United States Patent Application Publication US 2024/0327476 A1 - sequence listing, part 18

SEQ ID NO: 19976 - DNA, 637 bp, Homo sapiens
  source 1..637: mol_type = unassigned DNA
agaagcctctgctccaccgcggcgagaggcatgggcacgtggctgccgagggtggccgagctctgggaagaaaagcccgtgtgcctctgcatagcgtcgctacagcgctgactcggtgtggattgattggaaaggtttgagggagtacttgggaagcatggtggcacatgatgagactggaggtctcctacctattaaaaggaccatacgagtcctagatgtcaataaccagtccttcagagaacaagaggaactcacacatatatttggtgatctggactcttacatacctctgcatgaagatttgttgacaagaataggagaagcaaccaagcctgatggaacagtggagcagattggtcacattctcgtgagctggttaccgcgcttgaatgcctacagaggttactgtagtaaccagctggcagccaaagctcttcttgatcaaaagaaacaggatccaagagtccaagacttcctccagcgatgtctcgagtctcccttcagtcgaaaactagatctttggagtttcctagatatccctcgaagtcgcctagtcaaataccctttactgttaaaagaaattcttaaacacactccaaaagagcaccctgatgttcagcttctggaggatgct

SEQ ID NO: 19977 - DNA, 2016 bp, Homo sapiens
  source 1..2016: mol_type = unassigned DNA
gatttgttcagaaaataatatgttcccttcggagaggcagctccttcacattcttaacacctggccccaactgggacttcactttgaaaagaaaacgcagagagaaagatgatgatgttgtaagccttagcagccttgatctgaaggagccaagcaataaaagagttcgacctctggctcgtgtcacgtccttggcaaatttaatctctcctgtaagaaatggagctgtcagacgttttggtcaaacaatacagtcatttacccttcgtggtgaccacagatccccagcctctgcccagaagttttctagcaggtcaacagtcccaacacccgccaagagaaggagcagtgcactgtggtcagagatgctggacatcaccatgaaggagtctctcaccaccagggagatcagacggcaggaggaatgacctctgatgtttgctggatgtttttaggcaatatatgaaatgtcccgaggtgaacaggatttaattgaggatctcaaacttgcaagaaaggcctatcatgaccccatgttaaagttgtccatcatgtcagaagaggaactcacacatatatttggtgatctggactcttacatacctctgcatgaagatttgttgacaagaataggagaagcaaccaagcctgatggaacagtggagcagattggtcacattctcgtgagctggttaccgcgcttgaatgcctacagaggttactgtagtaaccagctggcagccaaagctcttcttgatcaaaagaaacaggatccaagagtccaagacttcctccagcgatgtctcgagtctcccttcagtcgaaaactagatctttggagtttcctagatatccctcgaagtcgcctagtcaaataccctttactgttaaaagaaattcttaaacacactccaaaagagcaccctgatgttcagcttctggaggatgctatattgataatacagggagtcctctctgatatcaacttgaagaaaggtgaatccgagtgccagtattacatcgacaagctggagtacctggatgaaaagcagagggaccccagaatcgaagcgagcaaagtgctgctgtgccatggggagctgcggagcaagagtggacataaactttacattttcctgtttcaagacatcttggttctgactcggcccgtcacacggaacgaacggcactcttaccaggtttaccggcagccaatcccagtccaagagctagtcctagaagacctgcaggatggagatgtgagaatgggaggctcctttcgaggagctttcagtaactcagagaaagctaaaaatatctttagaattcgcttccatgacccctctccagcccagtctcacactctgcaagccaatgacgtgttccacaagcagcagtggttcaactgtattcgagcggccattgcccccttccagtcggcaggcagtccacctgagctgcagggcctgccggagctgcacgaagagtgtgaggggaaccacccctctgcgaggaaactcacagcccagaggagggcatccacagtttccagtgttactcaggtagaagttgatgaaaacgcttacagatgtggctctggcatgcagatggcagaggacagcaagagcttaaagacacaccagacacagcccggcatccgaagagcgagggacaaagccctttctggtggcaaacggaaagagactttggtgtagagaaggctctgtgtgttaactgatgggagagactgtttgtttataaatgtgtacagttttgttttctcgtaaggggagcatcatagggttactttataccagttgtaacattttcattgtttttggttgttcttttttctttttttaatggcagctaaagatatacagattactgttaaattgcagtccttttttttttaaagatattttcttgaattatttagaacatggtaagcctggtattttttaatcaaacaaaatatttatgaaatgggttttctcttaattctggattcatcat

SEQ ID NO: 19978 - DNA, 3783 bp, Homo sapiens
  source 1..3783: mol_type = unassigned DNA
gccccgtcccggcctcgcgcacctgctcaggccatgatgagcttcggcggcgcggacgcgctgctgggcgccccgttcgcgccgctgcatggcggcggcagcctccactacgcgctagcccgaaagggtggcgcaggcgggacgcgctccgccgctggctcctccagcggcttccactcgtggacacggacgtccgtgagctccgtgtccgcctcgcccagccgcttccgtggcgcaggcgccgcctcaagcaccgactcgctggacacgctgagcaacgggccggagggctgcatggtggcggtggccacctcacgcagtgagaaggagcagctgcaggcgctgaacgaccgcttcgccgggtacatcgacaaggtgcggcagctggaggcgcacaaccgcagcctggagggcgaggctgcggcgctgcggcagcagcaggcgggccgctccgctatgggcgagctgtacgagcgcgaggtccgcgagatgcgcggcgcggtgctgcgcctgggcgcggcgcgcggtcagctacgcctggagcaggagcacctgctcgaggacatcgcgcacgtgcgccagcgcctagacgacgaggcccggcagcgagaggaggccgaggcggcggcccgcgcgctggcgcgcttcgcgcaggaggccgaggcggcgcgcgtggacctgcagaagaaggcgcaggcgctgcaggaggagtgcggctacctgcggcgccaccaccaggaagaggtgggcgagctgctcggccagatccagggctccggcgccgcgcaggcgcagatgcaggccgagacgcgcgacgccctgaagtgcgacgtgacgtcggcgctgcgcgagattcgcgcgcagcttgaaggccacgcggtgcagagcacgctgcagtccgaggagtggttccgagtgaggctggaccgactgtcggaggcagccaaggtgaacacagacgctatgcgctcagcgcaggaggagataactgagtaccggcgtcagctgcaggccaggaccacagagctggaggcactgaaaagcaccaaggactcactggagaggcagcgctctgagctggaggaccgtcatcaggccgacattgcctcctaccaggaagccattcagcagctggacgctgagctgaggaacaccaagtgggagatggccgcccagctgcgagaataccaggacctgctcaatgtcaagatggctctggatatagagatagccgcttacagaaaactcctggaaggtgaagagtgtcggattggctttggcccaattcctttctcgcttccagaaggactccccaaaattccctctgtgtccactcacataaaggtgaaaagcgaagagaagatcaaagtggtggagaagtctgagaaagaaactgtgattgtggaggaacagacagaggagacccaagtgactgaagaagtgactgaagaagaggagaaagaggccaaagaggaggagggcaaggaggaagaagggggtgaagaagaggaggcagaagggggagaagaagaaacaaagtctcccccagcagaagaggctgcatccccagagaaggaagccaagtcaccagtaaaggaagaggcaaagtcaccggctgaggccaagtccccagagaaggaggaagcaaaatccccagccgaagtcaagtcccctgagaaggccaagtctccagcaaaggaagaggcaaagtcaccgcctgaggccaagtccccagagaaggaggaagcaaaatctccagctgaggtcaagtcccccgagaaggccaagtccccagcaaaggaagaggcaaagtcaccggctgaggccaagtctccagagaaggccaagtccccagtgaaggaagaagcaaagtcaccggctgaggccaagtccccagtgaaggaagaagcaaaatctccagctgaggtcaagtccccggaaaaggccaagtctccaacgaaggaggaagcaaagtcccctgagaaggccaagtccccagagaaggaagaggccaagtcccctgagaaggccaagtccccagtgaaggcagaagcaaagtcccctgagaaggccaagtccccagtgaaggcagaagcaaagtcccctgagaaggccaagtccccagtgaaggaagaagcaaagtcccctgagaaggccaagtccccagtgaaggaagaagcaaagtcccctgagaaggccaagtccccagtgaaggaagaagcaaagacccccgagaaggccaagtccccagtgaaggaagaagctaagtccccagagaaggccaagtccccagagaaggccaagactcttgatgtgaagtctccagaagccaagactccagcgaaggaggaagcaaggtcccctgcagacaaattccctgaaaaggccaaaagccctgtcaaggaggaggtcaagtccccagagaaggcgaaatctcccctgaaggaggatgccaaggcccctgagaaggagatcccaaaaaaggaagaggtgaagtccccagtgaaggaggaggagaagccccaggaggtgaaagtcaaagagcccccaaagaaggcagaggaagagaaagcccctgccacaccaaaaacagaggagaagaaggacagcaagaaagaggaggcacccaagaaggaggctccaaagcccaaggtggaggagaagaaggaacctgctgtcgaaaagcccaaagaatccaaagttgaagccaagaaggaagaggctgaagataagaaaaaagtccccaccccagagaaggaggctcctgccaaggtggaggtgaaggaagacgctaaacccaaagaaaagacagaggtagccaagaaggaaccagatgatgccaaggccaaggaacccagcaaaccagcagagaagaaggaggcagcaccggagaaaaaagacaccaaggaggagaaggccaagaagcctgaggagaaacccaagacagaggccaaagccaaggaagatgacaagaccctctcaaaagagcctagcaagcctaaggcagaaaaggctgaaaaatcctccagcacagaccaaaaagacagcaagcctccagagaaggccacagaagacaaggccgccaaggggaagtaaggcagggagaaaggaacatccggaacagccaaagaaactcagaagagtcccggagctcaaggatcagagtaacacaattttcactttttctgtctttatgtaagaagaaactgcttagatgacggggcctccttcttcaaacaggaatttctgttagcaatatgttagcaagagagggcactcccaggcccctgcccccaggccctccccaggcgatggacaattatgatagcttatgtagctgaatgtgatacatgccgaatgccacacgtaaacacttgactataaaaactgcccccctcctttccaaataagtgcatttattgcctctatgtgcaactgacagatgaccgcaataatgaatgagcagttagaaatacattatgcttgagatgtcttaacctattcccaaatgccttctgttttccaaaggagtggtcaagcccttgcccagagctctctattctggaagagcggtccaggtggggccggggactggccactgaattatgccagggcgcactttccactggagttcactttcaattgcttctgtgcaataaaaccaagtgcttataaaatgaaaatgttgctgctgttattctctttccctgggaaggctgggggcagggcaggggaggtctggatgtgacaccccagactgcatgggactgagcaagcatcagt

SEQ ID NO: 19979 - DNA, 2987 bp, Homo sapiens
  source 1..2987: mol_type = unassigned DNA
aaaagggccggcgccctggtgctgccgcagtgcctcccgccccgtcccggcctcgcgcacctgctcaggccatgatgagcttcggcggcgcggacgcgctgctgggcgccccgttcgcgccgctgcatggcggcggcagcctccactacgcgctagcccgaaagggtggcgcaggcgggacgcgctccgccgctggctcctccagcggcttccactcgtggacacggacgtccgtgagctccgtgtccgcctcgcccagccgcttccgtggcgcaggcgccgcctcaagcaccgactcgctggacacgctgagcaacgggccggagggctgcatggtggcggtggccacctcacgcagtgagaaggagcagctgcaggcgctgaacgaccgcttcgccgggtacatcgacaaggtgcggcagctggaggcgcacaaccgcagcctggagggcgaggctgcggcgctgcggcagcagcaggcgggccgctccgctatgggcgagctgtacgagcgcgaggtccgcgagatgcgcggcgcggtgctgcgcctgggcgcggcgcgcggtcagctacgcctggagcaggagcacctgctcgaggacatcgcgcacgtgcgccagcgcctagacgacgaggcccggcagcgagaggaggccgaggcggcggcccgcgcgctggcgcgcttcgcgcaggaggccgaggcggcgcgcgtggacctgcagaagaaggcgcaggcgctgcaggaggagtgcggctacctgcggcgccaccaccaggaagaggtgggcgagctgctcggccagatccagggctccggcgccgcgcaggcgcagatgcaggccgagacgcgcgacgccctgaagtgcgacgtgacgtcggcgctgcgcgagattcgcgcgcagcttgaaggccacgcggtgcagagcacgctgcagtccgaggagtggttccgagtgaggctggaccgactgtcggaggcagccaaggtgaacacagacgctatgcgctcagcgcaggaggagataactgagtaccggcgtcagctgcaggccaggaccacagagctggaggcactgaaaagcaccaaggactcactggagaggcagcgctctgagctggaggaccgtcatcaggccgacattgcctcctaccaggaagccattcagcagctggacgctgagctgaggaacaccaagtgggagatggccgcccagctgcgagaataccaggacctgctcaatgtcaagatggctctggatatagagatagccgcttacagaaaactcctggaaggtgaagagtgtcggattggctttggcccaattcctttctcgcttccagaaggactccccaaaattccctctgtgtccactcacataaaggtgaaaagcgaagagaagatcaaagtggtggagaagtctgagaaagaaactgtgattgtggaggaacagacagaggagacccaagtgactgaagaagtgactgaagaagaggagaaagaggccaaagaggaggagggcaaggaggaagaagggggtgaagaagaggaggcagaagggggagaagaagaaacaaagtctcccccagcagaagaggctgcatccccagagaaggaagccaagtcaccagtaaaggaagaggcaaagtcaccggctgaggccaagtccccagagaaggaggaagcaaaatccccagccgaagtcaagtcccctgagaaggccaagtctccagcaaaggaagaggcaaagtcaccgcctgaggccaagtccccagagaaggaggaagcaaaatctccagctgaggtcaagtcccccgagaaggccaagtccccagcaaaggaagaggcaaagtcaccggctgaggccaagtctccagagaaggccaagtccccagtgaaggaagaagcaaagtcaccggctgaggccaagtccccagtgaaggaagaagcaaaatctccagctgaggtcaagtccccggaaaaggccaagtctccaacgaaggaggaagcaaagtcccctgagaaggccaagtccccagagaaggaagaggccaagtcccctgagaaggccaagtccccagtgaaggcagaagcaaagtcccctgagaaggccaagtccccagtgaaggcagaagcaaagtcccctgagaaggccaagtccccagtgaaggaagaagcaaagtcccctgagaaggccaagtccccagtgaaggaagaagcaaagtcccctgagaaggccaagtccccagtgaaggaagaagcaaagacccccgagaaggccaagtccccagtgaaggaagaagctaagtccccagagaaggcgaaatctcccctgaaggaggatgccaaggcccctgagaaggagatcccaaaaaaggaagaggtgaagtccccagtgaaggaggaggagaagccccaggaggtgaaagtcaaagagcccccaaagaaggcagaggaagagaaagcccctgccacaccaaaaacagaggagaagaaggacagcaagaaagaggaggcacccaagaaggaggctccaaagcccaaggtggaggagaagaaggaacctgctgtcgaaaagcccaaagaatccaaagttgaagccaagaaggaagaggctgaagataagaaaaaagtccccaccccagagaaggaggctcctgccaaggtggaggtgaaggaagacgctaaacccaaagaaaagacagaggtagccaagaaggaaccagatgatgccaaggccaaggaacccagcaaaccagcagagaagaaggaggcagcaccggagaaaaaagacaccaaggaggagaaggccaagaagcctgaggagaaacccaagacagaggccaaagccaaggaagatgacaagaccctctcaaaagagcctagcaagcctaaggcagaaaaggctgaaaaatcctccagcacagaccaaaaagacagcaagcctccagagaaggccacagaagacaaggccgccaaggggaagtaa

SEQ ID NO: 19980 - DNA, 4020 bp, Homo sapiens
  source 1..4020: mol_type = unassigned DNA
tttttttttgttttgttttgtcttctagacccagctcctcggcgctcatctccagctgctttaagacaaggggtgggggaaggggagggaggcaagaaaagatgagggtgggggaggggaaaagagggaatgcaaggggaaggagggaggagacggggagaaggaaagattggaagaaaaggatctccgaggaaggggctgagagaagggcagggtgaactggactaaaggccagagtaggaaggagaagaggggccaaaaaagaaggggatgaaattaagcacagaagatgggtaaagaaaaaagtatcagggaaagggcaaaataagagaaagccttgaggataagagggtagaaggctaaagaacaaggggaccactgggtcggggaagcgctgcctgaacggcgggacagtgacaaagaaagggcgctggcgatattcgcaccaagggtgcgaaacgcaatcgggaggtgagaaatggaaagaaggcgaatgcccggctacaagtagcctgggactgaaaggggacctgggggaggggctgggcccagggcagaaaagtccaggttcccatgcggcctgggcccacgtggagcgggcgctgaatcaccgttcagccgcccccctcccctcctccccgaccggtgcccgcagtccccgcctcctcggccgccgcctccacggggcggggccctggcccgggaccagcgccgcggctataaatgggctgcggcgaggccggcagaacgctgtgacagccacacgccccaaggcctccaagatgagctacacgttggactcgctgggcaacccgtccgcctaccggcgggtaaccgagacccgctcgagcttcagccgcgtcagcggctccccgtccagtggcttccgctcgcagtcgtggtcccgcggctcgcccagcaccgtgtcctcctcctataagcgcagcatgctcgccccgcgcctcgcttacagctcggccatgctcagctccgccgagagcagccttgacttcagccagtcctcgtccctgctcaacggcggctccggacccggcggcgactacaagctgtcccgctccaacgagaaggagcagctgcaggggctgaacgaccgctttgccggctacatagagaaggtgcactacctggagcagcagaataaggagattgaggcggagatccaggcgctgcggcagaagcaggcctcgcacgcccagctgggcgacgcgtacgaccaggagatccgcgagctgcgcgccaccctggagatggtgaaccacgagaaggctcaggtgcagctggactcggaccacctggaggaagacatccaccggctcaaggagcgctttgaggaggaggcgcggttgcgcgacgacactgaggcggccatccgcgcgctgcgcaaagacatcgaggaggcgtcgctggtcaaggtggagctggacaagaaggtgcagtcgctgcaggatgaggtggccttcctgcggagcaaccacgaggaggaggtggccgaccttctggcccagatccaggcatcgcacatcacggtggagcgcaaagactacctgaagacagacatctcgacggcgctgaaggaaatccgctcccagctcgaaagccactcagaccagaatatgcaccaggccgaagagtggttcaaatgccgctacgccaagctcaccgaggcggccgagcagaacaaggaggccatccgctccgccaaggaagagatcgccgagtaccggcgccagctgcagtccaagagcatcgagctagagtcggtgcgcggcaccaaggagtccctggagcggcagctcagcgacatcgaggagcgccacaaccacgacctcagcagctaccaggacaccatccagcagctggaaaatgagcttcggggcacaaagtgggaaatggctcgtcatttgcgcgaataccaggacctcctcaacgtcaagatggctctggatatagaaatcgctgcgtacagaaaactcctggagggtgaagagactagatttagcacatttgcaggaagcatcactgggccactgtatacacaccgacccccaatcacaatatccagtaagattcagaaacccaaggtggaagctcccaagcttaaggtccaacacaaatttgtcgaggagatcatagaggaaaccaaagtggaggatgagaagtcagaaatggaagaggccctgacagccattacagaggaattggccgtttccatgaaggaagagaagaaagaagcagcagaagaaaaggaagaggaacccgaagctgaagaagaagaagtagctgccaaaaagtctccagtgaaagcaactgcacctgaagttaaagaagaggaaggggaaaaggaggaagaagaaggccaggaagaagaggaggaagaagatgagggagctaagtcagaccaagccgaagagggaggatccgagaaggaaggctctagtgaaaaagaggaaggtgagcaggaagaaggagaaacagaagctgaagctgaaggagaggaagccgaagctaaagaggaaaagaaagtggaggaaaagagtgaggaagtggctaccaaggaggagctggtggcagatgccaaggtggaaaagccagaaaaagccaagtctcctgtgccaaaatcaccagtggaagagaaaggcaagtctcctgtgcccaagtcaccagtggaagagaaaggcaagtctcctgtgcccaagtcaccagtggaagagaaaggcaagtctcctgtgccgaaatcaccagtggaagagaaaggcaagtctcctgtgtcaaaatcaccagtggaagagaaagccaaatctcctgtgccaaaatcaccagtggaagaggcaaagtcaaaagcagaagtggggaaaggtgaacagaaagaggaagaagaaaaggaagtcaaggaagctcccaaggaagagaaggtagagaaaaaggaagagaaaccaaaggatgtgccagagaagaagaaagctgagtcccctgtaaaggaggaagctgtggcagaggtggtcaccatcaccaaatcggtaaaggtgcacttggagaaagagaccaaagaagaggggaagccactgcagcaggagaaagagaaggagaaagcgggaggagagggaggaagtgaggaggaagggagtgataaaggtgccaagggatccaggaaggaagacatagctgtcaatggggaggtagaaggaaaagaggaggtagagcaggagaccaaggaaaaaggcagtgggagggaagaggagaaaggcgttgtcaccaatggcctagacttgagcccagcagatgaaaagaaggggggtgataaaagtgaggagaaagtggtggtgaccaaaacggtagaaaaaatcaccagtgaggggggagatggtgctaccaaatacatcactaaatctgtaaccgtcactcaaaaggttgaagagcatgaagagacctttgaggagaaactagtgtctactaaaaaggtagaaaaagtcacttcacacgccatagtaaaggaagtcacccagagtgactaagatttgagtccattgcaaaaggttaagccatatgacaatttcaaaatgcatgtgattggcagcttcaaaacagaacgggttctcccatgggggctccagacattgtattttactttgtgcaatatgaggggactgcatgcaagctcagggtgctccctcctcagtctttgggggattcaaatgcatgatattgtatgtacctgggaaatttgccgatttcctaagctgttggaagggggtcacttaaggggggatgtcttgagatgtattatgcaaagtaccaactgagccaaaaacaataaacgaaacacagaactcagccttaagaaagctatatatgaataattatgtttacctcactggtgcatttaaaatggacttttgttcatgggagaacctcgttgacatgcacagtttgcaatcttatgttgatcgatgttaaacgtcacagcagtacttgctcaataaaggtcatattggaaacata

SEQ ID NO: 19981 - DNA, 2515 bp, Homo sapiens
  source 1..2515: mol_type = unassigned DNA
gtgcccaggcgccctctccgccgcgctccctggtggccgctcgctagagcacgcgcgccgcagacctagggtatttgcggatcagcgtcctcgcccatctcatcctccacactccgcccccacccacctgccccagctgctaagggtcttgacctttttcagaaacgtgcatcttttccagttctaattttgcacgcttgcacgtttaaagcaggagggatgaattcggtagtggataaatcagcaactttaggatagcttatgcagaaacgcgtgtattctctacttttccggcagtgatcggaagagctctcaaaattggcttcagcccaaagggctcagatgggaatggccaggacaccatccagcagctggaaaatgagcttcggggcacaaagtgggaaatggctcgtcatttgcgcgaataccaggacctcctcaacgtcaagatggctctggatatagaaatcgctgcgtacagaaaactcctggagggtgaagagactagatttagcacatttgcaggaagcatcactgggccactgtatacacaccgacccccaatcacaatatccagtaagattcagaaacccaaggtggaagctcccaagcttaaggtccaacacaaatttgtcgaggagatcatagaggaaaccaaagtggaggatgagaagtcagaaatggaagaggccctgacagccattacagaggaattggccgtttccatgaaggaagagaagaaagaagcagcagaagaaaaggaagaggaacccgaagctgaagaagaagaagtagctgccaaaaagtctccagtgaaagcaactgcacctgaagttaaagaagaggaaggggaaaaggaggaagaagaaggccaggaagaagaggaggaagaagatgagggagctaagtcagaccaagccgaagagggaggatccgagaaggaaggctctagtgaaaaagaggaaggtgagcaggaagaaggagaaacagaagctgaagctgaaggagaggaagccgaagctaaagaggaaaagaaagtggaggaaaagagtgaggaagtggctaccaaggaggagctggtggcagatgccaaggtggaaaagccagaaaaagccaagtctcctgtgccaaaatcaccagtggaagagaaaggcaagtctcctgtgcccaagtcaccagtggaagagaaaggcaagtctcctgtgcccaagtcaccagtggaagagaaaggcaagtctcctgtgccgaaatcaccagtggaagagaaaggcaagtctcctgtgtcaaaatcaccagtggaagagaaagccaaatctcctgtgccaaaatcaccagtggaagaggcaaagtcaaaagcagaagtggggaaaggtgaacagaaagaggaagaagaaaaggaagtcaaggaagctcccaaggaagagaaggtagagaaaaaggaagagaaaccaaaggatgtgccagagaagaagaaagctgagtcccctgtaaaggaggaagctgtggcagaggtggtcaccatcaccaaatcggtaaaggtgcacttggagaaagagaccaaagaagaggggaagccactgcagcaggagaaagagaaggagaaagcgggaggagagggaggaagtgaggaggaagggagtgataaaggtgccaagggatccaggaaggaagacatagctgtcaatggggaggtagaaggaaaagaggaggtagagcaggagaccaaggaaaaaggcagtgggagggaagaggagaaaggcgttgtcaccaatggcctagacttgagcccagcagatgaaaagaaggggggtgataaaagtgaggagaaagtggtggtgaccaaaacggtagaaaaaatcaccagtgaggggggagatggtgctaccaaatacatcactaaatctgtaaccgtcactcaaaaggttgaagagcatgaagagacctttgaggagaaactagtgtctactaaaaaggtagaaaaagtcacttcacacgccatagtaaaggaagtcacccagagtgactaagatttgagtccattgcaaaaggttaagccatatgacaatttcaaaatgcatgtgattggcagcttcaaaacagaacgggttctcccatgggggctccagacattgtattttactttgtgcaatatgaggggactgcatgcaagctcagggtgctccctcctcagtctttgggggattcaaatgcatgatattgtatgtacctgggaaatttgccgatttcctaagctgttggaagggggtcacttaaggggggatgtcttgagatgtattatgcaaagtaccaactgagccaaaaacaataaacgaaacacagaactcagccttaagaaagctatatatgaataattatgtttacctcactggtgcatttaaaatggacttttgttcatgggagaacctcgttgacatgcacagtttgcaatcttatgttgatcgatgttaaacgtcacagcagtacttgctcaataaaggtcatattggaaacatag

SEQ ID NO: 19982 - DNA, 3148 bp, Homo sapiens
  source 1..3148: mol_type = unassigned DNA
gtgacagccacacgccccaaggcctccaagatgagctacacgttggactcgctgggcaacccgtccgcctaccggcgggtaaccgagacccgctcgagcttcagccgcgtcagcggctccccgtccagtggcttccgctcgcagtcgtggtcccgcggctcgcccagcaccgtgtcctcctcctataagcgcagcatgctcgccccgcgcctcgcttacagctcggccatgctcagctccgccgagagcagccttgacttcagccagtcctcgtccctgctcaacggcggctccggacccggcggcgactacaagctgtcccgctccaacgagaaggagcagctgcaggggctgaacgaccgctttgccggctacatagagaaggtgcactacctggagcagcagaataaggagattgaggcggagatccaggcgctgcggcagaagcaggcctcgcacgcccagctgggcgacgcgtacgaccaggagatccgcgagctgcgcgccaccctggagatggtgaaccacgagaaggctcaggtgcagctggactcggaccacctggaggaagacatccaccggctcaaggagcgctttgaggaggaggcgcggttgcgcgacgacactgaggcggccatccgcgcgctgcgcaaagacatcgaggaggcgtcgctggtcaaggtggagctggacaagaaggtgcagtcgctgcaggatgaggtggccttcctgcggagcaaccacgaggaggaggtggccgaccttctggcccagatccaggcatcgcacatcacggtggagcgcaaagactacctgaagacagacatctcgacggcgctgaaggaaatccgctcccagctcgaaagccactcagaccagaatatgcaccaggccgaagagtggttcaaatgccgctacgccaagctcaccgaggcggccgagcagaacaaggaggccatccgctccgccaaggaagagatcgccgagtaccggcgccagctgcagtccaagagcatcgagctagagtcggtgcgcggcaccaaggagtccctggagcggcagctcagcgacatcgaggagcgccacaaccacgacctcagcagctaccaggacaccatccagcagctggaaaatgagcttcggggcacaaagtgggaaatggctcgtcatttgcgcgaataccaggacctcctcaacgtcaagatggctctggatatagaaatcgctgcgtacagaaaactcctggagggtgaagagactagatttagcacatttgcaggaagcatcactgggccactgtatacacaccgacccccaatcacaatatccagtaagattcagaaacccaaggtggaagctcccaagcttaaggtccaacacaaatttgtcgaggagatcatagaggaaaccaaagtggaggatgagaagtcagaaatggaagaggccctgacagccattacagaggaattggccgtttccatgaaggaagagaagaaagaagcagcagaagaaaaggaagaggaacccgaagctgaagaagaagaagtagctgccaaaaagtctccagtgaaagcaactgcacctgaagttaaagaagaggaaggggaaaaggaggaagaagaaggccaggaagaagaggaggaagaagatgagggagctaagtcagaccaagccgaagagggaggatccgagaaggaaggctctagtgaaaaagaggaaggtgagcaggaagaaggagaaacagaagctgaagctgaaggagaggaagccgaagctaaagaggaaaagaaagtggaggaaaagagtgaggaagtggctaccaaggaggagctggtggcagatgccaaggtggaaaagccagaaaaagccaagtctcctgtgccaaaatcaccagtggaagagaaaggcaagtctcctgtgtcaaaatcaccagtggaagagaaagccaaatctcctgtgccaaaatcaccagtggaagaggcaaagtcaaaagcagaagtggggaaaggtgaacagaaagaggaagaagaaaaggaagtcaaggaagctcccaaggaagagaaggtagagaaaaaggaagagaaaccaaaggatgtgccagagaagaagaaagctgagtcccctgtaaaggaggaagctgtggcagaggtggtcaccatcaccaaatcggtaaaggtgcacttggagaaagagaccaaagaagaggggaagccactgcagcaggagaaagagaaggagaaagcgggaggagagggaggaagtgaggaggaagggagtgataaaggtgccaagggatccaggaaggaagacatagctgtcaatggggaggtagaaggaaaagaggaggtagagcaggagaccaaggaaaaaggcagtgggagggaagaggagaaaggcgttgtcaccaatggcctagacttgagcccagcagatgaaaagaaggggggtgataaaagtgaggagaaagtggtggtgaccaaaacggtagaaaaaatcaccagtgaggggggagatggtgctaccaaatacatcactaaatctgtaaccgtcactcaaaaggttgaagagcatgaagagacctttgaggagaaactagtgtctactaaaaaggtagaaaaagtcacttcacacgccatagtaaaggaagtcacccagagtgactaagatttgagtccattgcaaaaggttaagccatatgacaatttcaaaatgcatgtgattggcagcttcaaaacagaacgggttctcccatgggggctccagacattgtattttactttgtgcaatatgaggggactgcatgcaagctcagggtgctccctcctcagtctttgggggattcaaatgcatgatattgtatgtacctgggaaatttgccgatttcctaagctgttggaagggggtcacttaaggggggatgtcttgagatgtattatgcaaagtaccaactgagccaaaaacaataaacgaaacacagaactcagccttaagaaagctatatatgaataattatgtttacctcactggtgcatttaaaatggacttttgttcatgggagaacctcgttgacatgcacagtttgcaatcttatgttgatcgatgttaaacgtcacagcagtacttgctcaataaaggtcatattggaaac

SEQ ID NO: 19983 - DNA, 2852 bp, Homo sapiens
  source 1..2852: mol_type = unassigned DNA
tgggccactttcttctggccacaaaggggccggaatggagcgctccgcggcatacaaatgggcaggtcacgtggttccaggctcttggctggaccgggaagaccatatggcgcatgccggggaggaaggaggaggggcgggggtaggggtggagggtgaggggagcggttgtcggaggagggcgggagacgagcaaggcgtggggagaagtggggaggaggggagaacggggagcgcacagcctggacgcgtgcgcaggcgtcaggcgcatagacctgctagcccctcagctagcggccccgcccgcgcttagcatcactaactgggctatataacctgagcgcccgcgcggccacgacacgaggaattcgcccacgcaggaggcgcggcgtccggaggccccagggttatgagactatcactgctcaggacctactaacaacaaaggaaatcgaaacatgaccaaatcgtacagcgagagtgggctgatgggcgagcctcagccccaaggtcctccaagctggacagacgagtgtctcagttctcaggacgaggagcacgaggcagacaagaaggaggacgacctcgaaaccatgaacgcagaggaggactcactgaggaacgggggagaggaggaggacgaagatgaggacctggaagaggaggaagaagaggaagaggaggatgacgatcaaaagcccaagagacgcggccccaaaaagaagaagatgactaaggctcgcctggagcgttttaaattgagacgcatgaaggctaacgcccgggagcggaaccgcatgcacggactgaacgcggcgctagacaacctgcgcaaggtggtgccttgctattctaagacgcagaagctgtccaaaatcgagactctgcgcttggccaagaactacatctgggctctgtcggagatcctgcgctcaggcaaaagcccagacctggtctccttcgttcagacgctttgcaagggcttatcccaacccaccaccaacctggttgcgggctgcctgcaactcaatcctcggacttttctgcctgagcagaaccaggacatgcccccccacctgccgacggccagcgcttccttccctgtacacccctactcctaccagtcgcctgggctgcccagtccgccttacggtaccatggacagctcccatgtcttccacgttaagcctccgccgcacgcctacagcgcagcgctggagcccttctttgaaagccctctgactgattgcaccagcccttcctttgatggacccctcagcccgccgctcagcatcaatggcaacttctctttcaaacacgaaccgtccgccgagtttgagaaaaattatgcctttaccatgcactatcctgcagcgacactggcaggggcccaaagccacggatcaatcttctcaggcaccgctgcccctcgctgcgagatccccatagacaatattatgtccttcgatagccattcacatcatgagcgagtcatgagtgcccagctcaatgccatatttcatgattagaggcacgccagtttcaccatttccgggaaacgaacccactgtgcttacagtgactgtcgtgtttacaaaaggcagccctttgggtactactgctgcaaagtgcaaatactccaagcttcaagtgatatatgtatttattgtcattactgcctttggaagaaacaggggatcaaagttcctgttcaccttatgtattattttctatagctcttctatttaaaaaataaaaaaatacagtaaagtttaaaaaatacaccacgaatttggtgtggctgtattcagatcgtattaattatctgatcgggataacaaaatcacaagcaataattaggatctatgcaatttttaaactagtaatgggccaattaaaatatatataaatatatatttttcaaccagcattttactacttgttacctttcccatgctgaattattttgttgtgattttgtacagaatttttaatgactttttataatgtggatttcctattttaaaaccatgcagcttcatcaatttttatacatatcagaaaagtagaattatatctaatttatacaaaataatttaactaatttaaaccagcagaaaagtgcttagaaagttattgtgttgccttagcacttctttcctctccaattgtaaaaaaaaaaaaaaaaaaaaaaaaaaaaaaaaaattgcacaatttgagcaattcatttcactttaaagtctttccgtctccctaaaataaaaaccagaatcataattttcaagagaagaaaaaattaagagatacattccctatcaaaacatatcaattcaacacattacttgcacaagcttgtatatacatattataaataaatgccaacatacccttctttaaatcaaaagctgcttgactatcacatacaatttgcactgttactttttagtcttttactcctttgcattccatgattttacagagaatctgaagctattgatgtttccagaaaatataaatgcatgattttatacatagtcacaaaaatggtggtttgtcatatattcatgtaataaatctgagcctaaatctaatcaggttgttaatgttgggatttatatctatagtagtcaattagtacagtagcttaaataaattcaaaccatttaattcataattagaacaatagctattgcatgtaaaatgcagtccagaataagtgctgtttgagatgtgatgctggtaccactggaatcgatctgtactgtaattttgtttgtaatcctgtatattatggtgtaatgcacaatttagaaaacattcatccagttgcaataaaatagtattgaaagtga

SEQ ID NO: 19984 - DNA, 3053 bp, Homo sapiens
  source 1..3053: mol_type = unassigned DNA
tagaggctggtaccccgcctggtagagatgccacactcgctccgcggttcgcatggcgctctgaagacgccggcgcccgccgccttgaggagccgctgcccccgctccctgaagatgggggaacaatgaaataagcgagaagatccctcttctcccccctctctctcttgccccctccccccctcccctcccctctccccttgactcctctccgaggcaccatgctgacccgcctgttcagcgagcccggccttctctcggacgtgcccaagttcgccagctggggcgacggcgaagacgacgagccgaggagcgacaagggcgacgcgccgccaccgccaccgcctgcgcccgggccaggggctccggggccagcccgggcggccaagccagtccctctccgtggagaagaggggacggaggccacgttggccgaggtcaaggaggaaggcgagctggggggagaggaggaggaggaagaggaggaggaagaaggactggacgaggcggagggcgagcggcccaagaagcgcgggcccaagaagcgcaagatgaccaaggcgcgcttggagcgctccaagcttcggcggcagaaggcgaacgcgcgggagcgcaaccgcatgcacgacctgaacgcagccctggacaacctgcgcaaggtggtgccctgctactccaagacgcagaagctgtccaagatcgagacgctgcgcctagccaagaactatatctgggcgctctcggagatcctgcgctccggcaagcggccagacctagtgtcctacgtgcagactctgtgcaagggtctgtcgcagcccaccaccaatctggtggccggctgtctgcagctcaactctcgcaacttcctcacggagcaaggcgccgacggtgccggccgcttccacggctcgggcggcccgttcgccatgcacccctacccgtacccgtgctcgcgcctggcgggcgcacagtgccaggcggccggcggcctgggcggcggcgcggcgcacgccctgcggacccacggctactgcgccgcctacgagacgctgtatgcggcggcaggcggtggcggcgcgagcccggactacaacagctccgagtacgagggcccgctcagccccccgctctgtctcaatggcaacttctcactcaagcaggactcctcgcccgaccacgagaaaagctaccactactctatgcactactcggcgctgcccggttcgcggcccacgggccacgggctagtcttcggctcgtcggctgtgcgcgggggcgtccactcggagaatctcttgtcttacgatatgcaccttcaccacgaccggggccccatgtacgaggagctcaatgcgttttttcataactgagacttcgcgccggctcccttctttttcttttgcctttgcccgcccccctgtccccagcccccagagcgcagggacacccccatcctaccccggcgccgggcgcggggagcgggccaccggtcctgccgctctcctggggcagcgcagtcctgttacctgtgggtggcctgtcccaggggcctcgcttcccccaggggactcgccttctctctccccaaggggttccctcctcctctctcccaaggagtgcttctccagggacctctctccgggggctccctggaggcacccctcccccattcccaatatcttcgctgaggtttcctcctccccctcctccctgcaggcccaaggcgttggtaagggggcagctgagcaatggaacgcgtttccccctctcattattattttaaaaacagacacccagctgccgaggcaaaaaggagccaggcgctccctctttcttgaagagggtagaagttagggcgccggagcccgggcctggaacgccctcacccccaacctccagtctccgcgttttgcgattttaattttggcgggaggggaagtggattgagaggaaagagagaggccaagacaatttgtaactagaatccgtttttcccttttcctttttttaaacaaacaaacatacaaaaaaaaaaaaaaaaaaaaaaaaaaaaaaaaaaaaaaaagctaagaggcgacggaagccgaacgcagagtccggatcggagagaaaacgcagtaaggacttttagaagcaataaaaggcaaaaaaaacaaaaaacaaaaaaacaaacaaaaaaaaaccactactaccaataatcaaagacacaaatatctatgcaaggaggctccactgagcctcgcggcccggcccggccccgggatgccccgcccggcctgcgggccgccccgcccgagcgcggatctgtgcactttggtgaagtgggggcccgcgccgccccctccccctccccaggttcttacaatcagtgactcggagatttggggccccagtgccactgccctcccccgccccgtccccgttgtgcgtcatgctgttttttaaaaacctgtttccaaatttgtatggaatggcaaactgttggggggtcggtttggggagggagggtttgcatgaaagacacacgcacaccacaccgcacgcacaagcaggcccggcgccggcgtccggggggcagaaggaggtgagctcgccggctcctcctccccgcggccattctgtcccctcctggggtgaggggtggggatggagacctgggggcagccccacccctgcccggactgtgcctcggtgggtgccacctggcgatttccggtgtctggagagagtattttttggtccaaggagtcctcttggctttagctggtgggtgggcggggagaggtctgagggctcctactggaggttcccccaaaaaggggcaaaaggagaccctctgcccaccggaggcaggggatcaggcatccaaatacacgatgcaaaaatgcaatcccacaggcgacacacccacacactcacccacacacacgcaattttaccttcctcttgtagcgaagatgaaactcccgtcggacacccgaagtgcattgcgtgtttctgttcagtttaatgacgattaataaatatttatgtaaatgagatgcaaagccgga

SEQ ID NO: 19985 - DNA, 3953 bp, Homo sapiens
  source 1..3953: mol_type = unassigned DNA
aaaactgcagcaagtcagaggctccggccagagagcaggagctgcccagaggcttgtggtcctgaaagctcctctccggggagctaaccagggagaggaggtactgaagagcgactaaactggctgcagcggagagatcagcccgaaggcgtccttgaggagcatacggaactccaaggaaggagtagaataaggagcaggcagagaaaccagacccggtggaatctctaagaggtaacaaccgggtttgacatggatcgctgaaagcgtctcttctaccatctggatggtcagggagacttggcttctctgactgtcctctaagacgcagattcacagagttcactccaggaacggccagtgaccgagagtctggaaatgtcaaaaacttttgtaaaatccaaggagatgggagagctagtcaacacaccatcctggatggataaaggtctgggctcccaaaatgaggtgaaggaggaagagagcagaccaggtacttatgggatgctcagcagcttaactgaagagcatgacagtattgaggaagaagaagaagaggaagaagatggggagaaacctaagagaaggggtcccaagaaaaagaagatgaccaaagctcgccttgagagattcagggctcgaagagtcaaggctaatgccagagaacggacccggatgcatggcctgaatgacgccctggataacctgaggcgagtcatgccatgctactctaaaacccaaaaactttccaagatagagactcttagactggccaggaactatatttgggctttatctgaagtcctggagactggccagacacctgaagggaaaggctttgtggagatgctgtgtaaagggctctctcagcccacaagcaacctggtggctggatgtctccaactgggccctcagtctgtcctcctggagaagcacgaggataaatctcctatttgtgactctgccatctctgtccacaacttcaactatcagtctccggggcttcctagccctccttatggtcatatggaaacacatctccttcatctcaagccccaagtattcaagagtttgggagaatcgtcctttgggagccatctgcctgactgcagtacacccccttatgagggcccactcactccacccctgagcatcagtgggaacttctccttgaagcaagatgggtctcctgacctagaaaaatcctacagcttcatgccacattacccttcttcaagtctaagctcagggcatgtgcattcaactccttttcaggctggtaccccccgttatgatgttcctatagacatgtcctatgattcctacccccatcatggtattgggacccaactcaatacagtcttcactgagtgaggcagttaagttcaatgtttcagagaatgacgtggagacattttccataattcaagtggttgagctaaagattcaatgaccttaaaggatccctatggatatatatcaaacaatagttcaagtccatttaggctttccttcacctatcacctcttttctcatcaccttctcacattgcattgatttctttatagagtcctcaagtgaaaatatttgatgatttaacaaccatgtgaaaatagaacagaagacctgggccctattccagtggtgccaaaaactcattgcataatctgtgccaattaattttccatttctggcctttgtttatttactagcaattgtaaataaacaaattgtatttatatgaggcaactattctaagtccagatgatttctaaagtccttcacagttctgaaatgctataactgtggtgatcactcttgacaatttcttgaaactgaaagaatagagaaataataggaaagggatgctatgcatagaatgatcaaattgaattatcagagggatcacaaggtacatgtctcttggctcacagaatgcaaagcttgtttggatttaatgataggacctctttgtatctattgaaaaatagcttctggaagctaaaagtctaacatggctgtcactgtgaagaacaaaacatgttcgttaagagactaactctatttgttattagactaaaagttgaacatatcttccttatgatttgaagaaccataatagagaaccataatagaggcctcatgccaactttattcttgataatatttcaaaaccatttttctcagtactagaggtagggcaaacaagtcactgaagcctcagactcctataactaatgggacatagagaagtcttttagaccatgacctccataaccagagggctctggaacttctgatgaagctcaggtgctgctgttagaatcagcacacaacacaggtttatattaaagagcaataaaatagctattggctataataactactatagttcagggactctctccagctcacagttgcccatgggaaaaaccaatggatttttttttaagcaagatgaatttcatttggttaaacgtgattaaaaccatccacctctgtccacaccaatatattttccagaagcacaagcaccaatcaatttattgatcaaggttaaatttttccaacatatatgtagttccttatctctccccctacactaattgttacctcttcctcacttctaagatagaatatgttattatatattgtaaataacatttcaggtgaccaaacttaaggatgcagaaatgaaatccaaggttggtgaatatttttaccaactatgtcttcatcacaggtttaacccaatttgcagagtgtttatttttctttatgtaactcctttttcctttatatcaatgctaacttcatcaaatttgtattttttttcagaaaatgggacctgagaaattttcctatcttgttcaatcagccaggacagttatttaagtcaaaccagagcctgaatggcttatttgatagtagattaggtcctgctcctgccagaaaggataagtttaacatgcagggtacatcaatagggccaatttaaaaaatgataacacatattagtatgtcattttctatagctcagctatcccctaaaatctgccaactatatgtgtatcttgtctgtttacctctcttatttattatctccatacagtataagttattttttttccattttgctctcagcacttaccctgctgtattttgcacccttggtttgtaaattcacttgaaagtagccttgcagagagatcttaagccccatcagtcaccaaagtggttcccttcatcacaatctgccctagaggaaataggcaagtaaaatgatatataaagccatactatgtgctttctgagtatatactgcacttacctttgtgagcggctgtaggagggtctatcctcgaagctagcattttctggcatttaagtttgtagataatcactgttgtttgagttatttattagatattatttatttaatttatttctctcttcctttcacgaaaattcctttagccccatagatgtgcttgcaaacccttcctaaaattttatttggaaagtagctcataattttgctaagaactgctgagttttggagtgaggggaaaggaaaaaatagagaattacctctgtgataatttttataaaaagcagcaataattcgaatggctatgcaagttaatgtttttagagtcttttcttcagtctaaaatgagccagagttattctttaataatctgctgtttatgcctttggggagtatggtacccatgagccaagcctccctgaaattgtacagagggattttataattgaattaaaatttaggaatgcaatagcttgtaaagagcctgctctccaacatagggtggtctcattcttctggagacttttttagataaagtaaaataattgtttaaatattttgtttaaaatatgactgtttttcctccctttttcctagcagaaataaagctgtaagtcttatt

SEQ ID NO: 19986 - DNA, 2131 bp, Homo sapiens
  source 1..2131: mol_type = unassigned DNA
agtctaaccttctgtgttgatgcatgaaggctggtacccacttacagggatgccagatgatcagtgcagaatgaaggtcccaagagagaggatcacatggctctctctgccctgtgacgtcactagcagatggcatgggtaccagctctggcagttggcatcaatgtcactttttagagatcaatgagatagtgcagatatacacagatctagagactccaggagacgatgcgacactcagcctgaaaagatttggaagacccaaaatgaaaactgattattgaatgaaattaaaacctaaggtaatttaagattagagaaccatgttaacactaccgtttgatgagtctgttgtaatgccagaatcccagatgtgcagaaagttttctagagaatgcgaggaccagaagcaaattaagaagccagaaagcttttccaaacagattgtccttcgaggaaagagcatcaaaagggcccctggagaagaaaccgagaaagaagaagaggaggaagacagggaagaggaagatgaaaatgggttgcctagaaggaggggtcttaggaaaaaaaagacaacaaagctgcgattggaaagggtcaagttcaggagacaggaagcgaacgcgcgcgagaggaacaggatgcacggcctcaacgacgctctggacaacttaagaaaagtggtcccctgttattctaaaacccagaaactgtccaaaatagagactttacgactggccaaaaactacatctgggcactttctgaaattctgagaatcggcaagagaccagatctgctcacattcgtccaaaacttatgcaaaggtctttcccagccaactacaaacttggtggcaggctgcttgcagctcaacgccaggagtttcctgatgggtcagggtggggaggctgcacaccacacaaggtcaccctactctaccttctacccaccctaccacagccctgagctcaccactcccccagggcatgggactcttgataattccaagtccatgaaaccctacaattattgcagtgcgtatgaatccttctatgaaagtacttcccctgagtgtgccagccctcagtttgaaggtcccttaagtcctcccccaattaactataatgggatattttccctgaagcaagaagaaaccttggactatggtaaaaattacaattacggcatgcattactgtgcagtgccacccaggggtccccttgggcagggtgccatgttcaggttgcccaccgacagccacttcccttacgacttacatctgcgcagccaatctctcacaatgcaagatgaattaaatgcagtttttcataattaatgaggaaaatgaaaataaacagtggtcattcacctcccctgtctaattaagacaaagcagatgcttgtgggctgagtaattggcacaactctatctaaggtgtttactagtttctgaagtgtgtttcaactattgtgagaattttctatgtaataataaatctcttttcgtatgagaacttcttttcctttccttttgtctgtgaagcactgtgattctgtttctactggaaagatttttttctttttaattttcttttaaacttatttaatttgtttgaacaaggtgtctaagaatatactgttgaataaagacatgcacacagcataattcaatgtctattttggttgtacagtaattataaaatgcatgttattaaaaccagatgagtaaaatgatgtgtttataattattaggaattatatattatgtatcttttaaaaattgaaattttaaaatatggagaatatcactaagctgacaatgatattgggagatgaatttgcaacaatataaaaagctatgcaattttctttttattaaggatgaatctaaatgcattcaattggtaactattcctcttcaagtatttgcagatggggcaacatgatatttgggtagctgatgtcataattcggggacaattatctcaatcatcaagaaaaaaatttcagcacttgttttgtattattcagaaattaactgtacaggtttgttatcacaatgtataattgtgtttttccaccccacatttttaaggcaattaaatatagatatttccactcgtaaaggac

SEQ ID NO: 19987 - DNA, 1649 bp, Homo sapiens
  source 1..1649: mol_type = unassigned DNA
cacacgagctgatctgatcgccggcgacatcactcaggagaccggccgggcgcgtggcccctgcaggcgaggcgaggaggccaggccaagttctccgtgcgcccctgcacccttccaggctctcgcacccgcaactggcacagagtaacaaccccaggctgttgggaacgtaagtgcgccctggcggctctgccctcagtccgggctgcagcgctctgagcgcctttctatctgtccgtcggtcctgcacagcgcaacgatgccagcccgccttgagacctgcatctccgacctcgactgcgccagcagcagcggcagtgacctatccggcttcctcaccgacgaggaagactgtgccagactccaacaggcagcctccgcttcggggccgcccgcgccggcccgcaggggcgcgcccaatatctcccgggcgtctgaggttccaggggcacaggacgacgagcaggagaggcggcggcgccgcggccggacgcgggtccgctccgaggcgctgctgcactcgctgcgcaggagccggcgcgtcaaggccaacgatcgcgagcgcaaccgcatgcacaacttgaacgcggccctggacgcactgcgcagcgtgctgccctcgttccccgacgacaccaagctcaccaaaatcgagacgctgcgcttcgcctacaactacatctgggctctggccgagacactgcgcctggcggatcaagggctgcccggaggcggtgcccgggagcgcctcctgccgccgcagtgcgtcccctgcctgcccggtcccccaagccccgccagcgacgcggagtcctggggctcaggtgccgccgccgcctccccgctctctgaccccagtagcccagccgcctccgaagacttcacctaccgccccggcgaccctgttttctccttcccaagcctgcccaaagacttgctccacacaacgccctgtttcattccttaccactaggccctttgtagacactgttactttccccctcccctagtcagcaggcaatagatggggccccagctgccgcctcgggaccccctctccaggcggagggaggaagcgggagctttaaagcagtcggggatacctgagccgcttgttaggtcgccgcaccctcgcggcggatgtctcttggtctgtttctccggccctcagcccagcgcccctcctgcccgcccctagacggcctttccttttgcactttctgaactccacaaaacctcctttgtgactggctcagaactgaccccagccaccacttcagtgtgatttagaaaagggacagatcagcccctgaagacgaggtgaaaagtcaattttacaatttgtagaactctaatgaagaaaaacgagcatgaaaattcggtttgagccggctgacaatacaatgaaaaggcttaaaaagcagagacaaggagtgggcttcatgcattatggatcccgacccccaccactgcagactcgctctaggaagaactggagactcttgcttagctattcaggcacagggctggagagtactttaatttattcaagatgcttcattcatatgaaaatgtatttttgtacataaagagtttattctattatgagctatcaaagtttacatttttgtactgcagacgcttcatgt

SEQ ID NO: 19988 - DNA, 1376 bp, Homo sapiens
  source 1..1376: mol_type = unassigned DNA
gctctctattcttttgcgccggtagaaaggatgacgcctcaaccctcgggtgcgcccactgtccaagtgacccgtgagacggagcggtccttccccagagcctcggaagacgaagtgacctgccccacgtccgccccgcccagccccactcgcacacgggggaactgcgcagaggcggaagagggaggctgccgaggggccccgaggaagctccgggcacggcgcgggggacgcagccggcctaagagcgagttggcactgagcaagcagcgacggagtcggcgaaagaaggccaacgaccgcgagcgcaatcgaatgcacaacctcaactcggcactggacgccctgcgcggtgtcctgcccaccttcccagacgacgcgaagctcaccaagatcgagacgctgcgcttcgcccacaactacatctgggcgctgactcaaacgctgcgcatagcggaccacagcttgtacgcgctggagccgccggcgccgcactgcggggagctgggcagcccaggcggttcccccggggactgggggtccctctactccccagtctcccaggctggcagcctgagtcccgccgcgtcgctggaggagcgacccgggctgctgggggccaccttttccgcctgcttgagcccaggcagtctggctttctcagattttctgtgaaaggacctgtctgtcgctgggctgtgggtgctaagggtaagggagagggagggagccgggagccgtagagggtggccgacggcggcggccctcaaaagcacttgttccttctgcttctccctggctgacccctggccggcccaggcctccacgggggcggcaggctgggttcattccccggccctccgagccgcgccaacgcacgcaacccttgctgctgcccgcgcgaagtgggcattgcaaagtgcgctcattttaggcctcctctctgccaccaccccataatctcattcaaagaatactagaatggtagcactacccggccggagccgcccaccgtcttgggtcgccctaccctcactcaagtctgtctgcctctcagtctcttaccacccctcctccaatgtgattcaatccaatgtttggtctctcagcgcttactccccttgccttgctccaaagacgctgccgatctgctctactcccaatcaggtccgggatttcagggcgcctcactctgccttaaagccacgaaggcgaccctctgccttctcctcgtgcacttttcggagccattgccctcccggggcggaagaccaggctgtgaactgggaaagcgctagcccggccagggagcatctccccagcctccctgcgaactgcgcctgaaacgtgagctgcgctgcaggtgcctggagcac

SEQ ID NO: 19989 - DNA, 1884 bp, Homo sapiens
  source 1..1884: mol_type = unassigned DNA
ttcccaggccaccatagcggctggcggagggagcgcgcgccttgctggcctggagggggcgggggccgtggcggctttaaagcgcccagcccaggcgtcgcggggtggggcggctctggcggctgcggggcgcagggcgcagcggccaagcggggtccccggaagcacagctggggtgtctccacctacgactggccgcgcgccttttctctcccgcgccagggaaggagcggctgcggcccccgccgggcggaggcacggggggcgtacgaggggcggaggggaccgcgtcgcggaggagatggcgcggcacgtgcggtgacggcacccgagccctgagggtcccagccccgcgctccgcgtccccgggacagcatggagcgcccggagcccgagctgatccggcagagctggcgggcagtgagccgcagcccgctggagcacggcaccgtcctgtttgccaggctgtttgccctggagcctgacctgctgcccctcttccagtacaactgccgccagttctccagcccagaggactgtctctcctcgcctgagttcctggaccacatcaggaaggtgatgctcgtgattgatgctgcagtgaccaatgtggaagacctgtcctcactggaggagtaccttgccagcctgggcaggaagcaccgggcagtgggtgtgaagctcagctccttctcgacagtgggtgagtctctgctctacatgctggagaagtgtctgggccctgccttcacaccagccacacgggctgcctggagccaactctacggggccgtagtgcaggccatgagtcgaggctgggatggcgagtaagaggcgaccccgcccggcagcccccatccatctgtgtctgtctgttggcctgtatctgttgtagcccaggctccccaagcttccctgcatcttggtccttgtccccttggccacactggagaggtgatggggcagggctgggtctcagtatcctagagtccagctgcagaaggagtggcttttcctccaggaaggggcttctgggtgtcccctcatccccagtagcctctttcttgcgtttctttttaccttttttggcactccctctgaccccgcgatgagtgttttggtggcagaggtgggatgagctggaaaggtatggaggtgggagaggatggggctcttctgtctgtcctgcttcttcaggtgagtgcaggccaaggcgggggtgagatggctgagcttccagcgccttctgtcctgcctgcccagtcccttcactgctttcctgccccaagatggcttgcttttcacaaataaagagaaagagcagctttagccttcttggtggaatcccaggcagtgggagcagaatcagaactgccagggaagggaagggggacctgggtctcaatgggtctcatttgagtctcgcgggctgtgcagatgccctgacagagtcggtttcctttggcggcattccctttccctcattcagcacttctgctgggaactccctgactattccgctgctgcaggaacccagctagctggccaggtggggaggggctggggaccggccaggaaggaggggtgacttcatcccagagagacccgagttcccccagcccttcatcaccaacccgctcctgcaggagtgagtcttacctcccctggccctcctttctggctcagcctgcagcgactgtgaggccacagctcctcagattcactgcccgctgtgtgccagtactcaggcagctggagagaagagaaggcagcagcagaggcccccgccctcaccccagccatctgcacttgtaccatttgctctgtgctgactgtggtcctataaattcatgagaaataaactggttctgtgtgcctctctga

SEQ ID NO: 19990 - DNA, 1218 bp, Homo sapiens
  source 1..1218: mol_type = unassigned DNA
gagcgcgggagaccggacccgagagcagagctgctgtttcggcgcgggtcggctggcggccgactgccccagagcccccacccggcaccacacagaccccacccccgccctgcgccagccttcgtccccgcagaggaccccccgacaccagcatggactgctgcaccgagaacgcctgctccaagccggacgacgacattctagacatcccgctggacgatcccggcgccaacgcggccgccgccaaaatccaggcgagttttcggggccacatggcgcggaagaagataaagagcggagagcgcggccggaagggcccgggccctggggggcctggcggagctggggtggcccggggaggcgcgggcggcggccccagcggagactaggccagaagaactgagcattttcaaagttcccgaggagagatggatgccgcgtccccttcgcagcgacgagacttccctgccgtgtttgtgaccccctcctgcccagcaacctgccagctacaggagccccctgcgtcccagagactccctcacccaggcaggctccgtcgcggagtcgctgagtccgtgcccttttagttagttctgcagtctagtatggtccccatttgcccttccactccaccccaccctaaaccatgcgctcccaatcttccttcttttgcttctcgcccacctcttcccgcacccagcatgcagctctgcctccgcagcctcagtgcgctttcctgcgcgcactgcggagggcgccctaagcgtcacccaagcacactcacttaaagaaaaaacgagttctttcgttctgtgcgcagctaaaaggggcgccctacatctccgtgccactcccgccccagcctagccccaagactttggatccggggcgagatgaagggaagagggttgttttggtttcggacgacccttgctctgaccggaagagaagtccctatcccacacctgcctgtcacgttccctcccctttccccagcgcactgttgagggcagcctctccagctctcttgtttatgcaaacgccgagcgcctgggaggctcggtaggaggagtcttccacggccccgccccgcccctgtcggtcccgccctcccccccgccgggctcctggggctgtggccgaaaggtttctgatctccgtgtgtgcatgtgactgtgctgggttggaatgtgaacaataaagaggaatgtccaagtg

SEQ ID NO: 19991 - DNA, 1215 bp, Homo sapiens
  source 1..1215: mol_type = unassigned DNA
gagcgcgggagaccggacccgagagcagagctgctgtttcggcgcgggtcggctggcggccgactgccccagagcccccacccggcaccacacagaccccacccccgccctgcgccagccttcgtccccgcagaggaccccccgacaccagcatggactgctgcaccgagaacgcctgctccaagccggacgacgacattctagacatcccgctggacgatcccggcgccaacgcggccgccgccaaaatccaggcgagttttcggggccacatggcgcggaagaagataaagagcggagagcgcggccggaagggcccgggccctggggggcctggcggagctggggtggcccggggaggcgcgggcggcggccccagcggagactaggccagaactgagcattttcaaagttcccgaggagagatggatgccgcgtccccttcgcagcgacgagacttccctgccgtgtttgtgaccccctcctgcccagcaacctgccagctacaggagccccctgcgtcccagagactccctcacccaggcaggctccgtcgcggagtcgctgagtccgtgcccttttagttagttctgcagtctagtatggtccccatttgcccttccactccaccccaccctaaaccatgcgctcccaatcttccttcttttgcttctcgcccacctcttcccgcacccagcatgcagctctgcctccgcagcctcagtgcgctttcctgcgcgcactgcggagggcgccctaagcgtcacccaagcacactcacttaaagaaaaaacgagttctttcgttctgtgcgcagctaaaaggggcgccctacatctccgtgccactcccgccccagcctagccccaagactttggatccggggcgagatgaagggaagagggttgttttggtttcggacgacccttgctctgaccggaagagaagtccctatcccacacctgcctgtcacgttccctcccctttccccagcgcactgttgagggcagcctctccagctctcttgtttatgcaaacgccgagcgcctgggaggctcggtaggaggagtcttccacggccccgccccgcccctgtcggtcccgccctcccccccgccgggctcctggggctgtggccgaaaggtttctgatctccgtgtgtgcatgtgactgtgctgggttggaatgtgaacaataaagaggaatgtccaagtg

SEQ ID NO: 19992 - DNA, 1969 bp, Homo sapiens
  source 1..1969: mol_type = unassigned DNA
ccggacccgagagcagagctgctgtttcggcgcgggtcggctggcggccgactgccccagagcccccacccggcaccacacagaccccacccccgccctgcgccagccttcgtccccgcagaggaccccccgacaccagcatggactgctgcaccgagaacgcctgctccaagccggacgacgacattctagacatcccgctggacgatcccggcgccaacgcggccgccgccaaaatccaggcgagttttcggggccacatggcgcggaagaagataaagagcggagagcgcggccggaagggcccgggccctggggggcctggcggagctggggtggcccggggaggcgcgggcggcggccccagcggagactaggccagaccttttctctcctcagttcccgaggagagatggatgccgcgtccccttcgcagcgacgagacttccctgccgtgtttgtgaccccctcctgcccagcaacctgccagctacaggagccccctgcgtcccagagactccctcacccaggcaggctccgtcgcggagtcgctgagtccgtgcccttttagttagttctgcagtctagtatggtccccatttgcccttccactccaccccaccctaaaccatgcgctcccaatcttccttcttttgcttctcgcccacctcttcccgcacccagcatgcagctctgcctccgcagcctcagtgcgctttcctgcgcgcactgcggagggcgccctaagcgtcacccaagcacactcacttaaagaaaaaacgagttctttcgttctgtgcgcagctaaaaggggcgccctacatctccgtgccactcccgccccagcctagccccaagactttggatccggggcgagatgaagggaagagggttgttttggtttcggacgacccttgctctgaccggaagagaagtccctatcccacacctgcctgtcacgttccctcccctttccccagcgcactgttgagggcagcctctccagctctcttgtttatgcaaacgccgagcgcctgggaggctcggtaggaggagtcttccacggccccgccccgcccctgtcggtcccgccctcccccccgccgggctcctggggctgtggccgaaaggtttctgatctccgtgtgtgcatgtgactgtgctgggttggaatgtgaacaataaagaggaatgtccaagtgttcagagggtgccgggggagggagtttgggtgcacaaggcctccgcttgcaacttgaacaagcctccttgggccaaaccagaaaccaacaatcgggggctggtggggtgaagtggaggggcacctaggttgaaacccacccctttgacccgaccaaacttcctgcctaccttttctcggacttcaagcccattccttctcttactgttaatactctgagccgcctagaggaattcgccataccagcagaaagaagaaggagacagtatggtacccacagactttaattattgatattccccctcaccgccctcagggatcgggagaagtcacacgaccatagggagcttggacttggtggtcgtcacggtgctggcagacgagggtctttccaggaaccccttgctagaatcagccctcatacaagtgtgctcagagatcccaggagcgatggcatcctccctgatgggtataggcaagttctgagtgaacagtagaagcctcctgcggaggagggccgtcctctaacctggggactcttaaatttcactgtgcttgagaataatctgcggaactttggttaaaatgaaatttctgggcctcatcactccccaacgcacaactacaggaaggctagaagtggcctgaatctgaatgtataactagttcccggtgatttctgtccaggtaatctgaggactccacctggagaaatgttgctctgatccctatcctagaccctgactggcagctaaagtggatgacaga

SEQ ID NO: 19993 - DNA, 2204 bp, Homo sapiens
  source 1..2204: mol_type = unassigned DNA
gggctttgcgaagatggcggcgctgggggtgctggagtccgacctgccaagtgccgtgacacttctgaaaaatctccaggagcaagtgatggctgtaactgcacaagtgaaatcactgacacaaaaagttcaagctggtgcctatcctacagaaaagggtctcagcttcttggaagtgaaagaccagctgctgctcatgtaccttatggatttgacccacctcattctggacaaagcctcaggaggatctcttcagggacatgatgcagttttgagactggtggagattcgcacggttttggaaaagcttcgtcccttggaccaaaagctgaagtatcaaattgacaagctgatcaagactgcagtgacaggcagccttagtgagaatgacccacttcgttttaagcctcatcccagcaatatgatgagcaagttgagctctgaggatgaggaggaagatgaagcagaagatgaccagtctgaggcttcagggaagaaatctgtgaagggagtgtctaagaaatatgttcctccacgcttggttccagtacattatgatgaaacagaagctgagcgggagaagaagcgtctagaacgagccaagagacgggcattgagcagctctgtcattcgtgaacttaaggagcagtactcagatgctccagaggaaatccgtgatgctcggcatccccatgttacccgccagagtcaggaggaccaacacaggattaactatgaggagagcatgatggtgcgtttgagcgtcagtaagcgagagaaaggacggcgaaaacgagcaaatgtcatgagctcacaacttcattcccttacacacttcagtgacatcagtgctttgacagggggaactgttcatcttgatgaggatcagaatcctattaagaagcggaagaagatacctcagaaaggtcggaagaaaaaaggtcagtgaactgctgggacttaggtgatcaggtgcaaggtggggagtacaaattgagtctctttggatttgccattctgggtctcaccaagccctgtagtatctcttccatactgggcaataatctccttaggtgggcttttattttttgctttcctgagctggaaatcagcatcattcacaaaatgaatctctggattctgcctctaaggtcccacagctcctgttcaggcttccctaaatagaactggtaaagtgtcacttgaaggaaccattatcccatttcaattttattcctacttctcgtcttttgtcctgggaagatattcagggtactgcctaggagaccccacccctgtgagcccttccctctagatgtcctgttttcctgtccctttagcttttccaactgtcctttgcctcattcttggtttcccttcctttcaggttttcggaggcggcggtgattatgggtgtacatatttgtatattttttgtcatcctgagatacttctaatttcattgtatataggtggttttccctggaattcattaattgtttgctttggacatgtggaaagagccttactaataaaattgattttgcttatgaattaaagcccctttttgcacatgtattgtacgactggagtcgttgggtttgggatatttttggtgagtggttggtgaaaagggaaattttttttggaagtgcaaaacatttgtattgttttctttgataatatatttttcccaaaaactaaaaattggttacgtcacaaaaagtattgagagacgaggctggtataatcaactctttcaacccatgttgccacaacttcctgtatgatttgttataatacaatacagattgagatattaacacatgaattttaggttttattagtgttatctgggctggccaccaggtggcataagtggttcaagaaacttgagcttggctgtaatcaaaagcaagatagaacctttccacatcagcaagattattcttatctccacttctctgaatgtttttcatttctttctgaaatagcatgaacataaggctgatctttggtcagttactgagggagtttgtagaaaatagtagagtgagtaagaaggctagagtgaagagtcagtatagtcttgtgtttttcagactctgacccccacccccccgccttcaactgagggtcattttaccagagtcaataaaggccaacccttctataaagagctggcaaaaaaaaaaaaaaaaaaa

SEQ ID NO: 19994 - DNA, 1143 bp, Homo sapiens
  source 1..1143: mol_type = unassigned DNA
gacaccggaaggggtgggctttgcgaagatggcggcgctgggggtgctggagtccgacctgccaagtgccgtgacacttctgaaaaatctccaggagcaagtgatggctgtaactgcacaagtgaaatcactgacacaaaaagttcaagctggtgcctatcctacagaaaagggtctcagcttcttggaagtgaaagaccagctgctgctcatgtaccttatggatttgacccacctcattctggacaaagcctcaggaggatctcttcagggacatgatgcagttttgagactggtggagattcgcacggttttggaaaagcttcgtcccttggaccaaaagctgaagtatcaaattgacaagctgatcaagactgcagtgacaggcagccttagtgagaatgacccacttcgttttaagcctcatcccagcaatatgatgagcaagttgagctctgaggatgaggaggaagatgaagcagaagatgaccagtctgaggcttcagggaagaaatctgtgaagggagtgtctaagaaatatgttcctccacgcttggttccagtacattatgatgaaacagaagctgagcgggagaagaagcgtctagaacgagccaagagacgggcattgagcagctctgtcattcgtgaacttaaggagcagtactcagatgctccagaggaaatccgtgatgctcggcatccccatgttacccgccagagtcaggaggaccaacacaggattaactatgaggagagcatgatggtgcgtttgagcgtcagtaagcgagagaaaggacggcgaaaacgagcaaatgtcatgagctcacaacttcattcccttacacacttcagtgacatcagtgctttgacagggggaactgttcatcttgatgaggatcagaatcctattaagaagcggaagaagatacctcagaaaggtcggaagaaaaaaggttttcggaggcggcggtgattatgggtgtacatatttgtatattttttgtcatcctgagatacttctaatttcattgtatataggtggttttccctggaattcattaattgtttgctttggacatgtggaaagagccttactaataaaattgattttgcttatgaattaaagcccctttttgcaca

SEQ ID NO: 19995 - DNA, 5092 bp, Homo sapiens
  source 1..5092: mol_type = unassigned DNA
gaattcatttttgaggtcaatttccaatcgagataaatctattggattagtaggattatctgattgcagccgaaagaagtaacgttgtttgatcatttgtatttcttgcctgatggtcggatttacatggaggtggctttgggtccccaggattctggatcgtggttgcatctggagagaaaaaaggatcaatcgacacgttttagaagtgtccgtgggtgaataaaaaaggaggggggggtgcaaaactggggttgcggatgcttaaagcaaaaaaagagaaaaggaagcgtcttgaatcctggaacaagaattaccgggtgctcgagatttcaaaaaagcgtctagaaactggtaaatacttggaccatttcagcttgaatttgacggcgaagtgttgtagagaccgtctccttgaatcattgcaaagggaccggggaaagatgagggggctccctctgtggatttatcttgctgagggatatagacctgcagctaactggatttgatttataagagagaaatctgcagtcaatgcccactcttgccacactgctaatatggaaaacagaatgttcaataggatatggtctgataaatagtgatgattgaagatgctgctccaatacatgtgaaatcaatgggagatatctgctgtctgaagatctttcagagcttttctcgacaagctcccctgtaagaaatcggaggtatattctaccattatacagtctttctcaagtggatataaatacgtttgcctcactgtaaccagacaactagacaactaatgtgggaccatggcactgcccagatgcacgtggccaaattatgtttggagagcagtgatggcatgcttggtacaccggggattgggtgccccattgactctctgtatgttgggatgtttgcttcaggctggccatgtgctatcacaaaaattggatgatgtggacccactggtggctaccaactttggaaagataagagggattaagaaggaactcaataatgaaattttggggcctgttattcaatttcttggggttccatatgcagccccaccaacaggggaacgtcgttttcagcctccagaaccaccatctccctggtcagatatcagaaatgccactcaatttgctcctgtgtgtccccagaatatcattgatggcagattgccagaagtcatgcttcctgtgtggtttactaataacttggatgtggtttcatcatatgtgcaagaccagagcgaagactgcctatatttaaatatatatgtcccgactgaggatgatattcgggacagtgggggtcccaaaccagtgatggtgtatatccatggtggctcatatatggaaggtactggaaatttatatgatggaagtgtcttggcaagttatggcaatgtgatcgtcatcacagtcaactatcgacttggagtactcggtttcttgagtacaggcgatcaggctgcaaaggggaactatggactccttgatctcatacaagctttaagatggactagtgaaaacattggattctttggtggtgaccccttaagaatcactgtttttggatctggtgctgggggttcatgtgtcaacctgctgactttatcccattattctgaaggtaaccgttggagcaattcaaccaaaggactttttcaacgagcaatagctcaaagtggaacagccctttccagctgggctgttagttttcaacctgcaaaatatgctagaatgttggccacaaaagttggttgcaatgtttcagatacagtagagttagtggaatgcctacagaagaagccttacaaagaacttgttgaccaagatattcaaccagctcgataccacatagcctttggacctgtgattgatggtgatgtaataccagacgacccccagatattgatggagcaaggagagtttctcaactatgatataatgttaggagtgaaccaaggggaagggttaaaatttgttgaaaatatagtagatagcgatgatggtatatcagctagtgattttgactttgctgtttcaaattttgttgataatttatatggatatcctgaaggcaaagatgttttgagagaaaccattaagttcatgtatactgactgggctgaccgtcataaccctgaaaccagaagaaagacattactggctttgtttacggaccatcagtgggtggcaccagctgtagccacagcggatcttcactcaaactttggttcacctacgtacttctatgccttttaccatcattgccaaacagatcaggttccagcttgggctgatgcagcccacggagacgaggttccctatgtactgggaatccccatgattggccctacagagttatttccttgcaatttctccaaaaatgatgtgatgctgagtgcagttgtaatgacatactggacaaattttgctaaaactggtgacccaaatcaaccagtccctcaagacacgaaattcattcataccaaacccaaccgttttgaagaagtagcatggaccagatattcccagaaagaccaactttatctccatattggattaaaaccaagagttaaagaacattacagagccaataaggtgaacctctggttggagttggtacctcatctgcataatctcaatgacatttctcagtatacctctacaacaactaaagtgccatcaactgacatcactttcagacctacgagaaaaaattctgtacctgtcacgtcagcctttcccactgccaagcaggatgatcccaaacaacaaccaagtccattttcagtggatcaaagggactactcaacagagctgagtgtcactattgcagttggagcatcactgctgtttctgaacatcttggcctttgcagccctgtactacaaaaaggataagaggagacatgatgttcacaggagatgcagccctcagcgcactactaccaatgatctaacccatgcacaagaagaggaaatcatgtccctccaaatgaagcacactgatttggatcatgaatgtgagtccattcatccacatgaggtggttcttcggaccgcctgtcccccagattacacactagctatgaggaggtcacctgatgatgttcccttaatgacacccaacaccattacaatgattcccaacactataccagggattcagcccttacacacattcaatacatttactggaggacagaacaatactctgccccatccccatccccacccccattcacattcaacaaccagggtatagccagataagagaaacaaactattttttttgatggattgcagtaaacgatcactgaagattccttggctttcaacctacaagacttactatttaaataaggaggaatattatgtgaatatacatatcaagaactttgggggttttgaaaaaaatgaattgtatatatacaaatcaactttaaaaacaaatttcaattgcttgaagcaattgttctgaatgatactttttcattcacattcaagaattaattttttgaagatttaagttacataatggaattaggcatgtggaacaccaaacaggaaagaactatgtctgaaatataaaaaataaaaataaaaaaacaactatgaatatgcacaagggacacaccagtggaatgtcagataattttcaccagtttttatttggagccgttttattgtgtagaccatatttacatatttggataagtacacaaagcgtcaatgctgttaatggccttagcaaaggctcatgctgaaatttgccagtaaaacaaagaagtttaaagactggcaggtacaccattatcacataagtgctgtcagtataaagttgtggggataaaggaaactggatatttttagcacgatgtgcatgataatttatatgcttggtggctgtgctgctgattaagccgtaattaaaattcttctcatcccattggagtttttaatagaagcttcctccatcaattggcagaacctaaagaagattttaaggggcaaaagtaattacaataaaataattcacagtagtttcaatatagaaggaattagctattaaaggtatttgaagaaactataggtatagtggtgaatactcgctgatatgaatcccagaaaaaaatttcctgtttttaatgttcttttcaatcccatctagataatttatagaaatataaccctaattggacatgtggtacaggatctataagttgctgtgtttttttgttactctgtattttgttccttttggtaaggtgaagtgtgtccaaagagttacttgcaacagtctttcatgatatgaggatgcccccgtattaccactctgattatagttctgagttctttgatttactcatgctgcatgacaaaatgtttactaataacaattcattataaagttatatccctctttacatcacttatctttctcactgaggttcattcactggaatttactcacgcaatctcagtagagtacaacgtagatacagaacctaggagagtcaacatctggaggattttagtctttcttacacatatgtgtgattttaaacgaatattctcagaccacaggaaactcttcatccccctgttgtttaccagtaacagtatatcacagacctttccaaatgtttgtatatgtaatcagatgtacatttatattgaaaaacaaatgagatggacttaaagagcacatcctgataaatactttctctctcacctgtactatatttctattagactaaagttatgtgattttttttttacattttttcagatgactagcaattttgatagtttataagataatgcaaagaactttctctgacaaactaactgcagtaacagaaacctttcttttcagttactctttttcaagaatgaaagattattatacaaaaaattgtatactacttgatggaaccaactttgtacatcttggccatgtcactggtcattgtgtgaaataaagataatctggataatgactattagtccaatgctaagaaacatgatctttgctcattaaagagctaaaatgtttattgctgttttgtctttcttttttct

SEQ ID NO: 19996 - DNA, 2592 bp, Homo sapiens
  source 1..2592: mol_type = unassigned DNA
atggcactgcccagatgcacgtggccaaattatgtttggagagcagtgatggcatgcttggtacaccggggattgggtgccccattgactctctgtatgttgggatgtttgcttcaggctggccatgtgctatcacaaaaattggatgatgtggacccactggtggctaccaactttggaaagataagagggattaagaaggaactcaataatgaaattttggggcctgttattcaatttcttggggttccatatgcagccccaccaacaggggaacgtcgttttcagcctccagaaccaccatctccctggtcagatatcagaaatgccactcaatttgctcctgtgtgtccccagaatatcattgatggcagattgccagaagtcatgcttcctgtgtggtttactaataacttggatgtggtttcatcatatgtgcaagaccagagcgaagactgcctatatttaaatatatatgtcccgactgaggatgtaaaaagaatatccaaggaatgtgccagaaagcccggcaagaaaatatgtagaaaaggaggtccccttacaaagaaacagacagatgatttaggtgataatgacggtgctgaagatgaagatattcgggacagtgggggtcccaaaccagtgatggtgtatatccatggtggctcatatatggaaggtactggaaatttatatgatggaagtgtcttggcaagttatggcaatgtgatcgtcatcacagtcaactatcgacttggagtactcggtttcttgagtacaggcgatcaggctgcaaaggggaactatggactccttgatctcatacaagctttaagatggactagtgaaaacattggattctttggtggtgaccccttaagaatcactgtttttggatctggtgctgggggttcatgtgtcaacctgctgactttatcccattattctgaaggtaaccgttggagcaattcaaccaaaggactttttcaacgagcaatagctcaaagtggaacagccctttccagctgggctgttagttttcaacctgcaaaatatgctagaatgttggccacaaaagttggttgcaatgtttcagatacagtagagttagtggaatgcctacagaagaagccttacaaagaacttgttgaccaagatattcaaccagctcgataccacatagcctttggacctgtgattgatggtgatgtaataccagacgacccccagatattgatggagcaaggagagtttctcaactatgatataatgttaggagtgaaccaaggggaagggttaaaatttgttgaaaatatagtagatagcgatgatggtatatcagctagtgattttgactttgctgtttcaaattttgttgataatttatatggatatcctgaaggcaaagatgttttgagagaaaccattaagttcatgtatactgactgggctgaccgtcataaccctgaaaccagaagaaagacattactggctttgtttacggaccatcagtgggtggcaccagctgtagccacagcggatcttcactcaaactttggttcacctacgtacttctatgccttttaccatcattgccaaacagatcaggttccagcttgggctgatgcagcccacggagacgaggttccctatgtactgggaatccccatgattggccctacagagttatttccttgcaatttctccaaaaatgatgtgatgctgagtgcagttgtaatgacatactggacaaattttgctaaaactggtgacccaaatcaaccagtccctcaagacacgaaattcattcataccaaacccaaccgttttgaagaagtagcatggaccagatattcccagaaagaccaactttatctccatattggattaaaaccaagagttaaagaacattacagagccaataaggtgaacctctggttggagttggtacctcatctgcataatctcaatgacatttctcagtatacctctacaacaactaaagtgccatcaactgacatcactttcagacctacgagaaaaaattctgtacctgtcacgtcagcctttcccactgccaagcaggatgatcccaaacaacaaccaagtccattttcagtggatcaaagggactactcaacagagctgagtgtcactattgcagttggagcatcactgctgtttctgaacatcttggcctttgcagccctgtactacaaaaaggataagaggagacatgatgttcacaggagatgcagccctcagcgcactactaccaatgatctaacccatgcacaagaagaggaaatcatgtccctccaaatgaagcacactgatttggatcatgaatgtgagtccattcatccacatgaggtggttcttcggaccgcctgtcccccagattacacactagctatgaggaggtcacctgatgatgttcccttaatgacacccaacaccattacaatgattcccaacactataccagggattcagcccttacacacattcaatacatttactggaggacagaacaatactctgccccatccccatccccacccccattcacattcaacaaccagggtatag

SEQ ID NO: 19997 - DNA, 635 bp, Homo sapiens
  source 1..635: mol_type = unassigned DNA
gagagcgcgcccgggcggccagcgccgagcgcgcggagctggcgtggggagacacggcaggaaaggcgagtcggagtgggtgatgagaggccgggagagcccgtccgagccggagagaccggagagaagggagcgagcgactgtgcggcgctcacgctgccagagcccgggcggagtgcagtcgcctccaaagccttagagcggcgccccagtcactgcagctcttcaccctagagctgtgccctgggaccacagagaccaagagcatggaaatcggctgagaggatatagacctgcagctaactggatttgatttataagagagaaatctgcagtcaatgcccactcttgccacactgctaatatggaaaacagaatgttcaataggatatggtctgataaatagtgatgattgaagatgctgctccaatacatgtgaaatcaatgggagatatctgctgtctgaagatctttcagagcttttctcgacaagctcccctgtaagaaatcggaggtatattctaccattatacagtctttctcaagtggatataaatacgtttgcctcactgtaaccagacaactagacaactaatgtgggaccatggcactgcccagatgcacgtggccaaatt

SEQ ID NO: 19998 - DNA, 771 bp, Homo sapiens
  source 1..771: mol_type = unassigned DNA
cggaaattctgcatattgaagcaggtggctcctggtacgaaatctctggatacatttggcttgccaagttttgctcttcgctgtcccctcccgtttacagaagcatctgtggtgcttttcattttggatttacatgcaggaaacgtatatatgtttatataccgaccgcataatatataaatacatatacgcgtgcccaagggcctggttttcgtctctcctccccacgaaacggaatgttttggagccgatggataacaagaacactattaacattcttttgagcctgttttttaaaagggggagggagcgtgaagaattgtttaacatttggccatcgtttggctgcacactaagcaccacgaagtatttatggttgcagatcaggtgcaaacggggcttagagagaaaggatatagacctgcagctaactggatttgatttataagagagaaatctgcagtcaatgcccactcttgccacactgctaatatggaaaacagaatgttcaataggatatggtctgataaatagtgatgattgaagatgctgctccaatacatgtgaaatcaatgggagatatctgctgtctgaagatctttcagagcttttctcgacaagctcccctgtaagaaatcggaggtatattctaccattatacagtctttctcaagtggatataaatacgtttgcctcactgtaaccagacaactagacaactaatgtgggaccatggcactgcccagatgcacgtggccaaattatgtttgg

SEQ ID NO: 19999 - DNA, 8242 bp, Homo sapiens
  source 1..8242: mol_type = unassigned DNA
cgttctccaccgactcctgcccgcctcaacacaatgccttacctgtgaagcttgaggccactcaagttccaaatttgtgacaaatcccccagggctcactggagtggcagatatagacctgcagctaactggatttgatttataagagagaaatctgcagtcaatgcccactcttgccacactgctaatatggaaaacagaatgttcaataggatatggtctgataaatagtgatgattgaagatgctgctccaatacatgtgaaatcaatgggagatatctgctgtctgaagatctttcagagcttttctcgacaagctcccctgtaagaaatcggaggtatattctaccattatacagtctttctcaagtggatataaatacgtttgcctcactgtaaccagacaactagacaactaatgtgggaccatggcactgcccagatgcacgtggccaaattatgtttggagagcagtgatggcatgcttggtacaccggggattgggtgccccattgactctctgtatgttgggatgtttgcttcaggctggccatgtgctatcacaaaaattggatgatgtggacccactggtggctaccaactttggaaagataagagggattaagaaggaactcaataatgaaattttggggcctgttattcaatttcttggggttccatatgcagccccaccaacaggggaacgtcgttttcagcctccagaaccaccatctccctggtcagatatcagaaatgccactcaatttgctcctgtgtgtccccagaatatcattgatggcagattgccagaagtcatgcttcctgtgtggtttactaataacttggatgtggtttcatcatatgtgcaagaccagagcgaagactgcctatatttaaatatatatgtcccgactgaggatgatattcgggacagtgggggtcccaaaccagtgatggtgtatatccatggtggctcatatatggaaggtactggaaatttatatgatggaagtgtcttggcaagttatggcaatgtgatcgtcatcacagtcaactatcgacttggagtactcggtttcttgagtacaggcgatcaggctgcaaaggggaactatggactccttgatctcatacaagctttaagatggactagtgaaaacattggattctttggtggtgaccccttaagaatcactgtttttggatctggtgctgggggttcatgtgtcaacctgctgactttatcccattattctgaaggtaaccgttggagcaattcaaccaaaggactttttcaacgagcaatagctcaaagtggaacagccctttccagctgggctgttagttttcaacctgcaaaatatgctagaatgttggccacaaaagttggttgcaatgtttcagatacagtagagttagtggaatgcctacagaagaagccttacaaagaacttgttgaccaagatattcaaccagctcgataccacatagcctttggacctgtgattgatggtgatgtaataccagacgacccccagatattgatggagcaaggagagtttctcaactatgatataatgttaggagtgaaccaaggggaagggttaaaatttgttgaaaatatagtagatagcgatgatggtatatcagctagtgattttgactttgctgtttcaaattttgttgataatttatatggatatcctgaaggcaaagatgttttgagagaaaccattaagttcatgtatactgactgggctgaccgtcataaccctgaaaccagaagaaagacattactggctttgtttacggaccatcagtgggtggcaccagctgtagccacagcggatcttcactcaaactttggttcacctacgtacttctatgccttttaccatcattgccaaacagatcaggttccagcttgggctgatgcagcccacggagacgaggttccctatgtactgggaatccccatgattggccctacagagttatttccttgcaatttctccaaaaatgatgtgatgctgagtgcagttgtaatgacatactggacaaattttgctaaaactggtgacccaaatcaaccagtccctcaagacacgaaattcattcataccaaacccaaccgttttgaagaagtagcatggaccagatattcccagaaagaccaactttatctccatattggattaaaaccaagagttaaagaacattacagagccaataaggtgaacctctggttggagttggtacctcatctgcataatctcaatgacatttctcagtatacctctacaacaactaaagtgccatcaactgacatcactttcagacctacgagaaaaaattctgtacctgtcacgtcagcctttcccactgccaagcaggatgatcccaaacaacaaccaagtccattttcagtggatcaaagggactactcaacagagctgagtgtcactattgcagttggagcatcactgctgtttctgaacatcttggcctttgcagccctgtactacaaaaaggataagaggagacatgatgttcacaggagatgcagccctcagcgcactactaccaatgatctaacccatgcacaagaagaggaaatcatgtccctccaaatgaagcacactgatttggatcatgaatgtgagtccattcatccacatgaggtggttcttcggaccgcctgtcccccagattacacactagctatgaggaggtcacctgatgatgttcccttaatgacacccaacaccattacaatgattcccaacactataccagggattcagcccttacacacattcaatacatttactggaggacagaacaatactctgccccatccccatccccacccccattcacattcaacaaccagggtatagccagataagagaaacaaactattttttttgatggattgcagtaaacgatcactgaagattccttggctttcaacctacaagacttactatttaaataaggaggaatattatgtgaatatacatatcaagaactttgggggttttgaaaaaaatgaattgtatatatacaaatcaactttaaaaacaaatttcaattgcttgaagcaattgttctgaatgatactttttcattcacattcaagaattaattttttgaagatttaagttacataatggaattaggcatgtggaacaccaaacaggaaagaactatgtctgaaatataaaaaataaaaataaaaaaacaactatgaatatgcacaagggacacaccagtggaatgtcagataattttcaccagtttttatttggagccgttttattgtgtagaccatatttacatatttggataagtacacaaagcgtcaatgctgttaatggccttagcaaaggctcatgctgaaatttgccagtaaaacaaagaagtttaaagactggcaggtacaccattatcacataagtgctgtcagtataaagttgtggggataaaggaaactggatatttttagcacgatgtgcatgataatttatatgcttggtggctgtgctgctgattaagccgtaattaaaattcttctcatcccattggagtttttaatagaagcttcctccatcaattggcagaacctaaagaagattttaaggggcaaaagtaattacaataaaataattcacagtagtttcaatatagaaggaattagctattaaaggtatttgaagaaactataggtatagtggtgaatactcgctgatatgaatcccagaaaaaaatttcctgtttttaatgttcttttcaatcccatctagataatttatagaaatataaccctaattggacatgtggtacaggatctataagttgctgtgtttttttgttactctgtattttgttccttttggtaaggtgaagtgtgtccaaagagttacttgcaacagtctttcatgatatgaggatgcccccgtattaccactctgattatagttctgagttctttgatttactcatgctgcatgacaaaatgtttactaataacaattcattataaagttatatccctctttacatcacttatctttctcactgaggttcattcactggaatttactcacgcaatctcagtagagtacaacgtagatacagaacctaggagagtcaacatctggaggattttagtctttcttacacatatgtgtgattttaaacgaatattctcagaccacaggaaactcttcatccccctgttgtttaccagtaacagtatatcacagacctttccaaatgtttgtatatgtaatcagatgtacatttatattgaaaaacaaatgagatggacttaaagagcacatcctgataaatactttctctctcacctgtactatatttctattagactaaagttatgtgattttttttttacattttttcagatgactagcaattttgatagtttataagataatgcaaagaactttctctgacaaactaactgcagtaacagaaacctttcttttcagttactctttttcaagaatgaaagattattatacaaaaaattgtatactacttgatggaaccaactttgtacatcttggccatgtcactggtcattgtgtgaaataaagataatctggataatgactattagtccaatgctaagaaacatgatctttgctcattaaagagctaaaatgtttattgctgttttgtctttcttttttctaaaaaaagaaaaaaaagaaaaaaaggaaaagaagaacaaagaaacatgactgtctcaaagagtaatttttctagattagaccagtcaggtttttgaagacatataggtaacttccacagaaaacacaaacatgtatttaaaggcaagtctcatctaagatgaaactcataaaaattatttaatgtttgttatgaatttaaaagctccagaaatccatgaaaaaaagaaagattagctttgtgttgttaaatatctcttaggtacagatgttgtagaaataaagtgccaattgttttcagttagttagaaaaacaagttccaattctagtcatcaaggaaaaggtctattgaaaagaaatttgcaatatttcatggaatacaaataactaggttcataaaatgggggtgattaaactaccataaagtaatgaatagaaagttgccatgctaagagaatgtaaaagtgctgagcaagatattaaactgacactaaaagataaaaatctatttcaaggaatttatgtgattataatcccccctcccaattattatctatcaaagaaatgtaggtattcctccataattaaaaaaaagtctctgttagaagcaaaagtcttcaaaatccagagtgatctacatacagcttttgactgaggtggttatgcttttcaactgtgaactgccagtgtacacaaatacaaataattgtttagcatctgaagtattgttcaattggaacactgtattttactgtattaattaaacaaaacacaagaacagaatagaaatgacaacaaaataagatatgaatgaatactttcatatgcattgcttcatttggcaaaaccaaacattctattaaatagtatgttttaacgatggccatatttatatcatctacctaccaatctattgctctgcatttatcaatctgcctatatatagcataactgtcaccctctttatattaatttaggaaaatgattgaggaaaacaaagcatagccctattaattattttctctaaattagggtagaataactttatggaagataaagcagcctaggtttaattgttgttcaccagtcacgtgataaagtcattgtgaatgagtgttagttgctagttttataattgcagtctctagtttctgaatgaaaaaggatgccccacattatacagaacattaagaactgtttttaaagctgaaacataatctttatatgcaagaaaaataaatactgttactcaattttagcaaatatgtttaaaatgtatttatttagataattttctttgaaaaacaatgtaagtaacaaaattaaaataatatttttggcattatttgttaattcagattttcctgcctccgattaaaaattaggcaaagctgcttataatttatacaaagattacactaaaatgaactttatttcattgttttgctgttatataaaatttttaccaaatgtttaccaagagattaatgttttagagtatgaggatagaaaaataaaagtgacagatttcatagttttaaatctctactgaacatgttgactatgaacaaaatctaattggctaccacagatatataacaaagtttattactaactttatgcaaattggaaaataatttgctaaagcattaaaaatgtcagatttgtagacgtcttgctggcaactcaaagcagaaaatctgagtatatattattttattcctcatttcaaatataaaagttgaccaaagtgatgctttatttccgacttcctgatctgtatgtgaaaacagcaacatttttttaaaaattatcaagtatatataatattaaaaagaggaaaacagatggcactaattttcttacaggagtgaagtgctgaaactaaattgttacatctgtaacaacagttatttcacctcttgccacactcatcctgacatacgtattaatatcaaaaaatgatacaaagaatatgagaaatgtgttccagcattaaagacactactacatagaaattactgggattcttttctttggcgagtttcactgaaatagtttcacaggatgaaatgatgaattgaattcttaagaagctgtcaaatatggcagtcttttgatgttagtaattttgttttcttctgtgttattggttcaaagtactggccttttccttcatttccagtaattagttgttatagactatcactttttaatgtgagtggaaattagatgatttggttatacttgtgaaaacatgcttccaaataaattcaattaatgggcacttccctgctgagattttgttatcattcatttgattatcttgtcaagctttactgttacgacaaatgttttagctttctggtcaatagactaagggaatttctccagtagccttatacctctcctgcacttgatctgatagcaacatacacttcaaatttccatcagaagtctctaaagaaatttcctactgctatgaaacatttggtggccaacttgattctttttcataagcattctgatttgattttattctggcacgttgctgtatttggatgcaggccagaaatcaattccatttgataagggttgtggagaatacagactggaataaccgtgtgcagggcttaagtgccttttcctcctgagattttatttataaaacttagcttttttaaattttcagattcagataattcaatttaaagagtacaataggatgactatattataaattaccaataaagaaagtttatttggacatttttacatttaatttgatttttaaaataatatcagatgcatctaaatggcttccgggaaagactgaggtaaatttttgaaagtgacaattatataggcatctgacttgatggtacttaagaataaaaatttaaatctctagcaaactttaaaaattgtccaaatagtaagtttaatttgaaagaagtctgaagctattagagaaaatcatgtactagataggtatatatttttttctagtcagctattacgtacaccacataatatatataccctatatactatatggtttatataacatttataatggccctttcagacccatatacttacaaatgacattgtataactacctacatatgtattaatgtgacagaatttagtcctttatggaaagtcaaaccaaattgctagcagttttgagttgaaatgaatgataacaattaaagcttttaagaaattggtaaaggtaccgtaacaaaaactcagcagataaatttaaaagagagggaccatttttgaatgccattttcagagttgacatctaaactagatggtgtgtttaaaaggattttagtggttttgattcatcctttctctgcattcatatcatttagcaaattaatgggacatatgtcatggtttttgtaaaaaagaccattgggttgtcatgattcagtttgtgtttggacatctatggctttcattaaaaacgtgtttattatcatgaataaatattaccatgttttccaa

SEQ ID NO: 20000 - DNA, 2719 bp, Homo sapiens
  source 1..2719: mol_type = unassigned DNA
atggcactgcccagatgcacgtggccaaattatgtttggagagcagtgatggcatgcttggtacaccggggattgggtgccccattgactctctgtatgttgggatgtttgcttcaggctggccatgtgctatcacaaaaattggatgatgtggacccactggtggctaccaactttggaaagataagagggattaagaaggaactcaataatgaaattttggggcctgttattcaatttcttggggttccatatgcagccccaccaacaggggaacgtcgttttcagcctccagaaccaccatctccctggtcagatatcagaaatgccactcaatttgctcctgtgtgtccccagaatatcattgatggcagattgccagaagtcatgcttcctgtgtggtttactaataacttggatgtggtttcatcatatgtgcaagaccagagcgaagactgcctatatttaaatatatatgtcccgactgaggatgatattcgggacagtgggggtcccaaaccagtgatggtgtatatccatggtggctcatatatggaaggtactggaaatttatatgatggaagtgtcttggcaagttatggcaatgtgatcgtcatcacagtcaactatcgacttggagtactcggtttcttgagtacaggcgatcaggctgcaaaggggaactatggactccttgatctcatacaagctttaagatggactagtgaaaacattggattctttggtggtgaccccttaagaatcactgtttttggatctggtgctgggggttcatgtgtcaacctgctgactttatcccattattctgaaggtaaccgttggagcaattcaaccaaaggactttttcaacgagcaatagctcaaagtggaacagccctttccagctgggctgttagttttcaacctgcaaaatatgctagaatgttggccacaaaagttggttgcaatgtttcagatacagtagagttagtggaatgcctacagaagaagccttacaaagaacttgttgaccaagatattcaaccagctcgataccacatagcctttggacctgtgattgatggtgatgtaataccagacgacccccagatattgatggagcaaggagagtttctcaactatgatataatgttaggagtgaaccaaggggaagggttaaaatttgttgaaaatatagtagatagcgatgatggtatatcagctagtgattttgactttgctgtttcaaattttgttgataatttatatggatatcctgaaggcaaagatgttttgagagaaaccattaagttcatgtatactgactgggctgaccgtcataaccctgaaaccagaagaaagacattactggctttgtttacggaccatcagtgggtggcaccagctgtagccacagcggatcttcactcaaactttggttcacctacgtacttctatgccttttaccatcattgccaaacagatcaggttccagcttgggctgatgcagcccacggagacgaggttccctatgtactgggaatccccatgattggccctacagagttatttccttgcaatttctccaaaaatgatgtgatgctgagtgcagttgtaatgacatactggacaaattttgctaaaactggtgacccaaatcaaccagtccctcaagacacgaaattcattcataccaaacccaaccgttttgaagaagtagcatggaccagatattcccagaaagaccaactttatctccatattggattaaaaccaagagttaaagaacattacagagccaataaggtgaacctctggttggagttggtacctcatctgcataatctcaatgacatttctcagtatacctctacaacaactaaagtgccatcaactgacatcactttcagacctacgagaaaaaattctgtacctgtcacgtcagcctttcccactgccaagcaggatgatcccaaacaacaaccaagtccattttcagtggatcaaagggactactcaacagagctgagtgtcactattgcagttggagcatcactgctgtttctgaacatcttggcctttgcagccctgtactacaaaaaggataagaggagacatgatgttcacaggagatgcagccctcagcgcactactaccaatgatctaacccatgcacaagaagaggaaatcatgtccctccaaatgaagcacactgatttggatcatgaatgtgagtccattcatccacatgaggtggttcttcggaccgcctgtcccccagattacacactagctatgaggaggtcacctgatgatgttcccttaatgacacccaacaccattacaatgattcccaacactataccagggattcagcccttacacacattcaatacatttactggaggacagaacaatactctgccccatccccatccccacccccattcacattcaacaaccagggtatagccagataagagaaacaaactattttttttgatggattgcagtaaacgatcactgaagattccttggctttcaacctacaagacttactatttaaataagaccaactttgtacatcttggccatgtcactggtcattgtgtgaaataaagataatctggataatgactattagtccaatgctaagaaacatgatctttgctcattaaagagctaaaatgtttattgctgttttgtctttcttttttct

SEQ ID NO: 20001 - DNA, 4642 bp, Homo sapiens
  source 1..4642: mol_type = unassigned DNA
tccctctcccccccttctctctctctccgaggggggggggtcccagggagggagggggggtcccccgatcagcatgtggctcctggcgctgtgtctggtggggctggcgggggctcaacgcgggggagggggtcccggcggcggcgccccgggcggccccggcctgggcctcggcagcctcggcgaggagcgcttcccggtggtgaacacggcctacgggcgagtgcgcggtgtgcggcgcgagctcaacaacgagatcctgggccccgtcgtgcagttcttgggcgtgccctacgccacgccgcccctgggcgcccgccgcttccagccgcctgaggcgcccgcctcgtggcccggcgtgcgcaacgccaccaccctgccgcccgcctgcccgcagaacctgcacggggcgctgcccgccatcatgctgcctgtgtggttcaccgacaacttggaggcggccgccacctacgtgcagaaccagagcgaggactgcctgtacctcaacctctacgtgcccaccgaggacggtccgctcacaaaaaaacgtgacgaggcgacgctcaatccgccagacacagatatccgtgaccctgggaagaagcctgtgatgctgtttctccatggcggctcctacatggaggggaccggaaacatgttcgatggctcagtcctggctgcctatggcaacgtcattgtagccacgctcaactaccgtcttggggtgctcggttttctcagcaccggggaccaggctgcaaaaggcaactatgggctcctggaccagatccaggccctgcgctggctcagtgaaaacatcgcccactttgggggcgaccccgagcgtatcaccatctttggttccggggcaggggcctcctgcgtcaaccttctgatcctctcccaccattcagaagggctgttccagaaggccatcgcccagagtggcaccgccatttccagctggtctgtcaactaccagccgctcaagtacacgcggctgctggcagccaaggtgggctgtgaccgagaggacagcgctgaagctgtggagtgtctgcgccggaagccctcccgggagctggtggaccaggacgtgcagcctgcccgctaccacatcgcctttgggcccgtggtggatggcgacgtggtccccgatgaccctgagatcctcatgcagcagggagaattcctcaactacgacatgctcatcggcgtcaaccagggagagggcctcaagttcgtggaggactctgcagagagcgaggacggtgtgtctgccagcgcctttgacttcactgtctccaactttgtggacaacctgtatggctacccggaaggcaaggatgtgcttcgggagaccatcaagtttatgtacacagactgggccgaccgggacaatggcgaaatgcgccgcaaaaccctgctggcgctctttactgaccaccaatgggtggcaccagctgtggccactgccaagctgcacgccgactaccagtctcccgtctacttttacaccttctaccaccactgccaggcggagggccggcctgagtgggcagatgcggcgcacggggatgaactgccctatgtctttggcgtgcccatggtgggtgccaccgacctcttcccctgtaacttctccaagaatgacgtcatgctcagtgccgtggtcatgacctactggaccaacttcgccaagactggggaccccaaccagccggtgccgcaggataccaagttcatccacaccaagcccaatcgcttcgaggaggtggtgtggagcaaattcaacagcaaggagaagcagtatctgcacataggcctgaagccacgcgtgcgtgacaactaccgcgccaacaaggtggccttctggctggagctcgtgccccacctgcacaacctgcacacggagctcttcaccaccaccacgcgcctgcctccctacgccacgcgctggccgcctcgtccccccgctggcgccccgggcacacgccggcccccgccgcctgccaccctgcctcccgagcccgagcccgagcccggcccaagggcctatgaccgcttccccggggactcacgggactactccacggagctgagcgtcaccgtggccgtgggtgcctccctcctcttcctcaacatcctggcctttgctgccctctactacaagcgggaccggcggcaggagctgcggtgcaggcggcttagcccacctggcggctcaggctctggcgtgcctggtgggggccccctgctccccgccgcgggccgtgagctgccaccagaggaggagctggtgtcactgcagctgaagcggggtggtggcgtcggggcggaccctgccgaggctctgcgccctgcctgcccgcccgactacaccctggccctgcgccgggcaccggacgatgtgcctctcttggcccccggggccctgaccctgctgcccagtggcctggggccaccgccacccccaccgcccccctcccttcatcccttcgggcccttccccccgccccctcccaccgccaccagccacaacaacacgctaccccacccccactccaccactcgggtatagggggtgggtggggaggccctcctccccggccctccctggcccggccactccgaaggcagggaggaggacttggcaactggcttttctcctgtggagtcgtcacacgccatccagcagcgctaaggtggacatgggattcctccctgcgatgcgtgtctttcccacgcagagaagcccagtctcttctctggatctgggcctttgaacaactggggggcgttttctcccccccattgggacaccagtcttcggtgtgtggaatgtggtattttcccgcgtggaggtgtgctttctcacaacggggtgtgttttcccatgtgcagggtgaggtttttttttgccaccctggacacatgttggccccctcaaagaatttctgtggggatttgtaccccagaatcctgttcccccatcccttctcccacctcctcccctctccctccccctggagaccctggaagtggtgtgttcacatacagtgacccttggccaccagaccacagaggatggagcctgggaagcagcgaggaaatcacagccccctcgcccctgcctcccttgcccctaccccggcgaagcatgttccccccgacgccccccttggcacaagtcagatgaagcacgttctgccggggaggccctcaccttccagagaggacagacacagatttcctgctgggggagggaggagtccacgcatcctgatgctgcctggaagcttattttcccgtggccaggacgcatttctctgagtggaaacaggttcttgcatgtggatgtgtgtttccccaggcagacggcccctctcttcccagcacttccctgcctcccccaggcctcaggcccagcacccagttcctcctcacatggcaggtgagcacagacttctagttggcaggagctgaggagggtgaacaaaccccgagggaggcccggcccttgctcccgagttggggggagggggtgtggcaacgtgccccccgcagaggccacgcatgtttgaccaaagccctcattgtggtccgaggacagccttttccccaggcctcagagcattgctcatccgtgccaaactgggtaggtggatttgagcggaaagactcccaaaatgtgccaagaatttcccagtcccaggcagggcaggggaaactaagggcaagcaggatacagggcgagggatgtggcaggtgagggggctcccgcctgtgccccttctcctcaccatgtctcccccaccctgcctcagttctccgttccccttcatctccgtccccctctttgaagctgtccccatctcagtgtcagaccagccttctcctcagctgaccaccctcctctgacccacgccccctccttgtctgaaagaaaggagccttgaatggtggagggaggcagtggggagaaaggtctcaccggacaggttgggagaatgaggtcagcggtgctggggaacagatggagggggcagtggggacagggcttgggcagacaccagcaggaataatttgaaatgtgtgaggtgactccccggagggccttgggcttgggcatttgggaaaagaatgatgtctggaagggcttaagggacacagtggacgaggggagagtcctcatctgctggcattttgtggggtgttagtgccaaacttgaataggggctggggtgctgtcttccactgacacccaaatccagaatccctggtcttgagtccccagaactttgcctcttgactgtcccttctcttcctacctccatccatggaaaattagttattttctgatcctttcccctgcctggtctagctcctctccaaacagccatgccctccaaatgctagagacctgggccctgaaccctgtagacagatgccctcagaattggggcatgggaggggggctgggggaccccatgattcagccacggactccaatgcccagctcctctccccaaaacaatcccgacaatcccttatccctaccccaaccctttgcggctctgtacacatttttaaacctggcaaaagatgaagagaatattgtaaatataaaagtttaactgtt

SEQ ID NO: 20002 - DNA, 3046 bp, Homo sapiens
  source 1..3046: mol_type = unassigned DNA
ccggagagctgatctcggggattcgggtgcggagcccttggcctggaggcgatatgggtggtccgtggcccggttcagtcgcttgcagcagcccggggaacaggcctgtctggccctgagggagtcccctttctgaagctgtggtgcttggacgacctgctctctacattgctgggcacctgtaggtgtccctcgagagctcagttttgaggttcaagtcagtgtggccatgaaggggctgcctattgggctgatgctgtgaccctggagtctgcctctcctgccagtccccctgcccggaacatgtggctgcggcttggcccgccctcgctgtccctgagccccaagcccacggttggcaggagcctgtgcctcaccctgtggttcctcagtttggcgctgagggccagtacccaggccccagcacccacagtcaacactcactttgggaagctaaggggtgcccgagtaccactgcccagtgagatcctggggcctgtggaccaatacctgggggtgccctacgcagctcccccgatcggcgagaaacgtttcctgccccctgaaccacccccatcctggtcgggcatccggaacgccacacactttcccccagtgtgcccccagaacatccacacagctgtgcccgaagtcatgctgccggtctggttcactgccaacttggatatcgtcgctacttacatccaggagcccaacgaagactgtctctacctgaacgtctatgtgccgacggaggatgtaaagcggatttccaaggaatgcgcccgaaagcccaacaagaaaatttgtaggaaaggaggatccggcgctaagaaacagggcgaggacttagcggataatgacggggatgaagatgaagacatccgggacagtggtgctaaacccgtcatggtctacatccacggaggctcttacatggaagggacaggcaacatgattgatggcagcatcctcgccagttatggcaatgtcatcgtcatcaccctcaactatcgggttggagtgctaggtttcctgagtactggagatcaggctgccaagggcaactatgggctccttgaccagatccaggccctccgctgggtgagcgagaatattgccttcttcgggggagacccccgccggatcactgtctttggctcgggcattggtgcatcctgcgtcagcctcctcacgttgtcacatcactcagagggacttttccagagagccatcatccaaagtggctctgctctgtccagctgggctgtgaactaccaaccagtgaagtacaccagcctgctggcagacaaagtgggctgtaatgtgctggacaccgtggatatggtggactgtcttcggcaaaagagtgccaaggagctggtagagcaggacatccagccagcccgctaccacgtggcctttggccctgtgattgatggtgatgtcattcctgatgaccctgagatcctcatggagcagggcgagttcctcaactatgacatcatgctaggtgtcaaccagggcgagggtctcaagtttgtggaaggggtggtggaccctgaggatggtgtctctggcactgactttgactattccgtctccaattttgtggacaatctgtatggctatcctgagggtaaggacaccctgcgagagaccatcaagttcatgtatacagactgggcagaccgtgacaaccctgagacccgccgtaaaacactggtggcactcttcactgaccaccagtgggtggagccctcagtggtgacagccgatctgcatgcccgctacggctcgcctacctacttctacgccttctatcatcactgccagagcctcatgaagcctgcttggtcagatgcagctcatggggatgaagtaccctatgtttttggggttcctatggtaggccccactgaccttttcccctgcaacttctccaagaatgatgttatgctcagtgctgtcgtcatgacctattggaccaactttgccaagactggggatcccaacaagccggtcccccaggacaccaagttcattcacaccaaggccaaccgctttgaggaagtggcctggtccaaatacaatccccgagaccagctctaccttcacatcgggctgaaaccaagggtccgagatcattaccgggccactaaggtggccttttggaaacatctggtgccccacctatacaacctgcatgacatgttccactatacgtccaccaccaccaaagtgccgcctccggataccacccacagctcccacatcacccgcaggcccaatggcaagacctggagcaccaagcggccagccatctcacctgcctacagcaacgagaatgcccaggggtcctggaacggggaccaggatgcagggccactcctggtggagaaccctcgtgactactccactgaattaagtgtcaccatcgccgtgggggcctccctcctgttccttaacgttctggccttcgctgccctctactaccgtaaggacaaacggcgccaggagcccctgcggcagcctagccctcagcggggagccggggccccggagttgggagctgctccagaggaggagctggcagcattacaactgggccccacccaccacgagtgtgaggccggtcccccccatgacacgctgcgcctcactgcattgcccgactacaccctgaccctgcggcgctccccggatgacatcccactcatgacccccaacaccatcactatgatccccaactccctggtagggctgcagacattgcacccctataacacctttgccgcagggttcaacagtaccgggctgccccactcacactccactacccgggtatagctccaactcagagcacagccaatctccaggctccctccctcccagatccaggaacacatgcacacacacacacacacacacgcagacacacacacacacacacatatatgtatacgcacgcacccacaccctacagcagatccacctgcacaaacatagacagatgtggacatgcacccgcatgtacaaaaacaca

SEQ ID NO: 20003 - DNA, 3913 bp, Homo sapiens
  source 1..3913: mol_type = unassigned DNA
gggcacagcagccaggctgccggagagctgatctcggggattcgggtgcggagcccttggcctggaggcgatatgggtggtccgtggcccggttcagtcgcttgcagcagcccggggaacaggcctgtctggccctgagggagtcccctttctgaagctgtggtgcttggacgacctgctctctacattgctgggcacctgtaggtgtccctcgagagctcagttttgaggttcaagtcagtgtggccatgaaggggctgcctattgggctgatgctgtgaccctggagtctgcctctcctgccagtccccctgcccggaacatgtggctgcggcttggcccgccctcgctgtccctgagccccaagcccacggttggcaggagcctgtgcctcaccctgtggttcctcagtttggcgctgagggccagtacccaggccccagcacccacagtcaacactcactttgggaagctaaggggtgcccgagtaccactgcccagtgagatcctggggcctgtggaccaatacctgggggtgccctacgcagctcccccgatcggcgagaaacgtttcctgccccctgaaccacccccatcctggtcgggcatccggaacgccacacactttcccccagtgtgcccccagaacatccacacagctgtgcccgaagtcatgctgccggtctggttcactgccaacttggatatcgtcgctacttacatccaggagcccaacgaagactgtctctacctgaacgtctatgtgccgacggaggatggatccggcgctaagaaacagggcgaggacttagcggataatgacggggatgaagatgaagacatccgggacagtggtgctaaacccgtcatggtctacatccacggaggctcttacatggaagggacaggcaacatgattgatggcagcatcctcgccagttatggcaatgtcatcgtcatcaccctcaactatcgggttggagtgctaggtttcctgagtactggagatcaggctgccaagggcaactatgggctccttgaccagatccaggccctccgctgggtgagcgagaatattgccttcttcgggggagacccccgccggatcactgtctttggctcgggcattggtgcatcctgcgtcagcctcctcacgttgtcacatcactcagagggacttttccagagagccatcatccaaagtggctctgctctgtccagctgggctgtgaactaccaaccagtgaagtacaccagcctgctggcagacaaagtgggctgtaatgtgctggacaccgtggatatggtggactgtcttcggcaaaagagtgccaaggagctggtagagcaggacatccagccagcccgctaccacgtggcctttggccctgtgattgatggtgatgtcattcctgatgaccctgagatcctcatggagcagggcgagttcctcaactatgacatcatgctaggtgtcaaccagggcgagggtctcaagtttgtggaaggggtggtggaccctgaggatggtgtctctggcactgactttgactattccgtctccaattttgtggacaatctgtatggctatcctgagggtaaggacaccctgcgagagaccatcaagttcatgtatacagactgggcagaccgtgacaaccctgagacccgccgtaaaacactggtggcactcttcactgaccaccagtgggtggagccctcagtggtgacagccgatctgcatgcccgctacggctcgcctacctacttctacgccttctatcatcactgccagagcctcatgaagcctgcttggtcagatgcagctcatggggatgaagtaccctatgtttttggggttcctatggtaggccccactgaccttttcccctgcaacttctccaagaatgatgttatgctcagtgctgtcgtcatgacctattggaccaactttgccaagactggggatcccaacaagccggtcccccaggacaccaagttcattcacaccaaggccaaccgctttgaggaagtggcctggtccaaatacaatccccgagaccagctctaccttcacatcgggctgaaaccaagggtccgagatcattaccgggccactaaggtggccttttggaaacatctggtgccccacctatacaacctgcatgacatgttccactatacgtccaccaccaccaaagtgccgcctccggataccacccacagctcccacatcacccgcaggcccaatggcaagacctggagcaccaagcggccagccatctcacctgcctacagcaacgagaatgcccaggggtcctggaacggggaccaggatgcagggccactcctggtggagaaccctcgtgactactccactgaattaagtgtcaccatcgccgtgggggcctccctcctgttccttaacgttctggccttcgctgccctctactaccgtaaggacaaacggcgccaggagcccctgcggcagcctagccctcagcggggagccggggccccggagttgggagctgctccagaggaggagctggcagcattacaactgggccccacccaccacgagtgtgaggccggtcccccccatgacacgctgcgcctcactgcattgcccgactacaccctgaccctgcggcgctccccggatgacatcccactcatgacccccaacaccatcactatgatccccaactccctggtagggctgcagacattgcacccctataacacctttgccgcagggttcaacagtaccgggctgccccactcacactccactacccgggtatagctccaactcagagcacagccaatctccaggctccctccctcccagatccaggaacacatgcacacacacacacacacacacgcagacacacacacacacacacatatatgtatacgcacgcacccacaccctacagcagatccacctgcacaaacatagacagatgtggacatgcacccgcatgtacaaaaacacaaatacggaagtaaacctgaacaaaccctttaaatggggacgcagatgagtcctcggtaaaccgaggacccatgaaacagcagctgaagccagctccctgaatctgaccacagacactcctggggggcctgaaagcaacagctggacacccccttggtgctcgccttcggcctctcttggaactgcaccaccgaccaactccagacttgggagctttaaagagcaggatagctcttcctccccaggacttggtcttttttctgggtcttgttttgttgatttttcttttttaattttggaacaaatgcttttccaacccatgagtgctaagagcctctggaagggagggcttcaggcccgaaggtctctctggctctaggacccccagtgctcacacaatcagaccaaggaacaagacccccaggaaggaaacagatttaagcaagaccatggggtggaaggagaaaggggctagcactggatggagctggagggtcgtaggggagagatctccaactctctctgtgtccgtgtggagggctgcagagcctgcagggtgacctgcttccccaaaggccaacagcattggcctggccagaccaggtgaccttagatttggtgaacaacgtactatggaagccacatcactattgggcccccaggtctgatctgggttttgcctctgcccttggggaaatgctatcagaaattcgccccattttctttacagtcttttgtgtctgtcatttctctttcaaaaaggcggtgttttttgttgttgttggtttttttttttttttaaagaaaagttcttaaaacactaacggaaacccatggagtttgtcctttgtaaaaattttaaacacagtgtcttgatataaaaataaaaaatccagttagcactcccaa

SEQ ID NO: 20004 - DNA, 1862 bp, Homo sapiens
  source 1..1862: mol_type = unassigned DNA
gggcacagcagccaggctgccggagagctgatctcggggattcgggtgcggagcccttggcctggaggcgatatgggtggtccgtggcccggttcagtcgcttgcagcagcccggggaacaggcctgtctggccctgagggagtcccctttctgaagctgtggtgcttggacgacctgctctctacattgctgggcacctgtaggtgtccctcgagagctcagttttgaggttcaagtcagtgtggccatgaaggggctgcctattgggctgatgctgtgaccctggagtctgcctctcctgccagtccccctgcccggaacatgtggctgcggcttggcccgccctcgctgtccctgagccccaagcccacggttggcaggagcctgtgcctcaccctgtggttcctcagtttggcgctgagggccagtacccaggccccagcacccacagtcaacactcactttgggaagctaaggggtgcccgagtaccactgcccagtgagatcctggggcctgtggaccaatacctgggggtgccctacgcagctcccccgatcggcgagaaacgtttcctgccccctgaaccacccccatcctggtcgggcatccggaacgccacacactttcccccagtgtgcccccagaacatccacacagctgtgcccgaagtcatgctgccggtctggttcactgccaacttggatatcgtcgctacttacatccaggagcccaacgaagactgtctctacctgaacgtctatgtgccgacggaggatgacatccgggacagtggtgctaaacccgtcatggtctacatccacggaggctcttacatggaagggacaggcaacatgattgatggcagcatcctcgccagttatggcaatgtcatcgtcatcaccctcaactatcgggttggagtgctaggtttcctgagtactggagatcaggctgccaagggcaactatgggctccttgaccagatccaggccctccgctgggtgagcgagaatattgccttcttcgggggagacccccgccggatcactgtctttggctcgggcattggtgcatcctgcgtcagcctcctcacgttgtcacatcactcagagggacttttccagagagccatcatccaaagtggctctgctctgtccagctgggctgtgaactaccaaccagtgaagtacaccagcctgctggcagacaaagtgggctgtaatgtgctggacaccgtggatatggtggactgtcttcggcaaaagagtgccaaggagctggtagagcaggacatccagccagcccgctaccacgtggcctttggccctgtgattgatggtgatgtcattcctgatgaccctgagatcctcatggagcagggcgagttcctcaactatgacatcatgctaggtgtcaaccagggcgagggtctcaagtttgtggaaggggtggtggaccctgaggatggtgtctctggcactgactttgactattccgtctccaattttgtggacaatctgtatggctatcctgagggtaaggacaccctgcgagagaccatcaagttcatgtatacagactgggcagaccgtgacaaccctgagacccgccgtaaaacactggtggcactcttcactgaccaccagtgggtggagccctcagtggtgacagccgatctgcatgcccgctacggctcgcctacctacttctacgccttctatcatcactgccagagcctcatgaagcctgcttggtcagatgcagctcatggggatgaagtaccctatgtttttggggttcctatggtaggccccactgaccttttcccctgcaacttctccaagaatgatgttatgctca

SEQ ID NO: 20005 - DNA, 3863 bp, Homo sapiens
  source 1..3863: mol_type = unassigned DNA
ccctcggtgcgcgggcacagcagccaggctgccggagagctgatctcggggattcgggtgcggagcccttggcctggaggcgatatgggtggtccgtggcccggttcagtcgcttgcagcagcccggggaacaggcctgtctggccctgagggagtcccctttctgaagctgtggtgcttggacgacctgctctctacattgctgggcacctgtaggtgtccctcgagagctcagttttgaggttcaagtcagtgtggccatgaaggggctgcctattgggctgatgctgtgaccctggagtctgcctctcctgccagtccccctgcccggaacatgtggctgcggcttggcccgccctcgctgtccctgagccccaagcccacggttggcaggagcctgtgcctcaccctgtggttcctcagtttggcgctgagggccagtacccaggccccagcacccacagtcaacactcactttgggaagctaaggggtgcccgagtaccactgcccagtgagatcctggggcctgtggaccaatacctgggggtgccctacgcagctcccccgatcggcgagaaacgtttcctgccccctgaaccacccccatcctggtcgggcatccggaacgccacacactttcccccagtgtgcccccagaacatccacacagctgtgcccgaagtcatgctgccggtctggttcactgccaacttggatatcgtcgctacttacatccaggagcccaacgaagactgtctctacctgaacgtctatgtgccgacggaggatgacatccgggacagtggtgctaaacccgtcatggtctacatccacggaggctcttacatggaagggacaggcaacatgattgatggcagcatcctcgccagttatggcaatgtcatcgtcatcaccctcaactatcgggttggagtgctaggtttcctgagtactggagatcaggctgccaagggcaactatgggctccttgaccagatccaggccctccgctgggtgagcgagaatattgccttcttcgggggagacccccgccggatcactgtctttggctcgggcattggtgcatcctgcgtcagcctcctcacgttgtcacatcactcagagggacttttccagagagccatcatccaaagtggctctgctctgtccagctgggctgtgaactaccaaccagtgaagtacaccagcctgctggcagacaaagtgggctgtaatgtgctggacaccgtggatatggtggactgtcttcggcaaaagagtgccaaggagctggtagagcaggacatccagccagcccgctaccacgtggcctttggccctgtgattgatggtgatgtcattcctgatgaccctgagatcctcatggagcagggcgagttcctcaactatgacatcatgctaggtgtcaaccagggcgagggtctcaagtttgtggaaggggtggtggaccctgaggatggtgtctctggcactgactttgactattccgtctccaattttgtggacaatctgtatggctatcctgagggtaaggacaccctgcgagagaccatcaagttcatgtatacagactgggcagaccgtgacaaccctgagacccgccgtaaaacactggtggcactcttcactgaccaccagtgggtggagccctcagtggtgacagccgatctgcatgcccgctacggctcgcctacctacttctacgccttctatcatcactgccagagcctcatgaagcctgcttggtcagatgcagctcatggggatgaagtaccctatgtttttggggttcctatggtaggccccactgaccttttcccctgcaacttctccaagaatgatgttatgctcagtgctgtcgtcatgacctattggaccaactttgccaagactggggatcccaacaagccggtcccccaggacaccaagttcattcacaccaaggccaaccgctttgaggaagtggcctggtccaaatacaatccccgagaccagctctaccttcacatcgggctgaaaccaagggtccgagatcattaccgggccactaaggtggccttttggaaacatctggtgccccacctatacaacctgcatgacatgttccactatacgtccaccaccaccaaagtgccgcctccggataccacccacagctcccacatcacccgcaggcccaatggcaagacctggagcaccaagcggccagccatctcacctgcctacagcaacgagaatgcccaggggtcctggaacggggaccaggatgcagggccactcctggtggagaaccctcgtgactactccactgaattaagtgtcaccatcgccgtgggggcctccctcctgttccttaacgttctggccttcgctgccctctactaccgtaaggacaaacggcgccaggagcccctgcggcagcctagccctcagcggggagccggggccccggagttgggagctgctccagaggaggagctggcagcattacaactgggccccacccaccacgagtgtgaggccggtcccccccatgacacgctgcgcctcactgcattgcccgactacaccctgaccctgcggcgctccccggatgacatcccactcatgacccccaacaccatcactatgatccccaactccctggtagggctgcagacattgcacccctataacacctttgccgcagggttcaacagtaccgggctgccccactcacactccactacccgggtatagctccaactcagagcacagccaatctccaggctccctccctcccagatccaggaacacatgcacacacacacacacacacacgcagacacacacacacacacacatatatgtatacgcacgcacccacaccctacagcagatccacctgcacaaacatagacagatgtggacatgcacccgcatgtacaaaaacacaaatacggaagtaaacctgaacaaaccctttaaatggggacgcagatgagtcctcggtaaaccgaggacccatgaaacagcagctgaagccagctccctgaatctgaccacagacactcctggggggcctgaaagcaacagctggacacccccttggtgctcgccttcggcctctcttggaactgcaccaccgaccaactccagacttgggagctttaaagagcaggatagctcttcctccccaggacttggtcttttttctgggtcttgttttgttgatttttcttttttaattttggaacaaatgcttttccaacccatgagtgctaagagcctctggaagggagggcttcaggcccgaaggtctctctggctctaggacccccagtgctcacacaatcagaccaaggaacaagacccccaggaaggaaacagatttaagcaagaccatggggtggaaggagaaaggggctagcactggatggagctggagggtcgtaggggagagatctccaactctctctgtgtccgtgtggagggctgcagagcctgcagggtgacctgcttccccaaaggccaacagcattggcctggccagaccaggtgaccttagatttggtgaacaacgtactatggaagccacatcactattgggcccccaggtctgatctgggttttgcctctgcccttggggaaatgctatcagaaattcgccccattttctttacagtcttttgtgtctgtcatttctctttcaaaaaggcggtgttttttgttgttgttggtttttttttttttttaaagaaaagttcttaaaacactaacggaaacccatggagtttgtcctttgtaaaaattttaaacacagtgtcttgatataaaaataaaaaatccagttagcactccc

SEQ ID NO: 20006 - DNA, 3319 bp, Homo sapiens
  source 1..3319: mol_type = unassigned DNA
ggtgcgcgggcacagcagccaggctgccggagagctgatctcggggattcgggtgcggagcccttggcctggaggcgatatgggtggtccgtggcccggttcagtcgcttgcagcagcccggggaacagtgtgcccccagaacatccacacagctgtgcccgaagtcatgctgccggtctggttcactgccaacttggatatcgtcgctacttacatccaggagcccaacgaagactgtctctacctgaacgtctatgtgccgacggaggatggatccggcgctaagaaacagggcgaggacttagcggataatgacggggatgaagatgaagacatccgggacagtggtgctaaacccgtcatggtctacatccacggaggctcttacatggaagggacaggcaacatgattgatggcagcatcctcgccagttatggcaatgtcatcgtcatcaccctcaactatcgggttggagtgctaggtttcctgagtactggagatcaggctgccaagggcaactatgggctccttgaccagatccaggccctccgctgggtgagcgagaatattgccttcttcgggggagacccccgccggatcactgtctttggctcgggcattggtgcatcctgcgtcagcctcctcacgttgtcacatcactcagagggacttttccagagagccatcatccaaagtggctctgctctgtccagctgggctgtgaactaccaaccagtgaagtacaccagcctgctggcagacaaagtgggctgtaatgtgctggacaccgtggatatggtggactgtcttcggcaaaagagtgccaaggagctggtagagcaggacatccagccagcccgctaccacgtggcctttggccctgtgattgatggtgatgtcattcctgatgaccctgagatcctcatggagcagggcgagttcctcaactatgacatcatgctaggtgtcaaccagggcgagggtctcaagtttgtggaaggggtggtggaccctgaggatggtgtctctggcactgactttgactattccgtctccattttgtggacaatctgtatggctatcctgagggtaaggacaccctgcgagagaccatcaagttcatgtatacagactgggcagaccgtgacaaccctgagacccgccgtaaaacactggtggcactcttcactgaccaccagtgggtggagccctcagtggtgacagccgatctgcatgcccgctacggctcgcctacctacttctacgccttctatcatcactgccagagcctcatgaagcctgcttggtcagatgcagctcatggggatgaagtaccctatgtttttggggttcctatggtaggccccactgaccttttcccctgcaacttctccaagaatgatgttatgctcagtgctgtcgtcatgacctattggaccaactttgccaagactggggatcccaacaagccggtcccccaggacaccaagttcattcacaccaaggccaaccgctttgaggaagtggcctggtccaaatacaatccccgagaccagctctaccttcacatcgggctgaaaccaagggtccgagatcattaccgggccactaaggtggccttttggaaacatctggtgccccacctatacaacctgcatgacatgttccactatacgtccaccaccaccaaagtgccgcctccggataccacccacagctcccacatcacccgcaggcccaatggcaagacctggagcaccaagcggccagccatctcacctgcctacagcaacgagaatgcccaggggtcctggaacggggaccaggatgcagggccactcctggtggagaaccctcgtgactactccactgaattaagtgtcaccatcgccgtgggggcctccctcctgttccttaacgttctggccttcgctgccctctactaccgtaaggacaaacggcgccaggagcccctgcggcagcctagccctcagcggggagccggggccccggagttgggagctgctccagaggaggagctggcagcattacaactgggccccacccaccacgagtgtgaggccggtcccccccatgacacgctgcgcctcactgcattgcccgactacaccctgaccctgcggcgctccccggatgacatcccactcatgacccccaacaccatcactatgatccccaactccctggtagggctgcagacattgcacccctataacacctttgccgcagggttcaacagtaccgggctgccccactcacactccactacccgggtatagctccaactcagagcacagccaatctccaggctccctccctcccagatccaggaacacatgcacacacacacacacacacacgcagacacacacacacacacacatatatgtatacgcacgcacccacaccctacagcagatccacctgcacaaacatagacagatgtggacatgcacccgcatgtacaaaaacacaaatacggaagtaaacctgaacaaaccctttaaatggggacgcagatgagtcctcggtaaaccgaggacccatgaaacagcagctgaagccagctccctgaatctgaccacagacactcctggggggcctgaaagcaacagctggacacccccttggtgctcgccttcggcctctcttggaactgcaccaccgaccaactccagacttgggagctttaaagagcaggatagctcttcctccccaggacttggtcttttttctgggtcttgttttgttgatttttcttttttaattttggaacaaatgcttttccaacccatgagtgctaagagcctctggaagggagggcttcaggcccgaaggtctctctggctctaggacccccagtgctcacacaatcagaccaaggaacaagacccccaggaaggaaacagatttaagcaagaccatggggtggaaggagaaaggggctagcactggatggagctggagggtcgtaggggagagatctccaactctctctgtgtccgtgtggagggctgcagagcctgcagggtgacctgcttccccaaaggccaacagcattggcctggccagaccaggtgaccttagatttggtgaacaacgtactatggaagccacatcactattgggcccccaggtctgatctgggttttgcctctgcccttggggaaatgctatcagaaattcgccccattttctttacagtcttttgtgtctgtcatttctctttcaaaaaggcggtgttttttgttgttgttggtttttttttttttttaaagaaaagttcttaaaacact

SEQ ID NO: 20007 - DNA, 882 bp, Homo sapiens
  source 1..882: mol_type = unassigned DNA
ttttcgaaagacttatctttctgcaggctcgcctctgagctttgtctccttggagccacctcacttagacagcttcggatgtggatgcagatttgaaccatgttgcgtccccagggactgctatggctccctttgttgttcacctctgtctgtgtcatgttaaactccaatgttcttctgtggataactgctcttgccatcaagttcaccctcattgacagccaagcacagtatccagttgtcaacacaaattatggtaaaatccagggcctaagaacaccattacccagtgagatcttgggtccagtggagcagtacttaggggtcccctatgcctcacccccaactggagagaggcggtttcagccaccagaatccccatcctcctggactggcatccgaaatgctactcagttttctgctgtgtgcccccagcacctggatgaaagattcttattgcatgacatgctgcccatctggtttaccaccagtttggatactttgatgacctatgttcaagatcaaaatgaagactgcctttacttaaacatctatgtgcccatggaagatggaaccaacataaagagaaatgcagacgatataaccagtaatgaccatggtgaagataaagatattcatgaacagaacagtaagaagcctgttatggtctatatccatgggggatcttacatggagggaaccggtaacatgattgatggcagcattttggccagctatgggaacgtcatcgttatcaccattaactaccgtctgggaatactaggtatgcaagaggcacgtttgtgtgggagctcaaaaatgtttaattattttaaatctcctttcactaatttaataaattttttttgagttcagatgcaa

SEQ ID NO: 20008 - DNA, 5310 bp, Homo sapiens
  source 1..5310: mol_type = unassigned DNA
gagacgaagcagggagagagtgaacttcagccccgtcccctccccactgccacggctggggcaacccaacccgcgcctgaagcggcttggcttgacctgcggaagcgcgggccgggatggcgtggggagagggaggtaggtgccactgggctgcagatgacgagtgggttgggggcttgctgtgggacaagaggttcaggttccggcctgcgccttccactccgcggtggcgctctctgcctgcggttttccaggaggccgatctaccccagggacactctcatccttcaggcggtctcctggacgccctttcctccccttgcctcccagcctgacctggctctttcgcccctcggagaaccggttgcattggagttttcgaaagacttatctttctgcaggctcgcctctgagctttgtctccttggagccacctcacttagacagcttcggatgtggatgcagatttgaaccatgttgcgtccccagggactgctatggctccctttgttgttcacctctgtctgtgtcatgttaaactccaatgttcttctgtggataactgctcttgccatcaagttcaccctcattgacagccaagcacagtatccagttgtcaacacaaattatggtaaaatccagggcctaagaacaccattacccagtgagatcttgggtccagtggagcagtacttaggggtcccctatgcctcacccccaactggagagaggcggtttcagccaccagaatccccatcctcctggactggcatccgaaatgctactcagttttctgctgtgtgcccccagcacctggatgaaagattcttattgcatgacatgctgcccatctggtttaccaccagtttggatactttgatgacctatgttcaagatcaaaatgaagactgcctttacttaaacatctatgtgcccatggaagatgatattcatgaacagaacagtaagaagcctgttatggtctatatccatgggggatcttacatggagggaaccggtaacatgattgatggcagcattttggccagctatgggaacgtcatcgttatcaccattaactaccgtctgggaatactagggtttttaagtaccggtgaccaggcagcaaaaggcaactatgggctcctggatcagattcaagcactgaggtggattgaggagaatgtcggagcctttggcggggaccccaagagagtgactatctttggctcgggggctggggcctcctgtgtcagcctgttgaccctgtcccactactcagaaggtctcttccagaaggccatcattcagagcggcactgccctgtccagctgggcagtgaactaccagccggccaagtacactcggatattggcagacaaggtcggctgcaacatgctggacaccacggacatggtagaatgtctgaagaacaagaactacaaggagctcatccagcagaccatcaccccggccacctaccacatagcctttgggccggtgatcgacggcgacgtcatcccagacgacccccagatcctgatggagcaaggcgagttcctcaactacgacatcatgctgggcgtcaaccaaggggaaggcctgaagttcgtggacggcatcgtggataacgaggacggtgtgacgcccaacgactttgacttctccgtgtccaacttcgtggacaacctttacggctaccctgaagggaaagacactttgcgggagactatcaagttcatgtacacagactgggccgataaggaaaacccggagacgcggcggaaaaccctggtggctctctttactgaccatcagtgggtggcccccgccgtggccaccgccgacctgcacgcgcagtacggctcccccacctacttctatgccttctatcatcactgccaaagcgaaatgaagcccagctgggcagattcggcccatggcgatgaagtcccctatgtcttcggcatccccatgatcggtcccacagagctcttcagttgtaatttctccaagaacgacgtcatgctcagtgccgtggtgatgacctactggacgaacttcgccaaaactggtgatccaaaccaaccagttcctcaggataccaagttcattcatacaaaacccaatcgctttgaagaagtggcctggtccaagtataatcccaaagaccagctctatctgcatattggcttgaaacccagagtgagagatcactaccgggcaacgaaagtggctttctggttggaattggttcctcatttgcacaacttgaacgagatattccagtatgtttcaacaaccacaaaggttcctccaccagacatgacatcatttccctatggcacccggcgatctcccgccaagatatggccaaccaccaaacgcccagcaatcactcctgccaacaatcccaaacactctaaggaccctcacaaaacagggcccgaggacacaactgtcctcattgaaaccaaacgagattattccaccgaattaagtgtcaccattgccgtcggggcgtcgctcctcttcctcaacatcttagcctttgcggcgctgtactacaaaaaggacaagaggcgccatgagactcacaggcaccccagtccccagagaaacaccacaaatgatatcactcacatccagaacgaagagatcatgtctctgcagatgaagcagctggaacacgatcacgagtgtgagtcgctgcaggcacacgacacgctgaggctcacctgccctccagactacaccctcacgctgcgccggtcgccggatgacatcccatttatgacgccaaacaccatcaccatgattccaaacacattgatggggatgcagcctttacacacttttaaaaccttcagtggaggacaaaacagtacaaatttaccccacggacattccaccactagagtatagcttttccctatttcccctcctatccctctgcccctactgctcagcaatgtaaaagagacaaataaggagaaagaaaatctccaaaccaggaatgtttttgtgccactgactttagataaaaatgcaaaagggcagtcatcctgtcccagcagacccttctcattggcattttccagtattgtgagatcaatttctgaccatatgaaatgtgaaaagtatatgtttctgttacaatactgctttaagatctaaaccatgccaacagatgtttcgtgtgactaggacatcaccatttcaaggaactgtgtgtttccaacatcatggtagcagcacacacttccaaagctcagccagggacacttaatattttttaattacaatggaaatttaaacatttttatgtgggctacacaatggatggctcttcttaagtgaagaaagactctataggcttttacacagcacatgaagcagtaatccagaaagaaggaaatgcagaattttattatcaaagtaagcgaattgactgtgcagaaaaattgtagggttctgtggaaggaggtattctgccagcctgaactatatttaagaaactttgtaaaaaataaaaatgtatatagctgtgagctcaaacaaaaactgcagacaaacaaaaaagagaaaagcttttatttgtgttttcagtttgaaagaacttttagcaaggttgtgctttcaaacacatattagtcctaccaccttagttcctctacagcaaaagaggcttttcttcttaattacatgtaaacaaagacatgggattttctgacgtaagattttcatttgtaggaatatgtgatgtcaaatggaagactcagaagttttgtgtggcctatttctccctgtcaggttgcacagatgcatgtagagcattcttaggagaccattgttttagaaaactttgatttgtacatgttagttttcatgaaattgcaacacagagataggtcctaaaagtggaatgtatttaaaacttgttgaattagacacacacacacagacacacacaaagaatcagcagagaaaacaaaatacaagtcctgttctgtagttcttgccctttgaatatatttgggaagagttgcttcctatttcaggaccctgccaaaaaagaagaaagcttgcctttggtggggctatgccccttggagtaaatacagctctgtgttccctagcagctgccggaggatttggctgatgaagtacctgctcagcttagctaatcagattaaaggaagacatgtatgtcttttgtttaagcacctagtcccttatgtatcagtaaacaggtttttaaaaatcttttatgtcatttataggataaaacatatgcttgtctgaaaatatcaccttttgtggatttatctgatcaccaaataataaatattaagaagaatgggggaaaaaggatagaatattaaaactgctttgcataggtttttggggaaattaggatatcttcactgacaagacactgaatggaatttattcacccattttaaattggttacttggggatcagagatttgtctctccaacagcttgtggttttcttattactcattttcaggaaagtttgtagtattacaaggcagaaggaaacacagtagcaatggttgctctatattttgtctttcaaagattactgcattaccaagaaacagtagccaaagatgtttgaagatcatgtcccttagctgcattgtgggttattctagaaatccaatgttaaatgcctctactaaagtggggattccccataaaaattgtccagctacctgactcttttgcaataacaactttgattactgaatccatacactcaaactatagtgatatatcagtgtttgggagtgacctctagaaaaaagaaaactgtttttagaaatacataaaatcacttccaaatcctgttgcttatgttgggttaaatttgaaagcaattctctatatataaatatgtgaaatattatgatctgaacttagcacacatgaagcaacatttctttgctacacagaggtgtcttggaaagatttcattcccaattcatttttcatagatctataatcaggcaatttctgcaagcaatgtatgaccccacctgagcaaccacaaataggctctccatgaaactgcaaaggaactgatgtgtggcatccatgctggttttgtctgtctataatatgaattcaagtatctgttcatatttccaattgtctcctgctagcaatatgtgccacaacatgacagtcttgtgacatcttaaggaaaagaagagttcctgttaaatgaatagctttagcttttacaggggattatgattaaaagtgatttagtacatctta

SEQ ID NO: 20009 - DNA, 5167 bp, Homo sapiens
  source 1..5167: mol_type = unassigned DNA
tttttttcccttccttcatctcctggcctcggataagataaggcttgggggatgcacgaaataatccaagtgattgattagacctggcatggcttggttgggctggagaaagatcggggcgcgctggaaaccccgcgtgaagatgaaatgactttttcgaaagacttatctttctgcaggctcgcctctgagctttgtctccttggagccacctcacttagacagcttcggatgtggatgcagatttgaaccatgttgcgtccccagggactgctatggctccctttgttgttcacctctgtctgtgtcatgttaaactccaatgttcttctgtggataactgctcttgccatcaagttcaccctcattgacagccaagcacagtatccagttgtcaacacaaattatggtaaaatccagggcctaagaacaccattacccagtgagatcttgggtccagtggagcagtacttaggggtcccctatgcctcacccccaactggagagaggcggtttcagccaccagaatccccatcctcctggactggcatccgaaatgctactcagttttctgctgtgtgcccccagcacctggatgaaagattcttattgcatgacatgctgcccatctggtttaccaccagtttggatactttgatgacctatgttcaagatcaaaatgaagactgcctttacttaaacatctatgtgcccatggaagatgatattcatgaacagaacagtaagaagcctgttatggtctatatccatgggggatcttacatggagggaaccggtaacatgattgatggcagcattttggccagctatgggaacgtcatcgttatcaccattaactaccgtctgggaatactagggtttttaagtaccggtgaccaggcagcaaaaggcaactatgggctcctggatcagattcaagcactgaggtggattgaggagaatgtcggagcctttggcggggaccccaagagagtgactatctttggctcgggggctggggcctcctgtgtcagcctgttgaccctgtcccactactcagaaggtctcttccagaaggccatcattcagagcggcactgccctgtccagctgggcagtgaactaccagccggccaagtacactcggatattggcagacaaggtcggctgcaacatgctggacaccacggacatggtagaatgtctgaagaacaagaactacaaggagctcatccagcagaccatcaccccggccacctaccacatagcctttgggccggtgatcgacggcgacgtcatcccagacgacccccagatcctgatggagcaaggcgagttcctcaactacgacatcatgctgggcgtcaaccaaggggaaggcctgaagttcgtggacggcatcgtggataacgaggacggtgtgacgcccaacgactttgacttctccgtgtccaacttcgtggacaacctttacggctaccctgaagggaaagacactttgcgggagactatcaagttcatgtacacagactgggccgataaggaaaacccggagacgcggcggaaaaccctggtggctctctttactgaccatcagtgggtggcccccgccgtggccaccgccgacctgcacgcgcagtacggctcccccacctacttctatgccttctatcatcactgccaaagcgaaatgaagcccagctgggcagattcggcccatggcgatgaagtcccctatgtcttcggcatccccatgatcggtcccacagagctcttcagttgtaatttctccaagaacgacgtcatgctcagtgccgtggtgatgacctactggacgaacttcgccaaaactggtgatccaaaccaaccagttcctcaggataccaagttcattcatacaaaacccaatcgctttgaagaagtggcctggtccaagtataatcccaaagaccagctctatctgcatattggcttgaaacccagagtgagagatcactaccgggcaacgaaagtggctttctggttggaattggttcctcatttgcacaacttgaacgagatattccagtatgtttcaacaaccacaaaggttcctccaccagacatgacatcatttccctatggcacccggcgatctcccgccaagatatggccaaccaccaaacgcccagcaatcactcctgccaacaatcccaaacactctaaggaccctcacaaaacagggcccgaggacacaactgtcctcattgaaaccaaacgagattattccaccgaattaagtgtcaccattgccgtcggggcgtcgctcctcttcctcaacatcttagcctttgcggcgctgtactacaaaaaggacaagaggcgccatgagactcacaggcaccccagtccccagagaaacaccacaaatgatatcactcacatccagaacgaagagatcatgtctctgcagatgaagcagctggaacacgatcacgagtgtgagtcgctgcaggcacacgacacgctgaggctcacctgccctccagactacaccctcacgctgcgccggtcgccggatgacatcccatttatgacgccaaacaccatcaccatgattccaaacacattgatggggatgcagcctttacacacttttaaaaccttcagtggaggacaaaacagtacaaatttaccccacggacattccaccactagagtatagcttttccctatttcccctcctatccctctgcccctactgctcagcaatgtaaaagagacaaataaggagaaagaaaatctccaaaccaggaatgtttttgtgccactgactttagataaaaatgcaaaagggcagtcatcctgtcccagcagacccttctcattggcattttccagtattgtgagatcaatttctgaccatatgaaatgtgaaaagtatatgtttctgttacaatactgctttaagatctaaaccatgccaacagatgtttcgtgtgactaggacatcaccatttcaaggaactgtgtgtttccaacatcatggtagcagcacacacttccaaagctcagccagggacacttaatattttttaattacaatggaaatttaaacatttttatgtgggctacacaatggatggctcttcttaagtgaagaaagactctataggcttttacacagcacatgaagcagtaatccagaaagaaggaaatgcagaattttattatcaaagtaagcgaattgactgtgcagaaaaattgtagggttctgtggaaggaggtattctgccagcctgaactatatttaagaaactttgtaaaaaataaaaatgtatatagctgtgagctcaaacaaaaactgcagacaaacaaaaaagagaaaagcttttatttgtgttttcagtttgaaagaacttttagcaaggttgtgctttcaaacacatattagtcctaccaccttagttcctctacagcaaaagaggcttttcttcttaattacatgtaaacaaagacatgggattttctgacgtaagattttcatttgtaggaatatgtgatgtcaaatggaagactcagaagttttgtgtggcctatttctccctgtcaggttgcacagatgcatgtagagcattcttaggagaccattgttttagaaaactttgatttgtacatgttagttttcatgaaattgcaacacagagataggtcctaaaagtggaatgtatttaaaacttgttgaattagacacacacacacagacacacacaaagaatcagcagagaaaacaaaatacaagtcctgttctgtagttcttgccctttgaatatatttgggaagagttgcttcctatttcaggaccctgccaaaaaagaagaaagcttgcctttggtggggctatgccccttggagtaaatacagctctgtgttccctagcagctgccggaggatttggctgatgaagtacctgctcagcttagctaatcagattaaaggaagacatgtatgtcttttgtttaagcacctagtcccttatgtatcagtaaacaggtttttaaaaatcttttatgtcatttataggataaaacatatgcttgtctgaaaatatcaccttttgtggatttatctgatcaccaaataataaatattaagaagaatgggggaaaaaggatagaatattaaaactgctttgcataggtttttggggaaattaggatatcttcactgacaagacactgaatggaatttattcacccattttaaattggttacttggggatcagagatttgtctctccaacagcttgtggttttcttattactcattttcaggaaagtttgtagtattacaaggcagaaggaaacacagtagcaatggttgctctatattttgtctttcaaagattactgcattaccaagaaacagtagccaaagatgtttgaagatcatgtcccttagctgcattgtgggttattctagaaatccaatgttaaatgcctctactaaagtggggattccccataaaaattgtccagctacctgactcttttgcaataacaactttgattactgaatccatacactcaaactatagtgatatatcagtgtttgggagtgacctctagaaaaaagaaaactgtttttagaaatacataaaatcacttccaaatcctgttgcttatgttgggttaaatttgaaagcaattctctatatataaatatgtgaaatattatgatctgaacttagcacacatgaagcaacatttctttgctacacagaggtgtcttggaaagatttcattcccaattcatttttcatagatctataatcaggcaatttctgcaagcaatgtatgaccccacctgagcaaccacaaataggctctccatgaaactgcaaaggaactgatgtgtggcatccatgctggttttgtctgtctataatatgaattcaagtatctgttcatatttccaattgtctcctgctagcaatatgtgccacaacatgacagtcttgtgacatcttaaggaaaagaagagttcctgttaaatgaatagctttagcttttacaggggattatgattaaaagtgatttagtacatcttacatgatatctcatttctacgtgaaaagaagttatagaatcttcatagagttccatgagaaaaatatacttgctatttat

SEQ ID NO: 20010 - DNA, 5338 bp, Homo sapiens
  source 1..5338: mol_type = unassigned DNA
tttttttcccttccttcatctcctggcctcggataagataaggcttgggggatgcacgaaataatccaagtgattgattagacctggcatggcttggttgggctggagaaagatcggggcgcgctggaaaccccgcgtgaagatgaaatgactttttcgaaagacttatctttctgcaggctcgcctctgagctttgtctccttggagccacctcacttagacagcttcggatgtggatgcagatttgaaccatgttgcgtccccagggactgctatggctccctttgttgttcacctctgtctgtgtcatgttaaactccaatgttcttctgtggataactgctcttgccatcaagttcaccctcattgacagccaagcacagtatccagttgtcaacacaaattatggtaaaatccagggcctaagaacaccattacccagtgagatcttgggtccagtggagcagtacttaggggtcccctatgcctcacccccaactggagagaggcggtttcagccaccagaatccccatcctcctggactggcatccgaaatgctactcagttttctgctgtgtgcccccagcacctggatgaaagattcttattgcatgacatgctgcccatctggtttaccaccagtttggatactttgatgacctatgttcaagatcaaaatgaagactgcctttacttaaacatctatgtgcccatggaagatggaaccaacataaagagaaatgcagacgatataaccagtaatgaccatggtgaagataaagatattcatgaacagaacagtaagaagcctgttatggtctatatccatgggggatcttacatggagggaaccggtaacatgattgatggcagcattttggccagctatgggaacgtcatcgttatcaccattaactaccgtctgggaatactagcacaaaacaccctggctcatggaaactgcaagcatcgttgtcagctgcacctgcaggcaccacgggattgcaagtcagcataccctttcagaaatgaggatgaaattagagggtttttaagtaccggtgaccaggcagcaaaaggcaactatgggctcctggatcagattcaagcactgaggtggattgaggagaatgtcggagcctttggcggggaccccaagagagtgactatctttggctcgggggctggggcctcctgtgtcagcctgttgaccctgtcccactactcagaaggtctcttccagaaggccatcattcagagcggcactgccctgtccagctgggcagtgaactaccagccggccaagtacactcggatattggcagacaaggtcggctgcaacatgctggacaccacggacatggtagaatgtctgaagaacaagaactacaaggagctcatccagcagaccatcaccccggccacctaccacatagcctttgggccggtgatcgacggcgacgtcatcccagacgacccccagatcctgatggagcaaggcgagttcctcaactacgacatcatgctgggcgtcaaccaaggggaaggcctgaagttcgtggacggcatcgtggataacgaggacggtgtgacgcccaacgactttgacttctccgtgtccaacttcgtggacaacctttacggctaccctgaagggaaagacactttgcgggagactatcaagttcatgtacacagactgggccgataaggaaaacccggagacgcggcggaaaaccctggtggctctctttactgaccatcagtgggtggcccccgccgtggccaccgccgacctgcacgcgcagtacggctcccccacctacttctatgccttctatcatcactgccaaagcgaaatgaagcccagctgggcagattcggcccatggcgatgaagtcccctatgtcttcggcatccccatgatcggtcccacagagctcttcagttgtaatttctccaagaacgacgtcatgctcagtgccgtggtgatgacctactggacgaacttcgccaaaactggtgatccaaaccaaccagttcctcaggataccaagttcattcatacaaaacccaatcgctttgaagaagtggcctggtccaagtataatcccaaagaccagctctatctgcatattggcttgaaacccagagtgagagatcactaccgggcaacgaaagtggctttctggttggaattggttcctcatttgcacaacttgaacgagatattccagtatgtttcaacaaccacaaaggttcctccaccagacatgacatcatttccctatggcacccggcgatctcccgccaagatatggccaaccaccaaacgcccagcaatcactcctgccaacaatcccaaacactctaaggaccctcacaaaacagggcccgaggacacaactgtcctcattgaaaccaaacgagattattccaccgaattaagtgtcaccattgccgtcggggcgtcgctcctcttcctcaacatcttagcctttgcggcgctgtactacaaaaaggacaagaggcgccatgagactcacaggcaccccagtccccagagaaacaccacaaatgatatcactcacatccagaacgaagagatcatgtctctgcagatgaagcagctggaacacgatcacgagtgtgagtcgctgcaggcacacgacacgctgaggctcacctgccctccagactacaccctcacgctgcgccggtcgccggatgacatcccatttatgacgccaaacaccatcaccatgattccaaacacattgatggggatgcagcctttacacacttttaaaaccttcagtggaggacaaaacagtacaaatttaccccacggacattccaccactagagtatagcttttccctatttcccctcctatccctctgcccctactgctcagcaatgtaaaagagacaaataaggagaaagaaaatctccaaaccaggaatgtttttgtgccactgactttagataaaaatgcaaaagggcagtcatcctgtcccagcagacccttctcattggcattttccagtattgtgagatcaatttctgaccatatgaaatgtgaaaagtatatgtttctgttacaatactgctttaagatctaaaccatgccaacagatgtttcgtgtgactaggacatcaccatttcaaggaactgtgtgtttccaacatcatggtagcagcacacacttccaaagctcagccagggacacttaatattttttaattacaatggaaatttaaacatttttatgtgggctacacaatggatggctcttcttaagtgaagaaagactctataggcttttacacagcacatgaagcagtaatccagaaagaaggaaatgcagaattttattatcaaagtaagcgaattgactgtgcagaaaaattgtagggttctgtggaaggaggtattctgccagcctgaactatatttaagaaactttgtaaaaaataaaaatgtatatagctgtgagctcaaacaaaaactgcagacaaacaaaaaagagaaaagcttttatttgtgttttcagtttgaaagaacttttagcaaggttgtgctttcaaacacatattagtcctaccaccttagttcctctacagcaaaagaggcttttcttcttaattacatgtaaacaaagacatgggattttctgacgtaagattttcatttgtaggaatatgtgatgtcaaatggaagactcagaagttttgtgtggcctatttctccctgtcaggttgcacagatgcatgtagagcattcttaggagaccattgttttagaaaactttgatttgtacatgttagttttcatgaaattgcaacacagagataggtcctaaaagtggaatgtatttaaaacttgttgaattagacacacacacacagacacacacaaagaatcagcagagaaaacaaaatacaagtcctgttctgtagttcttgccctttgaatatatttgggaagagttgcttcctatttcaggaccctgccaaaaaagaagaaagcttgcctttggtggggctatgccccttggagtaaatacagctctgtgttccctagcagctgccggaggatttggctgatgaagtacctgctcagcttagctaatcagattaaaggaagacatgtatgtcttttgtttaagcacctagtcccttatgtatcagtaaacaggtttttaaaaatcttttatgtcatttataggataaaacatatgcttgtctgaaaatatcaccttttgtggatttatctgatcaccaaataataaatattaagaagaatgggggaaaaaggatagaatattaaaactgctttgcataggtttttggggaaattaggatatcttcactgacaagacactgaatggaatttattcacccattttaaattggttacttggggatcagagatttgtctctccaacagcttgtggttttcttattactcattttcaggaaagtttgtagtattacaaggcagaaggaaacacagtagcaatggttgctctatattttgtctttcaaagattactgcattaccaagaaacagtagccaaagatgtttgaagatcatgtcccttagctgcattgtgggttattctagaaatccaatgttaaatgcctctactaaagtggggattccccataaaaattgtccagctacctgactcttttgcaataacaactttgattactgaatccatacactcaaactatagtgatatatcagtgtttgggagtgacctctagaaaaaagaaaactgtttttagaaatacataaaatcacttccaaatcctgttgcttatgttgggttaaatttgaaagcaattctctatatataaatatgtgaaatattatgatctgaacttagcacacatgaagcaacatttctttgctacacagaggtgtcttggaaagatttcattcccaattcatttttcatagatctataatcaggcaatttctgcaagcaatgtatgaccccacctgagcaaccacaaataggctctccatgaaactgcaaaggaactgatgtgtggcatccatgctggttttgtctgtctataatatgaattcaagtatctgttcatatttccaattgtctcctgctagcaatatgtgccacaacatgacagtcttgtgacatcttaaggaaaagaagagttcctgttaaatgaatagctttagcttttacaggggattatgattaaaagtgatttagtacatcttacatgatatctcatttctacgtgaaaagaagttatagaatcttcatagagttccatgagaaaaatatacttgctatttat

SEQ ID NO: 20011 - DNA, 6617 bp, Homo sapiens
  source 1..6617: mol_type = unassigned DNA
tccaaacccggcaatgttggtggctcttgcattcctctggatgagcgaatctagttggggggttcccgaaggggaaggcgcctgggctttcaatacatcctcctgaatcatactgcgtttcaggttccttagaaaaatttggatgtgtaaaaagaactcttaacggcgatgcaggtcttccacagctaaggaaccaacataaagagaaatgcagacgatataaccagtaatgaccatggtgaagataaagatattcatgaacagaacagtaagaagcctgttatggtctatatccatgggggatcttacatggagggaaccggtaacatgattgatggcagcattttggccagctatgggaacgtcatcgttatcaccattaactaccgtctgggaatactagggtttttaagtaccggtgaccaggcagcaaaaggcaactatgggctcctggatcagattcaagcactgaggtggattgaggagaatgtcggagcctttggcggggaccccaagagagtgactatctttggctcgggggctggggcctcctgtgtcagcctgttgaccctgtcccactactcagaaggtctcttccagaaggccatcattcagagcggcactgccctgtccagctgggcagtgaactaccagccggccaagtacactcggatattggcagacaaggtcggctgcaacatgctggacaccacggacatggtagaatgtctgaagaacaagaactacaaggagctcatccagcagaccatcaccccggccacctaccacatagcctttgggccggtgatcgacggcgacgtcatcccagacgacccccagatcctgatggagcaaggcgagttcctcaactacgacatcatgctgggcgtcaaccaaggggaaggcctgaagttcgtggacggcatcgtggataacgaggacggtgtgacgcccaacgactttgacttctccgtgtccaacttcgtggacaacctttacggctaccctgaagggaaagacactttgcgggagactatcaagttcatgtacacagactgggccgataaggaaaacccggagacgcggcggaaaaccctggtggctctctttactgaccatcagtgggtggcccccgccgtggccaccgccgacctgcacgcgcagtacggctcccccacctacttctatgccttctatcatcactgccaaagcgaaatgaagcccagctgggcagattcggcccatggcgatgaagtcccctatgtcttcggcatccccatgatcggtcccacagagctcttcagttgtaatttctccaagaacgacgtcatgctcagtgccgtggtgatgacctactggacgaacttcgccaaaactggtgatccaaaccaaccagttcctcaggataccaagttcattcatacaaaacccaatcgctttgaagaagtggcctggtccaagtataatcccaaagaccagctctatctgcatattggcttgaaacccagagtgagagatcactaccgggcaacgaaagtggctttctggttggaattggttcctcatttgcacaacttgaacgagatattccagtatgtttcaacaaccacaaaggttcctccaccagacatgacatcatttccctatggcacccggcgatctcccgccaagatatggccaaccaccaaacgcccagcaatcactcctgccaacaatcccaaacactctaaggaccctcacaaaacagggcccgaggacacaactgtcctcattgaaaccaaacgagattattccaccgaattaagtgtcaccattgccgtcggggcgtcgctcctcttcctcaacatcttagcctttgcggcgctgtactacaaaaaggacaagaggcgccatgagactcacaggcaccccagtccccagagaaacaccacaaatgatatcactcacatccagaacgaagagatcatgtctctgcagatgaagcagctggaacacgatcacgagtgtgagtcgctgcaggcacacgacacgctgaggctcacctgccctccagactacaccctcacgctgcgccggtcgccggatgacatcccatttatgacgccaaacaccatcaccatgattccaaacacattgatggggatgcagcctttacacacttttaaaaccttcagtggaggacaaaacagtacaaatttaccccacggacattccaccactagagtatagcttttccctatttcccctcctatccctctgcccctactgctcagcaatgtaaaagagacaaataaggagaaagaaaatctccaaaccaggaatgtttttgtgccactgactttagataaaaatgcaaaagggcagtcatcctgtcccagcagacccttctcattggcattttccagtattgtgagatcaatttctgaccatatgaaatgtgaaaagtatatgtttctgttacaatactgctttaagatctaaaccatgccaacagatgtttcgtgtgactaggacatcaccatttcaaggaactgtgtgtttccaacatcatggtagcagcacacacttccaaagctcagccagggacacttaatattttttaattacaatggaaatttaaacatttttatgtgggctacacaatggatggctcttcttaagtgaagaaagactctataggcttttacacagcacatgaagcagtaatccagaaagaaggaaatgcagaattttattatcaaagtaagcgaattgactgtgcagaaaaattgtagggttctgtggaaggaggtattctgccagcctgaactatatttaagaaactttgtaaaaaataaaaatgtatatagctgtgagctcaaacaaaaactgcagacaaacaaaaaagagaaaagcttttatttgtgttttcagtttgaaagaacttttagcaaggttgtgctttcaaacacatattagtcctaccaccttagttcctctacagcaaaagaggcttttcttcttaattacatgtaaacaaagacatgggattttctgacgtaagattttcatttgtaggaatatgtgatgtcaaatggaagactcagaagttttgtgtggcctatttctccctgtcaggttgcacagatgcatgtagagcattcttaggagaccattgttttagaaaactttgatttgtacatgttagttttcatgaaattgcaacacagagataggtcctaaaagtggaatgtatttaaaacttgttgaattagacacacacacacagacacacacaaagaatcagcagagaaaacaaaatacaagtcctgttctgtagttcttgccctttgaatatatttgggaagagttgcttcctatttcaggaccctgccaaaaaagaagaaagcttgcctttggtggggctatgccccttggagtaaatacagctctgtgttccctagcagctgccggaggatttggctgatgaagtacctgctcagcttagctaatcagattaaaggaagacatgtatgtcttttgtttaagcacctagtcccttatgtatcagtaaacaggtttttaaaaatcttttatgtcatttataggataaaacatatgcttgtctgaaaatatcaccttttgtggatttatctgatcaccaaataataaatattaagaagaatgggggaaaaaggatagaatattaaaactgctttgcataggtttttggggaaattaggatatcttcactgacaagacactgaatggaatttattcacccattttaaattggttacttggggatcagagatttgtctctccaacagcttgtggttttcttattactcattttcaggaaagtttgtagtattacaaggcagaaggaaacacagtagcaatggttgctctatattttgtctttcaaagattactgcattaccaagaaacagtagccaaagatgtttgaagatcatgtcccttagctgcattgtgggttattctagaaatccaatgttaaatgcctctactaaagtggggattccccataaaaattgtccagctacctgactcttttgcaataacaactttgattactgaatccatacactcaaactatagtgatatatcagtgtttgggagtgacctctagaaaaaagaaaactgtttttagaaatacataaaatcacttccaaatcctgttgcttatgttgggttaaatttgaaagcaattctctatatataaatatgtgaaatattatgatctgaacttagcacacatgaagcaacatttctttgctacacagaggtgtcttggaaagatttcattcccaattcatttttcatagatctataatcaggcaatttctgcaagcaatgtatgaccccacctgagcaaccacaaataggctctccatgaaactgcaaaggaactgatgtgtggcatccatgctggttttgtctgtctataatatgaattcaagtatctgttcatatttccaattgtctcctgctagcaatatgtgccacaacatgacagtcttgtgacatcttaaggaaaagaagagttcctgttaaatgaatagctttagcttttacaggggattatgattaaaagtgatttagtacatcttacatgatatctcatttctacgtgaaaagaagttatagaatcttcatagagttccatgagaaaaatatacttgctatttatagaaaacgagaaaaaagaaaaaaatgagaaacaagtaagaaaaaatcctttcctaggcttttccttgatcttcagaggcacacagggtttaatggttccttaggttattattttgaggttttgttctttcttttgccttaagtaatgacagaagatatatatggccagacacatatgtataaacttttcagcagcattttaataataaaatatcacactattttctaatgctttgtacaaacaattatgcatctgttctttcttggtaggtggaatattttatttacttttgccattctttgaatgcctttttctttgtaaatgctacatggtagctctcacataggctacaaatggataaatacatttggtaatgggatggtttctttagctttggccagctgcacagttgaggaggctctgctggcctgattttggaaaaccaagccctgtttggtgaagctcctgagatgacactgcctgaaaatgagtatttggttgtgttatttctaccactgttcattcttgtgtctctgtgttttgatttgtgttcaacaaactgatgccttaatggtttcaaatagaaagccttaggtgagtaaaccttctagtgacagtaagaaattctactgaatgaaactccagaggcagaaaatcattgtcattccaatgggagctcaattgtcaattccttcctgtgcattcagccatcacgaacttatttcacattcacagtagctctaaggggcaggcacctgcattactcccctttcataatggaagatgttctgactttgaaacatgcccccttggacaggaaaatttgatggataacaggatagcatatcctcatatcccaatctttcaccaagaagttatacagcaaacacttgtaagtcaaggtcttgcatgataatctttgctaagtagcaagtaaagaaatatagcaaggacccagactctttggaatatgtgaactaaatccttcagatgttgttggcctcaatcatgttgtgaaggcacacaggagaatacatacacacacatatgcatatatgtatatatgtacatgtatgtgtacattatatatgagtatacatgtacctatcctatatatgtatgtatgtatagagtcacagactgcataatgttttggacaaatatagatcacatatatgatgatagtgtcttgagattaaaataccatgtttttattgtaccttttcagtgttcagatatgtttagacaaacaaatgcttatcattgtgttacagttgcctaaggtcttctctccagtcacatgctgtacaggtttgtagactggaagaactaggctataccatagagcctaggtgtgctataggctacacatcggttttgtgtaagtatactacatgatgtttgcacaatgatgaaattgcctaacgaaacttttctcagaaacctattgatacatgactgtgtatgtttacattatatatactgtatatgcacacatgcatatatgcatatatatgttatacatttacatatgtacatggatatcacatactttaaattcctgaagatgtcattttcattaaatacatatgcacacacactcataaacacacacagactcatatatacacacaaatctataacacatttgtgctcacatatacattcctctgtgtgtgtgtgtgtattacattactgctttttatctgtgaaatcacattctgcagtttcatttactgtgatcaactatgatctaaaaatatatgagtacttcaataagatattttgaaagaaaccacattcacataacatttatgacattataattgttctattttattagctattgttcatctcttactccatctactttataaattaagcttcataataagtgtgtatatttaataaaatatatagtata

SEQ ID NO: 20012 - DNA, 722 bp, Homo sapiens
  source 1..722: mol_type = unassigned DNA
taaactccaatgttcttctgtggataactgctcttgccatcaagttcaccctcattgacagccaagcacagtatccagttgtcaacacaaattatggtaaaatccagggcctaagaacaccattacccagtgagatcttgggtccagtggagcagtacttaggggtcccctatgcctcacccccaactggagagaggcggtttcagccaccagaatccccatcctcctggactggcatccgaaatgctactcagttttctgctgtgtgcccccagcacctggatgaaagattcttattgcatgacatgctgcccatctggtttaccaccagtttggatactttgatgacctatgttcaagatcaaaatgaagactgcctttacttaaacatctatgtgcccatggaagatggaaccaacataaagagaaatgcagacgatataaccagtaatgaccatggtgaagataaagatattcatgaacagaacagtaagaagcctgttatggtctatatccatgggggatcttacatggagggaaccggtaacatgattgatggcagcattttggccagctatgggaacgtcatcgttatcaccattaactaccgtctgggaatactaggtatgcaagaggcacgtttgtgtgggagctcaaaaatgtttaattattttaaatctcctttcactaatttaataaattttttttgagttcagatgcaa

SEQ ID NO: 20013 - DNA, 3003 bp, Homo sapiens
  source 1..3003: mol_type = unassigned DNA
agtacaggggaaaaggagggaaaaggccagggctggagatggcgaaagcaggaggacttctgcaaactgttgcattggagttttcgaaagacttatctttctgcaggctcgcctctgagctttgtctccttggagccacctcacttagacagcttcggatgtggatgcagatttgaaccatgttgcgtccccagggactgctatggctccctttgttgttcacctctgtctgtgtcatgttaaactccaatgttcttctgtggataactgctcttgccatcaagttcaccctcattgacagccaagcacagtatccagttgtcaacacaaattatggtaaaatccagggcctaagaacaccattacccagtgagatcttgggtccagtggagcagtacttaggggtcccctatgcctcacccccaactggagagaggcggtttcagccaccagaatccccatcctcctggactggcatccgaaatgctactcagttttctgctgtgtgcccccagcacctggatgaaagattcttattgcatgacatgctgcccatctggtttaccaccagtttggatactttgatgacctatgttcaagatcaaaatgaagactgcctttacttaaacatctatgtgcccatggaagatggaaccaacataaagagaaatgcagacgatataaccagtaatgaccatggtgaagataaagatattcatgaacagaacagtaagaagcctgttatggtctatatccatgggggatcttacatggagggaaccggtaacatgattgatggcagcattttggccagctatgggaacgtcatcgttatcaccattaactaccgtctgggaatactagggtttttaagtaccggtgaccaggcagcaaaaggcaactatgggctcctggatcagattcaagcactgaggtggattgaggagaatgtcggagcctttggcggggaccccaagagagtgactatctttggctcgggggctggggcctcctgtgtcagcctgttgaccctgtcccactactcagaaggtctcttccagaaggccatcattcagagcggcactgccctgtccagctgggcagtgaactaccagccggccaagtacactcggatattggcagacaaggtcggctgcaacatgctggacaccacggacatggtagaatgtctgaagaacaagaactacaaggagctcatccagcagaccatcaccccggccacctaccacatagcctttgggccggtgatcgacggcgacgtcatcccagacgacccccagatcctgatggagcaaggcgagttcctcaactacgacatcatgctgggcgtcaaccaaggggaaggcctgaagttcgtggacggcatcgtggataacgaggacggtgtgacgcccaacgactttgacttctccgtgtccaacttcgtggacaacctttacggctaccctgaagggaaagacactttgcgggagactatcaagttcatgtacacagactgggccgataaggaaaacccggagacgcggcggaaaaccctggtggctctctttactgaccatcagtgggtggcccccgccgtggccaccgccgacctgcacgcgcagtacggctcccccacctacttctatgccttctatcatcactgccaaagcgaaatgaagcccagctgggcagattcggcccatggcgatgaagtcccctatgtcttcggcatccccatgatcggtcccacagagctcttcagttgtaatttctccaagaacgacgtcatgctcagtgccgtggtgatgacctactggacgaacttcgccaaaactggtgatccaaaccaaccagttcctcaggataccaagttcattcatacaaaacccaatcgctttgaagaagtggcctggtccaagtataatcccaaagaccagctctatctgcatattggcttgaaacccagagtgagagatcactaccgggcaacgaaagtggctttctggttggaattggttcctcatttgcacaacttgaacgagatattccagtatgtttcaacaaccacaaaggttcctccaccagacatgacatcatttccctatggcacccggcgatctcccgccaagatatggccaaccaccaaacgcccagcaatcactcctgccaacaatcccaaacactctaaggaccctcacaaaacagggcccgaggacacaactgtcctcattgaaaccaaacgagattattccaccgaattaagtgtcaccattgccgtcggggcgtcgctcctcttcctcaacatcttagcctttgcggcgctgtactacaaaaaggacaagaggcgccatgagactcacaggcaccccagtccccagagaaacaccacaaatgatatcactcacatccagaacgaagagatcatgtctctgcagatgaagcagctggaacacgatcacgagtgtgagtcgctgcaggcacacgacacgctgaggctcacctgccctccagactacaccctcacgctgcgccggtcgccggatgacatcccatttatgacgccaaacaccatcaccatgattccaaacacattgatggggatgcagcctttacacacttttaaaaccttcagtggaggacaaaacagtacaaatttaccccacggacattccaccactagagtatagcttttccctatttcccctcctatccctctgcccctactgctcagcaatgtaaaagagacaaataaggagaaagaaaatctccaaaccaggaatgtttttgtgccactgactttagataaaaatgcaaaagggcagtcatcctgtcccagcagacccttctcattggcattttccagtattgtgagatcaatttctgaccatatgaaatgtgaaaagtatatgtttctgttacaatactgctttaagatctaaaccatgccaacagatgtttcgtgtgactaggacatcaccatttcaaggaactgtgtgtttc

SEQ ID NO: 20014 - DNA, 2661 bp, Homo sapiens
  source 1..2661: mol_type = unassigned DNA
agccactgtggcctctgcggctaggccggctcgagactcccgggcgcccaggcgctgccgcccgcctcgccgccccacgccgaaggaccacgcgcccgccgccgccagcctctcagcgctcccatgatcgcccggtgccttttggctgtgcgaagcctccgcagagttggtggttccaggattttactcagaatgacgttaggaagagaagtgatgtctcctcttcaggcaatgtcttcctatactgtggctggcagaaatgttttaagatgggatctttcaccagagcaaattaaaacaagaactgaggagctcattgtgcagaccaaacaggtgtacgatgctgttggaatgctcggtattgaggaagtaacttacgagaactgtctgcaggcactggcagatgtagaagtaaagtatatagtggaaaggaccatgctagactttccccagcatgtatcctctgacaaagaagtacgagcagcaagtacagaagcagacaaaagactttctcgttttgatattgagatgagcatgagaggagatatatttgagagaattgttcatttacaggaaacctgtgatctggggaagataaaacctgaggccagacgatacttggaaaagtcaattaaaatggggaaaagaaatgggctccatcttcctgaacaagtacagaatgaaatcaaatcaatgaagaaaagaatgagtgagctatgtattgattttaacaaaaacctcaatgaggatgataccttccttgtattttccaaggctgaacttggtgctcttcctgatgatttcattgacagtttagaaaagacagatgatgacaagtataaaattaccttaaaatatccacactatttccctgtcatgaagaaatgttgtatccctgaaaccagaagaaggatggaaatggcttttaatacaaggtgcaaagaggaaaacaccataattttgcagcagctactcccactgcgaaccaaggtggccaaactactcggttatagcacacatgctgacttcgtccttgaaatgaacactgcaaagagcacaagccgcgtaacagcctttctagatgatttaagccagaagttaaaacccttgggtgaagcagaacgagagtttattttgaatttgaagaaaaaggaatgcaaagacaggggttttgaatatgatgggaaaatcaatgcctgggatctatattactacatgactcagacagaggaactcaagtattccatagaccaagagttcctcaaggaatacttcccaattgaggtggtcactgaaggcttgctgaacacctaccaggagttgttgggactttcatttgaacaaatgacagatgctcatgtttggaacaagagtgttacactttatactgtgaaggataaagctacaggagaagtattgggacagttctatttggacctctatccaagggaaggaaaatacaatcatgcggcctgcttcggtctccagcctggctgccttctgcctgatggaagccggatgatggcagtggctgccctcgtggtgaacttctcacagccagtggcaggtcgtccctctctcctgagacacgacgaggtgaggacttactttcatgagtttggtcacgtgatgcatcagatttgtgcacagactgattttgcacgatttagcggaacaaatgtggaaactgactttgtagaggtgccatcgcaaatgcttgaaaattgggtgtgggacgtcgattccctccgaagattgtcaaaacattataaagatggaagccctattgcagacgatctgcttgaaaaacttgttgcttctaggctggtcaacacaggtcttctgaccctgcgccagattgttttgagcaaagttgatcagtctcttcataccaacacatcgctggatgctgcaagtaatatgccaaatactgctcagaaatattaggagttgcagctactccaggcacaaatatgccagctacctttggacatttggcagggggatacgatggccaatattatggatatctttggagtgaagtattttccatggatatgttttacagctgttttaaaaaagaagggataatgaatccagaggttggaatgaaatacagaaacctaatcctgaaacctgggggatctctggacggcatggacatgctccacaatttcttgaaacgtgagccaaaccaaaaagcgttcctaatgagtagaggcctgcatgctccgtgaactggggatctttggtagccgtccatgtctggaggacaagtcgacatcaccatgtgttactggcctggaaactgaagggagttttgcaagtgaaaatttagatttctattgacatccttttgttttctaattttaaaaattataaagatgtaaatggaattataaatactgtgacctaagaaaagacccactagaaagtaattgtactataaaatttcataaaactggatttgatttctttttatgaaagtttcatatgaatgtaacttgattttttactattataatctagataatatgatataagagggctaagaatttttaaattgaatcatatatatgatataatttgatccttcttgtatcttgaagttttgtacttgggatttctggactgataaatgaatcatcacattcttctggt

SEQ ID NO: 20015 - DNA, 8661 bp, Homo sapiens
  source 1..8661: mol_type = unassigned DNA
ggggctggtaggcgccggcgtggagctgccgcacgtgggagggcgctggccaggcagccactgtggcctctgcggctaggccggctcgagactcccgggcgcccaggcgctgccgcccgcctcgccgccccacgccgaaggaccacgcgcccgccgccgccagcctctcagcgctcccatgatcgcccggtgccttttggctgtgcgaagcctccgcagagttggtggttccaggattttactcagaatgacgttaggaagagaagtgatgtctcctcttcaggcaatgtcttcctatactgtggctggcagaaatgttttaagatgggatctttcaccagagcaaattaaaacaagaactgaggagctcattgtgcagaccaaacaggtgtacgatgctgttggaatgctcggtattgaggaagtaacttacgagaactgtctgcaggcactggcagatgtagaagtaaagtatatagtggaaaggaccatgctagactttccccagcatgtatcctctgacaaagaagtacgagcagcaagtacagaagcagacaaaagactttctcgttttgatattgagatgagcatgagaggagatatatttgagagaattgttcatttacaggaaacctgtgatctggggaagataaaacctgaggccagacgatacttggaaaagtcaattaaaatggggaaaagaaatgggctccatcttcctgaacaagtacagaatgaaatcaaatcaatgaagaaaagaatgagtgagctatgtattgattttaacaaaaacctcaatgaggatgataccttccttgtattttccaaggctgaacttggtgctcttcctgatgatttcattgacagtttagaaaagacagatgatgacaagtataaaattaccttaaaatatccacactatttccctgtcatgaagaaatgttgtatccctgaaaccagaagaaggatggaaatggcttttaatacaaggtgcaaagaggaaaacaccataattttgcagcagctactcccactgcgaaccaaggtggccaaactactcggttatagcacacatgctgacttcgtccttgaaatgaacactgcaaagagcacaagccgcgtaacagcctttctagatgatttaagccagaagttaaaacccttgggtgaagcagaacgagagtttattttgaatttgaagaaaaaggaatgcaaagacaggggttttgaatatgatgggaaaatcaatgcctgggatctatattactacatgactcagacagaggaactcaagtattccatagaccaagagttcctcaaggaatacttcccaattgaggtggtcactgaaggcttgctgaacacctaccaggagttgttgggactttcatttgaacaaatgacagatgctcatgtttggaacaagagtgttacactttatactgtgaaggataaagctacaggagaagtattgggacagttctatttggacctctatccaagggaaggaaaatacaatcatgcggcctgcttcggtctccagcctggctgccttctgcctgatggaagccggatgatggcagtggctgccctcgtggtgaacttctcacagccagtggcaggtcgtccctctctcctgagacacgacgaggtgaggacttactttcatgagtttggtcacgtgatgcatcagatttgtgcacagactgattttgcacgatttagcggaacaaatgtggaaactgactttgtagaggtgccatcgcaaatgcttgaaaattgggtgtgggacgtcgattccctccgaagattgtcaaaacattataaagatggaagccctattgcagacgatctgcttgaaaaacttgttgcttctaggctggtcaacacaggtcttctgaccctgcgccagattgttttgagcaaagttgatcagtctcttcataccaacacatcgctggatgctgcaagtgaatatgccaaatactgctcagaaatattaggagttgcagctactccaggcacaaatatgccagctacctttggacatttggcagggggatacgatggccaatattatggatatctttggagtgaagtattttccatggatatgttttacagctgttttaaaaaagaagggataatgaatccagaggttggaatgaaatacagaaacctaatcctgaaacctgggggatctctggacggcatggacatgctccacaatttcttgaaacgtgagccaaaccaaaaagcgttcctaatgagtagaggcctgcatgctccgtgaactggggatctttggtagccgtccatgtctggaggacaagtcgacatcaccatgtgttactggcctggaaactgaagggagttttgcaagtgaaaatttagatttctattgacatccttttgttttctaattttaaaaattataaagatgtaaatggaattataaatactgtgacctaagaaaagacccactagaaagtaattgtactataaaatttcataaaactggatttgatttctttttatgaaagtttcatatgaatgtaacttgattttttactattataatctagataatatgatataagagggctaagaatttttaaattgaatcatatatatgatataatttgatccttcttgtatcttgaagttttgtacttgggatttctggactgataaatgaatcatcacattcttctggtaaatattttcttggagctctgtgtcaactttgatcctttgtctcccaggaaggtgtgacctctcctttgcctgcatacctcaaggccaggggaatatgcctcagtgatgcatttatctttgtatatcaggccgcatgattcccaactttctgccacacttaaattacgttcctccatttcagttttgtcttttctgtctaaagttcagtcaaagagtatcaaaaaattatgtttcagctagactggtgtaatgtataagtttttgtatcttgtattagaggatttcgtagcttttattagaggctcatttccacctcagcatacaagatcgttagtcttttggcatgtgtgccaattagaatactaaagcaagtccaagcacatttttctcttctcacgtttctaataagtgttagggactttgcctcttttacttaccacgtccccaaaagtgtcaggtagacatgtcacaaatggctctgtagagagccatgggaagagagaggaggtggatgtggaacataaagggttcagaaactccagaagaggagtgggttttggatagaagcatttgaggacagctgctccaaagccttatgtgtatgatgaaacttaaccacggggaagagactcttcagtagcctgttctgtctggtgatttttattttaagtgaacctttggatctatctttaactctctttattgtgagtctaaattccaattctgcagcagatcagtaaactcacagtatttttcctgtggaaatctattcaataaggaaaccaagacaggataataaaatttaaaaaaaaaacaactttgaattcccctgcctaggtcttccagttgttttccagcgcatacctcaggtatgactttgctagccggggacaaaattagcaccttccgattctctagtccaaatgaactttgtgctaaataaaaaattattatactacataataaagttacagatagcaggaaatgcaagagctaggagattcctagattatatctgccaagcaaataccttaaacatccacctgaaatcctactaccccctcttctgagataatttgcccagcccttctcttcccacacactcactcaatgtcacccccttctaatccccaaaactgtttttgtggtctttgtagcctatagtagttttctcacatctttccccctagacttttctgtttttcagtttcagacaaaaaaactcttcagctttttccagtgtgtctccttaacagtaactttaccacttgaaatcttatttcatagaaaaactaaattggtgtggaaaggctgcacacaataaagttatattattatccatgaaaatgaactcatatttctttcatactttaacgttaaaaccgaaatgcatgagagcaaaagcaccatggtgttctttctatttagggcctacctctaatatttaaaatctaccaaagagcagtcacaaaattaaaactcagcccgggcgcagtggctcatgcctgtaatcccagcactttgggaggccaaggcaggaggatcacctgaggtcagagttcaagaccagcatggtcaacatggtgaaaccctgtctctacaaaaatacaaaaagctgggcatgatgttgggttcctgtagtcccagctacttaggaggctgaggcaggagaatagcttgaacccgggaggtggaggttgcagtgagctgagatcatgccattgcactccagcctggacgacagagtgagattcagtctcaaaaaaaattaatactcaaagaattatctagcataatttaaaagaaaggactttttaaaaattctctagcataattcaaaagaaaggacttaacttttttttttttagtgtggtcatccgtctagttgttctttttttccagatcagagcagagaatatcactgacatgcttgaaatggtggataactatgtaaattgtaattggacaaatgtacactttagatttatggactgagccacatataataaggtctctcctggtaattgatccaggggatttaggcctctttcgggttttttgttttttttttaggcattgttatgttgtgaaggataaaatcttcaacatcttatgcaaatggatagtaggcatgatcctaaaggtttagttttacgatgctgcagagaagagaaatgtcttgacgttttgccacctgatgtagactttgtccccctctagtataaatgttgcatgttacctagataaacaactaaaaattgccttgagttatcacctgagctacttatgccaaggtcttgcctttctaaagctaataaggtgagaggtggatatctgtagctcttcggatgaaaaattgcattgtgggagataccaaaattgaggaaatagctcttcaaagaaaaattactgatatgatcattgtacttgtaaatgccttaagtagcaggcagtgactcaattttctactttaccattttacctttagcttttatgtatgaattataggtctgtggagattctgcctccccactaggccagtgtgtgtttaccatttattcattttctatcatacacaggtggattaaaatttacattaaaatttacattaaaataccatcatacttcaggcttctataacaaaatatcagactgggtggcttcaaaagcagacatttcttacagttctggaagctgggaagtcccacaatccacatgctggtaaatttggttcgtggtgaggcccctcttcctcttttactgaccacatccccaaaagtgtcaggtagacatgttacaaatagctctgtagagagccatgggaagagacaggaggcagatgtggaacataaagggtttagaaacttctgcaggcagcagtggcagggagcaagccctagagtgtctctttttacgagagcaggaatcccatcatgagagttccttcctcatgactttatctaaacccagtcacccccaacaaaggccccaccccctaaccccatcacattggctgttacggcttcaatgtaggggatggggcacaaacattcagtccataacgaatactgattcctcaaatagggtttaaacatagttaactgagcccccaaagaatgttaaaagagaaaatccattttatttgaatagatgcagtgaccacagcttcttccctcaaatcaacacattacagttagatgtctcccatctgaaattggatagcccactgaaattgaacatgccttctcttataaatgtgtggtgagaataaaagcaacaaagaaatgaatgtggtggctcacacctgtaatcctaacactttggaaggttgaggcaggaggatcctttgtgctcaagagtttgagaccagcctgagcaacacagtgagaccctgtctctacaaaaactaaaaaaattagctagggatggtggcacatgcctgtagtcccagctacttgggaggctgaggtgggaggattgcttgagcccaagaaggtcaaggctgccatgagccataatcacgccactgcactccagcctgggtgacagagaccctgtcttaaaataaaataaaaaaaaaaggaaaaggaaagacatacataccctcagttcttcgaaaaacagtcaacgtccaaaaagtttattttttgagtcacctttaatagagaaatttcccactggaaacagatccacctaagtgattatctagtatcagctgtatcaaggcaaaaggtaaaggttataagatgtaaatattagaccaaaatagccttttttaacaaacacaataatgctgtacgtctgtaacaaaacaaaatttgaaaaattgaggtaatgtacacagcgatgcacacacccccacaccacaccgtgattcctgagttttgatttggttgaattcaccttgtagttccctttcctgagaaaatacaggttcaacacatctagtccacgatgtacgtacaaggggaaggggtgaacaggaaatagactcccttattctgctcacatgagctggaacctgtactagctgcatatttcatagaccccagaggctcacctcaattgtactcctatgataaaatgtctctagcatttgtcatgagagaaactggctagaaatagtttgttcattgcgtccagcaagacacgcattgctgttgatatctttgtggctaagatggagaatgtgactggataatagttatccaggtggattactagctattgaaacagtctgagatagttgcatgatgattaacgttaaactgggagtaatttcaagtcatttggctaaaaatgaaaaaaaagtcccataaaaaggtatcaaatgtacagataatagggctggaattattaagtatgatgatgttattaacatctaaaattattttggccgggcaaggtgggtcacgcctgtaatctcagcactttgggatgccaagatgggtggatcacctgagttcaggagttcaagaccagcttggccaacatggcgaaacccgtctctactaaagaatacaaaaattagccaggtgttgtggcacatgcctgtactcccagctactcaggaggctgaggcagaagaatcatttgaaccccggaggtggaggttgcagtgagccgacattgtgccgcttcattccagcctgggcaacagagtgaaactcttgtctcaaaagtaaaaaaataataatgtttaaaaatatttcaatgtggagacaagctcaaaatgaaattagacacattccattacccaggtaaaagaaggggaagcctgacttgatagtagtattcaggaaaaaagagttggcagttttatttggccaaattccaatatcagctcatggtacagcacaccgggggagggggacgggaggcgagaactaaggctttttaagaatgtgttgatggaagtatgtgcctagatcaaaagaataatccccccggactccagtgtaagatcaattactgttggaatattgtgttcctttctagatatcacattttaagcagactttggccaagtagtacagtgtttgcaggagcagtaacaagatggtgataactttgaaaatacttctcaaaagaaaaataaaaaagaattagggaagttcagtctggagataattcagaaatacagatgataattgttttcaaattcttgaaggaaatgggagagagaataggctaattctgtattgcttcagaaaccaaatggaaacaattaaattccattagagaaacggttggaaaatatgaggaggatttagttcagtacgaggaagctgtttctaatactttttgttggttaaaaatacattccgctgctgtggaaagcctgtagctgccaggagtgttacagagggcattcctcccttgagttgacatttgtgccaaaccggcttttagggcttctccagcttttaagatgcgataatgataagatgatcatcgggaaaacatccctcagatgaaacgttcacaggctggctctgaaaactggcattcagatgattgcggctcccccatactgtaggaatattgtttatggcttaaggttgcctcgctcctcatctgtaatcagtgaaagtttatccagaggttaattaccggttttctggtgggtatctgggaactgaggatgggagattaactgttgtatatgaccatagtaaagcaaaagactgttagagaatgagtaaacgttcgttttcctccctacagaatttacagttactctctgtccattccactcactactgtcttcatcacacacacagaggcaaacgtctgattcagatagccaggtgtgccatgcatgcactccaccatattgtgatctcttcgaggcttgtttctgtcccctgtcctccacagtcctggattgttaatgaatagttcatacatgtttgttaaataaatataccttctttaaaatta

SEQ ID NO: 20016 - DNA, 8354 bp, Homo sapiens
  source 1..8354: mol_type = unassigned DNA
ggccaggcagccactgtggcctctgcggctaggccggctcgagactcccgggcgcccaggcgctgccgcccgcctcgccgccccacgccgaaggaccacgcgcccgccgccgccagcctctcagcgctcccatgatcgcccggtgccttttggctgtgcgaagcctccgcagtggaaaggaccatgctagactttccccagcatgtatcctctgacaaagaagtacgagcagcaagtacagaagcagacaaaagactttctcgttttgatattgagatgagcatgagaggagatatatttgagagaattgttcatttacaggaaacctgtgatctggggaagataaaacctgaggccagacgatacttggaaaagtcaattaaaatggggaaaagaaatgggctccatcttcctgaacaagtacagaatgaaatcaaatcaatgaagaaaagaatgagtgagctatgtattgattttaacaaaaacctcaatgaggatgataccttccttgtattttccaaggctgaacttggtgctcttcctgatgatttcattgacagtttagaaaagacagatgatgacaagtataaaattaccttaaaatatccacactatttccctgtcatgaagaaatgttgtatccctgaaaccagaagaaggatggaaatggcttttaatacaaggtgcaaagaggaaaacaccataattttgcagcagctactcccactgcgaaccaaggtggccaaactactcggttatagcacacatgctgacttcgtccttgaaatgaacactgcaaagagcacaagccgcgtaacagcctttctagatgatttaagccagaagttaaaacccttgggtgaagcagaacgagagtttattttgaatttgaagaaaaaggaatgcaaagacaggggttttgaatatgatgggaaaatcaatgcctgggatctatattactacatgactcagacagaggaactcaagtattccatagaccaagagttcctcaaggaatacttcccaattgaggtggtcactgaaggcttgctgaacacctaccaggagttgttgggactttcatttgaacaaatgacagatgctcatgtttggaacaagagtgttacactttatactgtgaaggataaagctacaggagaagtattgggacagttctatttggacctctatccaagggaaggaaaatacaatcatgcggcctgcttcggtctccagcctggctgccttctgcctgatggaagccggatgatggcagtggctgccctcgtggtgaacttctcacagccagtggcaggtcgtccctctctcctgagacacgacgaggtgaggacttactttcatgagtttggtcacgtgatgcatcagatttgtgcacagactgattttgcacgatttagcggaacaaatgtggaaactgactttgtagaggtgccatcgcaaatgcttgaaaattgggtgtgggacgtcgattccctccgaagattgtcaaaacattataaagatggaagccctattgcagacgatctgcttgaaaaacttgttgcttctaggctggtcaacacaggtcttctgaccctgcgccagattgttttgagcaaagttgatcagtctcttcataccaacacatcgctggatgctgcaagtgaatatgccaaatactgctcagaaatattaggagttgcagctactccaggcacaaatatgccagctacctttggacatttggcagggggatacgatggccaatattatggatatctttggagtgaagtattttccatggatatgttttacagctgttttaaaaaagaagggataatgaatccagaggttggaatgaaatacagaaacctaatcctgaaacctgggggatctctggacggcatggacatgctccacaatttcttgaaacgtgagccaaaccaaaaagcgttcctaatgagtagaggcctgcatgctccgtgaactggggatctttggtagccgtccatgtctggaggacaagtcgacatcaccatgtgttactggcctggaaactgaagggagttttgcaagtgaaaatttagatttctattgacatccttttgttttctaattttaaaaattataaagatgtaaatggaattataaatactgtgacctaagaaaagacccactagaaagtaattgtactataaaatttcataaaactggatttgatttctttttatgaaagtttcatatgaatgtaacttgattttttactattataatctagataatatgatataagagggctaagaatttttaaattgaatcatatatatgatataatttgatccttcttgtatcttgaagttttgtacttgggatttctggactgataaatgaatcatcacattcttctggtaaatattttcttggagctctgtgtcaactttgatcctttgtctcccaggaaggtgtgacctctcctttgcctgcatacctcaaggccaggggaatatgcctcagtgatgcatttatctttgtatatcaggccgcatgattcccaactttctgccacacttaaattacgttcctccatttcagttttgtcttttctgtctaaagttcagtcaaagagtatcaaaaaattatgtttcagctagactggtgtaatgtataagtttttgtatcttgtattagaggatttcgtagcttttattagaggctcatttccacctcagcatacaagatcgttagtcttttggcatgtgtgccaattagaatactaaagcaagtccaagcacatttttctcttctcacgtttctaataagtgttagggactttgcctcttttacttaccacgtccccaaaagtgtcaggtagacatgtcacaaatggctctgtagagagccatgggaagagagaggaggtggatgtggaacataaagggttcagaaactccagaagaggagtgggttttggatagaagcatttgaggacagctgctccaaagccttatgtgtatgatgaaacttaaccacggggaagagactcttcagtagcctgttctgtctggtgatttttattttaagtgaacctttggatctatctttaactctctttattgtgagtctaaattccaattctgcagcagatcagtaaactcacagtatttttcctgtggaaatctattcaataaggaaaccaagacaggataataaaatttaaaaaaaaaacaactttgaattcccctgcctaggtcttccagttgttttccagcgcatacctcaggtatgactttgctagccggggacaaaattagcaccttccgattctctagtccaaatgaactttgtgctaaataaaaaattattatactacataataaagttacagatagcaggaaatgcaagagctaggagattcctagattatatctgccaagcaaataccttaaacatccacctgaaatcctactaccccctcttctgagataatttgcccagcccttctcttcccacacactcactcaatgtcacccccttctaatccccaaaactgtttttgtggtctttgtagcctatagtagttttctcacatctttccccctagacttttctgtttttcagtttcagacaaaaaaactcttcagctttttccagtgtgtctccttaacagtaactttaccacttgaaatcttatttcatagaaaaactaaattggtgtggaaaggctgcacacaataaagttatattattatccatgaaaatgaactcatatttctttcatactttaacgttaaaaccgaaatgcatgagagcaaaagcaccatggtgttctttctatttagggcctacctctaatatttaaaatctaccaaagagcagtcacaaaattaaaactcagcccgggcgcagtggctcatgcctgtaatcccagcactttgggaggccaaggcaggaggatcacctgaggtcagagttcaagaccagcatggtcaacatggtgaaaccctgtctctacaaaaatacaaaaagctgggcatgatgttgggttcctgtagtcccagctacttaggaggctgaggcaggagaatagcttgaacccgggaggtggaggttgcagtgagctgagatcatgccattgcactccagcctggacgacagagtgagattcagtctcaaaaaaaattaatactcaaagaattatctagcataatttaaaagaaaggactttttaaaaattctctagcataattcaaaagaaaggacttaacttttttttttttagtgtggtcatccgtctagttgttctttttttccagatcagagcagagaatatcactgacatgcttgaaatggtggataactatgtaaattgtaattggacaaatgtacactttagatttatggactgagccacatataataaggtctctcctggtaattgatccaggggatttaggcctctttcgggttttttgttttttttttaggcattgttatgttgtgaaggataaaatcttcaacatcttatgcaaatggatagtaggcatgatcctaaaggtttagttttacgatgctgcagagaagagaaatgtcttgacgttttgccacctgatgtagactttgtccccctctagtataaatgttgcatgttacctagataaacaactaaaaattgccttgagttatcacctgagctacttatgccaaggtcttgcctttctaaagctaataaggtgagaggtggatatctgtagctcttcggatgaaaaattgcattgtgggagataccaaaattgaggaaatagctcttcaaagaaaaattactgatatgatcattgtacttgtaaatgccttaagtagcaggcagtgactcaattttctactttaccattttacctttagcttttatgtatgaattataggtctgtggagattctgcctccccactaggccagtgtgtgtttaccatttattcattttctatcatacacaggtggattaaaatttacattaaaatttacattaaaataccatcatacttcaggcttctataacaaaatatcagactgggtggcttcaaaagcagacatttcttacagttctggaagctgggaagtcccacaatccacatgctggtaaatttggttcgtggtgaggcccctcttcctcttttactgaccacatccccaaaagtgtcaggtagacatgttacaaatagctctgtagagagccatgggaagagacaggaggcagatgtggaacataaagggtttagaaacttctgcaggcagcagtggcagggagcaagccctagagtgtctctttttacgagagcaggaatcccatcatgagagttccttcctcatgactttatctaaacccagtcacccccaacaaaggccccaccccctaaccccatcacattggctgttacggcttcaatgtaggggatggggcacaaacattcagtccataacgaatactgattcctcaaatagggtttaaacatagttaactgagcccccaaagaatgttaaaagagaaaatccattttatttgaatagatgcagtgaccacagcttcttccctcaaatcaacacattacagttagatgtctcccatctgaaattggatagcccactgaaattgaacatgccttctcttataaatgtgtggtgagaataaaagcaacaaagaaatgaatgtggtggctcacacctgtaatcctaacactttggaaggttgaggcaggaggatcctttgtgctcaagagtttgagaccagcctgagcaacacagtgagaccctgtctctacaaaaactaaaaaaattagctagggatggtggcacatgcctgtagtcccagctacttgggaggctgaggtgggaggattgcttgagcccaagaaggtcaaggctgccatgagccataatcacgccactgcactccagcctgggtgacagagaccctgtcttaaaataaaataaaaaaaaaaggaaaaggaaagacatacataccctcagttcttcgaaaaacagtcaacgtccaaaaagtttattttttgagtcacctttaatagagaaatttcccactggaaacagatccacctaagtgattatctagtatcagctgtatcaaggcaaaaggtaaaggttataagatgtaaatattagaccaaaatagccttttttaacaaacacaataatgctgtacgtctgtaacaaaacaaaatttgaaaaattgaggtaatgtacacagcgatgcacacacccccacaccacaccgtgattcctgagttttgatttggttgaattcaccttgtagttccctttcctgagaaaatacaggttcaacacatctagtccacgatgtacgtacaaggggaaggggtgaacaggaaatagactcccttattctgctcacatgagctggaacctgtactagctgcatatttcatagaccccagaggctcacctcaattgtactcctatgataaaatgtctctagcatttgtcatgagagaaactggctagaaatagtttgttcattgcgtccagcaagacacgcattgctgttgatatctttgtggctaagatggagaatgtgactggataatagttatccaggtggattactagctattgaaacagtctgagatagttgcatgatgattaacgttaaactgggagtaatttcaagtcatttggctaaaaatgaaaaaaaagtcccataaaaaggtatcaaatgtacagataatagggctggaattattaagtatgatgatgttattaacatctaaaattattttggccgggcaaggtgggtcacgcctgtaatctcagcactttgggatgccaagatgggtggatcacctgagttcaggagttcaagaccagcttggccaacatggcgaaacccgtctctactaaagaatacaaaaattagccaggtgttgtggcacatgcctgtactcccagctactcaggaggctgaggcagaagaatcatttgaaccccggaggtggaggttgcagtgagccgacattgtgccgcttcattccagcctgggcaacagagtgaaactcttgtctcaaaagtaaaaaaataataatgtttaaaaatatttcaatgtggagacaagctcaaaatgaaattagacacattccattacccaggtaaaagaaggggaagcctgacttgatagtagtattcaggaaaaaagagttggcagttttatttggccaaattccaatatcagctcatggtacagcacaccgggggagggggacgggaggcgagaactaaggctttttaagaatgtgttgatggaagtatgtgcctagatcaaaagaataatccccccggactccagtgtaagatcaattactgttggaatattgtgttcctttctagatatcacattttaagcagactttggccaagtagtacagtgtttgcaggagcagtaacaagatggtgataactttgaaaatacttctcaaaagaaaaataaaaaagaattagggaagttcagtctggagataattcagaaatacagatgataattgttttcaaattcttgaaggaaatgggagagagaataggctaattctgtattgcttcagaaaccaaatggaaacaattaaattccattagagaaacggttggaaaatatgaggaggatttagttcagtacgaggaagctgtttctaatactttttgttggttaaaaatacattccgctgctgtggaaagcctgtagctgccaggagtgttacagagggcattcctcccttgagttgacatttgtgccaaaccggcttttagggcttctccagcttttaagatgcgataatgataagatgatcatcgggaaaacatccctcagatgaaacgttcacaggctggctctgaaaactggcattcagatgattgcggctcccccatactgtaggaatattgtttatggcttaaggttgcctcgctcctcatctgtaatcagtgaaagtttatccagaggttaattaccggttttctggtgggtatctgggaactgaggatgggagattaactgttgtatatgaccatagtaaagcaaaagactgttagagaatgagtaaacgttcgttttcctccctacagaatttacagttactctctgtccattccactcactactgtcttcatcacacacacagaggcaaacgtctgattcagatagccaggtgtgccatgcatgcactccaccatattgtgatctcttcgaggcttgtttctgtcccctgtcctccacagtcctggattgttaatgaatagttcatacatgtttgttaaataaatataccttctttaaaatta

SEQ ID NO: 20017 - DNA, 1007 bp, Homo sapiens
  source 1..1007: mol_type = unassigned DNA
gggctgaagtgcctatttggccgaaagccgtggcagagtggcaaggcagggccaggggaagcggctccgccgccggggccgggcccctgtttggccggtgcccggtccttagcctgaaggtggcgggcttccgccagaagcccctggcggaagcggtgcccgcgtgcgggccagagtgtgggtgtgcaggtctctgggcggcccaaagggggtgcccctgcctggtaacctagcgggagggtggggacggcggggagggcggcgggcgcggggcacggctccgctgctcagggcaggctccgcccccaggggcgcggatttaaaaggatcgaaggcagccccggagcccagcggccgggaagcgcgcccgaacgaagccgcggcccgggcacagccatggcccggcgggcggggggcgctcggatgttcggcagcctcctgctcttcgccctgctcgctgccggcgtcgccccgctcagctgggatctcccggagccccgcagccgagccagcaagatccgagtgcactcgcgaggcaacctctgggccaccggtcacttcatgggcaagaagagtctggagccttccagcccatccccattggggacagctccccacacctccctgagggaccagcgactgcagctgagtcatgatctgctcggaatcctcctgctaaagaaggctctgggcgtgagcctcagccgccccgcaccccaaatccagtacaggaggctgctggtacaaatactgcagaaatgacaccaataatggggcagacacaacagcgtggcttagattgtgcccacccagggaaggtgctgaatgggaccctgttgatggccccatctggatgtaaatcctgagctcaaatctctgttactccattactgtgatttctggctgggtcaccagaaatatcgctgatgcagacacagattatgttcctgctgtatttcctgcttccctgttgaattggtgaataaaaccttgctctttacatacaa

SEQ ID NO: 20018 - DNA, 1017 bp, Homo sapiens
  source 1..1017: mol_type = unassigned DNA
gaagagaggctcagagggctgaagtgcctatttggccgaaagccgtggcagagtggcaaggcagggccaggggaagcggctccgccgccggggccgggcccctgtttggccggtgcccggtccttagcctgaaggtggcgggcttccgccagaagcccctggcggaagcggtgcccgcgtgcgggccagagtgtgggtgtgcaggtctctgggcggcccaaagggggtgcccctgcctggtaacctagcgggagggtggggacggcggggagggcggcgggcgcggggcacggctccgctgctcagggcaggctccgcccccaggggcgcggatttaaaaggatcgaaggcagccccggagcccagcggccgggaagcgcgcccgaacgaagccgcggcccgggcacagccatggcccggcgggcggggggcgctcggatgttcggcagcctcctgctcttcgccctgctcgctgccggcgtcgccccgctcagctgggatctcccggagccccgcagccgagccagcaagatccgagtgcactcgcgaggcaacctctgggccaccggtcacttcatgggcaagaagagtctggagccttccagcccatccccattggggacagctccccacacctccctgagggaccagcgactgcagctgagtcatgatctgctcggaatcctcctgctaaagaaggctctgggcgtgagcctcagccgccccgcaccccaaatccaggaggctgctggtacaaatactgcagaaatgacaccaataatggggcagacacaacagcgtggcttagattgtgcccacccagggaaggtgctgaatgggaccctgttgatggccccatctggatgtaaatcctgagctcaaatctctgttactccattactgtgatttctggctgggtcaccagaaatatcgctgatgcagacacagattatgttcctgctgtatttcctgcttccctgttgaattggtgaataaaaccttgctctttacatacaa

SEQ ID NO: 20019 - DNA, 1354 bp, Homo sapiens
  source 1..1354: mol_type = unassigned DNA
gtgctgtgaggcttgccccgcggacagtaaacttgcaggggcgagagggagggacatcgattaaacctaaatcgtgggcgttcagtcctcagggcaccggagcgcgtgaaaactccagcggactctgctggaaaggagatcatgccctctaagtctctttccaacctctcggtgaccaccggcgcgaatgagagcggttccgttcccgaggggtgggaaagggatttcctgccggcctcggacgggaccaccacggagttggtgatccgctgtgtgatcccgtccctctacctgctcatcatcaccgtgggcttgctgggcaacatcatgctggtgaagatcttcatcaccaacagcgccatgaggagcgtccccaacatcttcatctctaacctggcggccggggacttgctgctgctgctcacctgcgtcccggtggacgcctcgcgctacttcttcgacgagtggatgtttggcaaggtgggctgcaaactgatccctgtcatccagctcacttccgtgggggtttccgtgttcactctcactgccctcagcgccgacaggtacagagccatcgttaaccccatggacatgcagacgtcaggggcattgctgcggacctgtgtgaaggccatgggtatctgggtggtctccgtgttgctggcagttcccgaagcggtgttttcagaagtggctcgcatcagtagcttggataatagcagcttcacagcatgtatcccataccctcaaacagatgaattacatccaaagattcattcagtgctcattttcttggtctatttcctcataccacttgctattattagcatttattattatcatattgcaaagaccttaattaaaagcgcacacaatcttcctggagaatacaatgaacataccaaaaaacagatggaaacacggaaacgcctggctaaaattgtgcttgtctttgtgggctgtttcatcttctgttggtttccaaaccacatcctttacatgtatcggtctttcaactataatgagattgatccatctctaggccacatgattgtcaccttagttgcccgggttctcagttttggcaattcttgtgtcaacccatttgctctttacctactcagtgaaagcttcaggaggcatttcaacagccaactctgctgtgggaggaagtcctatcaagagagaggaaccagctacctactcagctcttcagcggtgcgtatgacatctctgaaaagcaatgctaagaacatggtgaccaattctgttttactaaatgggcacagcatgaagcaggaaatggcactgtgattttggccattcaactcactacctggagagaacttagtaa

SEQ ID NO: 20020 - DNA, 3298 bp, Homo sapiens
  source 1..3298: mol_type = unassigned DNA
ggcgttcccggccggacaggcggggcgtcggggcgcgggctggggccgctgtcagtcagtccactggctcccgcgccgcgtctgtgtccgtcgctcggagggtggaagccggggtctcgcgggccgcgggccgcatgactcctctctgcctcaattgctctgtcctccctggagacctgtacccagggggtgcaaggaaccccatggcttgcaatggcagtgcggccagggggcactttgaccctgaggacttgaacctgactgacgaggcactgagactcaagtacctggggccccagcagacagagctgttcatgcccatctgtgccacatacctgctgatcttcgtggtgggcgctgtgggcaatgggctgacctgtctggtcatcctgcgccacaaggccatgcgcacgcctaccaactactacctcttcagcctggccgtgtcggacctgctggtgctgctggtgggcctgcccctggagctctatgagatgtggcacaactaccccttcctgctgggcgttggtggctgctatttccgcacgctactgtttgagatggtctgcctggcctcagtgctcaacgtcactgccctgagcgtggaacgctatgtggccgtggtgcacccactccaggccaggtccatggtgacgcgggcccatgtgcgccgagtgcttggggccgtctggggtcttgccatgctctgctccctgcccaacaccagcctgcacggcatccggcagctgcacgtgccctgccggggcccagtgccagactcagctgtttgcatgctggtccgcccacgggccctctacaacatggtagtgcagaccaccgcgctgctcttcttctgcctgcccatggccatcatgagcgtgctctacctgctcattgggctgcgactgcggcgggagaggctgctgctcatgcaggaggccaagggcaggggctctgcagcagccaggtccagatacacctgcaggctccagcagcacgatcggggccggagacaagtgaccaagatgctgtttgtcctggtcgtggtgtttggcatctgctgggccccgttccacgccgaccgcgtcatgtggagcgtcgtgtcacagtggacagatggcctgcacctggccttccagcacgtgcacgtcatctccggcatcttcttctacctgggctcggcggccaaccccgtgctctatagcctcatgtccagccgcttccgagagaccttccaggaggccctgtgcctcggggcctgctgccatcgcctcagaccccgccacagctcccacagcctcagcaggatgaccacaggcagcaccctgtgtgatgtgggctccctgggcagctgggtccaccccctggctgggaacgatggcccagaggcgcagcaagagaccgatccatcctgagtggagccttaaagtggcttcacctggaggggccagagggtcacctggagctggggagacacatctgccttcctctgcagggatgccttcacgtactgtccctagttcagcctagaaattctgaccagcacctcagtttccctcagagggaaacagcaggaggagggatccctgactgctgaggactcacactgaccagacgccacaccttgtgcttcttatctgtccactgccactcccccagttcaaatccttaccctgcagaaatatcacagttagctggggctcagcagtcctccctctggggactccctgccaccactgccagtttctgaaacggtcccactgggtcctcactgtccttcccagttcctgttcaggttctggcaggggcccagggatccaggggacctggttccaatctcagccctgctgtcaccaccttgtcatgcaccatcaagcatatcagtctacctttctttttttctgagacagagtctcactctgtcgcccaggctagagtgcagtggcgcgattttggctcactgcaacctccgcctccggggttcaagcgattctcctgcctcagcctcccgagtagctgggactacaggtgagccccagcatgcccagctaattttttttaatttttagtagagacggggtttcaccatgttggccaggctggtctcaaactcttgacctcaggtgatccgccgacctcggcctcccaaagtcctcggattacaggcatgagccaccacacccggccaatcagtccacctttctaggccttggttccttgcctgaaaaatgaaagaggcgctggctttccacagtgtcatgctttggcactttagctatggttttctttctgtgtgtgtgtaagccactgcttataataaaaccaacaataccctcagactgaaagggcggaagttattatctgcatctttatcaaccccaagccccacttcctccctgacctccccatgccctccccagcctctcccagcacaagtggggcaaagccagcatgcaagcagaccccaccaccacagcccacctccgtcctcacatacgtgcaggctggctcgggagtccagtgagcagagcattggacttggctggccagagggtctctgagggcaagagacatggccaaccaagggcaaggagtgaccctgtggagggttctgccgaactcaatgcagtgagaagagggacagggacaagtagtccttgaaactgagccccattctgaatccctgcaggccaagtcattgctcagccaggactcagttcatggaggaaacttgtcctgctgcagtccctgagtcttgtcctcctgagaggaagccctggcttccaaggctgggagctggaggatgaccttcggtcggtctgtctgggttctccctgcagacagcttcctagctcatgcccatagctcatgctccctgccgagaaagtggaggacgtggtacagggttgcagatgtttagttttaaaaattcaattataaaaataataaatgctcatgatagaaaatttggaaagtgcaaataagcaaaaatgaaaacaattttaaaaatgtaaaacctctcttgccagggaatgggggaagggcaagtgaggagttctttaatgggtgaagagtttcagttttgcaaaatgaaaaagttctggagatcagttgtgcaacaatatgaatatacataacaatactgaactatacactgaaatggttaagatggtacattttatgttatgtgtattttaccacaatttttataaaaagaggattaaatctaaaggaaagaaaaaattaaaaccacccataactttactctgaagcagtaacagtggcatgtttcctccta

SEQ ID NO: 20021 - DNA, 2073 bp, Homo sapiens
  source 1..2073: mol_type = unassigned DNA
aacctggagggtgaaacactcactctctcccagccttccttacgaagcctgtgactttcgtgactgctttctcttttttgttttccttttttcttttttttttttttttcctggctcagcttgaaacagagcctcgtaccaggggaggctcaggccttggattttaatgtcagggatggaaaaacttcagaatgcttcctggatctaccagcagaaactagaagatccattccagaaacacctgaacagcaccgaggagtatctggccttcctctgcggacctcggcgcagccacttcttcctccccgtgtctgtggtgtatgtgccaatttttgtggtgggggtcattggcaatgtcctggtgtgcctggtgattctgcagcaccaggctatgaagacgcccaccaactactacctcttcagcctggcggtctctgacctcctggtcctgctccttggaatgcccctggaggtctatgagatgtggcgcaactaccctttcttgttcgggcccgtgggctgctacttcaagacggccctctttgagaccgtgtgcttcgcctccatcctcagcatcaccaccgtcagcgtggagcgctacgtggccatcctacacccgttccgcgccaaactgcagagcacccggcgccgggccctcaggatcctcggcatcgtctggggcttctccgtgctcttctccctgcccaacaccagcatccatggcatcaagttccactacttccccaatgggtccctggtcccaggttcggccacctgtacggtcatcaagcccatgtggatctacaatttcatcatccaggtcacctccttcctattctacctcctccccatgactgtcatcagtgtcctctactacctcatggcactcagactaaagaaagacaaatctcttgaggcagatgaagggaatgcaaatattcaaagaccctgcagaaaatcagtcaacaagatgctgtttgtcttggtcttagtgtttgctatctgttgggccccgttccacattgaccgactcttcttcagctttgtggaggagtggagtgaatccctggctgctgtgttcaacctcgtccatgtggtgtcaggtgtcttcttctacctgagctcagctgtcaaccccattatctataacctactgtctcgccgcttccaggcagcattccagaatgtgatctcttctttccacaaacagtggcactcccagcatgacccacagttgccacctgcccagcggaacatcttcctgacagaatgccactttgtggagctgaccgaagatataggtccccaattcccatgtcagtcatccatgcacaactctcacctcccagcagccctctctagtgaacagatgtcaagaacaaactatcaaagcttccactttaacaaaacctgaattctttcagagctgactctcctctatgcctcaaaacttcagagaggaacatcccataatgtatgccttctcatatgatattagagaggtagaatggctcttacaactcatgtacccattgctagtttttttttttttaataaacgtgaaaactgagagttagatctggtttcaaaacccaagactgcctgatttttagttatctttccactatcctaactgcctcatgccccttcactagttcatgccaagaacgtgactggaaaggcatggcacctataccttgattaatttccattaatggaaatggttcgtcctgagtcatctacgttccgagtcaggctgtcactcctactaccaatggccactgtgagccacagaaggaagacatgtacgtgctgttctactttatatgatgtgagaagccaacatcagtgtcccttggcagcagtctacaggcataacttgttttattgtgctgaattttattgtgcttctcaaatattgcacttttaaaaaaattgaaagtttgtggcaatgctgttgagcaaatctgctggcatctttcttcccaaaggcatgtgctcacttcatgtctctgtatcaattgtcataattttcgcaataaacttgattattattatatgtgcttatggtga

SEQ ID NO: 20022 - DNA, 13014 bp, Homo sapiens
  source 1..13014: mol_type = unassigned DNA
ggagccgcggggcttccatccttcctttgactgatttttaaattttaatttgtattttccccgccgccccgccccttttcctccgaccccgccctatcgctccccggcttccctgctctttcctttttcccggcttccttcctcgcgtttctttcccctgcgccctcggcttgcctctctccctcctccctcgctctctcccccttctctccccttcttcctcggtttcttccgtcctctctctccccctcctcctcccccgcctcctcctcctgcgctcccgccccctgccccctccccccgtgcctgcagacgcgcggatcgtccatgcgctcctcgcgggcagaatgctgggcagcagcgtcaagagcgtgcagcccgaggtggagctgagcagcggcggcggcgacgagggcgcggacgaaccgcggggcgccggcaggaaggcggcagcggcggacggcagaggcatgctgcccaagcgcgccaaggcgcccggcggcggcggcggcatggccaaggccagcgcggctgagctgaaggtcttcaagtccggcagcgtggacagccgtgtccccggcgggccgcccgcctccaacctgcgcaagcagaagtcactcaccaacctctcttttctcacggactccgagaaaaagctgcagctttatgagcccgaatggagcgacgatatggccaaggcgcccaaaggcttaggcaaggtggggtccaagggccgtgaagctccgctgatgtccaagacgctgtccaagtcggagcactcgctcttccaggccaagggcagcccggcgggcggcgccaagacccccctggctccgctcgcgcccaacctgggaaagccgagccggatccctcgaggaccctatgcggaggtcaagccgctcagcaaggcgcctgaagcggccgtgagcgaagatggcaaatcggacgacgagctgctctccagcaaggccaaggcgcaaaagagctctgggcctgtcccctctgccaagggccaggaggagcgcgccttcctcaaggtggaccccgagctggtggtgaccgtgctgggagacctggagcagctgctcttcagccagatgctggacccagagtcccagagaaagaggacagtgcagaatgtcctggatctccggcagaacctggaagagaccatgtccagcctgcgagggtcccaggtgactcacagctccctggagatgacctgctacgacagcgatgatgccaacccacgcagcgtgtccagcctctccaaccgctcgtcccctctgtcatggcgctatggccagtccagtccgcggctgcaggctggtgacgcgccctctgtgggtgggagctgccgctcggaggggacgcccgcctggtacatgcacggcgaacgggcccactactcccacaccatgcccatgcgcagccccagcaagctcagccatatctcccgcctggagctggtcgaatccctggactcggatgaggtggacctcaagtccggctacatgagcgacagtgacctcatgggcaagaccatgacggaggatgatgacatcactaccggctgggatgaaagcagctccatcagtagtggactcagcgatgcctcagacaatctcagttcagaagaattcaatgccagctcctcactcaactccctcccaagtactcccactgcttctcgcaggaactcaacaatagtgctacgcacagactcagagaagcgctcactggcagaaagtgggctgagctggtttagtgaatcagaggagaaagcccctaaaaaactggagtacgacagtggtagcctgaagatggaacctgggacttctaagtggcggagggagcggcctgagagctgtgatgattcatccaagggtggagaactgaaaaagcccatcagcctgggccaccctggttccctgaagaagggcaagaccccacctgtggctgtaacttcccccatcactcacacagcccagagtgccctcaaagtcgcaggcaaacctgagggcaaagctacagacaagggtaagcttgcagtgaagaatactgggctccaacgctcctcctctgatgctggtcgggaccgcctgagtgatgctaagaagcccccctcgggcattgctcgcccctccacttcgggatcctttggctacaagaagcctcctcctgccacaggcacagccactgtcatgcaaactggtggttcagccactctcagcaagatccagaagtcctcaggcatccctgtcaagccagtaaatgggcgcaagactagcttagatgtttccaacagtgcagagccaggattcctggctcctggagcccgttctaacatccagtaccgcagcctgccccggccagccaagtcaagttctatgagcgtgaccggcgggcggggtggacctcgccctgtgagcagcagcattgaccccagtctcctcagcaccaagcagggaggccttacgccttccagactgaaggagcctaccaaggtagccagtgggcggaccactccagcccctgtcaatcagacagatcgggaaaaggagaaggccaaagccaaggcagtggccttggactcagacaacatctccttgaagagtattggctccccagaaagtactcccaagaaccaagcaagccaccccacagccaccaagctggcagagctgccaccaacccctctcagggccacagcgaagagctttgtcaaaccaccctcactagccaatcttgacaaggtcaactccaacagtctggatctaccatcatccagtgataccacccatgcttcaaaggtcccagatctgcatgctacaagctcagcatctgggggccctctcccttcctgcttcacccccagtccggcacccatcctcaatattaactcagccagcttctcccagggcctggagctaatgagtggtttcagtgtgccaaaagagacccgcatgtaccccaaactctcaggcctgcacaggagcatggagtccctccagatgccaatgagcctccccagtgccttccccagcagtactcccgtccccaccccacctgctccccctgctgctcccacagaagaagagacggaagagctgacttggagtggaagccccagagctgggcaactggacagtaatcagcgggatcggaacactcttcccaagaaagggctcaggtaccagcttcagtcccaggaggagaccaaggagaggcgacattcccataccattggtgggctgcctgaatccgatgaccagtcagagctgccttctccccctgcacttcccatgtctctgagtgcaaagggccaacttaccaacatagtgagtcccactgcggccaccacgccaagaatcacccgctccaacagcatccccacccacgaggcggccttcgagctgtacagcggctcccaaatggggagcaccctgtccctggccgagagacccaagggaatgattcggtcaggatccttccgagaccccacggacgatgttcacggctcagtgctgtccctggcctccagtgcctcctccacctactcctcagctgaggagaggatgcaatctgagcaaatccggaagcttcgtagggaactggaatcatcccaggaaaaagtggccaccttgacgtctcagctttctgccaatgctaatctggtggctgcttttgagcagagcctggtgaatatgacatcccgcctgcgacacctggcagagacggccgaggagaaggacactgagctgctggatttgcgagaaaccatagactttctgaagaaaaagaactctgaggcccaggcagtcattcagggagcccttaatgcctcagaaaccacacccaaagaacttcggatcaagagacaaaactcctcagatagcatctcaagcctcaacagcatcactagccattccagcatcggcagcagcaaggatgctgatgcgaaaaagaagaaaaaaaagagttggcttcgaagttccttcaacaaagcgttcagtataaaaaaggggcccaagtcagcttcctcatactcggatatagaggagattgctacacccgactcttcagccccctcatcccccaaactacagcatggttctacagagactgcttcaccctccatcaagtcctccacctcgtcctccgtgggcactgatgtcaccgagggccctgctcacccagccccccacactaggctgttccatgcaaatgaggaggaggagccagagaagaaggaggtatcggagctgcgctctgagctatgggagaaggaaatgaagcttacagacatccgcttggaggccctcaactctgcccaccaactggatcagcttcgggagaccatgcacaacatgcagttggaggtggacctgctgaaagcagagaatgaccgactgaaggtagccccaggcccctcatcaggctccactccagggcaggtccctggatcatctgcattatcttccccacgccgctccctaggcctggcactcacccattccttcggccccagtcttgcagacacagacctgtcacccatggatggcatcagtacttgtggtccaaaggaggaagtgaccctccgggtggtggtgaggatgcccccgcagcacatcatcaaaggggacttgaagcagcaggaattcttcctgggctgtagcaaggtcagtggaaaagttgactggaagatgctggatgaagctgttttccaagtgttcaaggactatatttctaaaatggacccagcctctaccctgggactaagcactgagtccatccatggctacagcatcagccacgtgaaacgagtgttggatgcagagccccccgagatgcctccttgccgtcgaggtgtcaataacatatcagtctccctcaaaggtctgaaggagaaatgcgtcgacagcctggtgttcgagacgctgatccccaagccgatgatgcagcactacataagcctcctgctgaagcaccggcgcctcgtcctctcgggccccagcggcacgggcaagacctacctgaccaatcgcttggccgagtacctggtggagcgctctggccgtgaggtcacagagggcatcgtcagcaccttcaacatgcaccagcagtcttgcaaggatctgcaactgtatctttccaacctagccaaccagatagaccgggaaacaggaattggggatgtgcccctggtgattctattggatgacctgagtgaagcaggctccatcagtgagttggtcaatggggccctcacctgcaagtatcataaatgtccctatattataggtaccaccaatcagcctgtaaaaatgacacccaaccatggcttgcacttgagcttcaggatgttgaccttctccaacaacgtggagccagccaatggcttcctggttcgttacctgaggaggaagctggtagagtcagacagcgacatcaatgccaacaaggaagagctgcttcgggtgctcgactgggtacccaagctgtggtatcatctccacaccttccttgagaagcacagcacctcagacttcctcatcggcccttgcttctttctgtcgtgtcccattggcattgaggacttccggacctggttcattgacctgtggaacaactctatcattccctatctacaggaaggagccaaggatgggataaaggtccatggacagaaagctgcttgggaggacccagtggaatgggtccgggacacacttccctggccatcagcccaacaagaccaatcaaagctgtaccacctgcccccacccaccgtgggccctcacagcattgcctcacctcccgaggataggacagtcaaagacagcaccccaagttctctggactcagatcctctgatggccatgctgctgaaacttcaagaagctgccaactacattgagtctccagatcgagaaaccatcctggaccccaaccttcaggcaacactttaagggttcggcaatcactgtcacccccggacagcagaacgctggcatcagctatcttagctcctcctctcccctctcctctttcagagcactggctctccagccccaggaggagaacaggagggaggaggagatgaaagaggagggacaggttcttggtgctgtacctttgagaacttcctaggaaggaatggtggggtggcgtttgggaacttgtgccccctaaacacatttactggcctcctctaatgactttggggaaaagatgattctgggtctttcccttgacttcttgtttcaattacaaactcctgggctttctggggaggggttcagaaaacatcaaaacactgcagcagttcctaaatgattctcacaagcaaccctgagagagacagtcttgtgagggagatctgggggaggcaggaagctcctcagattttctcacagacccttcccaattccatcaccactgccaacaactcctcccccagagatctggctggagcccagaaaaagaagcatgtggtttaaaaaatgtttaaatcaatctgtaaaaggtaaaaatgaaaaacaaaaacaagcaaacaaacaaaaaacaatggaaaagatgaagctggagagagaggaaccagttgccaaggtagagagctgcccgctcctgccctctggatgacataggggacatcaacaagacggctgccaacctgagaagtcaccaaaccacaaaaataaccttacagccttcagggaaagactaccagctctgtctttctaccctctaatttaacaatgcataagagtcaataaaccctacttttttatttttggtttttattttgttttcatttttttctcccatttgcctatttatttttttgtttcccttttttttttctttttccgtttttccatttcctcacatgtccacgagatgcttgggttgcttttccaggggctagtttggcttttccaagtgggttttctttggagaatctgatgccatgcaattggcatgacacctgccatgccactatctttggcatccatggggcttatatgagacatgaagcattggctcagaagtagagggagaagaggaacccagttcccttgacttcccttttgagagcacacgttctgctgggtagctcaattgccagcctctgtcatgagaaggtatagccccatcttgatagaagagttactccgagctttatcatggaccagaggaaaaccagaaaactgaaaacattcctctgtcttgtggccagtttggcctttcactgcactattctgatggtgcctgactgaatccaaatatcctagctggctcttactatttttcacaaatgagtattcacatataagagatgaacatccatgtgagatcatcccaatcagaatataagactcaaggagtttgacttggtggccaatacctgccttccaaagagatcctacctttgcagatttgctcctttcccattgccttgaaggtctggcaatccctgttctttcatttgacaagtacttactgagtactcactatatacaaatcattaggttaaaacagacacacacacacacacacacacacacacacacacacacacacacacaagacctgggcccttaagtttacagtccagcaggaaatgttaacctccattcagctacgcccccttgttatctagaccttcgggatcatctaagaaatgtagctgaaacccaaggagccagctagaaagaagcttttgattagatgtacaatacattgggggcagaagatctgggatcaattaagatggagcctgaaggactatggaatcttgcttgtcaggaatgggcaagtctacttcctgccatttctgaaagccccgcgggaccagcttctaggctgagctgcctagtaggctgaagcttcaggactctgcaggtcaaggatatgtgatgagcaccggcctaagtgtttgctcttcagattcctaagtagcacaagactttatcagaatctataggcataccaacctggatcactcttccacccaaccgaggagtagatgcatctgaatcttcatatcggtatattaagtccaaaagatggtccgggctgcccctcacaaaagcttctgcatccacgtggtaagctcccatggatgacagggttctgtatgatggagactattattgctattgctgctaattccatgagctgtgaagatccctaaccaactcagctgtaacatatgcaattctgtggtgggaagaggctgtgtgtccaaggatggtgctgaaatcactgccttaaggtctctgctgtgcagaatgaggaggcccccgagctggctgttctaacttagaaggaagagaagactggatgggcctgcttgggatctaggcctcttctaaaccctatcctaagctccagttccatggcaaggctcagacttttaatgccatcttaatctgatggttgagcgcttcactctattttctggtgctgcccagccagtgccttctgccatggatgttactggctacttgagaaaaaggagaggggagaaccccttctttcattccaactgcctccgaccccaaagggattcttggctctctggtaaccatggataccaccatgaattttatttggatcctcagcaggttgattctggaggcctcatgctatgactttttatttctcttcctgggatccaccaccctctactctcagctgactgctgcatttaggccaggtctccaattgctttcctccagaaagtgtgttcccgtctagtgaggtagtattgaagcctcggctttccctctggagcctgggaccctgtttacagttgcacatctgggcccctcactgtggggattgatcattctcatgaaggaatcacagttatatggcaactgcagaaggctgagcctcctcatggtgctataaccccttgggacactcatccagacttctctgaagcagaaaacctgagctccccactcactgccctagaatttatggcaaggagcaaatctacagcattctctcccacctacgtcctgcttcttggttgagactactgggatccttcagaaaagaaacactgggtcccatagctaaattctcaaccgccaggcaccttcagaagaatccagcctaatactggaatttgtgctattatcttcctctccagccccccaactccatccctcaccacagttgtctaggaaatgacatgaattcaatatctaatgtcaaccaatggggagagccacaactccaggagaggttcctgagctgagtcccttaatttctggatgaagaagaccaacaagttttgtccaatgtatttgtttctcagaccttgcctaggcactaaaaataaaatactaggtcattggaggctaatgtgggacctgatgtctgcgtgtgtgtgtgtgtgtgtgtgtgtgtgtgtctccctctctcacacacacaagagcagtttgctgttgctgtttcctaccttctgaggcttcaaagtattttttaaaatctatgctttgtggcagctctacggtgcttatctctgtctttgtgtcaatccttaagtacccatgtctttttcatgtctaaccattgggaaggtagaggctggcagggaagacaaatctgctacaagtccatgggaagaccctacaatgaaatgttcattggttggtatactgttttagtcttgaattgccaactttccaactgatctatccatattccttaagtactaaagacaaaatagagggcttctttttctctcttaatgtcttgccttctggttttcctggtttgcaagactaagtgtacctaatctcaccatctcttcacttctagctctctgaaacaagggtcacactactcagagggataaccccttacagtggtctgaggagtaactatttcctaaagtattctaaaagagtaggaagagagaaatggtagcctgctgcttctcacagacacctcacatcctcacttgggatggcatccacatagaaaccctgcatttaggtaaaatttgcctgactgaaggggactcagtcctccaaatcaaggtcaagaagatatctgcatgagaccttaagaactctttattgccattatttggagagggcgggggaattgtcctaatcacacatttaacacagggaataagtgctgaagtgacccagatcaccaagcgcagttcctcatcatactttatttttgctttccttattccttggcactgactaagctaaagttaagaagccgacttcataagccaacccctgtgatgggatggaaaaatgggcttttgcagagggtttattaatagagatggatatactactcacaagttctggctcatggctccactgagaaggccatagtaataaaatgatcttatgaacactgttccccaaaggccaaagcctgaagatattgccccttataatccaatcagccttatattttaataagtcctgaatcaacctgactacggatatatggggccaccagggtgcatgggtgcatgtctgctcagcctagccctggaagtgagcactgccggccacagatcctgggaaaggtggtagtaacccagaagatgtagccttgaagggaggatacctatcaaaatgccaaagctgcagggacacgaagacggttgaaaattcaacctgtgtatactagatccttccagtttgatggtttggtcattcttcttcatgattataccatggagaattttctgtgacaagggtggtcatggaagtaagtgagtgatcccctggtttctcattccttaaagcagtggttcgcaaagtatggcacaagaccagcagcatcagcagcctttgggaacttgttagaaacgaaaattctcaatcccatcccagatctgctgaatcagaaactctaatgagaggacccggcaatccacgttttaataagccctcctggtgattctgatgcacactaaattcaactgttttaaagggaaagccctttatagtattggagttcccacactgagaggctttggggcccaaaataagaaggttctaggttgtcattcagactttaacattaatttcaaagtcacctttctcatgcttccttgtgtttctgtttttccatttatgattttaacaaagaaaggtatgtgtgcttttgggtggaagttaggagaatgtttgtgtctttcctagttgaatacaaccttcagagaaaaaccttatgccttggaaattactacctggcacacaaaggggcttcaacaaggaaaagcagttggaggtctcttccagattgctcttctgccgaattatttgtatctattccgagctgattatgtaataggatggaaaaagtaaaaaaaaaaaaaaaaatctaatttgtatttccatgacaacgtgttctcccagcaacatccctctcctttatttgagttataaagggcactgctgggcctgagaaccaggccagaacctccttctgtatggcagctaacagtgtagggctccagtatcccaggaaggccccttatccacactccactcagctcataggagagtcttgcataatgaagacacagacctgggcacttcagtccttgtgctcctcctctcttttccccacagcaggacctggatacagaagtactcagccaaggtgacagaataaaatcctttttttgttgttttctgtttgtttgtttgttttggagaaggagtctcgctttgtcacccaggctggtgtgcagtggcacgatctcggctcactgcaacctccgcctcccaggttcaagcgattctcctgtctcagcctcctgagtagctgggattacagacgtgcgccatcacgcccagctaatttttgtatttttagtagatacggagttttgccttgttggccaggctgtgctggagctcctgacctcaggtgattcacctgccacagcctcccaaagtgctgggattacaggcgtgagccacagcaccctgccaaataagatcctttttaaaaaatatctgaaaaaagcttcatatctttacaaactcataaaatagctgattgggccatggaggagatgaggctgtttagaactggttttgtttcaagtttgtcaattttccctgtatgagaacttgggtaaagcacaaagaaacatacagtgctagtaacaggtctcctgcgccctggaactaagtgtttggaggaaggactaaaccccgggggaggtgagtataaaataattccactaagatcacctcctcagtccccagaaggctgatggtggatcctctggccatctcctgtggggtcttactgctcctctgccatttctctatgcctgaagacacgaagatgatatcaaggcagagctaccatatcgcagccagtctctaggctactgctgtgcagtggctcccactttctaatgcttttttgtttttgctttttctaacaaaacaatcttttttcaaaatgaattccaacccctgctagcttccttccccgcctccatactgttttaggcagcaccgtttatgtgacagagtccgtgtttctcaaatgcatggtgttcctcaggtggagagtgggcagaagtttttgcaacactttttttttaagttattgggtgcaaaatcccaaaccaggatatgtgtatgtctgtgtgtttatgttttttatttgaccctcccctctttcaacctacccccttttatatctaatgtagaaaaagcgaaattgaatctggaaagcaaactgttgtatatagttgcggtaacaatcatgaagagagagccgggctgtcccctcagtaattcattttaaataacaaattatttaaaaataaaattcatgccagagccagctgaagaggccttccttcatcaccactgaggccacccccaatctgggccctctgtccatctggcatgtctcctcccagcaagattcatctgttcaatgccatttgcgtttcaataaagttatctcctgtactgtccactg

SEQ ID NO: 20023 - DNA, 13091 bp, Homo sapiens
  source 1..13091: mol_type = unassigned DNA
cacgggactgacaggcaggcaggccgcgggctgggatccggacaccaaagcaaaagcaccgctgggcgccggaggagccgcggggcttccatccttcctttgactgatttttaaattttaatttgtattttccccgccgccccgccccttttcctccgaccccgccctatcgctccccggcttccctgctctttcctttttcccggcttccttcctcgcgtttctttcccctgcgccctcggcttgcctctctccctcctccctcgctctctcccccttctctccccttcttcctcggtttcttccgtcctctctctccccctcctcctcccccgcctcctcctcctgcgctcccgccccctgccccctccccccgtgcctgcagacgcgcggatcgtccatgcgctcctcgcgggcagaatgctgggcagcagcgtcaagagcgtgcagcccgaggtggagctgagcagcggcggcggcgacgagggcgcggacgaaccgcggggcgccggcaggaaggcggcagcggcggacggcagaggcatgctgcccaagcgcgccaaggcgcccggcggcggcggcggcatggccaaggccagcgcggctgagctgaaggtcttcaagtccggcagcgtggacagccgtgtccccggcgggccgcccgcctccaacctgcgcaagcagaagtcactcaccaacctctcttttctcacggactccgagaaaaagctgcagctttatgagcccgaatggagcgacgatatggccaaggcgcccaaaggcttaggcaaggtggggtccaagggccgtgaagctccgctgatgtccaagacgctgtccaagtcggagcactcgctcttccaggccaagggcagcccggcgggcggcgccaagacccccctggctccgctcgcgcccaacctgggaaagccgagccggatccctcgaggaccctatgcggaggtcaagccgctcagcaaggcgcctgaagcggccgtgagcgaagatggcaaatcggacgacgagctgctctccagcaaggccaaggcgcaaaagagctctgggcctgtcccctctgccaagggccaggaggagcgcgccttcctcaaggtggaccccgagctggtggtgaccgtgctgggagacctggagcagctgctcttcagccagatgctggacccagagtcccagagaaagaggacagtgcagaatgtcctggatctccggcagaacctggaagagaccatgtccagcctgcgagggtcccaggtgactcacagctccctggagatgacctgctacgacagcgatgatgccaacccacgcagcgtgtccagcctctccaaccgctcgtcccctctgtcatggcgctatggccagtccagtccgcggctgcaggctggtgacgcgccctctgtgggtgggagctgccgctcggaggggacgcccgcctggtacatgcacggcgaacgggcccactactcccacaccatgcccatgcgcagccccagcaagctcagccatatctcccgcctggagctggtcgaatccctggactcggatgaggtggacctcaagtccggctacatgagcgacagtgacctcatgggcaagaccatgacggaggatgatgacatcactaccggctgggatgaaagcagctccatcagtagtggactcagcgatgcctcagacaatctcagttcagaagaattcaatgccagctcctcactcaactccctcccaagtactcccactgcttctcgcaggaactcaacaatagtgctacgcacagactcagagaagcgctcactggcagaaagtgggctgagctggtttagtgaatcagaggagaaagcccctaaaaaactggagtacgacagtggtagcctgaagatggaacctgggacttctaagtggcggagggagcggcctgagagctgtgatgattcatccaagggtggagaactgaaaaagcccatcagcctgggccaccctggttccctgaagaagggcaagaccccacctgtggctgtaacttcccccatcactcacacagcccagagtgccctcaaagtcgcaggcaaacctgagggcaaagctacagacaagggtaagcttgcagtgaagaatactgggctccaacgctcctcctctgatgctggtcgggaccgcctgagtgatgctaagaagcccccctcgggcattgctcgcccctccacttcgggatcctttggctacaagaagcctcctcctgccacaggcacagccactgtcatgcaaactggtggttcagccactctcagcaagatccagaagtcctcaggcatccctgtcaagccagtaaatgggcgcaagactagcttagatgtttccaacagtgcagagccaggattcctggctcctggagcccgttctaacatccagtaccgcagcctgccccggccagccaagtcaagttctatgagcgtgaccggcgggcggggtggacctcgccctgtgagcagcagcattgaccccagtctcctcagcaccaagcagggaggccttacgccttccagactgaaggagcctaccaaggtagccagtgggcggaccactccagcccctgtcaatcagacagatcgggaaaaggagaaggccaaagccaaggcagtggccttggactcagacaacatctccttgaagagtattggctccccagaaagtactcccaagaaccaagcaagccaccccacagccaccaagctggcagagctgccaccaacccctctcagggccacagcgaagagctttgtcaaaccaccctcactagccaatcttgacaaggtcaactccaacagtctggatctaccatcatccagtgataccacccatgcttcaaaggtcccagatctgcatgctacaagctcagcatctgggggccctctcccttcctgcttcacccccagtccggcacccatcctcaatattaactcagccagcttctcccagggcctggagctaatgagtggtttcagtgtgccaaaagagacccgcatgtaccccaaactctcaggcctgcacaggagcatggagtccctccagatgccaatgagcctccccagtgccttccccagcagtactcccgtccccaccccacctgctccccctgctgctcccacagaagaagagacggaagagctgacttggagtggaagccccagagctgggcaactggacagtaatcagcgggatcggaacactcttcccaagaaagggctcaggtaccagcttcagtcccaggaggagaccaaggagaggcgacattcccataccattggtgggctgcctgaatccgatgaccagtcagagctgccttctccccctgcacttcccatgtctctgagtgcaaagggccaacttaccaacatagtgagtcccactgcggccaccacgccaagaatcacccgctccaacagcatccccacccacgaggcggccttcgagctgtacagcggctcccaaatggggagcaccctgtccctggccgagagacccaagggaatgattcggtcaggatccttccgagaccccacggacgatgttcacggctcagtgctgtccctggcctccagtgcctcctccacctactcctcagctgaggagaggatgcaatctgagcaaatccggaagcttcgtagggaactggaatcatcccaggaaaaagtggccaccttgacgtctcagctttctgccaatgctaatctggtggctgcttttgagcagagcctggtgaatatgacatcccgcctgcgacacctggcagagacggccgaggagaaggacactgagctgctggatttgcgagaaaccatagactttctgaagaaaaagaactctgaggcccaggcagtcattcagggagcccttaatgcctcagaaaccacacccaaagaacttcggatcaagagacaaaactcctcagatagcatctcaagcctcaacagcatcactagccattccagcatcggcagcagcaaggatgctgatgcgaaaaagaagaaaaaaaagagttgggtctatgagcttcgaagttccttcaacaaagcgttcagtataaaaaaggggcccaagtcagcttcctcatactcggatatagaggagattgctacacccgactcttcagccccctcatcccccaaactacagcatggttctacagagactgcttcaccctccatcaagtcctccacctcgtcctccgtgggcactgatgtcaccgagggccctgctcacccagccccccacactaggctgttccatgcaaatgaggaggaggagccagagaagaaggaggtatcggagctgcgctctgagctatgggagaaggaaatgaagcttacagacatccgcttggaggccctcaactctgcccaccaactggatcagcttcgggagaccatgcacaacatgcagttggaggtggacctgctgaaagcagagaatgaccgactgaaggtagccccaggcccctcatcaggctccactccagggcaggtccctggatcatctgcattatcttccccacgccgctccctaggcctggcactcacccattccttcggccccagtcttgcagacacagacctgtcacccatggatggcatcagtacttgtggtccaaaggaggaagtgaccctccgggtggtggtgaggatgcccccgcagcacatcatcaaaggggacttgaagcagcaggaattcttcctgggctgtagcaaggtcagtggaaaagttgactggaagatgctggatgaagctgttttccaagtgttcaaggactatatttctaaaatggacccagcctctaccctgggactaagcactgagtccatccatggctacagcatcagccacgtgaaacgagtgttggatgcagagccccccgagatgcctccttgccgtcgaggtgtcaataacatatcagtctccctcaaaggtctgaaggagaaatgcgtcgacagcctggtgttcgagacgctgatccccaagccgatgatgcagcactacataagcctcctgctgaagcaccggcgcctcgtcctctcgggccccagcggcacgggcaagacctacctgaccaatcgcttggccgagtacctggtggagcgctctggccgtgaggtcacagagggcatcgtcagcaccttcaacatgcaccagcagtcttgcaaggatctgcaactgtatctttccaacctagccaaccagatagaccgggaaacaggaattggggatgtgcccctggtgattctattggatgacctgagtgaagcaggctccatcagtgagttggtcaatggggccctcacctgcaagtatcataaatgtccctatattataggtaccaccaatcagcctgtaaaaatgacacccaaccatggcttgcacttgagcttcaggatgttgaccttctccaacaacgtggagccagccaatggcttcctggttcgttacctgaggaggaagctggtagagtcagacagcgacatcaatgccaacaaggaagagctgcttcgggtgctcgactgggtacccaagctgtggtatcatctccacaccttccttgagaagcacagcacctcagacttcctcatcggcccttgcttctttctgtcgtgtcccattggcattgaggacttccggacctggttcattgacctgtggaacaactctatcattccctatctacaggaaggagccaaggatgggataaaggtccatggacagaaagctgcttgggaggacccagtggaatgggtccgggacacacttccctggccatcagcccaacaagaccaatcaaagctgtaccacctgcccccacccaccgtgggccctcacagcattgcctcacctcccgaggataggacagtcaaagacagcaccccaagttctctggactcagatcctctgatggccatgctgctgaaacttcaagaagctgccaactacattgagtctccagatcgagaaaccatcctggaccccaaccttcaggcaacactttaagggttcggcaatcactgtcacccccggacagcagaacgctggcatcagctatcttagctcctcctctcccctctcctctttcagagcactggctctccagccccaggaggagaacaggagggaggaggagatgaaagaggagggacaggttcttggtgctgtacctttgagaacttcctaggaaggaatggtggggtggcgtttgggaacttgtgccccctaaacacatttactggcctcctctaatgactttggggaaaagatgattctgggtctttcccttgacttcttgtttcaattacaaactcctgggctttctggggaggggttcagaaaacatcaaaacactgcagcagttcctaaatgattctcacaagcaaccctgagagagacagtcttgtgagggagatctgggggaggcaggaagctcctcagattttctcacagacccttcccaattccatcaccactgccaacaactcctcccccagagatctggctggagcccagaaaaagaagcatgtggtttaaaaaatgtttaaatcaatctgtaaaaggtaaaaatgaaaaacaaaaacaagcaaacaaacaaaaaacaatggaaaagatgaagctggagagagaggaaccagttgccaaggtagagagctgcccgctcctgccctctggatgacataggggacatcaacaagacggctgccaacctgagaagtcaccaaaccacaaaaataaccttacagccttcagggaaagactaccagctctgtctttctaccctctaatttaacaatgcataagagtcaataaaccctacttttttatttttggtttttattttgttttcatttttttctcccatttgcctatttatttttttgtttcccttttttttttctttttccgtttttccatttcctcacatgtccacgagatgcttgggttgcttttccaggggctagtttggcttttccaagtgggttttctttggagaatctgatgccatgcaattggcatgacacctgccatgccactatctttggcatccatggggcttatatgagacatgaagcattggctcagaagtagagggagaagaggaacccagttcccttgacttcccttttgagagcacacgttctgctgggtagctcaattgccagcctctgtcatgagaaggtatagccccatcttgatagaagagttactccgagctttatcatggaccagaggaaaaccagaaaactgaaaacattcctctgtcttgtggccagtttggcctttcactgcactattctgatggtgcctgactgaatccaaatatcctagctggctcttactatttttcacaaatgagtattcacatataagagatgaacatccatgtgagatcatcccaatcagaatataagactcaaggagtttgacttggtggccaatacctgccttccaaagagatcctacctttgcagatttgctcctttcccattgccttgaaggtctggcaatccctgttctttcatttgacaagtacttactgagtactcactatatacaaatcattaggttaaaacagacacacacacacacacacacacacacacacacacacacacacacacaagacctgggcccttaagtttacagtccagcaggaaatgttaacctccattcagctacgcccccttgttatctagaccttcgggatcatctaagaaatgtagctgaaacccaaggagccagctagaaagaagcttttgattagatgtacaatacattgggggcagaagatctgggatcaattaagatggagcctgaaggactatggaatcttgcttgtcaggaatgggcaagtctacttcctgccatttctgaaagccccgcgggaccagcttctaggctgagctgcctagtaggctgaagcttcaggactctgcaggtcaaggatatgtgatgagcaccggcctaagtgtttgctcttcagattcctaagtagcacaagactttatcagaatctataggcataccaacctggatcactcttccacccaaccgaggagtagatgcatctgaatcttcatatcggtatattaagtccaaaagatggtccgggctgcccctcacaaaagcttctgcatccacgtggtaagctcccatggatgacagggttctgtatgatggagactattattgctattgctgctaattccatgagctgtgaagatccctaaccaactcagctgtaacatatgcaattctgtggtgggaagaggctgtgtgtccaaggatggtgctgaaatcactgccttaaggtctctgctgtgcagaatgaggaggcccccgagctggctgttctaacttagaaggaagagaagactggatgggcctgcttgggatctaggcctcttctaaaccctatcctaagctccagttccatggcaaggctcagacttttaatgccatcttaatctgatggttgagcgcttcactctattttctggtgctgcccagccagtgccttctgccatggatgttactggctacttgagaaaaaggagaggggagaaccccttctttcattccaactgcctccgaccccaaagggattcttggctctctggtaaccatggataccaccatgaattttatttggatcctcagcaggttgattctggaggcctcatgctatgactttttatttctcttcctgggatccaccaccctctactctcagctgactgctgcatttaggccaggtctccaattgctttcctccagaaagtgtgttcccgtctagtgaggtagtattgaagcctcggctttccctctggagcctgggaccctgtttacagttgcacatctgggcccctcactgtggggattgatcattctcatgaaggaatcacagttatatggcaactgcagaaggctgagcctcctcatggtgctataaccccttgggacactcatccagacttctctgaagcagaaaacctgagctccccactcactgccctagaatttatggcaaggagcaaatctacagcattctctcccacctacgtcctgcttcttggttgagactactgggatccttcagaaaagaaacactgggtcccatagctaaattctcaaccgccaggcaccttcagaagaatccagcctaatactggaatttgtgctattatcttcctctccagccccccaactccatccctcaccacagttgtctaggaaatgacatgaattcaatatctaatgtcaaccaatggggagagccacaactccaggagaggttcctgagctgagtcccttaatttctggatgaagaagaccaacaagttttgtccaatgtatttgtttctcagaccttgcctaggcactaaaaataaaatactaggtcattggaggctaatgtgggacctgatgtctgcgtgtgtgtgtgtgtgtgtgtgtgtgtgtgtctccctctctcacacacacaagagcagtttgctgttgctgtttcctaccttctgaggcttcaaagtattttttaaaatctatgctttgtggcagctctacggtgcttatctctgtctttgtgtcaatccttaagtacccatgtctttttcatgtctaaccattgggaaggtagaggctggcagggaagacaaatctgctacaagtccatgggaagaccctacaatgaaatgttcattggttggtatactgttttagtcttgaattgccaactttccaactgatctatccatattccttaagtactaaagacaaaatagagggcttctttttctctcttaatgtcttgccttctggttttcctggtttgcaagactaagtgtacctaatctcaccatctcttcacttctagctctctgaaacaagggtcacactactcagagggataaccccttacagtggtctgaggagtaactatttcctaaagtattctaaaagagtaggaagagagaaatggtagcctgctgcttctcacagacacctcacatcctcacttgggatggcatccacatagaaaccctgcatttaggtaaaatttgcctgactgaaggggactcagtcctccaaatcaaggtcaagaagatatctgcatgagaccttaagaactctttattgccattatttggagagggcgggggaattgtcctaatcacacatttaacacagggaataagtgctgaagtgacccagatcaccaagcgcagttcctcatcatactttatttttgctttccttattccttggcactgactaagctaaagttaagaagccgacttcataagccaacccctgtgatgggatggaaaaatgggcttttgcagagggtttattaatagagatggatatactactcacaagttctggctcatggctccactgagaaggccatagtaataaaatgatcttatgaacactgttccccaaaggccaaagcctgaagatattgccccttataatccaatcagccttatattttaataagtcctgaatcaacctgactacggatatatggggccaccagggtgcatgggtgcatgtctgctcagcctagccctggaagtgagcactgccggccacagatcctgggaaaggtggtagtaacccagaagatgtagccttgaagggaggatacctatcaaaatgccaaagctgcagggacacgaagacggttgaaaattcaacctgtgtatactagatccttccagtttgatggtttggtcattcttcttcatgattataccatggagaattttctgtgacaagggtggtcatggaagtaagtgagtgatcccctggtttctcattccttaaagcagtggttcgcaaagtatggcacaagaccagcagcatcagcagcctttgggaacttgttagaaacgaaaattctcaatcccatcccagatctgctgaatcagaaactctaatgagaggacccggcaatccacgttttaataagccctcctggtgattctgatgcacactaaattcaactgttttaaagggaaagccctttatagtattggagttcccacactgagaggctttggggcccaaaataagaaggttctaggttgtcattcagactttaacattaatttcaaagtcacctttctcatgcttccttgtgtttctgtttttccatttatgattttaacaaagaaaggtatgtgtgcttttgggtggaagttaggagaatgtttgtgtctttcctagttgaatacaaccttcagagaaaaaccttatgccttggaaattactacctggcacacaaaggggcttcaacaaggaaaagcagttggaggtctcttccagattgctcttctgccgaattatttgtatctattccgagctgattatgtaataggatggaaaaagtaaaaaaaaaaaaaaaaatctaatttgtatttccatgacaacgtgttctcccagcaacatccctctcctttatttgagttataaagggcactgctgggcctgagaaccaggccagaacctccttctgtatggcagctaacagtgtagggctccagtatcccaggaaggccccttatccacactccactcagctcataggagagtcttgcataatgaagacacagacctgggcacttcagtccttgtgctcctcctctcttttccccacagcaggacctggatacagaagtactcagccaaggtgacagaataaaatcctttttttgttgttttctgtttgtttgtttgttttggagaaggagtctcgctttgtcacccaggctggtgtgcagtggcacgatctcggctcactgcaacctccgcctcccaggttcaagcgattctcctgtctcagcctcctgagtagctgggattacagacgtgcgccatcacgcccagctaatttttgtatttttagtagatacggagttttgccttgttggccaggctgtgctggagctcctgacctcaggtgattcacctgccacagcctcccaaagtgctgggattacaggcgtgagccacagcaccctgccaaataagatcctttttaaaaaatatctgaaaaaagcttcatatctttacaaactcataaaatagctgattgggccatggaggagatgaggctgtttagaactggttttgtttcaagtttgtcaattttccctgtatgagaacttgggtaaagcacaaagaaacatacagtgctagtaacaggtctcctgcgccctggaactaagtgtttggaggaaggactaaaccccgggggaggtgagtataaaataattccactaagatcacctcctcagtccccagaaggctgatggtggatcctctggccatctcctgtggggtcttactgctcctctgccatttctctatgcctgaagacacgaagatgatatcaaggcagagctaccatatcgcagccagtctctaggctactgctgtgcagtggctcccactttctaatgcttttttgtttttgctttttctaacaaaacaatcttttttcaaaatgaattccaacccctgctagcttccttccccgcctccatactgttttaggcagcaccgtttatgtgacagagtccgtgtttctcaaatgcatggtgttcctcaggtggagagtgggcagaagtttttgcaacactttttttttaagttattgggtgcaaaatcccaaaccaggatatgtgtatgtctgtgtgtttatgttttttatttgaccctcccctctttcaacctacccccttttatatctaatgtagaaaaagcgaaattgaatctggaaagcaaactgttgtatatagttgcggtaacaatcatgaagagagagccgggctgtcccctcagtaattcattttaaataacaaattatttaaaaataaaattcatgccagagccagctgaagaggccttccttcatcaccactgaggccacccccaatctgggccctctgtccatctggcatgtctcctcccagcaagattcatctgttcaatgccatttgcgtttcaataaagttatctcctgtactgtc

SEQ ID NO: 20024 - DNA, 12999 bp, Homo sapiens
  source 1..12999: mol_type = unassigned DNA
ggagccgcggggcttccatccttcctttgactgatttttaaattttaatttgtattttccccgccgccccgccccttttcctccgaccccgccctatcgctccccggcttccctgctctttcctttttcccggcttccttcctcgcgtttctttcccctgcgccctcggcttgcctctctccctcctccctcgctctctcccccttctctccccttcttcctcggtttcttccgtcctctctctccccctcctcctcccccgcctcctcctcctgcgctcccgccccctgccccctccccccgtgcctgcagacgcgcggatcgtccatgcgctcctcgcgggcagaatgctgggcagcagcgtcaagagcgtgcagcccgaggtggagctgagcagcggcggcggcgacgagggcgcggacgaaccgcggggcgccggcaggaaggcggcagcggcggacggcagaggcatgctgcccaagcgcgccaaggcgcccggcggcggcggcggcatggccaaggccagcgcggctgagctgaaggtcttcaagtccggcagcgtggacagccgtgtccccggcgggccgcccgcctccaacctgcgcaagcagaagtcactcaccaacctctcttttctcacggactccgagaaaaagctgcagctttatgagcccgaatggagcgacgatatggccaaggcgcccaaaggcttaggcaaggtggggtccaagggccgtgaagctccgctgatgtccaagacgctgtccaagtcggagcactcgctcttccaggccaagggcagcccggcgggcggcgccaagacccccctggctccgctcgcgcccaacctgggaaagccgagccggatccctcgaggaccctatgcggaggtcaagccgctcagcaaggcgcctgaagcggccgtgagcgaagatggcaaatcggacgacgagctgctctccagcaaggccaaggcgcaaaagagctctgggcctgtcccctctgccaagggccaggaggagcgcgccttcctcaaggtggaccccgagctggtggtgaccgtgctgggagacctggagcagctgctcttcagccagatgctggacccagagtcccagagaaagaggacagtgcagaatgtcctggatctccggcagaacctggaagagaccatgtccagcctgcgagggtcccaggtgactcacagctccctggagatgacctgctacgacagcgatgatgccaacccacgcagcgtgtccagcctctccaaccgctcgtcccctctgtcatggcgctatggccagtccagtccgcggctgcaggctggtgacgcgccctctgtgggtgggagctgccgctcggaggggacgcccgcctggtacatgcacggcgaacgggcccactactcccacaccatgcccatgcgcagccccagcaagctcagccatatctcccgcctggagctggtcgaatccctggactcggatgaggtggacctcaagtccggctacatgagcgacagtgacctcatgggcaagaccatgacggaggatgatgacatcactaccggctgggatgaaagcagctccatcagtagtggactcagcgatgcctcagacaatctcagttcagaagaattcaatgccagctcctcactcaactccctcccaagtactcccactgcttctcgcaggaactcaacaatagtgctacgcacagactcagagaagcgctcactggcagaaagtgggctgagctggtttagtgaatcagaggagaaagcccctaaaaaactggagtacgacagtggtagcctgaagatggaacctgggacttctaagtggcggagggagcggcctgagagctgtgatgattcatccaagggtggagaactgaaaaagcccatcagcctgggccaccctggttccctgaagaagggcaagaccccacctgtggctgtaacttcccccatcactcacacagcccagagtgccctcaaagtcgcaggcaaacctgagggcaaagctacagacaagggtaagcttgcagtgaagaatactgggctccaacgctcctcctctgatgctggtcgggaccgcctgagtgatgctaagaagcccccctcgggcattgctcgcccctccacttcgggatcctttggctacaagaagcctcctcctgccacaggcacagccactgtcatgcaaactggtggttcagccactctcagcaagatccagaagtcctcaggcatccctgtcaagccagtaaatgggcgcaagactagcttagatgtttccaacagtgcagagccaggattcctggctcctggagcccgttctaacatccagtaccgcagcctgccccggccagccaagtcaagttctatgagcgtgaccggcgggcggggtggacctcgccctgtgagcagcagcattgaccccagtctcctcagcaccaagcagggaggccttacgccttccagactgaaggagcctaccaaggtagccagtgggcggaccactccagcccctgtcaatcagacagatcgggaaaaggagaaggccaaagccaaggcagtggccttggactcagacaacatctccttgaagagtattggctccccagaaagtactcccaagaaccaagcaagccaccccacagccaccaagctggcagagctgccaccaacccctctcagggccacagcgaagagctttgtcaaaccaccctcactagccaatcttgacaaggtcaactccaacagtctggatctaccatcatccagtgataccacccatgcttcaaaggtcccagatctgcatgctacaagctcagcatctgggggccctctcccttcctgcttcacccccagtccggcacccatcctcaatattaactcagccagcttctcccagggcctggagctaatgagtggtttcagtgtgccaaaagagacccgcatgtaccccaaactctcaggcctgcacaggagcatggagtccctccagatgccaatgagcctccccagtgccttccccagcagtactcccgtccccaccccacctgctccccctgctgctcccacagaagaagagacggaagagctgacttggagtggaagccccagagctgggcaactggacagtaatcagcgggatcggaacactcttcccaagaaagggctcaggtaccagcttcagtcccaggaggagaccaaggagaggcgacattcccataccattggtgggctgcctgaatccgatgaccagtcagagctgccttctccccctgcacttcccatgtctctgagtgcaaagggccaacttaccaacatagtgagtcccactgcggccaccacgccaagaatcacccgctccaacagcatccccacccacgaggcggccttcgagctgtacagcggctcccaaatggggagcaccctgtccctggccgagagacccaagggaatgattcggtcaggatccttccgagaccccacggacgatgttcacggctcagtgctgtccctggcctccagtgcctcctccacctactcctcacaaatccggaagcttcgtagggaactggaatcatcccaggaaaaagtggccaccttgacgtctcagctttctgccaatgctaatctggtggctgcttttgagcagagcctggtgaatatgacatcccgcctgcgacacctggcagagacggccgaggagaaggacactgagctgctggatttgcgagaaaccatagactttctgaagaaaaagaactctgaggcccaggcagtcattcagggagcccttaatgcctcagaaaccacacccaaagaacttcggatcaagagacaaaactcctcagatagcatctcaagcctcaacagcatcactagccattccagcatcggcagcagcaaggatgctgatgcgaaaaagaagaaaaaaaagagttgggtctatgagcttcgaagttccttcaacaaagcgttcagtataaaaaaggggcccaagtcagcttcctcatactcggatatagaggagattgctacacccgactcttcagccccctcatcccccaaactacagcatggttctacagagactgcttcaccctccatcaagtcctccacctcgtcctccgtgggcactgatgtcaccgagggccctgctcacccagccccccacactaggctgttccatgcaaatgaggaggaggagccagagaagaaggaggtatcggagctgcgctctgagctatgggagaaggaaatgaagcttacagacatccgcttggaggccctcaactctgcccaccaactggatcagcttcgggagaccatgcacaacatgcagttggaggtggacctgctgaaagcagagaatgaccgactgaaggtagccccaggcccctcatcaggctccactccagggcaggtccctggatcatctgcattatcttccccacgccgctccctaggcctggcactcacccattccttcggccccagtcttgcagacacagacctgtcacccatggatggcatcagtacttgtggtccaaaggaggaagtgaccctccgggtggtggtgaggatgcccccgcagcacatcatcaaaggggacttgaagcagcaggaattcttcctgggctgtagcaaggtcagtggaaaagttgactggaagatgctggatgaagctgttttccaagtgttcaaggactatatttctaaaatggacccagcctctaccctgggactaagcactgagtccatccatggctacagcatcagccacgtgaaacgagtgttggatgcagagccccccgagatgcctccttgccgtcgaggtgtcaataacatatcagtctccctcaaaggtctgaaggagaaatgcgtcgacagcctggtgttcgagacgctgatccccaagccgatgatgcagcactacataagcctcctgctgaagcaccggcgcctcgtcctctcgggccccagcggcacgggcaagacctacctgaccaatcgcttggccgagtacctggtggagcgctctggccgtgaggtcacagagggcatcgtcagcaccttcaacatgcaccagcagtcttgcaaggatctgcaactgtatctttccaacctagccaaccagatagaccgggaaacaggaattggggatgtgcccctggtgattctattggatgacctgagtgaagcaggctccatcagtgagttggtcaatggggccctcacctgcaagtatcataaatgtccctatattataggtaccaccaatcagcctgtaaaaatgacacccaaccatggcttgcacttgagcttcaggatgttgaccttctccaacaacgtggagccagccaatggcttcctggttcgttacctgaggaggaagctggtagagtcagacagcgacatcaatgccaacaaggaagagctgcttcgggtgctcgactgggtacccaagctgtggtatcatctccacaccttccttgagaagcacagcacctcagacttcctcatcggcccttgcttctttctgtcgtgtcccattggcattgaggacttccggacctggttcattgacctgtggaacaactctatcattccctatctacaggaaggagccaaggatgggataaaggtccatggacagaaagctgcttgggaggacccagtggaatgggtccgggacacacttccctggccatcagcccaacaagaccaatcaaagctgtaccacctgcccccacccaccgtgggccctcacagcattgcctcacctcccgaggataggacagtcaaagacagcaccccaagttctctggactcagatcctctgatggccatgctgctgaaacttcaagaagctgccaactacattgagtctccagatcgagaaaccatcctggaccccaaccttcaggcaacactttaagggttcggcaatcactgtcacccccggacagcagaacgctggcatcagctatcttagctcctcctctcccctctcctctttcagagcactggctctccagccccaggaggagaacaggagggaggaggagatgaaagaggagggacaggttcttggtgctgtacctttgagaacttcctaggaaggaatggtggggtggcgtttgggaacttgtgccccctaaacacatttactggcctcctctaatgactttggggaaaagatgattctgggtctttcccttgacttcttgtttcaattacaaactcctgggctttctggggaggggttcagaaaacatcaaaacactgcagcagttcctaaatgattctcacaagcaaccctgagagagacagtcttgtgagggagatctgggggaggcaggaagctcctcagattttctcacagacccttcccaattccatcaccactgccaacaactcctcccccagagatctggctggagcccagaaaaagaagcatgtggtttaaaaaatgtttaaatcaatctgtaaaaggtaaaaatgaaaaacaaaaacaagcaaacaaacaaaaaacaatggaaaagatgaagctggagagagaggaaccagttgccaaggtagagagctgcccgctcctgccctctggatgacataggggacatcaacaagacggctgccaacctgagaagtcaccaaaccacaaaaataaccttacagccttcagggaaagactaccagctctgtctttctaccctctaatttaacaatgcataagagtcaataaaccctacttttttatttttggtttttattttgttttcatttttttctcccatttgcctatttatttttttgtttcccttttttttttctttttccgtttttccatttcctcacatgtccacgagatgcttgggttgcttttccaggggctagtttggcttttccaagtgggttttctttggagaatctgatgccatgcaattggcatgacacctgccatgccactatctttggcatccatggggcttatatgagacatgaagcattggctcagaagtagagggagaagaggaacccagttcccttgacttcccttttgagagcacacgttctgctgggtagctcaattgccagcctctgtcatgagaaggtatagccccatcttgatagaagagttactccgagctttatcatggaccagaggaaaaccagaaaactgaaaacattcctctgtcttgtggccagtttggcctttcactgcactattctgatggtgcctgactgaatccaaatatcctagctggctcttactatttttcacaaatgagtattcacatataagagatgaacatccatgtgagatcatcccaatcagaatataagactcaaggagtttgacttggtggccaatacctgccttccaaagagatcctacctttgcagatttgctcctttcccattgccttgaaggtctggcaatccctgttctttcatttgacaagtacttactgagtactcactatatacaaatcattaggttaaaacagacacacacacacacacacacacacacacacacacacacacacacacaagacctgggcccttaagtttacagtccagcaggaaatgttaacctccattcagctacgcccccttgttatctagaccttcgggatcatctaagaaatgtagctgaaacccaaggagccagctagaaagaagcttttgattagatgtacaatacattgggggcagaagatctgggatcaattaagatggagcctgaaggactatggaatcttgcttgtcaggaatgggcaagtctacttcctgccatttctgaaagccccgcgggaccagcttctaggctgagctgcctagtaggctgaagcttcaggactctgcaggtcaaggatatgtgatgagcaccggcctaagtgtttgctcttcagattcctaagtagcacaagactttatcagaatctataggcataccaacctggatcactcttccacccaaccgaggagtagatgcatctgaatcttcatatcggtatattaagtccaaaagatggtccgggctgcccctcacaaaagcttctgcatccacgtggtaagctcccatggatgacagggttctgtatgatggagactattattgctattgctgctaattccatgagctgtgaagatccctaaccaactcagctgtaacatatgcaattctgtggtgggaagaggctgtgtgtccaaggatggtgctgaaatcactgccttaaggtctctgctgtgcagaatgaggaggcccccgagctggctgttctaacttagaaggaagagaagactggatgggcctgcttgggatctaggcctcttctaaaccctatcctaagctccagttccatggcaaggctcagacttttaatgccatcttaatctgatggttgagcgcttcactctattttctggtgctgcccagccagtgccttctgccatggatgttactggctacttgagaaaaaggagaggggagaaccccttctttcattccaactgcctccgaccccaaagggattcttggctctctggtaaccatggataccaccatgaattttatttggatcctcagcaggttgattctggaggcctcatgctatgactttttatttctcttcctgggatccaccaccctctactctcagctgactgctgcatttaggccaggtctccaattgctttcctccagaaagtgtgttcccgtctagtgaggtagtattgaagcctcggctttccctctggagcctgggaccctgtttacagttgcacatctgggcccctcactgtggggattgatcattctcatgaaggaatcacagttatatggcaactgcagaaggctgagcctcctcatggtgctataaccccttgggacactcatccagacttctctgaagcagaaaacctgagctccccactcactgccctagaatttatggcaaggagcaaatctacagcattctctcccacctacgtcctgcttcttggttgagactactgggatccttcagaaaagaaacactgggtcccatagctaaattctcaaccgccaggcaccttcagaagaatccagcctaatactggaatttgtgctattatcttcctctccagccccccaactccatccctcaccacagttgtctaggaaatgacatgaattcaatatctaatgtcaaccaatggggagagccacaactccaggagaggttcctgagctgagtcccttaatttctggatgaagaagaccaacaagttttgtccaatgtatttgtttctcagaccttgcctaggcactaaaaataaaatactaggtcattggaggctaatgtgggacctgatgtctgcgtgtgtgtgtgtgtgtgtgtgtgtgtgtgtctccctctctcacacacacaagagcagtttgctgttgctgtttcctaccttctgaggcttcaaagtattttttaaaatctatgctttgtggcagctctacggtgcttatctctgtctttgtgtcaatccttaagtacccatgtctttttcatgtctaaccattgggaaggtagaggctggcagggaagacaaatctgctacaagtccatgggaagaccctacaatgaaatgttcattggttggtatactgttttagtcttgaattgccaactttccaactgatctatccatattccttaagtactaaagacaaaatagagggcttctttttctctcttaatgtcttgccttctggttttcctggtttgcaagactaagtgtacctaatctcaccatctcttcacttctagctctctgaaacaagggtcacactactcagagggataaccccttacagtggtctgaggagtaactatttcctaaagtattctaaaagagtaggaagagagaaatggtagcctgctgcttctcacagacacctcacatcctcacttgggatggcatccacatagaaaccctgcatttaggtaaaatttgcctgactgaaggggactcagtcctccaaatcaaggtcaagaagatatctgcatgagaccttaagaactctttattgccattatttggagagggcgggggaattgtcctaatcacacatttaacacagggaataagtgctgaagtgacccagatcaccaagcgcagttcctcatcatactttatttttgctttccttattccttggcactgactaagctaaagttaagaagccgacttcataagccaacccctgtgatgggatggaaaaatgggcttttgcagagggtttattaatagagatggatatactactcacaagttctggctcatggctccactgagaaggccatagtaataaaatgatcttatgaacactgttccccaaaggccaaagcctgaagatattgccccttataatccaatcagccttatattttaataagtcctgaatcaacctgactacggatatatggggccaccagggtgcatgggtgcatgtctgctcagcctagccctggaagtgagcactgccggccacagatcctgggaaaggtggtagtaacccagaagatgtagccttgaagggaggatacctatcaaaatgccaaagctgcagggacacgaagacggttgaaaattcaacctgtgtatactagatccttccagtttgatggtttggtcattcttcttcatgattataccatggagaattttctgtgacaagggtggtcatggaagtaagtgagtgatcccctggtttctcattccttaaagcagtggttcgcaaagtatggcacaagaccagcagcatcagcagcctttgggaacttgttagaaacgaaaattctcaatcccatcccagatctgctgaatcagaaactctaatgagaggacccggcaatccacgttttaataagccctcctggtgattctgatgcacactaaattcaactgttttaaagggaaagccctttatagtattggagttcccacactgagaggctttggggcccaaaataagaaggttctaggttgtcattcagactttaacattaatttcaaagtcacctttctcatgcttccttgtgtttctgtttttccatttatgattttaacaaagaaaggtatgtgtgcttttgggtggaagttaggagaatgtttgtgtctttcctagttgaatacaaccttcagagaaaaaccttatgccttggaaattactacctggcacacaaaggggcttcaacaaggaaaagcagttggaggtctcttccagattgctcttctgccgaattatttgtatctattccgagctgattatgtaataggatggaaaaagtaaaaaaaaaaaaaaaaatctaatttgtatttccatgacaacgtgttctcccagcaacatccctctcctttatttgagttataaagggcactgctgggcctgagaaccaggccagaacctccttctgtatggcagctaacagtgtagggctccagtatcccaggaaggccccttatccacactccactcagctcataggagagtcttgcataatgaagacacagacctgggcacttcagtccttgtgctcctcctctcttttccccacagcaggacctggatacagaagtactcagccaaggtgacagaataaaatcctttttttgttgttttctgtttgtttgtttgttttggagaaggagtctcgctttgtcacccaggctggtgtgcagtggcacgatctcggctcactgcaacctccgcctcccaggttcaagcgattctcctgtctcagcctcctgagtagctgggattacagacgtgcgccatcacgcccagctaatttttgtatttttagtagatacggagttttgccttgttggccaggctgtgctggagctcctgacctcaggtgattcacctgccacagcctcccaaagtgctgggattacaggcgtgagccacagcaccctgccaaataagatcctttttaaaaaatatctgaaaaaagcttcatatctttacaaactcataaaatagctgattgggccatggaggagatgaggctgtttagaactggttttgtttcaagtttgtcaattttccctgtatgagaacttgggtaaagcacaaagaaacatacagtgctagtaacaggtctcctgcgccctggaactaagtgtttggaggaaggactaaaccccgggggaggtgagtataaaataattccactaagatcacctcctcagtccccagaaggctgatggtggatcctctggccatctcctgtggggtcttactgctcctctgccatttctctatgcctgaagacacgaagatgatatcaaggcagagctaccatatcgcagccagtctctaggctactgctgtgcagtggctcccactttctaatgcttttttgtttttgctttttctaacaaaacaatcttttttcaaaatgaattccaacccctgctagcttccttccccgcctccatactgttttaggcagcaccgtttatgtgacagagtccgtgtttctcaaatgcatggtgttcctcaggtggagagtgggcagaagtttttgcaacactttttttttaagttattgggtgcaaaatcccaaaccaggatatgtgtatgtctgtgtgtttatgttttttatttgaccctcccctctttcaacctacccccttttatatctaatgtagaaaaagcgaaattgaatctggaaagcaaactgttgtatatagttgcggtaacaatcatgaagagagagccgggctgtcccctcagtaattcattttaaataacaaattatttaaaaataaaattcatgccagagccagctgaagaggccttccttcatcaccactgaggccacccccaatctgggccctctgtccatctggcatgtctcctcccagcaagattcatctgttcaatgccatttgcgtttcaataaagttatctcctgtactgtccactg

SEQ ID NO: 20025 - DNA, 12843 bp, Homo sapiens
  source 1..12843: mol_type = unassigned DNA
ggagccgcggggcttccatccttcctttgactgatttttaaattttaatttgtattttccccgccgccccgccccttttcctccgaccccgccctatcgctccccggcttccctgctctttcctttttcccggcttccttcctcgcgtttctttcccctgcgccctcggcttgcctctctccctcctccctcgctctctcccccttctctccccttcttcctcggtttcttccgtcctctctctccccctcctcctcccccgcctcctcctcctgcgctcccgccccctgccccctccccccgtgcctgcagacgcgcggatcgtccatgcgctcctcgcgggcagaatgctgggcagcagcgtcaagagcgtgcagcccgaggtggagctgagcagcggcggcggcgacgagggcgcggacgaaccgcggggcgccggcaggaaggcggcagcggcggacggcagaggcatgctgcccaagcgcgccaaggcgcccggcggcggcggcggcatggccaaggccagcgcggctgagctgaaggtcttcaagtccggcagcgtggacagccgtgtccccggcgggccgcccgcctccaacctgcgcaagcagaagtcactcaccaacctctcttttctcacggactccgagaaaaagctgcagctttatgagcccgaatggagcgacgatatggccaaggcgcccaaaggcttaggcaaggtggggtccaagggccgtgaagctccgctgatgtccaagacgctgtccaagtcggagcactcgctcttccaggccaagggcagcccggcgggcggcgccaagacccccctggctccgctcgcgcccaacctgggaaagccgagccggatccctcgaggaccctatgcggaggtcaagccgctcagcaaggcgcctgaagcggccgtgagcgaagatggcaaatcggacgacgagctgctctccagcaaggccaaggcgcaaaagagctctgggcctgtcccctctgccaagggccaggaggagcgcgccttcctcaaggtggaccccgagctggtggtgaccgtgctgggagacctggagcagctgctcttcagccagatgctggacccagagtcccagagaaagaggacagtgcagaatgtcctggatctccggcagaacctggaagagaccatgtccagcctgcgagggtcccaggtgactcacagctccctggagatgacctgctacgacagcgatgatgccaacccacgcagcgtgtccagcctctccaaccgctcgtcccctctgtcatggcgctatggccagtccagtccgcggctgcaggctggtgacgcgccctctgtgggtgggagctgccgctcggaggggacgcccgcctggtacatgcacggcgaacgggcccactactcccacaccatgcccatgcgcagccccagcaagctcagccatatctcccgcctggagctggtcgaatccctggactcggatgaggtggacctcaagtccggctacatgagcgacagtgacctcatgggcaagaccatgacggaggatgatgacatcactaccggctgggatgaaagcagctccatcagtagtggactcagcgatgcctcagacaatctcagttcagaagaattcaatgccagctcctcactcaactccctcccaagtactcccactgcttctcgcaggaactcaacaatagtgctacgcacagactcagagaagcgctcactggcagaaagtgggctgagctggtttagtgaatcagaggagaaagcccctaaaaaactggagtacgacagtggtagcctgaagatggaacctgggacttctaagtggcggagggagcggcctgagagctgtgatgattcatccaagggtggagaactgaaaaagcccatcagcctgggccaccctggttccctgaagaagggcaagaccccacctgtggctgtaacttcccccatcactcacacagcccagagtgccctcaaagtcgcaggcaaacctgagggcaaagctacagacaagggtaagcttgcagtgaagaatactgggctccaacgctcctcctctgatgctggtcgggaccgcctgagtgatgctaagaagcccccctcgggcattgctcgcccctccacttcgggatcctttggctacaagaagcctcctcctgccacaggcacagccactgtcatgcaaactggtggttcagccactctcagcaagatccagaagtcctcaggcatccctgtcaagccagtaaatgggcgcaagactagcttagatgtttccaacagtgcagagccaggattcctggctcctggagcccgttctaacatccagtaccgcagcctgccccggccagccaagtcaagttctatgagcgtgaccggcgggcggggtggacctcgccctgtgagcagcagcattgaccccagtctcctcagcaccaagcagggaggccttacgccttccagactgaaggagcctaccaaggtagccagtgggcggaccactccagcccctgtcaatcagacagatcgggaaaaggagaaggccaaagccaaggcagtggccttggactcagacaacatctccttgaagagtattggctccccagaaagtactcccaagaaccaagcaagccaccccacagccaccaagctggcagagctgccaccaacccctctcagggccacagcgaagagctttgtcaaaccaccctcactagccaatcttgacaaggtcaactccaacagtctggatctaccatcatccagtgataccacccatgcttcaaaggtcccagatctgcatgctacaagctcagcatctgggggccctctcccttcctgcttcacccccagtccggcacccatcctcaatattaactcagccagcttctcccagggcctggagctaatgagtggtttcagtgtgccaaaagagacccgcatgtaccccaaactctcaggcctgcacaggagcatggagtccctccagatgccaatgagcctccccagtgccttccccagcagtactcccgtccccaccccacctgctccccctgctgctcccacagaagaagagacggaagagctgacttggagtggaagccccagagctgggcaactggacagtaatcagcgggatcggaacactcttcccaagaaagggctcaggtaccagcttcagtcccaggaggagaccaaggagaggcgacattcccataccattggtgggctgcctgaatccgatgaccagtcagagctgccttctccccctgcacttcccatgtctctgagtgcaaagggccaacttaccaacatagttcacggctcagtgctgtccctggcctccagtgcctcctccacctactcctcagctgaggagaggatgcaatctgagcaaatccggaagcttcgtagggaactggaatcatcccaggaaaaagtggccaccttgacgtctcagctttctgccaatgctaatctggtggctgcttttgagcagagcctggtgaatatgacatcccgcctgcgacacctggcagagacggccgaggagaaggacactgagctgctggatttgcgagaaaccatagactttctgaagaaaaagaactctgaggcccaggcagtcattcagggagcccttaatgcctcagaaaccacacccaaagaacttcggatcaagagacaaaactcctcagatagcatctcaagcctcaacagcatcactagccattccagcatcggcagcagcaaggatgctgatgcgaaaaagaagaaaaaaaagagttggcttcgaagttccttcaacaaagcgttcagtataaaaaaggggcccaagtcagcttcctcatactcggatatagaggagattgctacacccgactcttcagccccctcatcccccaaactacagcatggttctacagagactgcttcaccctccatcaagtcctccacctcgtcctccgtgggcactgatgtcaccgagggccctgctcacccagccccccacactaggctgttccatgcaaatgaggaggaggagccagagaagaaggaggtatcggagctgcgctctgagctatgggagaaggaaatgaagcttacagacatccgcttggaggccctcaactctgcccaccaactggatcagcttcgggagaccatgcacaacatgcagttggaggtggacctgctgaaagcagagaatgaccgactgaaggtagccccaggcccctcatcaggctccactccagggcaggtccctggatcatctgcattatcttccccacgccgctccctaggcctggcactcacccattccttcggccccagtcttgcagacacagacctgtcacccatggatggcatcagtacttgtggtccaaaggaggaagtgaccctccgggtggtggtgaggatgcccccgcagcacatcatcaaaggggacttgaagcagcaggaattcttcctgggctgtagcaaggtcagtggaaaagttgactggaagatgctggatgaagctgttttccaagtgttcaaggactatatttctaaaatggacccagcctctaccctgggactaagcactgagtccatccatggctacagcatcagccacgtgaaacgagtgttggatgcagagccccccgagatgcctccttgccgtcgaggtgtcaataacatatcagtctccctcaaaggtctgaaggagaaatgcgtcgacagcctggtgttcgagacgctgatccccaagccgatgatgcagcactacataagcctcctgctgaagcaccggcgcctcgtcctctcgggccccagcggcacgggcaagacctacctgaccaatcgcttggccgagtacctggtggagcgctctggccgtgaggtcacagagggcatcgtcagcaccttcaacatgcaccagcagtcttgcaaggatctgcaactgtatctttccaacctagccaaccagatagaccgggaaacaggaattggggatgtgcccctggtgattctattggatgacctgagtgaagcaggctccatcagtgagttggtcaatggggccctcacctgcaagtatcataaatgtccctatattataggtaccaccaatcagcctgtaaaaatgacacccaaccatggcttgcacttgagcttcaggatgttgaccttctccaacaacgtggagccagccaatggcttcctggttcgttacctgaggaggaagctggtagagtcagacagcgacatcaatgccaacaaggaagagctgcttcgggtgctcgactgggtacccaagctgtggtatcatctccacaccttccttgagaagcacagcacctcagacttcctcatcggcccttgcttctttctgtcgtgtcccattggcattgaggacttccggacctggttcattgacctgtggaacaactctatcattccctatctacaggaaggagccaaggatgggataaaggtccatggacagaaagctgcttgggaggacccagtggaatgggtccgggacacacttccctggccatcagcccaacaagaccaatcaaagctgtaccacctgcccccacccaccgtgggccctcacagcattgcctcacctcccgaggataggacagtcaaagacagcaccccaagttctctggactcagatcctctgatggccatgctgctgaaacttcaagaagctgccaactacattgagtctccagatcgagaaaccatcctggaccccaaccttcaggcaacactttaagggttcggcaatcactgtcacccccggacagcagaacgctggcatcagctatcttagctcctcctctcccctctcctctttcagagcactggctctccagccccaggaggagaacaggagggaggaggagatgaaagaggagggacaggttcttggtgctgtacctttgagaacttcctaggaaggaatggtggggtggcgtttgggaacttgtgccccctaaacacatttactggcctcctctaatgactttggggaaaagatgattctgggtctttcccttgacttcttgtttcaattacaaactcctgggctttctggggaggggttcagaaaacatcaaaacactgcagcagttcctaaatgattctcacaagcaaccctgagagagacagtcttgtgagggagatctgggggaggcaggaagctcctcagattttctcacagacccttcccaattccatcaccactgccaacaactcctcccccagagatctggctggagcccagaaaaagaagcatgtggtttaaaaaatgtttaaatcaatctgtaaaaggtaaaaatgaaaaacaaaaacaagcaaacaaacaaaaaacaatggaaaagatgaagctggagagagaggaaccagttgccaaggtagagagctgcccgctcctgccctctggatgacataggggacatcaacaagacggctgccaacctgagaagtcaccaaaccacaaaaataaccttacagccttcagggaaagactaccagctctgtctttctaccctctaatttaacaatgcataagagtcaataaaccctacttttttatttttggtttttattttgttttcatttttttctcccatttgcctatttatttttttgtttcccttttttttttctttttccgtttttccatttcctcacatgtccacgagatgcttgggttgcttttccaggggctagtttggcttttccaagtgggttttctttggagaatctgatgccatgcaattggcatgacacctgccatgccactatctttggcatccatggggcttatatgagacatgaagcattggctcagaagtagagggagaagaggaacccagttcccttgacttcccttttgagagcacacgttctgctgggtagctcaattgccagcctctgtcatgagaaggtatagccccatcttgatagaagagttactccgagctttatcatggaccagaggaaaaccagaaaactgaaaacattcctctgtcttgtggccagtttggcctttcactgcactattctgatggtgcctgactgaatccaaatatcctagctggctcttactatttttcacaaatgagtattcacatataagagatgaacatccatgtgagatcatcccaatcagaatataagactcaaggagtttgacttggtggccaatacctgccttccaaagagatcctacctttgcagatttgctcctttcccattgccttgaaggtctggcaatccctgttctttcatttgacaagtacttactgagtactcactatatacaaatcattaggttaaaacagacacacacacacacacacacacacacacacacacacacacacacacaagacctgggcccttaagtttacagtccagcaggaaatgttaacctccattcagctacgcccccttgttatctagaccttcgggatcatctaagaaatgtagctgaaacccaaggagccagctagaaagaagcttttgattagatgtacaatacattgggggcagaagatctgggatcaattaagatggagcctgaaggactatggaatcttgcttgtcaggaatgggcaagtctacttcctgccatttctgaaagccccgcgggaccagcttctaggctgagctgcctagtaggctgaagcttcaggactctgcaggtcaaggatatgtgatgagcaccggcctaagtgtttgctcttcagattcctaagtagcacaagactttatcagaatctataggcataccaacctggatcactcttccacccaaccgaggagtagatgcatctgaatcttcatatcggtatattaagtccaaaagatggtccgggctgcccctcacaaaagcttctgcatccacgtggtaagctcccatggatgacagggttctgtatgatggagactattattgctattgctgctaattccatgagctgtgaagatccctaaccaactcagctgtaacatatgcaattctgtggtgggaagaggctgtgtgtccaaggatggtgctgaaatcactgccttaaggtctctgctgtgcagaatgaggaggcccccgagctggctgttctaacttagaaggaagagaagactggatgggcctgcttgggatctaggcctcttctaaaccctatcctaagctccagttccatggcaaggctcagacttttaatgccatcttaatctgatggttgagcgcttcactctattttctggtgctgcccagccagtgccttctgccatggatgttactggctacttgagaaaaaggagaggggagaaccccttctttcattccaactgcctccgaccccaaagggattcttggctctctggtaaccatggataccaccatgaattttatttggatcctcagcaggttgattctggaggcctcatgctatgactttttatttctcttcctgggatccaccaccctctactctcagctgactgctgcatttaggccaggtctccaattgctttcctccagaaagtgtgttcccgtctagtgaggtagtattgaagcctcggctttccctctggagcctgggaccctgtttacagttgcacatctgggcccctcactgtggggattgatcattctcatgaaggaatcacagttatatggcaactgcagaaggctgagcctcctcatggtgctataaccccttgggacactcatccagacttctctgaagcagaaaacctgagctccccactcactgccctagaatttatggcaaggagcaaatctacagcattctctcccacctacgtcctgcttcttggttgagactactgggatccttcagaaaagaaacactgggtcccatagctaaattctcaaccgccaggcaccttcagaagaatccagcctaatactggaatttgtgctattatcttcctctccagccccccaactccatccctcaccacagttgtctaggaaatgacatgaattcaatatctaatgtcaaccaatggggagagccacaactccaggagaggttcctgagctgagtcccttaatttctggatgaagaagaccaacaagttttgtccaatgtatttgtttctcagaccttgcctaggcactaaaaataaaatactaggtcattggaggctaatgtgggacctgatgtctgcgtgtgtgtgtgtgtgtgtgtgtgtgtgtgtctccctctctcacacacacaagagcagtttgctgttgctgtttcctaccttctgaggcttcaaagtattttttaaaatctatgctttgtggcagctctacggtgcttatctctgtctttgtgtcaatccttaagtacccatgtctttttcatgtctaaccattgggaaggtagaggctggcagggaagacaaatctgctacaagtccatgggaagaccctacaatgaaatgttcattggttggtatactgttttagtcttgaattgccaactttccaactgatctatccatattccttaagtactaaagacaaaatagagggcttctttttctctcttaatgtcttgccttctggttttcctggtttgcaagactaagtgtacctaatctcaccatctcttcacttctagctctctgaaacaagggtcacactactcagagggataaccccttacagtggtctgaggagtaactatttcctaaagtattctaaaagagtaggaagagagaaatggtagcctgctgcttctcacagacacctcacatcctcacttgggatggcatccacatagaaaccctgcatttaggtaaaatttgcctgactgaaggggactcagtcctccaaatcaaggtcaagaagatatctgcatgagaccttaagaactctttattgccattatttggagagggcgggggaattgtcctaatcacacatttaacacagggaataagtgctgaagtgacccagatcaccaagcgcagttcctcatcatactttatttttgctttccttattccttggcactgactaagctaaagttaagaagccgacttcataagccaacccctgtgatgggatggaaaaatgggcttttgcagagggtttattaatagagatggatatactactcacaagttctggctcatggctccactgagaaggccatagtaataaaatgatcttatgaacactgttccccaaaggccaaagcctgaagatattgccccttataatccaatcagccttatattttaataagtcctgaatcaacctgactacggatatatggggccaccagggtgcatgggtgcatgtctgctcagcctagccctggaagtgagcactgccggccacagatcctgggaaaggtggtagtaacccagaagatgtagccttgaagggaggatacctatcaaaatgccaaagctgcagggacacgaagacggttgaaaattcaacctgtgtatactagatccttccagtttgatggtttggtcattcttcttcatgattataccatggagaattttctgtgacaagggtggtcatggaagtaagtgagtgatcccctggtttctcattccttaaagcagtggttcgcaaagtatggcacaagaccagcagcatcagcagcctttgggaacttgttagaaacgaaaattctcaatcccatcccagatctgctgaatcagaaactctaatgagaggacccggcaatccacgttttaataagccctcctggtgattctgatgcacactaaattcaactgttttaaagggaaagccctttatagtattggagttcccacactgagaggctttggggcccaaaataagaaggttctaggttgtcattcagactttaacattaatttcaaagtcacctttctcatgcttccttgtgtttctgtttttccatttatgattttaacaaagaaaggtatgtgtgcttttgggtggaagttaggagaatgtttgtgtctttcctagttgaatacaaccttcagagaaaaaccttatgccttggaaattactacctggcacacaaaggggcttcaacaaggaaaagcagttggaggtctcttccagattgctcttctgccgaattatttgtatctattccgagctgattatgtaataggatggaaaaagtaaaaaaaaaaaaaaaaatctaatttgtatttccatgacaacgtgttctcccagcaacatccctctcctttatttgagttataaagggcactgctgggcctgagaaccaggccagaacctccttctgtatggcagctaacagtgtagggctccagtatcccaggaaggccccttatccacactccactcagctcataggagagtcttgcataatgaagacacagacctgggcacttcagtccttgtgctcctcctctcttttccccacagcaggacctggatacagaagtactcagccaaggtgacagaataaaatcctttttttgttgttttctgtttgtttgtttgttttggagaaggagtctcgctttgtcacccaggctggtgtgcagtggcacgatctcggctcactgcaacctccgcctcccaggttcaagcgattctcctgtctcagcctcctgagtagctgggattacagacgtgcgccatcacgcccagctaatttttgtatttttagtagatacggagttttgccttgttggccaggctgtgctggagctcctgacctcaggtgattcacctgccacagcctcccaaagtgctgggattacaggcgtgagccacagcaccctgccaaataagatcctttttaaaaaatatctgaaaaaagcttcatatctttacaaactcataaaatagctgattgggccatggaggagatgaggctgtttagaactggttttgtttcaagtttgtcaattttccctgtatgagaacttgggtaaagcacaaagaaacatacagtgctagtaacaggtctcctgcgccctggaactaagtgtttggaggaaggactaaaccccgggggaggtgagtataaaataattccactaagatcacctcctcagtccccagaaggctgatggtggatcctctggccatctcctgtggggtcttactgctcctctgccatttctctatgcctgaagacacgaagatgatatcaaggcagagctaccatatcgcagccagtctctaggctactgctgtgcagtggctcccactttctaatgcttttttgtttttgctttttctaacaaaacaatcttttttcaaaatgaattccaacccctgctagcttccttccccgcctccatactgttttaggcagcaccgtttatgtgacagagtccgtgtttctcaaatgcatggtgttcctcaggtggagagtgggcagaagtttttgcaacactttttttttaagttattgggtgcaaaatcccaaaccaggatatgtgtatgtctgtgtgtttatgttttttatttgaccctcccctctttcaacctacccccttttatatctaatgtagaaaaagcgaaattgaatctggaaagcaaactgttgtatatagttgcggtaacaatcatgaagagagagccgggctgtcccctcagtaattcattttaaataacaaattatttaaaaataaaattcatgccagagccagctgaagaggccttccttcatcaccactgaggccacccccaatctgggccctctgtccatctggcatgtctcctcccagcaagattcatctgttcaatgccatttgcgtttcaataaagttatctcctgtactgtccactg

SEQ ID NO: 20026 - DNA, 5353 bp, Homo sapiens
  source 1..5353: mol_type = unassigned DNA
ggagaaaagggagcggagggcaggcgagggttaggtttccgaccctccgcgtggcccacagctcataccttttcgggtgtccccgggtgtcaggcgagagcggtcctggggggcgctgggtgcccacccggtgaatggccgcctgagccggggaagatgcttcatctgcccctgcccagatccggaagaacggtgaatttcccccgcagctgggatgaaagcagctccatcagtagtggactcagcgatgcctcagacaatctcagttcagaagaattcaatgccagctcctcactcaactccctcccaagtactcccactgcttctcgcaggaactcaacaatagtgctacgcacagactcagagaagcgctcactggcagaaagtgggctgagctggtttagtgaatcagaggagaaagcccctaaaaaactggagtacgacagtggtagcctgaagatggaacctgggacttctaagtggcggagggagcggcctgagagctgtgatgattcatccaagggtggagaactgaaaaagcccatcagcctgggccaccctggttccctgaagaagggcaagaccccacctgtggctgtaacttcccccatcactcacacagcccagagtgccctcaaagtcgcaggcaaacctgagggcaaagctacagacaagggtaagcttgcagtgaagaatactgggctccaacgctcctcctctgatgctggtcgggaccgcctgagtgatgctaagaagcccccctcgggcattgctcgcccctccacttcgggatcctttggctacaagaagcctcctcctgccacaggcacagccactgtcatgcaaactggtggttcagccactctcagcaagatccagaagtcctcaggcatccctgtcaagccagtaaatgggcgcaagactagcttagatgtttccaacagtgcagagccaggattcctggctcctggagcccgttctaacatccagtaccgcagcctgccccggccagccaagtcaagttctatgagcgtgaccggcgggcggggtggacctcgccctgtgagcagcagcattgaccccagtctcctcagcaccaagcagggaggccttacgccttccagactgaaggagcctaccaaggtagccagtgggcggaccactccagcccctgtcaatcagacagatcgggaaaaggagaaggccaaagccaaggcagtggccttggactcagacaacatctccttgaagagtattggctccccagaaagtactcccaagaaccaagcaagccaccccacagccaccaagctggcagagctgccaccaacccctctcagggccacagcgaagagctttgtcaaaccaccctcactagccaatcttgacaaggtcaactccaacagtctggatctaccatcatccagtgataccacccatgcttcaaaggtcccagatctgcatgctacaagctcagcatctgggggccctctcccttcctgcttcacccccagtccggcacccatcctcaatattaactcagccagcttctcccagggcctggagctaatgagtggtttcagtgtgccaaaagagacccgcatgtaccccaaactctcaggcctgcacaggagcatggagtccctccagatgccaatgagcctccccagtgccttccccagcagtactcccgtccccaccccacctgctccccctgctgctcccacagaagaagagacggaagagctgacttggagtggaagccccagagctgggcaactggacagtaatcagcgggatcggaacactcttcccaagaaagggctcaggtaccagcttcagtcccaggaggagaccaaggagaggcgacattcccataccattggtgggctgcctgaatccgatgaccagtcagagctgccttctccccctgcacttcccatgtctctgagtgcaaagggccaacttaccaacatagtgagtcccactgcggccaccacgccaagaatcacccgctccaacagcatccccacccacgaggcggccttcgagctgtacagcggctcccaaatggggagcaccctgtccctggccgagagacccaagggaatgattcggtcaggatccttccgagaccccacggacgatgttcacggctcagtgctgtccctggcctccagtgcctcctccacctactcctcagctgaggagaggatgcaatctgagcaaatccggaagcttcgtagggaactggaatcatcccaggaaaaagtggccaccttgacgtctcagctttctgccaatgctaatctggtggctgcttttgagcagagcctggtgaatatgacatcccgcctgcgacacctggcagagacggccgaggagaaggacactgagctgctggatttgcgagaaaccatagactttctgaagaaaaagaactctgaggcccaggcagtcattcagggagcccttaatgcctcagaaaccacacccaaagaacttcggatcaagagacaaaactcctcagatagcatctcaagcctcaacagcatcactagccattccagcatcggcagcagcaaggatgctgatgcgaaaaagaagaaaaaaaagagttggcttcgaagttccttcaacaaagcgttcagtataaaaaaggggcccaagtcagcttcctcatactcggatatagaggagattgctacacccgactcttcagccccctcatcccccaaactacagcatggttctacagagactgcttcaccctccatcaagtcctccacctcgtcctccgtgggcactgatgtcaccgagggccctgctcacccagccccccacactaggctgttccatgcaaatgaggaggaggagccagagaagaaggaggtatcggagctgcgctctgagctatgggagaaggaaatgaagcttacagacatccgcttggaggccctcaactctgcccaccaactggatcagcttcgggagaccatgcacaacatgcagttggaggtggacctgctgaaagcagagaatgaccgactgaaggtagccccaggcccctcatcaggctccactccagggcaggtccctggatcatctgcattatcttccccacgccgctccctaggcctggcactcacccattccttcggccccagtcttgcagacacagacctgtcacccatggatggcatcagtacttgtggtccaaaggaggaagtgaccctccgggtggtggtgaggatgcccccgcagcacatcatcaaaggggacttgaagcagcaggaattcttcctgggctgtagcaaggtcagtggaaaagttgactggaagatgctggatgaagctgttttccaagtgttcaaggactatatttctaaaatggacccagcctctaccctgggactaagcactgagtccatccatggctacagcatcagccacgtgaaacgagtgttggatgcagagccccccgagatgcctccttgccgtcgaggtgtcaataacatatcagtctccctcaaaggtctgaaggagaaatgcgtcgacagcctggtgttcgagacgctgatccccaagccgatgatgcagcactacataagcctcctgctgaagcaccggcgcctcgtcctctcgggccccagcggcacgggcaagacctacctgaccaatcgcttggccgagtacctggtggagcgctctggccgtgaggtcacagagggcatcgtcagcaccttcaacatgcaccagcagtcttgcaaggatctgcaactgtatctttccaacctagccaaccagatagaccgggaaacaggaattggggatgtgcccctggtgattctattggatgacctgagtgaagcaggctccatcagtgagttggtcaatggggccctcacctgcaagtatcataaatgtccctatattataggtaccaccaatcagcctgtaaaaatgacacccaaccatggcttgcacttgagcttcagcaggatgttgaccttctccaacaacgtggagccagccaatggcttcctggttcgttacctgaggaggaagctggtagagtcagacagcgacatcaatgccaacaaggaagagctgcttcgggtgctcgactgggtacccaagctgtggtatcatctccacaccttccttgagaagcacagcacctcagacttcctcatcggtagcccttgcttctttctgtcgtgtcccattggcattgaggacttccggacctggttcattgacctgtggaacaactctatcattccctatctacaggaaggagccaaggatgggataaaggtccatggacagaaagctgcttgggaggacccagtggaatgggtccgggacacacttccctggccatcagcccaacaagacgacagcaccccaagttctctggactcagatcctctgatggccatgctgctgaaacttcaagaagctgccaactacattgagtctccagatcgagaaaccatcctggaccccaaccttcaggcaacactttaagggttcggcaatcactgtcacccccggacagcagaacgctggcatcagctatcttagctcctcctctcccctctcctctttcagagcactggctctccagccccaggaggagaacaggagggaggaggagatgaaagaggagggacaggttcttggtgctgtacctttgagaacttcctaggaaggaatggtggggtggcgtttgggaacttgtgccccctaaacacatttactggcctcctctaatgactttggggaaaagatgattctgggtctttcccttgacttcttgtttcaattacaaactcctgggctttctggggaggggttcagaaaacatcaaaacactgcagcagttcctaaatgattctcacaagcaaccctgagagagacagtcttgtgagggagatctgggggaggcaggaagctcctcagattttctcacagacccttcccaattccatcaccactgccaacaactcctcccccagagatctggctggagcccagaaaaagaagcatgtggtttaaaaaatgtttaaatcaatctgtaaaaggtaaaaatgaaaaacaaaaacaagcaaacaaacaaaaaacaatggaaaagatgaagctggagagagaggaaccagttgccaaggtagagagctgcccgctcctgccctctggatgacataggggacatcaacaagacggctgccaacctgagaagtcaccaaaccacaaaaataaccttacagccttcagggaaagactaccagctctgtctttctaccctctaatttaacaatgcataagagtcaataaaccctactttttt

SEQ ID NO: 20027 - DNA, 13075 bp, Homo sapiens
  source 1..13075: mol_type = unassigned DNA
ggagccgcggggcttccatccttcctttgactgatttttaaattttaatttgtattttccccgccgccccgccccttttcctccgaccccgccctatcgctccccggcttccctgctctttcctttttcccggcttccttcctcgcgtttctttcccctgcgccctcggcttgcctctctccctcctccctcgctctctcccccttctctccccttcttcctcggtttcttccgtcctctctctccccctcctcctcccccgcctcctcctcctgcgctcccgccccctgccccctccccccgtgcctgcagacgcgcggatcgtccatgcgctcctcgcgggcagaatgctgggcagcagcgtcaagagcgtgcagcccgaggtggagctgagcagcggcggcggcgacgagggcgcggacgaaccgcggggcgccggcaggaaggcggcagcggcggacggcagaggcatgctgcccaagcgcgccaaggcgcccggcggcggcggcggcatggccaaggccagcgcggctgagctgaaggtcttcaagtccggcagcgtggacagccgtgtccccggcgggccgcccgcctccaacctgcgcaagcagaagtcactcaccaacctctcttttctcacggactccgagaaaaagctgcagctttatgagcccgaatggagcgacgatatggccaaggcgcccaaaggcttaggcaaggtggggtccaagggccgtgaagctccgctgatgtccaagacgctgtccaagtcggagcactcgctcttccaggccaagggcagcccggcgggcggcgccaagacccccctggctccgctcgcgcccaacctgggaaagccgagccggatccctcgaggaccctatgcggaggtcaagccgctcagcaaggcgcctgaagcggccgtgagcgaagatggcaaatcggacgacgagctgctctccagcaaggccaaggcgcaaaagagctctgggcctgtcccctctgccaagggccaggaggagcgcgccttcctcaaggtggaccccgagctggtggtgaccgtgctgggagacctggagcagctgctcttcagccagatgctggacccagagtcccagagaaagaggacagtgcagaatgtcctggatctccggcagaacctggaagagaccatgtccagcctgcgagggtcccaggtgactcacagctccctggagatgacctgctacgacagcgatgatgccaacccacgcagcgtgtccagcctctccaaccgctcgtcccctctgtcatggcgctatggccagtccagtccgcggctgcaggctggtgacgcgccctctgtgggtgggagctgccgctcggaggggacgcccgcctggtacatgcacggcgaacgggcccactactcccacaccatgcccatgcgcagccccagcaagctcagccatatctcccgcctggagctggtcgaatccctggactcggatgaggtggacctcaagtccggctacatgagcgacagtgacctcatgggcaagaccatgacggaggatgatgacatcactaccggctgggatgaaagcagctccatcagtagtggactcagcgatgcctcagacaatctcagttcagaagaattcaatgccagctcctcactcaactccctcccaagtactcccactgcttctcgcaggaactcaacaatagtgctacgcacagactcagagaagcgctcactggcagaaagtgggctgagctggtttagtgaatcagaggagaaagcccctaaaaaactggagtacgacagtggtagcctgaagatggaacctgggacttctaagtggcggagggagcggcctgagagctgtgatgattcatccaagggtggagaactgaaaaagcccatcagcctgggccaccctggttccctgaagaagggcaagaccccacctgtggctgtaacttcccccatcactcacacagcccagagtgccctcaaagtcgcaggcaaacctgagggcaaagctacagacaagggtaagcttgcagtgaagaatactgggctccaacgctcctcctctgatgctggtcgggaccgcctgagtgatgctaagaagcccccctcgggcattgctcgcccctccacttcgggatcctttggctacaagaagcctcctcctgccacaggcacagccactgtcatgcaaactggtggttcagccactctcagcaagatccagaagtcctcaggcatccctgtcaagccagtaaatgggcgcaagactagcttagatgtttccaacagtgcagagccaggattcctggctcctggagcccgttctaacatccagtaccgcagcctgccccggccagccaagtcaagttctatgagcgtgaccggcgggcggggtggacctcgccctgtgagcagcagcattgaccccagtctcctcagcaccaagcagggaggccttacgccttccagactgaaggagcctaccaaggtagccagtgggcggaccactccagcccctgtcaatcagacagatcgggaaaaggagaaggccaaagccaaggcagtggccttggactcagacaacatctccttgaagagtattggctccccagaaagtactcccaagaaccaagcaagccaccccacagccaccaagctggcagagctgccaccaacccctctcagggccacagcgaagagctttgtcaaaccaccctcactagccaatcttgacaaggtcaactccaacagtctggatctaccatcatccagtgataccacccatgcttcaaaggtcccagatctgcatgctacaagctcagcatctgggggccctctcccttcctgcttcacccccagtccggcacccatcctcaatattaactcagccagcttctcccagggcctggagctaatgagtggtttcagtgtgccaaaagagacccgcatgtaccccaaactctcaggcctgcacaggagcatggagtccctccagatgccaatgagcctccccagtgccttccccagcagtactcccgtccccaccccacctgctccccctgctgctcccacagaagaagagacggaagagctgacttggagtggaagccccagagctgggcaactggacagtaatcagcgggatcggaacactcttcccaagaaagggctcaggtaccagcttcagtcccaggaggagaccaaggagaggcgacattcccataccattggtgggctgcctgaatccgatgaccagtcagagctgccttctccccctgcacttcccatgtctctgagtgcaaagggccaacttaccaacatagtgagtcccactgcggccaccacgccaagaatcacccgctccaacagcatccccacccacgaggcggccttcgagctgtacagcggctcccaaatggggagcaccctgtccctggccgagagacccaagggaatgattcggtcaggatccttccgagaccccacggacgatgttcacggctcagtgctgtccctggcctccagtgcctcctccacctactcctcacaaatccggaagcttcgtagggaactggaatcatcccaggaaaaagtggccaccttgacgtctcagctttctgccaatgctaatctggtggctgcttttgagcagagcctggtgaatatgacatcccgcctgcgacacctggcagagacggccgaggagaagatggagtttcgttcttgtcacccaggctggagtgcactggcgcgatcttggctaactgcaaactctgcctcccaggacactgagctgctggatttgcgagaaaccatagactttctgaagaaaaagaactctgaggcccaggcagtcattcagggagcccttaatgcctcagaaaccacacccaaagaacttcggatcaagagacaaaactcctcagatagcatctcaagcctcaacagcatcactagccattccagcatcggcagcagcaaggatgctgatgcgaaaaagaagaaaaaaaagagttgggtaggtaaagcttcgaagttccttcaacaaagcgttcagtataaaaaaggggcccaagtcagcttcctcatactcggatatagaggagattgctacacccgactcttcagccccctcatcccccaaactacagcatggttctacagagactgcttcaccctccatcaagtcctccacctcgtcctccgtgggcactgatgtcaccgagggccctgctcacccagccccccacactaggctgttccatgcaaatgaggaggaggagccagagaagaaggaggtatcggagctgcgctctgagctatgggagaaggaaatgaagcttacagacatccgcttggaggccctcaactctgcccaccaactggatcagcttcgggagaccatgcacaacatgcagttggaggtggacctgctgaaagcagagaatgaccgactgaaggtagccccaggcccctcatcaggctccactccagggcaggtccctggatcatctgcattatcttccccacgccgctccctaggcctggcactcacccattccttcggccccagtcttgcagacacagacctgtcacccatggatggcatcagtacttgtggtccaaaggaggaagtgaccctccgggtggtggtgaggatgcccccgcagcacatcatcaaaggggacttgaagcagcaggaattcttcctgggctgtagcaaggtcagtggaaaagttgactggaagatgctggatgaagctgttttccaagtgttcaaggactatatttctaaaatggacccagcctctaccctgggactaagcactgagtccatccatggctacagcatcagccacgtgaaacgagtgttggatgcagagccccccgagatgcctccttgccgtcgaggtgtcaataacatatcagtctccctcaaaggtctgaaggagaaatgcgtcgacagcctggtgttcgagacgctgatccccaagccgatgatgcagcactacataagcctcctgctgaagcaccggcgcctcgtcctctcgggccccagcggcacgggcaagacctacctgaccaatcgcttggccgagtacctggtggagcgctctggccgtgaggtcacagagggcatcgtcagcaccttcaacatgcaccagcagtcttgcaaggatctgcaactgtatctttccaacctagccaaccagatagaccgggaaacaggaattggggatgtgcccctggtgattctattggatgacctgagtgaagcaggctccatcagtgagttggtcaatggggccctcacctgcaagtatcataaatgtccctatattataggtaccaccaatcagcctgtaaaaatgacacccaaccatggcttgcacttgagcttcaggatgttgaccttctccaacaacgtggagccagccaatggcttcctggttcgttacctgaggaggaagctggtagagtcagacagcgacatcaatgccaacaaggaagagctgcttcgggtgctcgactgggtacccaagctgtggtatcatctccacaccttccttgagaagcacagcacctcagacttcctcatcggcccttgcttctttctgtcgtgtcccattggcattgaggacttccggacctggttcattgacctgtggaacaactctatcattccctatctacaggaaggagccaaggatgggataaaggtccatggacagaaagctgcttgggaggacccagtggaatgggtccgggacacacttccctggccatcagcccaacaagaccaatcaaagctgtaccacctgcccccacccaccgtgggccctcacagcattgcctcacctcccgaggataggacagtcaaagacagcaccccaagttctctggactcagatcctctgatggccatgctgctgaaacttcaagaagctgccaactacattgagtctccagatcgagaaaccatcctggaccccaaccttcaggcaacactttaagggttcggcaatcactgtcacccccggacagcagaacgctggcatcagctatcttagctcctcctctcccctctcctctttcagagcactggctctccagccccaggaggagaacaggagggaggaggagatgaaagaggagggacaggttcttggtgctgtacctttgagaacttcctaggaaggaatggtggggtggcgtttgggaacttgtgccccctaaacacatttactggcctcctctaatgactttggggaaaagatgattctgggtctttcccttgacttcttgtttcaattacaaactcctgggctttctggggaggggttcagaaaacatcaaaacactgcagcagttcctaaatgattctcacaagcaaccctgagagagacagtcttgtgagggagatctgggggaggcaggaagctcctcagattttctcacagacccttcccaattccatcaccactgccaacaactcctcccccagagatctggctggagcccagaaaaagaagcatgtggtttaaaaaatgtttaaatcaatctgtaaaaggtaaaaatgaaaaacaaaaacaagcaaacaaacaaaaaacaatggaaaagatgaagctggagagagaggaaccagttgccaaggtagagagctgcccgctcctgccctctggatgacataggggacatcaacaagacggctgccaacctgagaagtcaccaaaccacaaaaataaccttacagccttcagggaaagactaccagctctgtctttctaccctctaatttaacaatgcataagagtcaataaaccctacttttttatttttggtttttattttgttttcatttttttctcccatttgcctatttatttttttgtttcccttttttttttctttttccgtttttccatttcctcacatgtccacgagatgcttgggttgcttttccaggggctagtttggcttttccaagtgggttttctttggagaatctgatgccatgcaattggcatgacacctgccatgccactatctttggcatccatggggcttatatgagacatgaagcattggctcagaagtagagggagaagaggaacccagttcccttgacttcccttttgagagcacacgttctgctgggtagctcaattgccagcctctgtcatgagaaggtatagccccatcttgatagaagagttactccgagctttatcatggaccagaggaaaaccagaaaactgaaaacattcctctgtcttgtggccagtttggcctttcactgcactattctgatggtgcctgactgaatccaaatatcctagctggctcttactatttttcacaaatgagtattcacatataagagatgaacatccatgtgagatcatcccaatcagaatataagactcaaggagtttgacttggtggccaatacctgccttccaaagagatcctacctttgcagatttgctcctttcccattgccttgaaggtctggcaatccctgttctttcatttgacaagtacttactgagtactcactatatacaaatcattaggttaaaacagacacacacacacacacacacacacacacacacacacacacacacacaagacctgggcccttaagtttacagtccagcaggaaatgttaacctccattcagctacgcccccttgttatctagaccttcgggatcatctaagaaatgtagctgaaacccaaggagccagctagaaagaagcttttgattagatgtacaatacattgggggcagaagatctgggatcaattaagatggagcctgaaggactatggaatcttgcttgtcaggaatgggcaagtctacttcctgccatttctgaaagccccgcgggaccagcttctaggctgagctgcctagtaggctgaagcttcaggactctgcaggtcaaggatatgtgatgagcaccggcctaagtgtttgctcttcagattcctaagtagcacaagactttatcagaatctataggcataccaacctggatcactcttccacccaaccgaggagtagatgcatctgaatcttcatatcggtatattaagtccaaaagatggtccgggctgcccctcacaaaagcttctgcatccacgtggtaagctcccatggatgacagggttctgtatgatggagactattattgctattgctgctaattccatgagctgtgaagatccctaaccaactcagctgtaacatatgcaattctgtggtgggaagaggctgtgtgtccaaggatggtgctgaaatcactgccttaaggtctctgctgtgcagaatgaggaggcccccgagctggctgttctaacttagaaggaagagaagactggatgggcctgcttgggatctaggcctcttctaaaccctatcctaagctccagttccatggcaaggctcagacttttaatgccatcttaatctgatggttgagcgcttcactctattttctggtgctgcccagccagtgccttctgccatggatgttactggctacttgagaaaaaggagaggggagaaccccttctttcattccaactgcctccgaccccaaagggattcttggctctctggtaaccatggataccaccatgaattttatttggatcctcagcaggttgattctggaggcctcatgctatgactttttatttctcttcctgggatccaccaccctctactctcagctgactgctgcatttaggccaggtctccaattgctttcctccagaaagtgtgttcccgtctagtgaggtagtattgaagcctcggctttccctctggagcctgggaccctgtttacagttgcacatctgggcccctcactgtggggattgatcattctcatgaaggaatcacagttatatggcaactgcagaaggctgagcctcctcatggtgctataaccccttgggacactcatccagacttctctgaagcagaaaacctgagctccccactcactgccctagaatttatggcaaggagcaaatctacagcattctctcccacctacgtcctgcttcttggttgagactactgggatccttcagaaaagaaacactgggtcccatagctaaattctcaaccgccaggcaccttcagaagaatccagcctaatactggaatttgtgctattatcttcctctccagccccccaactccatccctcaccacagttgtctaggaaatgacatgaattcaatatctaatgtcaaccaatggggagagccacaactccaggagaggttcctgagctgagtcccttaatttctggatgaagaagaccaacaagttttgtccaatgtatttgtttctcagaccttgcctaggcactaaaaataaaatactaggtcattggaggctaatgtgggacctgatgtctgcgtgtgtgtgtgtgtgtgtgtgtgtgtgtgtctccctctctcacacacacaagagcagtttgctgttgctgtttcctaccttctgaggcttcaaagtattttttaaaatctatgctttgtggcagctctacggtgcttatctctgtctttgtgtcaatccttaagtacccatgtctttttcatgtctaaccattgggaaggtagaggctggcagggaagacaaatctgctacaagtccatgggaagaccctacaatgaaatgttcattggttggtatactgttttagtcttgaattgccaactttccaactgatctatccatattccttaagtactaaagacaaaatagagggcttctttttctctcttaatgtcttgccttctggttttcctggtttgcaagactaagtgtacctaatctcaccatctcttcacttctagctctctgaaacaagggtcacactactcagagggataaccccttacagtggtctgaggagtaactatttcctaaagtattctaaaagagtaggaagagagaaatggtagcctgctgcttctcacagacacctcacatcctcacttgggatggcatccacatagaaaccctgcatttaggtaaaatttgcctgactgaaggggactcagtcctccaaatcaaggtcaagaagatatctgcatgagaccttaagaactctttattgccattatttggagagggcgggggaattgtcctaatcacacatttaacacagggaataagtgctgaagtgacccagatcaccaagcgcagttcctcatcatactttatttttgctttccttattccttggcactgactaagctaaagttaagaagccgacttcataagccaacccctgtgatgggatggaaaaatgggcttttgcagagggtttattaatagagatggatatactactcacaagttctggctcatggctccactgagaaggccatagtaataaaatgatcttatgaacactgttccccaaaggccaaagcctgaagatattgccccttataatccaatcagccttatattttaataagtcctgaatcaacctgactacggatatatggggccaccagggtgcatgggtgcatgtctgctcagcctagccctggaagtgagcactgccggccacagatcctgggaaaggtggtagtaacccagaagatgtagccttgaagggaggatacctatcaaaatgccaaagctgcagggacacgaagacggttgaaaattcaacctgtgtatactagatccttccagtttgatggtttggtcattcttcttcatgattataccatggagaattttctgtgacaagggtggtcatggaagtaagtgagtgatcccctggtttctcattccttaaagcagtggttcgcaaagtatggcacaagaccagcagcatcagcagcctttgggaacttgttagaaacgaaaattctcaatcccatcccagatctgctgaatcagaaactctaatgagaggacccggcaatccacgttttaataagccctcctggtgattctgatgcacactaaattcaactgttttaaagggaaagccctttatagtattggagttcccacactgagaggctttggggcccaaaataagaaggttctaggttgtcattcagactttaacattaatttcaaagtcacctttctcatgcttccttgtgtttctgtttttccatttatgattttaacaaagaaaggtatgtgtgcttttgggtggaagttaggagaatgtttgtgtctttcctagttgaatacaaccttcagagaaaaaccttatgccttggaaattactacctggcacacaaaggggcttcaacaaggaaaagcagttggaggtctcttccagattgctcttctgccgaattatttgtatctattccgagctgattatgtaataggatggaaaaagtaaaaaaaaaaaaaaaaatctaatttgtatttccatgacaacgtgttctcccagcaacatccctctcctttatttgagttataaagggcactgctgggcctgagaaccaggccagaacctccttctgtatggcagctaacagtgtagggctccagtatcccaggaaggccccttatccacactccactcagctcataggagagtcttgcataatgaagacacagacctgggcacttcagtccttgtgctcctcctctcttttccccacagcaggacctggatacagaagtactcagccaaggtgacagaataaaatcctttttttgttgttttctgtttgtttgtttgttttggagaaggagtctcgctttgtcacccaggctggtgtgcagtggcacgatctcggctcactgcaacctccgcctcccaggttcaagcgattctcctgtctcagcctcctgagtagctgggattacagacgtgcgccatcacgcccagctaatttttgtatttttagtagatacggagttttgccttgttggccaggctgtgctggagctcctgacctcaggtgattcacctgccacagcctcccaaagtgctgggattacaggcgtgagccacagcaccctgccaaataagatcctttttaaaaaatatctgaaaaaagcttcatatctttacaaactcataaaatagctgattgggccatggaggagatgaggctgtttagaactggttttgtttcaagtttgtcaattttccctgtatgagaacttgggtaaagcacaaagaaacatacagtgctagtaacaggtctcctgcgccctggaactaagtgtttggaggaaggactaaaccccgggggaggtgagtataaaataattccactaagatcacctcctcagtccccagaaggctgatggtggatcctctggccatctcctgtggggtcttactgctcctctgccatttctctatgcctgaagacacgaagatgatatcaaggcagagctaccatatcgcagccagtctctaggctactgctgtgcagtggctcccactttctaatgcttttttgtttttgctttttctaacaaaacaatcttttttcaaaatgaattccaacccctgctagcttccttccccgcctccatactgttttaggcagcaccgtttatgtgacagagtccgtgtttctcaaatgcatggtgttcctcaggtggagagtgggcagaagtttttgcaacactttttttttaagttattgggtgcaaaatcccaaaccaggatatgtgtatgtctgtgtgtttatgttttttatttgaccctcccctctttcaacctacccccttttatatctaatgtagaaaaagcgaaattgaatctggaaagcaaactgttgtatatagttgcggtaacaatcatgaagagagagccgggctgtcccctcagtaattcattttaaataacaaattatttaaaaataaaattcatgccagagccagctgaagaggccttccttcatcaccactgaggccacccccaatctgggccctctgtccatctggcatgtctcctcccagcaagattcatctgttcaatgccatttgcgtttcaataaagttatctcctgtactgtccactg

SEQ ID NO: 20028 - DNA, 11645 bp, Homo sapiens
  source 1..11645: mol_type = unassigned DNA
ggagaaaagggagcggagggcaggcgagggttaggtttccgaccctccgcgtggcccacagctcataccttttcgggtgtccccgggtgtcaggcgagagcggtcctggggggcgctgggtgcccacccggtgaatggccgcctgagccggggaagatgcttcatctgcccctgcccagatccggaagaacggtgaatttcccccgcagctgggatgaaagcagctccatcagtagtggactcagcgatgcctcagacaatctcagttcagaagaattcaatgccagctcctcactcaactccctcccaagtactcccactgcttctcgcaggaactcaacaatagtgctacgcacagactcagagaagcgctcactggcagaaagtgggctgagctggtttagtgaatcagaggagaaagcccctaaaaaactggagtacgacagtggtagcctgaagatggaacctgggacttctaagtggcggagggagcggcctgagagctgtgatgattcatccaagggtggagaactgaaaaagcccatcagcctgggccaccctggttccctgaagaagggcaagaccccacctgtggctgtaacttcccccatcactcacacagcccagagtgccctcaaagtcgcaggcaaacctgagggcaaagctacagacaagggtaagcttgcagtgaagaatactgggctccaacgctcctcctctgatgctggtcgggaccgcctgagtgatgctaagaagcccccctcgggcattgctcgcccctccacttcgggatcctttggctacaagaagcctcctcctgccacaggcacagccactgtcatgcaaactggtggttcagccactctcagcaagatccagaagtcctcaggcatccctgtcaagccagtaaatgggcgcaagactagcttagatgtttccaacagtgcagagccaggattcctggctcctggagcccgttctaacatccagtaccgcagcctgccccggccagccaagtcaagttctatgagcgtgaccggcgggcggggtggacctcgccctgtgagcagcagcattgaccccagtctcctcagcaccaagcagggaggccttacgccttccagactgaaggagcctaccaaggtagccagtgggcggaccactccagcccctgtcaatcagacagatcgggaaaaggagaaggccaaagccaaggcagtggccttggactcagacaacatctccttgaagagtattggctccccagaaagtactcccaagaaccaagcaagccaccccacagccaccaagctggcagagctgccaccaacccctctcagggccacagcgaagagctttgtcaaaccaccctcactagccaatcttgacaaggtcaactccaacagtctggatctaccatcatccagtgataccacccatgcttcaaaggtcccagatctgcatgctacaagctcagcatctgggggccctctcccttcctgcttcacccccagtccggcacccatcctcaatattaactcagccagcttctcccagggcctggagctaatgagtggtttcagtgtgccaaaagagacccgcatgtaccccaaactctcaggcctgcacaggagcatggagtccctccagatgccaatgagcctccccagtgccttccccagcagtactcccgtccccaccccacctgctccccctgctgctcccacagaagaagagacggaagagctgacttggagtggaagccccagagctgggcaactggacagtaatcagcgggatcggaacactcttcccaagaaagggctcaggtaccagcttcagtcccaggaggagaccaaggagaggcgacattcccataccattggtgggctgcctgaatccgatgaccagtcagagctgccttctccccctgcacttcccatgtctctgagtgcaaagggccaacttaccaacatagtgagtcccactgcggccaccacgccaagaatcacccgctccaacagcatccccacccacgaggcggccttcgagctgtacagcggctcccaaatggggagcaccctgtccctggccgagagacccaagggaatgattcggtcaggatccttccgagaccccacggacgatgttcacggctcagtgctgtccctggcctccagtgcctcctccacctactcctcagctgaggagaggatgcaatctgagcaaatccggaagcttcgtagggaactggaatcatcccaggaaaaagtggccaccttgacgtctcagctttctgccaatgctaatctggtggctgcttttgagcagagcctggtgaatatgacatcccgcctgcgacacctggcagagacggccgaggagaaggacactgagctgctggatttgcgagaaaccatagactttctgaagaaaaagaactctgaggcccaggcagtcattcagggagcccttaatgcctcagaaaccacacccaaagaacttcggatcaagagacaaaactcctcagatagcatctcaagcctcaacagcatcactagccattccagcatcggcagcagcaaggatgctgatgcgaaaaagaagaaaaaaaagagttggcttcgaagttccttcaacaaagcgttcagtataaaaaaggggcccaagtcagcttcctcatactcggatatagaggagattgctacacccgactcttcagccccctcatcccccaaactacagcatggttctacagagactgcttcaccctccatcaagtcctccacctcgtcctccgtgggcactgatgtcaccgagggccctgctcacccagccccccacactaggctgttccatgcaaatgaggaggaggagccagagaagaaggaggtatcggagctgcgctctgagctatgggagaaggaaatgaagcttacagacatccgcttggaggccctcaactctgcccaccaactggatcagcttcgggagaccatgcacaacatgcagttggaggtggacctgctgaaagcagagaatgaccgactgaaggtagccccaggcccctcatcaggctccactccagggcaggtccctggatcatctgcattatcttccccacgccgctccctaggcctggcactcacccattccttcggccccagtcttgcagacacagacctgtcacccatggatggcatcagtacttgtggtccaaaggaggaagtgaccctccgggtggtggtgaggatgcccccgcagcacatcatcaaaggggacttgaagcagcaggaattcttcctgggctgtagcaaggtcagtggaaaagttgactggaagatgctggatgaagctgttttccaagtgttcaaggactatatttctaaaatggacccagcctctaccctgggactaagcactgagtccatccatggctacagcatcagccacgtgaaacgagtgttggatgcagagccccccgagatgcctccttgccgtcgaggtgtcaataacatatcagtctccctcaaaggtctgaaggagaaatgcgtcgacagcctggtgttcgagacgctgatccccaagccgatgatgcagcactacataagcctcctgctgaagcaccggcgcctcgtcctctcgggccccagcggcacgggcaagacctacctgaccaatcgcttggccgagtacctggtggagcgctctggccgtgaggtcacagagggcatcgtcagcaccttcaacatgcaccagcagtcttgcaaggatctgcaactgtatctttccaacctagccaaccagatagaccgggaaacaggaattggggatgtgcccctggtgattctattggatgacctgagtgaagcaggctccatcagtgagttggtcaatggggccctcacctgcaagtatcataaatgtccctatattataggtaccaccaatcagcctgtaaaaatgacacccaaccatggcttgcacttgagcttcaggatgttgaccttctccaacaacgtggagccagccaatggcttcctggttcgttacctgaggaggaagctggtagagtcagacagcgacatcaatgccaacaaggaagagctgcttcgggtgctcgactgggtacccaagctgtggtatcatctccacaccttccttgagaagcacagcacctcagacttcctcatcggcccttgcttctttctgtcgtgtcccattggcattgaggacttccggacctggttcattgacctgtggaacaactctatcattccctatctacaggaaggagccaaggatgggataaaggtccatggacagaaagctgcttgggaggacccagtggaatgggtccgggacacacttccctggccatcagcccaacaagaccaatcaaagctgtaccacctgcccccacccaccgtgggccctcacagcattgcctcacctcccgaggataggacagtcaaagacagcaccccaagttctctggactcagatcctctgatggccatgctgctgaaacttcaagaagctgccaactacattgagtctccagatcgagaaaccatcctggaccccaaccttcaggcaacactttaagggttcggcaatcactgtcacccccggacagcagaacgctggcatcagctatcttagctcctcctctcccctctcctctttcagagcactggctctccagccccaggaggagaacaggagggaggaggagatgaaagaggagggacaggttcttggtgctgtacctttgagaacttcctaggaaggaatggtggggtggcgtttgggaacttgtgccccctaaacacatttactggcctcctctaatgactttggggaaaagatgattctgggtctttcccttgacttcttgtttcaattacaaactcctgggctttctggggaggggttcagaaaacatcaaaacactgcagcagttcctaaatgattctcacaagcaaccctgagagagacagtcttgtgagggagatctgggggaggcaggaagctcctcagattttctcacagacccttcccaattccatcaccactgccaacaactcctcccccagagatctggctggagcccagaaaaagaagcatgtggtttaaaaaatgtttaaatcaatctgtaaaaggtaaaaatgaaaaacaaaaacaagcaaacaaacaaaaaacaatggaaaagatgaagctggagagagaggaaccagttgccaaggtagagagctgcccgctcctgccctctggatgacataggggacatcaacaagacggctgccaacctgagaagtcaccaaaccacaaaaataaccttacagccttcagggaaagactaccagctctgtctttctaccctctaatttaacaatgcataagagtcaataaaccctacttttttatttttggtttttattttgttttcatttttttctcccatttgcctatttatttttttgtttcccttttttttttctttttccgtttttccatttcctcacatgtccacgagatgcttgggttgcttttccaggggctagtttggcttttccaagtgggttttctttggagaatctgatgccatgcaattggcatgacacctgccatgccactatctttggcatccatggggcttatatgagacatgaagcattggctcagaagtagagggagaagaggaacccagttcccttgacttcccttttgagagcacacgttctgctgggtagctcaattgccagcctctgtcatgagaaggtatagccccatcttgatagaagagttactccgagctttatcatggaccagaggaaaaccagaaaactgaaaacattcctctgtcttgtggccagtttggcctttcactgcactattctgatggtgcctgactgaatccaaatatcctagctggctcttactatttttcacaaatgagtattcacatataagagatgaacatccatgtgagatcatcccaatcagaatataagactcaaggagtttgacttggtggccaatacctgccttccaaagagatcctacctttgcagatttgctcctttcccattgccttgaaggtctggcaatccctgttctttcatttgacaagtacttactgagtactcactatatacaaatcattaggttaaaacagacacacacacacacacacacacacacacacacacacacacacacacaagacctgggcccttaagtttacagtccagcaggaaatgttaacctccattcagctacgcccccttgttatctagaccttcgggatcatctaagaaatgtagctgaaacccaaggagccagctagaaagaagcttttgattagatgtacaatacattgggggcagaagatctgggatcaattaagatggagcctgaaggactatggaatcttgcttgtcaggaatgggcaagtctacttcctgccatttctgaaagccccgcgggaccagcttctaggctgagctgcctagtaggctgaagcttcaggactctgcaggtcaaggatatgtgatgagcaccggcctaagtgtttgctcttcagattcctaagtagcacaagactttatcagaatctataggcataccaacctggatcactcttccacccaaccgaggagtagatgcatctgaatcttcatatcggtatattaagtccaaaagatggtccgggctgcccctcacaaaagcttctgcatccacgtggtaagctcccatggatgacagggttctgtatgatggagactattattgctattgctgctaattccatgagctgtgaagatccctaaccaactcagctgtaacatatgcaattctgtggtgggaagaggctgtgtgtccaaggatggtgctgaaatcactgccttaaggtctctgctgtgcagaatgaggaggcccccgagctggctgttctaacttagaaggaagagaagactggatgggcctgcttgggatctaggcctcttctaaaccctatcctaagctccagttccatggcaaggctcagacttttaatgccatcttaatctgatggttgagcgcttcactctattttctggtgctgcccagccagtgccttctgccatggatgttactggctacttgagaaaaaggagaggggagaaccccttctttcattccaactgcctccgaccccaaagggattcttggctctctggtaaccatggataccaccatgaattttatttggatcctcagcaggttgattctggaggcctcatgctatgactttttatttctcttcctgggatccaccaccctctactctcagctgactgctgcatttaggccaggtctccaattgctttcctccagaaagtgtgttcccgtctagtgaggtagtattgaagcctcggctttccctctggagcctgggaccctgtttacagttgcacatctgggcccctcactgtggggattgatcattctcatgaaggaatcacagttatatggcaactgcagaaggctgagcctcctcatggtgctataaccccttgggacactcatccagacttctctgaagcagaaaacctgagctccccactcactgccctagaatttatggcaaggagcaaatctacagcattctctcccacctacgtcctgcttcttggttgagactactgggatccttcagaaaagaaacactgggtcccatagctaaattctcaaccgccaggcaccttcagaagaatccagcctaatactggaatttgtgctattatcttcctctccagccccccaactccatccctcaccacagttgtctaggaaatgacatgaattcaatatctaatgtcaaccaatggggagagccacaactccaggagaggttcctgagctgagtcccttaatttctggatgaagaagaccaacaagttttgtccaatgtatttgtttctcagaccttgcctaggcactaaaaataaaatactaggtcattggaggctaatgtgggacctgatgtctgcgtgtgtgtgtgtgtgtgtgtgtgtgtgtgtctccctctctcacacacacaagagcagtttgctgttgctgtttcctaccttctgaggcttcaaagtattttttaaaatctatgctttgtggcagctctacggtgcttatctctgtctttgtgtcaatccttaagtacccatgtctttttcatgtctaaccattgggaaggtagaggctggcagggaagacaaatctgctacaagtccatgggaagaccctacaatgaaatgttcattggttggtatactgttttagtcttgaattgccaactttccaactgatctatccatattccttaagtactaaagacaaaatagagggcttctttttctctcttaatgtcttgccttctggttttcctggtttgcaagactaagtgtacctaatctcaccatctcttcacttctagctctctgaaacaagggtcacactactcagagggataaccccttacagtggtctgaggagtaactatttcctaaagtattctaaaagagtaggaagagagaaatggtagcctgctgcttctcacagacacctcacatcctcacttgggatggcatccacatagaaaccctgcatttaggtaaaatttgcctgactgaaggggactcagtcctccaaatcaaggtcaagaagatatctgcatgagaccttaagaactctttattgccattatttggagagggcgggggaattgtcctaatcacacatttaacacagggaataagtgctgaagtgacccagatcaccaagcgcagttcctcatcatactttatttttgctttccttattccttggcactgactaagctaaagttaagaagccgacttcataagccaacccctgtgatgggatggaaaaatgggcttttgcagagggtttattaatagagatggatatactactcacaagttctggctcatggctccactgagaaggccatagtaataaaatgatcttatgaacactgttccccaaaggccaaagcctgaagatattgccccttataatccaatcagccttatattttaataagtcctgaatcaacctgactacggatatatggggccaccagggtgcatgggtgcatgtctgctcagcctagccctggaagtgagcactgccggccacagatcctgggaaaggtggtagtaacccagaagatgtagccttgaagggaggatacctatcaaaatgccaaagctgcagggacacgaagacggttgaaaattcaacctgtgtatactagatccttccagtttgatggtttggtcattcttcttcatgattataccatggagaattttctgtgacaagggtggtcatggaagtaagtgagtgatcccctggtttctcattccttaaagcagtggttcgcaaagtatggcacaagaccagcagcatcagcagcctttgggaacttgttagaaacgaaaattctcaatcccatcccagatctgctgaatcagaaactctaatgagaggacccggcaatccacgttttaataagccctcctggtgattctgatgcacactaaattcaactgttttaaagggaaagccctttatagtattggagttcccacactgagaggctttggggcccaaaataagaaggttctaggttgtcattcagactttaacattaatttcaaagtcacctttctcatgcttccttgtgtttctgtttttccatttatgattttaacaaagaaaggtatgtgtgcttttgggtggaagttaggagaatgtttgtgtctttcctagttgaatacaaccttcagagaaaaaccttatgccttggaaattactacctggcacacaaaggggcttcaacaaggaaaagcagttggaggtctcttccagattgctcttctgccgaattatttgtatctattccgagctgattatgtaataggatggaaaaagtaaaaaaaaaaaaaaaaatctaatttgtatttccatgacaacgtgttctcccagcaacatccctctcctttatttgagttataaagggcactgctgggcctgagaaccaggccagaacctccttctgtatggcagctaacagtgtagggctccagtatcccaggaaggccccttatccacactccactcagctcataggagagtcttgcataatgaagacacagacctgggcacttcagtccttgtgctcctcctctcttttccccacagcaggacctggatacagaagtactcagccaaggtgacagaataaaatcctttttttgttgttttctgtttgtttgtttgttttggagaaggagtctcgctttgtcacccaggctggtgtgcagtggcacgatctcggctcactgcaacctccgcctcccaggttcaagcgattctcctgtctcagcctcctgagtagctgggattacagacgtgcgccatcacgcccagctaatttttgtatttttagtagatacggagttttgccttgttggccaggctgtgctggagctcctgacctcaggtgattcacctgccacagcctcccaaagtgctgggattacaggcgtgagccacagcaccctgccaaataagatcctttttaaaaaatatctgaaaaaagcttcatatctttacaaactcataaaatagctgattgggccatggaggagatgaggctgtttagaactggttttgtttcaagtttgtcaattttccctgtatgagaacttgggtaaagcacaaagaaacatacagtgctagtaacaggtctcctgcgccctggaactaagtgtttggaggaaggactaaaccccgggggaggtgagtataaaataattccactaagatcacctcctcagtccccagaaggctgatggtggatcctctggccatctcctgtggggtcttactgctcctctgccatttctctatgcctgaagacacgaagatgatatcaaggcagagctaccatatcgcagccagtctctaggctactgctgtgcagtggctcccactttctaatgcttttttgtttttgctttttctaacaaaacaatcttttttcaaaatgaattccaacccctgctagcttccttccccgcctccatactgttttaggcagcaccgtttatgtgacagagtccgtgtttctcaaatgcatggtgttcctcaggtggagagtgggcagaagtttttgcaacactttttttttaagttattgggtgcaaaatcccaaaccaggatatgtgtatgtctgtgtgtttatgttttttatttgaccctcccctctttcaacctacccccttttatatctaatgtagaaaaagcgaaattgaatctggaaagcaaactgttgtatatagttgcggtaacaatcatgaagagagagccgggctgtcccctcagtaattcattttaaataacaaattatttaaaaataaaattcatgccagagccagctgaagaggccttccttcatcaccactgaggccacccccaatctgggccctctgtccatctggcatgtctcctcccagcaagattcatctgttcaatgccatttgcgtttcaataaagttatctcctgtactgtc

SEQ ID NO: 20029 - DNA, 7839 bp, Homo sapiens
  source 1..7839: mol_type = unassigned DNA
ggccgcaatgtagtgaaatgctctggcctaggaaccttacaagctgggacgacagcagctccgtcagcagcggcatcagcgacaccatagacaacctcagcactgatgacatcaacaccagctcctccatcagctcttatgccaacacacctgcctcctctcgaaaaaacctggatgtgcagactgatgctgagaagcactcacaggtggagaggaattccctgtggtctggtgatgatgtcaagaaatcagacggaggctcagacagcggcataaaaatggagccaggttccaagtggaggcggaatccttctgatgtgtctgacgagtccgacaaaagcacgtcgggcaagaagaatcctgtcatctcccagacaggctcatggcggcgaggcatgacagctcaggtgggcatcaccatgccaaggacgaagccttcagccccggcaggcgcactgaagaccccaggaactggaaaaacagacgacgcaaaggtgtctgagaaaggaaggctttctcctaaagcctcccaggtgaagcgctccccatcagatgcaggccggagcagtggtgacgaatccaaaaagcccctccccagcagctctaggacacctactgccaatgccaacagctttgggttcaagaagcagagtggttccgccgccggcctggccatgatcacagccagcggggtgactgtcaccagcaggtcagccacactgggcaaaatcccaaagtcatctgcactcgtcagtcggtctgctggtcggaagtcaagtatggatggggctcagaatcaggatgacgggtatctagccctaagctcccggacaaaccttcagtaccggagtttgccgaggcccagtaagtccaacagccggaacggggctgggaacaggtctagcaccagcagcatagattccaacattagcagcaagtccgcaggcctgccagtgcccaaactgagggagccttccaaaacagccctaggcagctctctaccaggtctggtcaaccaaacagacaaggagaaaggcatctcatcagacaacgagagtgtggcttcctgtaactcggtgaaagtgaatccggcagcccagcctgtgtccagtccggctcagaccagtctccagcctggagccaagtacccagatgtggcctctcccacactccgcagactctttggtgggaagcctaccaagcaagtgcccatcgccacagctgaaaacatgaaaaattcggtggtcatctccaatcctcatgccaccatgactcagcaaggtaacctagactccccgtcaggcagtggcgtcctgagcagtgggagcagcagtcctctctacagcaagaatgtggacctcaaccagtctccgctagcctccagccccagctcagcccactcggccccttccaacagcctcacctggggcaccaacgccagcagctcctccgcagttagcaaggatggcctgggctttcagtctgtcagcagcctccacaccagctgtgagtccatcgacatctccctcagcagtggaggggtccccagccacaattcttccactggcctcatcgcctcctccaaggacgactccttgactccctttgtcagaactaacagtgtgaagaccacactgtcagaaagtgacccgcaccttgataggaacactttgcctaagaaaggactcaggtatactcccacctcccagcttcgcacgcaagaagatgcaaaagaatggttacggtcccattctgcaggaggccttcaggacaccgctgccaattcccccttttcctctggctccagcgtgacttctccctccggaacaagattcaacttttcccagcttgcgagtcccaccactgtcacccagatgagcttgtccaacccgaccatgctgaggactcacagcctctccaatgctgatgggcagtatgatccatacactgacagccgcttccggaatagctccatgtccctggatgagaagagcagaaccatgagccgttcaggctcattccgggatgggtttgaagaagttcatggatcctcactctccttggtttccagcacatcgtcagtttattctacaccagaagaaaaatgccagtcagagattcgcaagctgcggcgggaactggatgcctcccaggagaaagtttcagctttgaccacccagctgacagcaaatgctcaccttgtggcagcctttgaacagagtcttggtaacatgacaatcaggctccagagtctgaccatgacagctgagcagaaggactcagaactgaatgagttaagaaaaaccattgagctgctaaagaaacagaacgcagctgcccaggctgccattaatggagtaattaacacacctgagctcaactgcaaaggaaacggcactgcccagtctgcagacctccgcatccgcaggcagcactcctcagacagcgtctccagcatcaacagtgccaccagccactccagcgtgggcagcaacatagagagtgactcaaagaagaagaagcggaagaactggttacgcagctccttcaagcaagctttcgggaagaagaagtccccaaaatctgcgtcctctcattcagatattgaggagatgacggattcttctttgccttcctcaccaaagttaccgcacaatgggtccacaggttccaccccactgctgaggaattctcactccaactctctaatttcagaatgcatggatagtgaagctgagaccgtcatgcagctccgaaatgagttaagagacaaggagatgaagctgacggatatccgcttagaagctctcagttctgcccaccagctggaccagctccgggaggccatgaacaggatgcagagtgaaatagagaagctgaaagctgagaatgatcggctgaagtcagagtctcaaggcagtggctgcagccgggctccttcccaagtgtccatctctgcctccccgaggcagtccatgggcctctcccagcacagcttgaacctcactgagtcaaccagcctggacatgttgctggatgacactggtgaatgctcggctcggaaggaaggaggcaggcatgttaagatagttgtcagctttcaggaggaaatgaagtggaaggaggattccagaccacatctctttcttattggctgcattggagttagtggcaagacgaagtgggatgtgctcgatggggtggttagacggctgttcaaagaatacatcattcatgtcgacccagtgagtcagctagggctgaattcagacagcgttcttggctacagcattggagaaatcaagcgcagcaacacttccgaaacaccggagctgcttccttgtggctatctggttggagagaacacgaccatctcagtgactgtgaaagggctcgcagaaaacagcctggactcactggtgtttgagtccttgattcccaagcccatcctgcagcgctacgtctccctcctgatagagcaccgtcggatcattctctctggccccagcggcactgggaaaacctacctggccaaccggctgtctgagtatatagtgcttcgagagggacgggagttgacagacggggttatcgccacctttaacgtggaccataagtccagcaaggaattgcgccagtacctgtccaaccttgctgaccagtgcaacagtgagaacaatgctgtggacatgcccctcgtcatcatcctggacaacctacaccacgtgagctctctgggagagatcttcaatgggctgctcaactgcaagtaccacaaatgcccttacataattggcacaatgaaccaggctacctcttcgactcccaacctgcagcttcaccataacttcagatgggtgctttgtgccaaccacacggagcctgtgaagggtttccttggccgattcctgaggaggaagctcatggaaacagagatcagtgggcgggtgcgcaatatggagctggtaaaaatcattgactggattcccaaggtctggcatcacctcaaccgcttcctggaggctcacagttcctcggacgtcaccatcggcccccggctcttcctgtcatgccccatcgatgtggacggctcgagagtgtggttcaccgacttgtggaactattccattatcccctatctcctggaagccgtcagagaaggactccagctctatggaaggcgcgccccctgggaggatcctgccaagtgggtgatggacacatatccatgggcagccagcccacaacagcacgagtggcctcccctgctgcagttacggcctgaggatgtcggcttcgacggctactccatgcctcgggagggatcgacaagcaagcagatgccccccagtgatgctgaaggtgacccgctgatgaacatgctgatgaggctgcaggaggcagccaactactccagcccccagagctatgacagcgactccaacagcaacagccatcacgatgacatcttggactcctctttggagtccactctgtgacaggggcccggagcccagcgccctcctcttctcctcaccgcattccacctgcatcccccacatcaccctgaagatgacttcctgagccagcccccagccacagccttagagctgcgggaacaccgagaccccccgtccttcagcctcgacctgggtgcaggcatcccgggccagctgcctgcggaccgcttccttccacagcgagaactgcactaccttctgttgtactttaattattgttttgccttgttgctgtgacctccctaagacactgaagatacttctcgggaaaggatcatcgccgttgaaatgaaaagagagacagagagaaaaaaaaaaagagaacccacatgaagctctgaaaccaaacagcatcctgccatgagcttcccagagacagaagagactggagcaaagtcggaaacacagagaagcacggcttcccctcagcacagaccctccagactgggtctcagagccgtgccacccaccctcccacacagccggccacagggagaactggtgctaaccagggtgcttgctttggtcacgttcaacgcactacagagctacgacacagggaaaccttaggagcaaataaaccgtgctttcatgttttttaaatggtgctttccttacccgagaggtattttgcctgttccaatcaaaccaccccattcaggtccatcagcctctgattaatatccgtgagagtgagtgacggagtgagagtgtgagcgagtggatgtggctgtcagtgcagaacagcatgtgtctctttccttctgatatatgaatgaatcaggtttttttttttttttttctgcaaacactgtgtatagtgagacttgttctactttggagaacaggttaccttttgaaaatgaggttgagtttcttcctttctgatgcattgatttttgaagatttttttttcccccttcccctcttggtcagaatcaatcctttggtgaaagtaagaaccgcaggagttgagttttggtttggtcctgctcagttttggtttttagttgtccatcctcacagtcctacacactcgcctcctcctgctagggctgggggtatctgtgtcctttaaaatggatgaggacctggtcctcgacatgtgggtgagccatggaccttgccttcccttctcgtccttgagggtttagaacacacaccaacacctccagcgtccccgccccagcttccggtggggtgatgcggtcaccctgcaaaagacttgcactttcctcagaaccaacatgacgcagctcaataagggtgagggtcactccctcccagaagccccgtctggacgagccttgcctgacctcttcggtgctgaccttcccaaagtgatgccttactggttttgtactaactgtgttcattttacataagtgtcgtgcctgcctggggtttgttttttttgtcattgttttccccattgaaacaaacagggctaaaaagtcatctgttcattaggagaactcaagttgctgtgacttttctcatccaaaagactcatttgtgtggatgcgtgaccatgggaaaaagaaaaaaaaaaagatccattttttaggttcttttcggtctccagctgacaacccaactggacaatgatctgtctggtgcaggagaaggcaaaagtttctacaagtctacatgaccttgctgatacttgttctaatagaaacccagtctgctgtgtcttcaacatactggtattttcattacaaagtatggtaaatttttgagttgtttgtttctgttttgtaaagagaatccttattggacaccagtgaaggtgtctctgttttaatgatcagggtttttattccatcttttgcatttcttctatttctgaaggtttgtctcttggcatctttttttagtttcttaccataagagtttgacccgaaactgctcacttcacattggatgacaccatgttcttcctctttgaaaagaaaaggggaatgtgtcccactagtgaaaggaaaacttttcaacactatccctgctttagtctcagcaaactcagactattctgcttagccttcattagtcatctgggtgtgagtgtgtcttgttctgtttttctttttaataaaacttttaaaccatatatttagcctgtgaccaggggggccaaaccctaagatttctggtaaacctgaagggtggccctcctcagacaatttatctcccagcaatgaccctactacactcgcgtactgtgaatttgggaggaggtaaagttgacttctcctcgtgggcagttttccaatcaccttgtgagtagacacctgccaatattgtttgaaacctttttttaatatgacatcctctcttgtcattctcttctcccctttcccacagacttccctcctgggtccaggttcagaaccaagacttctgtacctagtgctgcctgattggtgaacattgacttcaagtagcatagcccttgtgtgactcacaactccgtgtccttcctaaagtttcgggaagcagggttgtctaatatgcacatttcttattttggtcatatttttactttagtgtcactcaccttttacaaagtgactttgtactcatttagggctctatcggaaatgcttccattttgccttttctacagttaggccaattttgaaatatataaattctatgcaacatttatgttgagttaccaatggaagccaaaagttctcttcccaaactgccaagaatgatacaggccataattgaaatgggaataccttttaagtttcattaggggtggggtgggagtgggacaggaacaagacttgcctagatctttgttgtatcttggggacttttactttgttgtttgatgcttaaacttcaaaattctctgtattcaaatttgattgtggcgaatctacttcaaaaaggaaaaataatccaactttgtggatattaaatggaaggtttgctgttttgatctagttgtttccagtggagcagttttatgaaatatgttctataagatgtacattttttcattgtaacatagaaattgtaaataattgattaaagtgctgcattttgatgaattttttctagccatttttaaagagaaaactaggaattgagtattttgtgtacggtatgtttccatcctccctccccttcctcctcccctcctctctctctcttcctacctatttaattttcatttgtcatgaggtttttggatttgccaatgatctgctggacatcatgccccatgtcatagagaataaagctgatgattgtaccagtcttaaattattcatgattcaataaaattgatgcttatttattc

SEQ ID NO: 20030 - DNA, 10960 bp, Homo sapiens
  source 1..10960: mol_type = unassigned DNA
aggaggaaatttgcaagaggcggcagcccctgagcgcccagagctcttgaaaggccacccaggagaggtgtgagacccggcggcagcatccgtccaggtgggacccgctgagcgccgtggccagtcccccattcccatcccggcaccccaaaggcgcgctcgcccgattgcttcgagttccccgacctggggattttttttttagccgctggtggtgggcgcctcgtgggctaaggcccggcgcctgctctgctacccgcgctgcctttagcggtcgcccccgccgccgctgccagggacgtgctgggaaagcccaagccccgggagaagatgccggccatcctggtcgcctccaaaatgaagtcgggactgcccaaacccgtgcacagcgccgcgcccatcctgcacgtgcccccggcccgggcgggcccccagccctgctacctgaagttgggaagcaaggtggaggtgagcaagaccacctatcctagccagatccccctgaaatcgcaggtgctgcaggggctgcaggagccagcgggggaggggctcccgctgcggaagagcggctcggtggaaaacgggttcgatacccagatctacacagactgggccaatcattacctagccaaatccggccacaagcgtctcatcagggatctccagcaagatgtgacagatggcgtcctcctggcccagattatccaggttgtggcaaatgaaaagattgaagacatcaatggctgtccgaagaacagatcccaaatgattgaaaacatagatgcctgcttgaatttcctggcagctaagggaataaacatccaggggctgtctgcagaagagatcaggaatggaaacctcaaggccattctaggcctcttcttcagcctctcccgatacaagcagcagcagcagcagccccagaagcagcacctctcctcacctctgccgcccgccgtatcccaggtggccggggccccctcccagtgccaggctggcacccctcagcagcaggtgccagtcactccccaagccccgtgccagcctcaccagccagcgccacatcagcagtcaaaagcacaagctgaaatgcagtccagacttccaggtcctaccgcgagggtatccgctgcaggcagcgaggccaaaacacgcggagggtcaactactgctaacaaccgacgcagccagagctttaacaactatgataaatccaaaccagtcacctccccacccccaccgccaagcagccacgagaaagagcctttggcaagttcagcctcctcccaccccggaatgagtgacaatgcacctgcttccttggagagcggcagcagctccacccctactaattgcagtacctcctcggccatcccgcagcccggtgcagccaccaagccttggcgcagcaaatccctcagcgtgaagcacagtgccacggtatccatgctctcggtcaagcctcctgggcctgaggcccccaggcccacacctgaagccatgaagccggcccccaacaatcagaagtccatgctggaaaagctgaaacttttcaacagtaaagggggctcaaaggcaggtgaggggccggggtcccgggacacaagctgtgagcggctggagactctgcccagcttcgaagagagcgaggagctggaggccgccagtcgcatgctcaccaccgtgggccctgcttccagcagccccaagattgcactcaagggcattgcccagaggacttttagccgggcactgaccaacaagaagagttctctgaaaggcaatgagaaagagaaggagaaacaacagcgggagaaggataaggagaaaagcaaggaccttgccaagagagcctctgtgacggagaggctggacctcaaggaggagccaaaagaagaccccagtggagcagctgtgcccgagatgccaaaaaagtcctccaagattgccagcttcatccccaaaggggggaagctcaacagtgccaagaaggagcccatggccccttcccacagtggaataccaaaaccaggaatgaaaagcatgcccgggaaatccccaagtgccccagcgccttccaaggaaggggagcggagccggagtgggaagctgagctcaggactcccccagcagaagccccagctggacggcagacactccagttcctcttccagcctggcgtcctcagaaggaaaaggcccaggagggaccaccctgaaccacagcatcagcagccagactgtcagtgggtctgtcgggaccacccagaccacaggaagcaataccgtcagtgttcagctacctcagccccagcagcaatacaaccatcccaacactgccacggttgcacctttcctgtacaggtctcagacggacactgaagggaatgttactgccgagtcaagctcaacaggtgtgagcgtggagcccagccacttcaccaagactggacagcctgctctggaagaactcactggggaagatcctgaggctcggcggctgcggacagtgaagaacatcgctgatctgcggcagaatttggaggaaaccatgtccagtttaaggggaactcaggttacacacagcacattggaaaccacgtttgacaccaatgtcaccacggagatgagtggccgtagcatactcagcttgacagggaggcccacacctctgtcctggagactgggccagtccagccctcggctccaagcaggagacgccccctcaatgggcaatgggtatccccctcgagccaacgccagcaggttcatcaacactgagtcaggtcgctatgtgtactccgcccctctgagaaggcagctggcctcccggggcagtagtgtctgccatgtggacgtctcagacaaggcaggagatgagatggacctggaaggcatcagcatggatgcccccggctacatgagcgacggggatgttctgagcaagaacatccggaccgatgacattacaagcggatacatgactgatggtggacttggcctctatacccgtcgcctgaaccggctccctgatgggatggctgtggtacgggagaccctgcaacgaaatacctccctgggcctcggagacgctgacagctgggacgacagcagctccgtcagcagcggcatcagcgacaccatagacaacctcagcactgatgacatcaacaccagctcctccatcagctcttatgccaacacacctgcctcctctcgaaaaaacctggatgtgcagactgatgctgagaagcactcacaggtggagaggaattccctgtggtctggtgatgatgtcaagaaatcagacggaggctcagacagcggcataaaaatggagccaggttccaagtggaggcggaatccttctgatgtgtctgacgagtccgacaaaagcacgtcgggcaagaagaatcctgtcatctcccagacaggctcatggcggcgaggcatgacagctcaggtgggcatcaccatgccaaggacgaagccttcagccccggcaggcgcactgaagaccccaggaactggaaaaacagacgacgcaaaggtgtctgagaaaggaaggctttctcctaaagcctcccaggtgaagcgctccccatcagatgcaggccggagcagtggtgacgaatccaaaaagcccctccccagcagctctaggacacctactgccaatgccaacagctttgggttcaagaagcagagtggttccgccgccggcctggccatgatcacagccagcggggtgactgtcaccagcaggtcagccacactgggcaaaatcccaaagtcatctgcactcgtcagtcggtctgctggtcggaagtcaagtatggatggggctcagaatcaggatgacgggtatctagccctaagctcccggacaaaccttcagtaccggagtttgccgaggcccagtaagtccaacagccggaacggggctgggaacaggtctagcaccagcagcatagattccaacattagcagcaagtccgcaggcctgccagtgcccaaactgagggagccttccaaaacagccctaggcagctctctaccaggtctggtcaaccaaacagacaaggagaaaggcatctcatcagacaacgagagtgtggcttcctgtaactcggtgaaagtgaatccggcagcccagcctgtgtccagtccggctcagaccagtctccagcctggagccaagtacccagatgtggcctctcccacactccgcagactctttggtgggaagcctaccaagcaagtgcccatcgccacagctgaaaacatgaaaaattcggtggtcatctccaatcctcatgccaccatgactcagcaaggtaacctagactccccgtcaggcagtggcgtcctgagcagtgggagcagcagtcctctctacagcaagaatgtggacctcaaccagtctccgctagcctccagccccagctcagcccactcggccccttccaacagcctcacctggggcaccaacgccagcagctcctccgcagttagcaaggatggcctgggctttcagtctgtcagcagcctccacaccagctgtgagtccatcgacatctccctcagcagtggaggggtccccagccacaattcttccactggcctcatcgcctcctccaaggacgactccttgactccctttgtcagaactaacagtgtgaagaccacactgtcagaaagccctctctcttcccctgctgctagccctaagttctgcagaagtactctgcccaggaaacaggacagtgacccgcaccttgataggaacactttgcctaagaaaggactcaggtatactcccacctcccagcttcgcacgcaagaagatgcaaaagaatggttacggtcccattctgcaggaggccttcaggacaccgctgccaattcccccttttcctctggctccagcgtgacttctccctccggaacaagattcaacttttcccagcttgcgagtcccaccactgtcacccagatgagcttgtccaacccgaccatgctgaggactcacagcctctccaatgctgatgggcagtatgatccatacactgacagccgcttccggaatagctccatgtccctggatgagaagagcagaaccatgagccgttcaggctcattccgggatgggtttgaagaagttcatggatcctcactctccttggtttccagcacatcgtcagtttattctacaccagaagaaaaatgccagtcagagattcgcaagctgcggcgggaactggatgcctcccaggagaaagtttcagctttgaccacccagctgacagcaaatgctcaccttgtggcagcctttgaacagagtcttggtaacatgacaatcaggctccagagtctgaccatgacagctgagcagaaggactcagaactgaatgagttaagaaaaaccattgagctgctaaagaaacagaacgcagctgcccaggctgccattaatggagtaattaacacacctgagctcaactgcaaaggaaacggcactgcccagtctgcagacctccgcatccgcaggcagcactcctcagacagcgtctccagcatcaacagtgccaccagccactccagcgtgggcagcaacatagagagtgactcaaagaagaagaagcggaagaactggttacgcagctccttcaagcaagctttcgggaagaagaagtccccaaaatctgcgtcctctcattcagatattgaggagatgacggattcttctttgccttcctcaccaaagttaccgcacaatgggtccacaggttccaccccactgctgaggaattctcactccaactctctaatttcagaatgcatggatagtgaagctgagaccgtcatgcagctccgaaatgagttaagagacaaggagatgaagctgacggatatccgcttagaagctctcagttctgcccaccagctggaccagctccgggaggccatgaacaggatgcagagtgaaatagagaagctgaaagctgagaatgatcggctgaagtcagagtctcaaggcagtggctgcagccgggctccttcccaagtgtccatctctgcctccccgaggcagtccatgggcctctcccagcacagcttgaacctcactgagtcaaccagcctggacatgttgctggatgacactggtgaatgctcggctcggaaggaaggaggcaggcatgttaagatagttgtcagctttcaggaggaaatgaagtggaaggaggattccagaccacatctctttcttattggctgcattggagttagtggcaagacgaagtgggatgtgctcgatggggtggttagacggctgttcaaagaatacatcattcatgtcgacccagtgagtcagctagggctgaattcagacagcgttcttggctacagcattggagaaatcaagcgcagcaacacttccgaaacaccggagctgcttccttgtggctatctggttggagagaacacgaccatctcagtgactgtgaaagggctcgcagaaaacagcctggactcactggtgtttgagtccttgattcccaagcccatcctgcagcgctacgtctccctcctgatagagcaccgtcggatcattctctctggccccagcggcactgggaaaacctacctggccaaccggctgtctgagtatatagtgcttcgagagggacgggagttgacagacggggttatcgccacctttaacgtggaccataagtccagcaaggaattgcgccagtacctgtccaaccttgctgaccagtgcaacagtgagaacaatgctgtggacatgcccctcgtcatcatcctggacaacctacaccacgtgagctctctgggagagatcttcaatgggctgctcaactgcaagtaccacaaatgcccttacataattggcacaatgaaccaggctacctcttcgactcccaacctgcagcttcaccataacttcagatgggtgctttgtgccaaccacacggagcctgtgaagggtttccttggccgattcctgaggaggaagctcatggaaacagagatcagtgggcgggtgcgcaatatggagctggtaaaaatcattgactggattcccaaggtctggcatcacctcaaccgcttcctggaggctcacagttcctcggacgtcaccatcggcccccggctcttcctgtcatgccccatcgatgtggacggctcgagagtgtggttcaccgacttgtggaactattccattatcccctatctcctggaagccgtcagagaaggactccagctctatggaaggcgcgccccctgggaggatcctgccaagtgggtgatggacacatatccatgggcagccagcccacaacagcacgagtggcctcccctgctgcagttacggcctgaggatgtcggcttcgacggctactccatgcctcgggagggatcgacaagcaagcagatgccccccagtgatgctgaaggtgacccgctgatgaacatgctgatgaggctgcaggaggcagccaactactccagcccccagagctatgacagcgactccaacagcaacagccatcacgatgacatcttggactcctctttggagtccactctgtgacaggggcccggagcccagcgccctcctcttctcctcaccgcattccacctgcatcccccacatcaccctgaagatgacttcctgagccagcccccagccacagccttagagctgcgggaacaccgagaccccccgtccttcagcctcgacctgggtgcaggcatcccgggccagctgcctgcggaccgcttccttccacagcgagaactgcactaccttctgttgtactttaattattgttttgccttgttgctgtgacctccctaagacactgaagatacttctcgggaaaggatcatcgccgttgaaatgaaaagagagacagagagaaaaaaaaaaagagaacccacatgaagctctgaaaccaaacagcatcctgccatgagcttcccagagacagaagagactggagcaaagtcggaaacacagagaagcacggcttcccctcagcacagaccctccagactgggtctcagagccgtgccacccaccctcccacacagccggccacagggagaactggtgctaaccagggtgcttgctttggtcacgttcaacgcactacagagctacgacacagggaaaccttaggagcaaataaaccgtgctttcatgttttttaaatggtgctttccttacccgagaggtattttgcctgttccaatcaaaccaccccattcaggtccatcagcctctgattaatatccgtgagagtgagtgacggagtgagagtgtgagcgagtggatgtggctgtcagtgcagaacagcatgtgtctctttccttctgatatatgaatgaatcaggtttttttttttttttttctgcaaacactgtgtatagtgagacttgttctactttggagaacaggttaccttttgaaaatgaggttgagtttcttcctttctgatgcattgatttttgaagatttttttttcccccttcccctcttggtcagaatcaatcctttggtgaaagtaagaaccgcaggagttgagttttggtttggtcctgctcagttttggtttttagttgtccatcctcacagtcctacacactcgcctcctcctgctagggctgggggtatctgtgtcctttaaaatggatgaggacctggtcctcgacatgtgggtgagccatggaccttgccttcccttctcgtccttgagggtttagaacacacaccaacacctccagcgtccccgccccagcttccggtggggtgatgcggtcaccctgcaaaagacttgcactttcctcagaaccaacatgacgcagctcaataagggtgagggtcactccctcccagaagccccgtctggacgagccttgcctgacctcttcggtgctgaccttcccaaagtgatgccttactggttttgtactaactgtgttcattttacataagtgtcgtgcctgcctggggtttgttttttttgtcattgttttccccattgaaacaaacagggctaaaaagtcatctgttcattaggagaactcaagttgctgtgacttttctcatccaaaagactcatttgtgtggatgcgtgaccatgggaaaaagaaaaaaaaaaagatccattttttaggttcttttcggtctccagctgacaacccaactggacaatgatctgtctggtgcaggagaaggcaaaagtttctacaagtctacatgaccttgctgatacttgttctaatagaaacccagtctgctgtgtcttcaacatactggtattttcattacaaagtatggtaaatttttgagttgtttgtttctgttttgtaaagagaatccttattggacaccagtgaaggtgtctctgttttaatgatcagggtttttattccatcttttgcatttcttctatttctgaaggtttgtctcttggcatctttttttagtttcttaccataagagtttgacccgaaactgctcacttcacattggatgacaccatgttcttcctctttgaaaagaaaaggggaatgtgtcccactagtgaaaggaaaacttttcaacactatccctgctttagtctcagcaaactcagactattctgcttagccttcattagtcatctgggtgtgagtgtgtcttgttctgtttttctttttaataaaacttttaaaccatatatttagcctgtgaccaggggggccaaaccctaagatttctggtaaacctgaagggtggccctcctcagacaatttatctcccagcaatgaccctactacactcgcgtactgtgaatttgggaggaggtaaagttgacttctcctcgtgggcagttttccaatcaccttgtgagtagacacctgccaatattgtttgaaacctttttttaatatgacatcctctcttgtcattctcttctcccctttcccacagacttccctcctgggtccaggttcagaaccaagacttctgtacctagtgctgcctgattggtgaacattgacttcaagtagcatagcccttgtgtgactcacaactccgtgtccttcctaaagtttcgggaagcagggttgtctaatatgcacatttcttattttggtcatatttttactttagtgtcactcaccttttacaaagtgactttgtactcatttagggctctatcggaaatgcttccattttgccttttctacagttaggccaattttgaaatatataaattctatgcaacatttatgttgagttaccaatggaagccaaaagttctcttcccaaactgccaagaatgatacaggccataattgaaatgggaataccttttaagtttcattaggggtggggtgggagtgggacaggaacaagacttgcctagatctttgttgtatcttggggacttttactttgttgtttgatgcttaaacttcaaaattctctgtattcaaatttgattgtggcgaatctacttcaaaaaggaaaaataatccaactttgtggatattaaatggaaggtttgctgttttgatctagttgtttccagtggagcagttttatgaaatatgttctataagatgtacattttttcattgtaacatagaaattgtaaataattgattaaagtgctgcattttgatgaattttttctagccatttttaaagagaaaactaggaattgagtattttgtgtacggtatgtttccatcctccctccccttcctcctcccctcctctctctctcttcctacctatttaattttcatttgtcatgaggtttttggatttgccaatgatctgctggacatcatgccccatgtcatagagaataaagctgatgattgtaccagtcttaaattattcatgattcaataaaattgatgcttatttattc

SEQ ID NO: 20031 - DNA, 11000 bp, Homo sapiens
  source 1..11000: mol_type = unassigned DNA
gttaatatgggcgtccaagcctctgtttcccaggaggaaatttgcaagaggcggcagcccctgagcgcccagagctcttgaaaggccacccaggagaggtgtgagacccggcggcagcatccgtccaggtgggacccgctgagcgccgtggccagtcccccattcccatcccggcaccccaaaggcgcgctcgcccgattgcttcgagttccccgacctggggattttttttttagccgctggtggtgggcgcctcgtgggctaaggcccggcgcctgctctgctacccgcgctgcctttagcggtcgcccccgccgccgctgccagggacgtgctgggaaagcccaagccccgggagaagatgccggccatcctggtcgcctccaaaatgaagtcgggactgcccaaacccgtgcacagcgccgcgcccatcctgcacgtgcccccggcccgggcgggcccccagccctgctacctgaagttgggaagcaaggtggaggtgagcaagaccacctatcctagccagatccccctgaaatcgcaggtgctgcaggggctgcaggagccagcgggggaggggctcccgctgcggaagagcggctcggtggaaaacgggttcgatacccagatctacacagactgggccaatcattacctagccaaatccggccacaagcgtctcatcagggatctccagcaagatgtgacagatggcgtcctcctggcccagattatccaggttgtggcaaatgaaaagattgaagacatcaatggctgtccgaagaacagatcccaaatgattgaaaacatagatgcctgcttgaatttcctggcagctaagggaataaacatccaggggctgtctgcagaagagatcaggaatggaaacctcaaggccattctaggcctcttcttcagcctctcccgatacaagcagcagcagcagcagccccagaagcagcacctctcctcacctctgccgcccgccgtatcccaggtggccggggccccctcccagtgccaggctggcacccctcagcagcaggtgccagtcactccccaagccccgtgccagcctcaccagccagcgccacatcagcagtcaaaagcacaagctgaaatgcagtccagacttccaggtcctaccgcgagggtatccgctgcaggcagcgaggccaaaacacgcggagggtcaactactgctaacaaccgacgcagccagagctttaacaactatgataaatccaaaccagtcacctccccacccccaccgccaagcagccacgagaaagagcctttggcaagttcagcctcctcccaccccggaatgagtgacaatgcacctgcttccttggagagcggcagcagctccacccctactaattgcagtacctcctcggccatcccgcagcccggtgcagccaccaagccttggcgcagcaaatccctcagcgtgaagcacagtgccacggtatccatgctctcggtcaagcctcctgggcctgaggcccccaggcccacacctgaagccatgaagccggcccccaacaatcagaagtccatgctggaaaagctgaaacttttcaacagtaaagggggctcaaaggcaggtgaggggccggggtcccgggacacaagctgtgagcggctggagactctgcccagcttcgaagagagcgaggagctggaggccgccagtcgcatgctcaccaccgtgggccctgcttccagcagccccaagattgcactcaagggcattgcccagaggacttttagccgggcactgaccaacaagaagagttctctgaaaggcaatgagaaagagaaggagaaacaacagcgggagaaggataaggagaaaagcaaggaccttgccaagagagcctctgtgacggagaggctggacctcaaggaggagccaaaagaagaccccagtggagcagctgtgcccgagatgccaaaaaagtcctccaagattgccagcttcatccccaaaggggggaagctcaacagtgccaagaaggagcccatggccccttcccacagtggaataccaaaaccaggaatgaaaagcatgcccgggaaatccccaagtgccccagcgccttccaaggaaggggagcggagccggagtgggaagctgagctcaggactcccccagcagaagccccagctggacggcagacactccagttcctcttccagcctggcgtcctcagaaggaaaaggcccaggagggaccaccctgaaccacagcatcagcagccagactgtcagtgggtctgtcgggaccacccagaccacaggaagcaataccgtcagtgttcagctacctcagccccagcagcaatacaaccatcccaacactgccacggttgcacctttcctgtacaggtctcagacggacactgaagggaatgttactgccgagtcaagctcaacaggtgtgagcgtggagcccagccacttcaccaagactggacagcctgctctggaagaactcactggggaagatcctgaggctcggcggctgcggacagtgaagaacatcgctgatctgcggcagaatttggaggaaaccatgtccagtttaaggggaactcaggttacacacagcacattggaaaccacgtttgacaccaatgtcaccacggagatgagtggccgtagcatactcagcttgacagggaggcccacacctctgtcctggagactgggccagtccagccctcggctccaagcaggagacgccccctcaatgggcaatgggtatccccctcgagccaacgccagcaggttcatcaacactgagtcaggtcgctatgtgtactccgcccctctgagaaggcagctggcctcccggggcagtagtgtctgccatgtggacgtctcagacaaggcaggagatgagatggacctggaaggcatcagcatggatgcccccggctacatgagcgacggggatgttctgagcaagaacatccggaccgatgacattacaagcggatacatgactgatggtggacttggcctctatacccgtcgcctgaaccggctccctgatgggatggctgtggtacgggagaccctgcaacgaaatacctccctgggcctcggagacgctgacagctgggacgacagcagctccgtcagcagcggcatcagcgacaccatagacaacctcagcactgatgacatcaacaccagctcctccatcagctcttatgccaacacacctgcctcctctcgaaaaaacctggatgtgcagactgatgctgagaagcactcacaggtggagaggaattccctgtggtctggtgatgatgtcaagaaatcagacggaggctcagacagcggcataaaaatggagccaggttccaagtggaggcggaatccttctgatgtgtctgacgagtccgacaaaagcacgtcgggcaagaagaatcctgtcatctcccagacaggctcatggcggcgaggcatgacagctcaggtgggcatcaccatgccaaggacgaagccttcagccccggcaggcgcactgaagaccccaggaactggaaaaacagacgacgcaaaggtgtctgagaaaggaaggctttctcctaaagcctcccaggtgaagcgctccccatcagatgcaggccggagcagtggtgacgaatccaaaaagcccctccccagcagctctaggacacctactgccaatgccaacagctttgggttcaagaagcagagtggttccgccgccggcctggccatgatcacagccagcggggtgactgtcaccagcaggtcagccacactgggcaaaatcccaaagtcatctgcactcgtcagtcggtctgctggtcggaagtcaagtatggatggggctcagaatcaggatgacgggtatctagccctaagctcccggacaaaccttcagtaccggagtttgccgaggcccagtaagtccaacagccggaacggggctgggaacaggtctagcaccagcagcatagattccaacattagcagcaagtccgcaggcctgccagtgcccaaactgagggagccttccaaaacagccctaggcagctctctaccaggtctggtcaaccaaacagacaaggagaaaggcatctcatcagacaacgagagtgtggcttcctgtaactcggtgaaagtgaatccggcagcccagcctgtgtccagtccggctcagaccagtctccagcctggagccaagtacccagatgtggcctctcccacactccgcagactctttggtgggaagcctaccaagcaagtgcccatcgccacagctgaaaacatgaaaaattcggtggtcatctccaatcctcatgccaccatgactcagcaaggtaacctagactccccgtcaggcagtggcgtcctgagcagtgggagcagcagtcctctctacagcaagaatgtggacctcaaccagtctccgctagcctccagccccagctcagcccactcggccccttccaacagcctcacctggggcaccaacgccagcagctcctccgcagttagcaaggatggcctgggctttcagtctgtcagcagcctccacaccagctgtgagtccatcgacatctccctcagcagtggaggggtccccagccacaattcttccactggcctcatcgcctcctccaaggacgactccttgactccctttgtcagaactaacagtgtgaagaccacactgtcagaaagccctctctcttcccctgctgctagccctaagttctgcagaagtactctgcccaggaaacaggacagtgacccgcaccttgataggaacactttgcctaagaaaggactcaggtatactcccacctcccagcttcgcacgcaagaagatgcaaaagaatggttacggtcccattctgcaggaggccttcaggacaccgctgccaattcccccttttcctctggctccagcgtgacttctccctccggaacaagattcaacttttcccagcttgcgagtcccaccactgtcacccagatgagcttgtccaacccgaccatgctgaggactcacagcctctccaatgctgatgggcagtatgatccatacactgacagccgcttccggaatagctccatgtccctggatgagaagagcagaaccatgagccgttcaggctcattccgggatgggtttgaagaagttcatggatcctcactctccttggtttccagcacatcgtcagtttattctacaccagaagaaaaatgccagtcagagattcgcaagctgcggcgggaactggatgcctcccaggagaaagtttcagctttgaccacccagctgacagcaaatgctcaccttgtggcagcctttgaacagagtcttggtaacatgacaatcaggctccagagtctgaccatgacagctgagcagaaggactcagaactgaatgagttaagaaaaaccattgagctgctaaagaaacagaacgcagctgcccaggctgccattaatggagtaattaacacacctgagctcaactgcaaaggaaacggcactgcccagtctgcagacctccgcatccgcaggcagcactcctcagacagcgtctccagcatcaacagtgccaccagccactccagcgtgggcagcaacatagagagtgactcaaagaagaagaagcggaagaactgggtcaatgagttacgcagctccttcaagcaagctttcgggaagaagaagtccccaaaatctgcgtcctctcattcagatattgaggagatgacggattcttctttgccttcctcaccaaagttaccgcacaatgggtccacaggttccaccccactgctgaggaattctcactccaactctctaatttcagaatgcatggatagtgaagctgagaccgtcatgcagctccgaaatgagttaagagacaaggagatgaagctgacggatatccgcttagaagctctcagttctgcccaccagctggaccagctccgggaggccatgaacaggatgcagagtgaaatagagaagctgaaagctgagaatgatcggctgaagtcagagtctcaaggcagtggctgcagccgggctccttcccaagtgtccatctctgcctccccgaggcagtccatgggcctctcccagcacagcttgaacctcactgagtcaaccagcctggacatgttgctggatgacactggtgaatgctcggctcggaaggaaggaggcaggcatgttaagatagttgtcagctttcaggaggaaatgaagtggaaggaggattccagaccacatctctttcttattggctgcattggagttagtggcaagacgaagtgggatgtgctcgatggggtggttagacggctgttcaaagaatacatcattcatgtcgacccagtgagtcagctagggctgaattcagacagcgttcttggctacagcattggagaaatcaagcgcagcaacacttccgaaacaccggagctgcttccttgtggctatctggttggagagaacacgaccatctcagtgactgtgaaagggctcgcagaaaacagcctggactcactggtgtttgagtccttgattcccaagcccatcctgcagcgctacgtctccctcctgatagagcaccgtcggatcattctctctggccccagcggcactgggaaaacctacctggccaaccggctgtctgagtatatagtgcttcgagagggacgggagttgacagacggggttatcgccacctttaacgtggaccataagtccagcaaggaattgcgccagtacctgtccaaccttgctgaccagtgcaacagtgagaacaatgctgtggacatgcccctcgtcatcatcctggacaacctacaccacgtgagctctctgggagagatcttcaatgggctgctcaactgcaagtaccacaaatgcccttacataattggcacaatgaaccaggctacctcttcgactcccaacctgcagcttcaccataacttcagatgggtgctttgtgccaaccacacggagcctgtgaagggtttccttggccgattcctgaggaggaagctcatggaaacagagatcagtgggcgggtgcgcaatatggagctggtaaaaatcattgactggattcccaaggtctggcatcacctcaaccgcttcctggaggctcacagttcctcggacgtcaccatcggcccccggctcttcctgtcatgccccatcgatgtggacggctcgagagtgtggttcaccgacttgtggaactattccattatcccctatctcctggaagccgtcagagaaggactccagctctatggaaggcgcgccccctgggaggatcctgccaagtgggtgatggacacatatccatgggcagccagcccacaacagcacgagtggcctcccctgctgcagttacggcctgaggatgtcggcttcgacggctactccatgcctcgggagggatcgacaagcaagcagatgccccccagtgatgctgaaggtgacccgctgatgaacatgctgatgaggctgcaggaggcagccaactactccagcccccagagctatgacagcgactccaacagcaacagccatcacgatgacatcttggactcctctttggagtccactctgtgacaggggcccggagcccagcgccctcctcttctcctcaccgcattccacctgcatcccccacatcaccctgaagatgacttcctgagccagcccccagccacagccttagagctgcgggaacaccgagaccccccgtccttcagcctcgacctgggtgcaggcatcccgggccagctgcctgcggaccgcttccttccacagcgagaactgcactaccttctgttgtactttaattattgttttgccttgttgctgtgacctccctaagacactgaagatacttctcgggaaaggatcatcgccgttgaaatgaaaagagagacagagagaaaaaaaaaaagagaacccacatgaagctctgaaaccaaacagcatcctgccatgagcttcccagagacagaagagactggagcaaagtcggaaacacagagaagcacggcttcccctcagcacagaccctccagactgggtctcagagccgtgccacccaccctcccacacagccggccacagggagaactggtgctaaccagggtgcttgctttggtcacgttcaacgcactacagagctacgacacagggaaaccttaggagcaaataaaccgtgctttcatgttttttaaatggtgctttccttacccgagaggtattttgcctgttccaatcaaaccaccccattcaggtccatcagcctctgattaatatccgtgagagtgagtgacggagtgagagtgtgagcgagtggatgtggctgtcagtgcagaacagcatgtgtctctttccttctgatatatgaatgaatcaggtttttttttttttttttctgcaaacactgtgtatagtgagacttgttctactttggagaacaggttaccttttgaaaatgaggttgagtttcttcctttctgatgcattgatttttgaagatttttttttcccccttcccctcttggtcagaatcaatcctttggtgaaagtaagaaccgcaggagttgagttttggtttggtcctgctcagttttggtttttagttgtccatcctcacagtcctacacactcgcctcctcctgctagggctgggggtatctgtgtcctttaaaatggatgaggacctggtcctcgacatgtgggtgagccatggaccttgccttcccttctcgtccttgagggtttagaacacacaccaacacctccagcgtccccgccccagcttccggtggggtgatgcggtcaccctgcaaaagacttgcactttcctcagaaccaacatgacgcagctcaataagggtgagggtcactccctcccagaagccccgtctggacgagccttgcctgacctcttcggtgctgaccttcccaaagtgatgccttactggttttgtactaactgtgttcattttacataagtgtcgtgcctgcctggggtttgttttttttgtcattgttttccccattgaaacaaacagggctaaaaagtcatctgttcattaggagaactcaagttgctgtgacttttctcatccaaaagactcatttgtgtggatgcgtgaccatgggaaaaagaaaaaaaaaaagatccattttttaggttcttttcggtctccagctgacaacccaactggacaatgatctgtctggtgcaggagaaggcaaaagtttctacaagtctacatgaccttgctgatacttgttctaatagaaacccagtctgctgtgtcttcaacatactggtattttcattacaaagtatggtaaatttttgagttgtttgtttctgttttgtaaagagaatccttattggacaccagtgaaggtgtctctgttttaatgatcagggtttttattccatcttttgcatttcttctatttctgaaggtttgtctcttggcatctttttttagtttcttaccataagagtttgacccgaaactgctcacttcacattggatgacaccatgttcttcctctttgaaaagaaaaggggaatgtgtcccactagtgaaaggaaaacttttcaacactatccctgctttagtctcagcaaactcagactattctgcttagccttcattagtcatctgggtgtgagtgtgtcttgttctgtttttctttttaataaaacttttaaaccatatatttagcctgtgaccaggggggccaaaccctaagatttctggtaaacctgaagggtggccctcctcagacaatttatctcccagcaatgaccctactacactcgcgtactgtgaatttgggaggaggtaaagttgacttctcctcgtgggcagttttccaatcaccttgtgagtagacacctgccaatattgtttgaaacctttttttaatatgacatcctctcttgtcattctcttctcccctttcccacagacttccctcctgggtccaggttcagaaccaagacttctgtacctagtgctgcctgattggtgaacattgacttcaagtagcatagcccttgtgtgactcacaactccgtgtccttcctaaagtttcgggaagcagggttgtctaatatgcacatttcttattttggtcatatttttactttagtgtcactcaccttttacaaagtgactttgtactcatttagggctctatcggaaatgcttccattttgccttttctacagttaggccaattttgaaatatataaattctatgcaacatttatgttgagttaccaatggaagccaaaagttctcttcccaaactgccaagaatgatacaggccataattgaaatgggaataccttttaagtttcattaggggtggggtgggagtgggacaggaacaagacttgcctagatctttgttgtatcttggggacttttactttgttgtttgatgcttaaacttcaaaattctctgtattcaaatttgattgtggcgaatctacttcaaaaaggaaaaataatccaactttgtggatattaaatggaaggtttgctgttttgatctagttgtttccagtggagcagttttatgaaatatgttctataagatgtacattttttcattgtaacatagaaattgtaaataattgattaaagtgctgcattttgatgaattttttctagccatttttaaagagaaaactaggaattgagtattttgtgtacggtatgtttccatcctccctccccttcctcctcccctcctctctctctcttcctacctatttaattttcatttgtcatgaggtttttggatttgccaatgatctgctggacatcatgccccatgtcatagagaataaagctgatgattgtaccagtcttaaattattcatgattcaataaaattgatgcttatttattc

SEQ ID NO: 20032 - DNA, 7882 bp, Homo sapiens
  source 1..7882: mol_type = unassigned DNA
taaggcccggcgcctgctctgctacccgcgctgcctttagcggtcgcccccgccgccgctgccagggacgtgctgggaaagcccaagccccgggagaagatgccggccatcctggtcgcctccaaaatgaagtcgggactgcccaaacccgtgcacagcgccgcgcccatcctgcacgtgcccccggcccgggcgggcccccagccctgctacctgaagttgggaagcaaggtggaggtgagcaagaccacctatcctagccagatccccctgaaatcgcaggtgctgcaggggctgcaggagccagcgggggaggggctcccgctgcggaagagcggctcggtggaaaacgggttcgatacccagatctacacagactgggccaatcattacctagccaaatccggccacaagcgtctcatcagggatctccagcaagatgtgacagatggcgtcctcctggcccagattatccaggttgtggcaaatgaaaagattgaagacatcaatggctgtccgaagaacagatcccaaatgattgaaaacatagatgcctgcttgaatttcctggcagctaagggaataaacatccaggggctgtctgcagaagagatcaggaatggaaacctcaaggccattctaggcctcttcttcagcctctcccgatacaagcagcagcagcagcagccccagaagcagcacctctcctcacctctgccgcccgccgtatcccaggtggccggggccccctcccagtgccaggctggcacccctcagcagcaggtgccagtcactccccaagccccgtgccagcctcaccagccagcgccacatcagcagtcaaaagcacaagctgaaatgcagtccagtgcatcatccaaggactcatctcaaagcaaaatcatccgcttcactctgggtcagaaaaagatctctagacttccaggtcctaccgcgagggtatccgctgcaggcagcgaggccaaaacacgcggagggtcaactactgctaacaaccgacgcagccagagctttaacaactatgataaatccaaaccagtcacctccccacccccaccgccaagcagccacgagaaagagcctttggcaagttcagcctcctcccaccccggaatgagtgacaatgcacctgcttccttggagagcggcagcagctccacccctactaattgcagtacctcctcggccatcccgcagcccggtgcagccaccaagccttggcgcagcaaatccctcagcgtgaagcacagtgccacggtatccatgctctcggtcaagcctcctgggcctgaggcccccaggcccacacctgaagccatgaagccggcccccaacaatcagaagtccatgctggaaaagctgaaacttttcaacagtaaagggggctcaaaggcaggtgaggggccggggtcccgggacacaagctgtgagcggctggagactctgcccagcttcgaagagagcgaggagctggaggccgccagtcgcatgctcaccaccgtgggccctgcttccagcagccccaagattgcactcaagggcattgcccagaggacttttagccgggcactgaccaacaagaagagttctctgaaaggcaatgagaaagagaaggagaaacaacagcgggagaaggataaggagaaaagcaaggaccttgccaagagagcctctgtgacggagaggctggacctcaaggaggagccaaaagaagaccccagtggagcagctgtgcccgagatgccaaaaaagtcctccaagattgccagcttcatccccaaaggggggaagctcaacagtgccaagaaggagcccatggccccttcccacagtggaataccaaaaccaggaatgaaaagcatgcccgggaaatccccaagtgccccagcgccttccaaggaaggggagcggagccggagtgggaagctgagctcaggactcccccagcagaagccccagctggacggcagacactccagttcctcttccagcctggcgtcctcagaaggaaaaggcccaggagggaccaccctgaaccacagcatcagcagccagactgtcagtgggtctgtcgggaccacccagaccacaggaagcaataccgtcagtgttcagctacctcagccccagcagcaatacaaccatcccaacactgccacggttgcacctttcctgtacaggtctcagacggacactgaagggaatgttactgccgagtcaagctcaacaggtgtgagcgtggagcccagccacttcaccaagactggacagcctgctctggaagaactcactggggaagatcctgaggctcggcggctgcggacagtgaagaacatcgctgatctgcggcagaatttggaggaaaccatgtccagtttaaggggaactcaggttacacacagcacattggaaaccacgtttgacaccaatgtcaccacggagatgagtggccgtagcatactcagcttgacagggaggcccacacctctgtcctggagactgggccagtccagccctcggctccaagcaggagacgccccctcaatgggcaatgggtatccccctcgagccaacgccagcaggttcatcaacactgagtcaggtcgctatgtgtactccgcccctctgagaaggcagctggcctcccggggcagtagtgtctgccatgtggacgtctcagacaaggcaggagatgagatggacctggaaggcatcagcatggatgcccccggctacatgagcgacggggatgttctgagcaagaacatccggaccgatgacattacaagcggatacatgactgatggtggacttggcctctatacccgtcgcctgaaccggctccctgatgggatggctgtggtacgggagaccctgcaacgaaatacctccctgggcctcggagacgctgacagctgggacgacagcagctccgtcagcagcggcatcagcgacaccatagacaacctcagcactgatgacatcaacaccagctcctccatcagctcttatgccaacacacctgcctcctctcgaaaaaacctggatgtgcagactgatgctgagaagcactcacaggtggagaggaattccctgtggtctggtgatgatgtcaagaaatcagacggaggctcagacagcggcataaaaatggagccaggttccaagtggaggcggaatccttctgatgtgtctgacgagtccgacaaaagcacgtcgggcaagaagaatcctgtcatctcccagacaggctcatggcggcgaggcatgacagctcaggtgggcatcaccatgccaaggacgaagccttcagccccggcaggcgcactgaagaccccaggaactggaaaaacagacgacgcaaaggtgtctgagaaaggaaggctttctcctaaagcctcccaggtgaagcgctccccatcagatgcaggccggagcagtggtgacgaatccaaaaagcccctccccagcagctctaggacacctactgccaatgccaacagctttgggttcaagaagcagagtggttccgccgccggcctggccatgatcacagccagcggggtgactgtcaccagcaggtcagccacactgggcaaaatcccaaagtcatctgcactcgtcagtcggtctgctggtcggaagtcaagtatggatggggctcagaatcaggatgacgggtatctagccctaagctcccggacaaaccttcagtaccggagtttgccgaggcccagtaagtccaacagccggaacggggctgggaacaggtctagcaccagcagcatagattccaacattagcagcaagtccgcaggcctgccagtgcccaaactgagggagccttccaaaacagccctaggcagctctctaccaggtctggtcaaccaaacagacaaggagaaaggcatctcatcagacaacgagagtgtggcttcctgtaactcggtgaaagtgaatccggcagcccagcctgtgtccagtccggctcagaccagtctccagcctggagccaagtacccagatgtggcctctcccacactccgcagactctttggtgggaagcctaccaagcaagtgcccatcgccacagctgaaaacatgaaaaattcggtggtcatctccaatcctcatgccaccatgactcagcaaggtaacctagactccccgtcaggcagtggcgtcctgagcagtgggagcagcagtcctctctacagcaagaatgtggacctcaaccagtctccgctagcctccagccccagctcagcccactcggccccttccaacagcctcacctggggcaccaacgccagcagctcctccgcagttagcaaggatggcctgggctttcagtctgtcagcagcctccacaccagctgtgagtccatcgacatctccctcagcagtggaggggtccccagccacaattcttccactggcctcatcgcctcctccaaggacgactccttgactccctttgtcagaactaacagtgtgaagaccacactgtcagaaagccctctctcttcccctgctgctagccctaagttctgcagaagtactctgcccaggaaacaggacagtgacccgcaccttgataggaacactttgcctaagaaaggactcaggtatactcccacctcccagcttcgcacgcaagaagatgcaaaagaatggttacggtcccattctgcaggaggccttcaggacaccgctgccaattcccccttttcctctggctccagcgtgacttctccctccggaacaagattcaacttttcccagcttgcgagtcccaccactgtcacccagatgagcttgtccaacccgaccatgctgaggactcacagcctctccaatgctgatgggcagtatgatccatacactgacagccgcttccggaatagctccatgtccctggatgagaagagcagaaccatgagccgttcaggctcattccgggatgggtttgaagaagaatcatgggagaaaagttctgtggacaactttgtcagccgtcttcacagctcacttcatttctctcttcctttgttccatcacgcaaggtatgagttagttcatggatcctcactctccttggtttccagcacatcgtcagtttattctacaccagaagaaaaatgccagtcagagattcgcaagctgcggcgggaactggatgcctcccaggagaaagtttcagctttgaccacccagctgacagcaaatgctcaccttgtggcagcctttgaacagagtcttggtaacatgacaatcaggctccagagtctgaccatgacagctgagcagaaggactcagaactgaatgagttaagaaaaaccattgagctgctaaagaaacagaacgcagctgcccaggctgccattaatggagtaattaacacacctgagctcaactgcaaaggaaacggcactgcccagtctgcagacctccgcatccgcaggcagcactcctcagacagcgtctccagcatcaacagtgccaccagccactccagcgtgggcagcaacatagagagtgactcaaagaagaagaagcggaagaactgggtcaatgagttacgcagctccttcaagcaagctttcgggaagaagaagtccccaaaatctgcgtcctctcattcagatattgaggagatgacggattcttctttgccttcctcaccaaagttaccgcacaatgggtccacaggttccaccccactgctgaggaattctcactccaactctctaatttcagaatgcatggatagtgaagctgagaccgtcatgcagctccgaaatgagttaagagacaaggagatgaagctgacggatatccgcttagaagctctcagttctgcccaccagctggaccagctccgggaggccatgaacaggatgcagagtgaaatagagaagctgaaagctgagaatgatcggctgaagtcagagtctcaaggcagtggctgcagccgggctccttcccaagtgtccatctctgcctccccgaggcagtccatgggcctctcccagcacagcttgaacctcactgagtcaaccagcctggacatgttgctggatgacactggtgaatgctcggctcggaaggaaggaggcaggcatgttaagatagttgtcagctttcaggaggaaatgaagtggaaggaggattccagaccacatctctttcttattggctgcattggagttagtggcaagacgaagtgggatgtgctcgatggggtggttagacggctgttcaaagaatacatcattcatgtcgacccagtgagtcagctagggctgaattcagacagcgttcttggctacagcattggagaaatcaagcgcagcaacacttccgaaacaccggagctgcttccttgtggctatctggttggagagaacacgaccatctcagtgactgtgaaagggctcgcagaaaacagcctggactcactggtgtttgagtccttgattcccaagcccatcctgcagcgctacgtctccctcctgatagagcaccgtcggatcattctctctggccccagcggcactgggaaaacctacctggccaaccggctgtctgagtatatagtgcttcgagagggacgggagttgacagacggggttatcgccacctttaacgtggaccataagtccagcaaggaattgcgccagtacctgtccaaccttgctgaccagtgcaacagtgagaacaatgctgtggacatgcccctcgtcatcatcctggacaacctacaccacgtgagctctctgggagagatcttcaatgggctgctcaactgcaagtaccacaaatgcccttacataattggcacaatgaaccaggctacctcttcgactcccaacctgcagcttcaccataacttcagatgggtgctttgtgccaaccacacggagcctgtgaagggtttccttggccgattcctgaggaggaagctcatggaaacagagatcagtgggcgggtgcgcaatatggagctggtaaaaatcattgactggattcccaaggtctggcatcacctcaaccgcttcctggaggctcacagttcctcggacgtcaccatcggcccccggctcttcctgtcatgccccatcgatgtggacggctcgagagtgtggttcaccgacttgtggaactattccattatcccctatctcctggaagccgtcagagaaggactccagctctatggaaggcgcgccccctgggaggatcctgccaagtgggtgatggacacatatccatgggcagccagcccacaacagcacgagtggcctcccctgctgcagttacggcctgaggatgtcggcttcgacggctactccatgcctcgggagggatcgacaagcaagcagatgccccccagtgatgctgaaggtgacccgctgatgaacatgctgatgaggctgcaggaggcagccaactactccagcccccagagctatgacagcgactccaacagcaacagccatcacgatgacatcttggactcctctttggagtccactctgtgacaggggcccggagcccagcgccctcctcttctcctcaccgcattccacctgcatcccccacatcaccctgaagatgacttcctgagccagcccccagccacagccttagagctgcgggaacaccgagaccccccgtccttcagcctcgacctgggtgcaggcatcccgggccagctgcctgcggaccgcttccttccacagcgagaactgcactaccttctgttgtactttaattattgttttgccttgttgctgtgacctccctaagacactgaagatacttctcgggaaaggatcatcgccgttgaaatgaaaa

SEQ ID NO: 20033 - DNA, 10594 bp, Homo sapiens
  source 1..10594: mol_type = unassigned DNA
atgagcgtgatgctgtggcgctgggaacagaataacaccaccatgaagctgcaaatctacacagactgggccaatcattacctagccaaatccggccacaagcgtctcatcagggatctccagcaagatgtgacagatggcgtcctcctggcccagattatccaggttgtggcaaatgaaaagattgaagacatcaatggctgtccgaagaacagatcccaaatgattgaaaacatagatgcctgcttgaatttcctggcagctaagggaataaacatccaggggctgtctgcagaagagatcaggaatggaaacctcaaggccattctaggcctcttcttcagcctctcccgatacaagcagcagcagcagcagccccagaagcagcacctctcctcacctctgccgcccgccgtatcccaggtggccggggccccctcccagtgccaggctggcacccctcagcagcaggtgccagtcactccccaagccccgtgccagcctcaccagccagcgccacatcagcagtcaaaagcacaagctgaaatgcagtccagtgcatcatccaaggactcatctcaaagcaaaatcatccgcttcactctgggtcagaaaaagatctctagacttccaggtcctaccgcgagggtatccgctgcaggcagcgaggccaaaacacgcggagggtcaactactgctaacaaccgacgcagccagagctttaacaactatgataaatccaaaccagtcacctccccacccccaccgccaagcagccacgagaaagagcctttggcaagttcagcctcctcccaccccggaatgagtgacaatgcacctgcttccttggagagcggcagcagctccacccctactaattgcagtacctcctcggccatcccgcagcccggtgcagccaccaagccttggcgcagcaaatccctcagcgtgaagcacagtgccacggtatccatgctctcggtcaagcctcctgggcctgaggcccccaggcccacacctgaagccatgaagccggcccccaacaatcagaagtccatgctggaaaagctgaaacttttcaacagtaaagggggctcaaaggcaggtgaggggccggggtcccgggacacaagctgtgagcggctggagactctgcccagcttcgaagagagcgaggagctggaggccgccagtcgcatgctcaccaccgtgggccctgcttccagcagccccaagattgcactcaagggcattgcccagaggacttttagccgggcactgaccaacaagaagagttctctgaaaggcaatgagaaagagaaggagaaacaacagcgggagaaggataaggagaaaagcaaggaccttgccaagagagcctctgtgacggagaggctggacctcaaggaggagccaaaagaagaccccagtggagcagctgtgcccgagatgccaaaaaagtcctccaagattgccagcttcatccccaaaggggggaagctcaacagtgccaagaaggagcccatggccccttcccacagtggaataccaaaaccaggaatgaaaagcatgcccgggaaatccccaagtgccccagcgccttccaaggaaggggagcggagccggagtgggaagctgagctcaggactcccccagcagaagccccagctggacggcagacactccagttcctcttccagcctggcgtcctcagaaggaaaaggcccaggagggaccaccctgaaccacagcatcagcagccagactgtcagtgggtctgtcgggaccacccagaccacaggaagcaataccgtcagtgttcagctacctcagccccagcagcaatacaaccatcccaacactgccacggttgcacctttcctgtacaggtctcagacggacactgaagggaatgttactgccgagtcaagctcaacaggtgtgagcgtggagcccagccacttcaccaagactggacagcctgctctggaagaactcactggggaagatcctgaggctcggcggctgcggacagtgaagaacatcgctgatctgcggcagaatttggaggaaaccatgtccagtttaaggggaactcaggttacacacagcacattggaaaccacgtttgacaccaatgtcaccacggagatgagtggccgtagcatactcagcttgacagggaggcccacacctctgtcctggagactgggccagtccagccctcggctccaagcaggagacgccccctcaatgggcaatgggtatccccctcgagccaacgccagcaggttcatcaacactgagtcaggtcgctatgtgtactccgcccctctgagaaggcagctggcctcccggggcagtagtgtctgccatgtggacgtctcagacaaggcaggagatgagatggacctggaaggcatcagcatggatgcccccggctacatgagcgacggggatgttctgagcaagaacatccggaccgatgacattacaagcggatacatgactgatggtggacttggcctctatacccgtcgcctgaaccggctccctgatgggatggctgtggtacgggagaccctgcaacgaaatacctccctgggcctcggagacgctgacagctgggacgacagcagctccgtcagcagcggcatcagcgacaccatagacaacctcagcactgatgacatcaacaccagctcctccatcagctcttatgccaacacacctgcctcctctcgaaaaaacctggatgtgcagactgatgctgagaagcactcacaggtggagaggaattccctgtggtctggtgatgatgtcaagaaatcagacggaggctcagacagcggcataaaaatggagccaggttccaagtggaggcggaatccttctgatgtgtctgacgagtccgacaaaagcacgtcgggcaagaagaatcctgtcatctcccagacaggctcatggcggcgaggcatgacagctcaggtgggcatcaccatgccaaggacgaagccttcagccccggcaggcgcactgaagaccccaggaactggaaaaacagacgacgcaaaggtgtctgagaaaggaaggctttctcctaaagcctcccaggtgaagcgctccccatcagatgcaggccggagcagtggtgacgaatccaaaaagcccctccccagcagctctaggacacctactgccaatgccaacagctttgggttcaagaagcagagtggttccgccgccggcctggccatgatcacagccagcggggtgactgtcaccagcaggtcagccacactgggcaaaatcccaaagtcatctgcactcgtcagtcggtctgctggtcggaagtcaagtatggatggggctcagaatcaggatgacgggtatctagccctaagctcccggacaaaccttcagtaccggagtttgccgaggcccagtaagtccaacagccggaacggggctgggaacaggtctagcaccagcagcatagattccaacattagcagcaagtccgcaggcctgccagtgcccaaactgagggagccttccaaaacagccctaggcagctctctaccaggtctggtcaaccaaacagacaaggagaaaggcatctcatcagacaacgagagtgtggcttcctgtaactcggtgaaagtgaatccggcagcccagcctgtgtccagtccggctcagaccagtctccagcctggagccaagtacccagatgtggcctctcccacactccgcagactctttggtgggaagcctaccaagcaagtgcccatcgccacagctgaaaacatgaaaaattcggtggtcatctccaatcctcatgccaccatgactcagcaaggtaacctagactccccgtcaggcagtggcgtcctgagcagtgggagcagcagtcctctctacagcaagaatgtggacctcaaccagtctccgctagcctccagccccagctcagcccactcggccccttccaacagcctcacctggggcaccaacgccagcagctcctccgcagttagcaaggatggcctgggctttcagtctgtcagcagcctccacaccagctgtgagtccatcgacatctccctcagcagtggaggggtccccagccacaattcttccactggcctcatcgcctcctccaaggacgactccttgactccctttgtcagaactaacagtgtgaagaccacactgtcagaaagccctctctcttcccctgctgctagccctaagttctgcagaagtactctgcccaggaaacaggacagtgacccgcaccttgataggaacactttgcctaagaaaggactcaggtatactcccacctcccagcttcgcacgcaagaagatgcaaaagaatggttacggtcccattctgcaggaggccttcaggacaccgctgccaattcccccttttcctctggctccagcgtgacttctccctccggaacaagattcaacttttcccagcttgcgagtcccaccactgtcacccagatgagcttgtccaacccgaccatgctgaggactcacagcctctccaatgctgatgggcagtatgatccatacactgacagccgcttccggaatagctccatgtccctggatgagaagagcagaaccatgagccgttcaggctcattccgggatgggtttgaagaagaatcatgggagaaaagttctgtggacaactttgtcagccgtcttcacagctcacttcatttctctcttcctttgttccatcacgcaaggtatgagttagttcatggatcctcactctccttggtttccagcacatcgtcagtttattctacaccagaagaaaaatgccagtcagagattcgcaagctgcggcgggaactggatgcctcccaggagaaagtttcagctttgaccacccagctgacagcaaatgctcaccttgtggcagcctttgaacagagtcttggtaacatgacaatcaggctccagagtctgaccatgacagctgagcagaaggactcagaactgaatgagttaagaaaaaccattgagctgctaaagaaacagaacgcagctgcccaggctgccattaatggagtaattaacacacctgagctcaactgcaaaggaaacggcactgcccagtctgcagacctccgcatccgcaggcagcactcctcagacagcgtctccagcatcaacagtgccaccagccactccagcgtgggcagcaacatagagagtgactcaaagaagaagaagcggaagaactgggtcaatgagttacgcagctccttcaagcaagctttcgggaagaagaagtccccaaaatctgcgtcctctcattcagatattgaggagatgacggattcttctttgccttcctcaccaaagttaccgcacaatgggtccacaggttccaccccactgctgaggaattctcactccaactctctaatttcagaatgcatggatagtgaagctgagaccgtcatgcagctccgaaatgagttaagagacaaggagatgaagctgacggatatccgcttagaagctctcagttctgcccaccagctggaccagctccgggaggccatgaacaggatgcagagtgaaatagagaagctgaaagctgagaatgatcggctgaagtcagagtctcaaggcagtggctgcagccgggctccttcccaagtgtccatctctgcctccccgaggcagtccatgggcctctcccagcacagcttgaacctcactgagtcaaccagcctggacatgttgctggatgacactggtgaatgctcggctcggaaggaaggaggcaggcatgttaagatagttgtcagctttcaggaggaaatgaagtggaaggaggattccagaccacatctctttcttattggctgcattggagttagtggcaagacgaagtgggatgtgctcgatggggtggttagacggctgttcaaagaatacatcattcatgtcgacccagtgagtcagctagggctgaattcagacagcgttcttggctacagcattggagaaatcaagcgcagcaacacttccgaaacaccggagctgcttccttgtggctatctggttggagagaacacgaccatctcagtgactgtgaaagggctcgcagaaaacagcctggactcactggtgtttgagtccttgattcccaagcccatcctgcagcgctacgtctccctcctgatagagcaccgtcggatcattctctctggccccagcggcactgggaaaacctacctggccaaccggctgtctgagtatatagtgcttcgagagggacgggagttgacagacggggttatcgccacctttaacgtggaccataagtccagcaaggaattgcgccagtacctgtccaaccttgctgaccagtgcaacagtgagaacaatgctgtggacatgcccctcgtcatcatcctggacaacctacaccacgtgagctctctgggagagatcttcaatgggctgctcaactgcaagtaccacaaatgcccttacataattggcacaatgaaccaggctacctcttcgactcccaacctgcagcttcaccataacttcagatgggtgctttgtgccaaccacacggagcctgtgaagggtttccttggccgattcctgaggaggaagctcatggaaacagagatcagtgggcgggtgcgcaatatggagctggtaaaaatcattgactggattcccaaggtctggcatcacctcaaccgcttcctggaggctcacagttcctcggacgtcaccatcggcccccggctcttcctgtcatgccccatcgatgtggacggctcgagagtgtggttcaccgacttgtggaactattccattatcccctatctcctggaagccgtcagagaaggactccagctctatggaaggcgcgccccctgggaggatcctgccaagtgggtgatggacacatatccatgggcagccagcccacaacagcacgagtggcctcccctgctgcagttacggcctgaggatgtcggcttcgacggctactccatgcctcgggagggatcgacaagcaagcagatgccccccagtgatgctgaaggtgacccgctgatgaacatgctgatgaggctgcaggaggcagccaactactccagcccccagagctatgacagcgactccaacagcaacagccatcacgatgacatcttggactcctctttggagtccactctgtgacaggggcccggagcccagcgccctcctcttctcctcaccgcattccacctgcatcccccacatcaccctgaagatgacttcctgagccagcccccagccacagccttagagctgcgggaacaccgagaccccccgtccttcagcctcgacctgggtgcaggcatcccgggccagctgcctgcggaccgcttccttccacagcgagaactgcactaccttctgttgtactttaattattgttttgccttgttgctgtgacctccctaagacactgaagatacttctcgggaaaggatcatcgccgttgaaatgaaaagagagacagagagaaaaaaaaaaagagaacccacatgaagctctgaaaccaaacagcatcctgccatgagcttcccagagacagaagagactggagcaaagtcggaaacacagagaagcacggcttcccctcagcacagaccctccagactgggtctcagagccgtgccacccaccctcccacacagccggccacagggagaactggtgctaaccagggtgcttgctttggtcacgttcaacgcactacagagctacgacacagggaaaccttaggagcaaataaaccgtgctttcatgttttttaaatggtgctttccttacccgagaggtattttgcctgttccaatcaaaccaccccattcaggtccatcagcctctgattaatatccgtgagagtgagtgacggagtgagagtgtgagcgagtggatgtggctgtcagtgcagaacagcatgtgtctctttccttctgatatatgaatgaatcaggtttttttttttttttttctgcaaacactgtgtatagtgagacttgttctactttggagaacaggttaccttttgaaaatgaggttgagtttcttcctttctgatgcattgatttttgaagatttttttttcccccttcccctcttggtcagaatcaatcctttggtgaaagtaagaaccgcaggagttgagttttggtttggtcctgctcagttttggtttttagttgtccatcctcacagtcctacacactcgcctcctcctgctagggctgggggtatctgtgtcctttaaaatggatgaggacctggtcctcgacatgtgggtgagccatggaccttgccttcccttctcgtccttgagggtttagaacacacaccaacacctccagcgtccccgccccagcttccggtggggtgatgcggtcaccctgcaaaagacttgcactttcctcagaaccaacatgacgcagctcaataagggtgagggtcactccctcccagaagccccgtctggacgagccttgcctgacctcttcggtgctgaccttcccaaagtgatgccttactggttttgtactaactgtgttcattttacataagtgtcgtgcctgcctggggtttgttttttttgtcattgttttccccattgaaacaaacagggctaaaaagtcatctgttcattaggagaactcaagttgctgtgacttttctcatccaaaagactcatttgtgtggatgcgtgaccatgggaaaaagaaaaaaaaaaagatccattttttaggttcttttcggtctccagctgacaacccaactggacaatgatctgtctggtgcaggagaaggcaaaagtttctacaagtctacatgaccttgctgatacttgttctaatagaaacccagtctgctgtgtcttcaacatactggtattttcattacaaagtatggtaaatttttgagttgtttgtttctgttttgtaaagagaatccttattggacaccagtgaaggtgtctctgttttaatgatcagggtttttattccatcttttgcatttcttctatttctgaaggtttgtctcttggcatctttttttagtttcttaccataagagtttgacccgaaactgctcacttcacattggatgacaccatgttcttcctctttgaaaagaaaaggggaatgtgtcccactagtgaaaggaaaacttttcaacactatccctgctttagtctcagcaaactcagactattctgcttagccttcattagtcatctgggtgtgagtgtgtcttgttctgtttttctttttaataaaacttttaaaccatatatttagcctgtgaccaggggggccaaaccctaagatttctggtaaacctgaagggtggccctcctcagacaatttatctcccagcaatgaccctactacactcgcgtactgtgaatttgggaggaggtaaagttgacttctcctcgtgggcagttttccaatcaccttgtgagtagacacctgccaatattgtttgaaacctttttttaatatgacatcctctcttgtcattctcttctcccctttcccacagacttccctcctgggtccaggttcagaaccaagacttctgtacctagtgctgcctgattggtgaacattgacttcaagtagcatagcccttgtgtgactcacaactccgtgtccttcctaaagtttcgggaagcagggttgtctaatatgcacatttcttattttggtcatatttttactttagtgtcactcaccttttacaaagtgactttgtactcatttagggctctatcggaaatgcttccattttgccttttctacagttaggccaattttgaaatatataaattctatgcaacatttatgttgagttaccaatggaagccaaaagttctcttcccaaactgccaagaatgatacaggccataattgaaatgggaataccttttaagtttcattaggggtggggtgggagtgggacaggaacaagacttgcctagatctttgttgtatcttggggacttttactttgttgtttgatgcttaaacttcaaaattctctgtattcaaatttgattgtggcgaatctacttcaaaaaggaaaaataatccaactttgtggatattaaatggaaggtttgctgttttgatctagttgtttccagtggagcagttttatgaaatatgttctataagatgtacattttttcattgtaacatagaaattgtaaataattgattaaagtgctgcattttgatgaattttttctagccatttttaaagagaaaactaggaattgagtattttgtgtacggtatgtttccatcctccctccccttcctcctcccctcctctctctctcttcctacctatttaattttcatttgtcatgaggtttttggatttgccaatgatctgctggacatcatgccccatgtcatagagaataaagctgatgattgtaccagtcttaaattattcatgattcaataaaattgatgcttatttattc

SEQ ID NO: 20034 - DNA, 5084 bp, Homo sapiens
  source 1..5084: mol_type = unassigned DNA
aatcttttcaatcgaatgctttgccttcagacgtcaatggaatgagctaagaaatgttatagtcaatgatttttgcatcattaaaagtagcacttagggctggaaagactttctgcaatgtttctgtgcagtctgtgaggatttaaagtagtttttcattcttagattttcttcaatttgacccgctgttgcaaactcccctgggaccacatggagggcccttccattcagtgctttacgggccgcaatgtagtgaaatgctctggcctaggaaccttacaagctgggacgacagcagctccgtcagcagcggcatcagcgacaccatagacaacctcagcactgatgacatcaacaccagctcctccatcagctcttatgccaacacacctgcctcctctcgaaaaaacctggatgtgcagactgatgctgagaagcactcacaggtggagaggaattccctgtggtctggtgatgatgtcaagaaatcagacggaggctcagacagcggcataaaaatggagccaggttccaagtggaggcggaatccttctgatgtgtctgacgagtccgacaaaagcacgtcgggcaagaagaatcctgtcatctcccagacaggctcatggcggcgaggcatgacagctcaggtgggcatcaccatgccaaggacgaagccttcagccccggcaggcgcactgaagaccccaggaactggaaaaacagacgacgcaaaggtgtctgagaaaggaaggctttctcctaaagcctcccaggtgaagcgctccccatcagatgcaggccggagcagtggtgacgaatccaaaaagcccctccccagcagctctaggacacctactgccaatgccaacagctttgggttcaagaagcagagtggttccgccgccggcctggccatgatcacagccagcggggtgactgtcaccagcaggtcagccacactgggcaaaatcccaaagtcatctgcactcgtcagtcggtctgctggtcggaagtcaagtatggatggggctcagaatcaggatgacgggtatctagccctaagctcccggacaaaccttcagtaccggagtttgccgaggcccagtaagtccaacagccggaacggggctgggaacaggtctagcaccagcagcatagattccaacattagcagcaagtccgcaggcctgccagtgcccaaactgagggagccttccaaaacagccctaggcagctctctaccaggtctggtcaaccaaacagacaaggagaaaggcatctcatcagacaacgagagtgtggcttcctgtaactcggtgaaagtgaatccggcagcccagcctgtgtccagtccggctcagaccagtctccagcctggagccaagtacccagatgtggcctctcccacactccgcagactctttggtgggaagcctaccaagcaagtgcccatcgccacagctgaaaacatgaaaaattcggtggtcatctccaatcctcatgccaccatgactcagcaaggtaacctagactccccgtcaggcagtggcgtcctgagcagtgggagcagcagtcctctctacagcaagaatgtggacctcaaccagtctccgctagcctccagccccagctcagcccactcggccccttccaacagcctcacctggggcaccaacgccagcagctcctccgcagttagcaaggatggcctgggctttcagtctgtcagcagcctccacaccagctgtgagtccatcgacatctccctcagcagtggaggggtccccagccacaattcttccactggcctcatcgcctcctccaaggacgactccttgactccctttgtcagaactaacagtgtgaagaccacactgtcagaaagtgacccgcaccttgataggaacactttgcctaagaaaggactcaggtatactcccacctcccagcttcgcacgcaagaagatgcaaaagaatggttacggtcccattctgcaggaggccttcaggacaccgctgccaattcccccttttcctctggctccagcgtgacttctccctccggaacaagattcaacttttcccagcttgcgagtcccaccactgtcacccagatgagcttgtccaacccgaccatgctgaggactcacagcctctccaatgctgatgggcagtatgatccatacactgacagccgcttccggaatagctccatgtccctggatgagaagagcagaaccatgagccgttcaggctcattccgggatgggtttgaagaagttcatggatcctcactctccttggtttccagcacatcgtcagtttattctacaccagaagaaaaatgccagtcagagattcgcaagctgcggcgggaactggatgcctcccaggagaaagtttcagctttgaccacccagctgacagcaaatgctcaccttgtggcagcctttgaacagagtcttggtaacatgacaatcaggctccagagtctgaccatgacagctgagcagaaggactcagaactgaatgagttaagaaaaaccattgagctgctaaagaaacagaacgcagctgcccaggctgccattaatggagtaattaacacacctgagctcaactgcaaaggaaacggcactgcccagtctgcagacctccgcatccgcaggcagcactcctcagacagcgtctccagcatcaacagtgccaccagccactccagcgtgggcagcaacatagagagtgactcaaagaagaagaagcggaagaactggttacgcagctccttcaagcaagctttcgggaagaagaagtccccaaaatctgcgtcctctcattcagatattgaggagatgacggattcttctttgccttcctcaccaaagttaccgcacaatgggtccacaggttccaccccactgctgaggaattctcactccaactctctaatttcagaatgcatggatagtgaagctgagaccgtcatgcagctccgaaatgagttaagagacaaggagatgaagctgacggatatccgcttagaagctctcagttctgcccaccagctggaccagctccgggaggccatgaacaggatgcagagtgaaatagagaagctgaaagctgagaatgatcggctgaagtcagagtctcaaggcagtggctgcagccgggctccttcccaagtgtccatctctgcctccccgaggcagtccatgggcctctcccagcacagcttgaacctcactgagtcaaccagcctggacatgttgctggatgacactggtgaatgctcggctcggaaggaaggaggcaggcatgttaagatagttgtcagctttcaggaggaaatgaagtggaaggaggattccagaccacatctctttcttattggctgcattggagttagtggcaagacgaagtgggatgtgctcgatggggtggttagacggctgttcaaagaatacatcattcatgtcgacccagtgagtcagctagggctgaattcagacagcgttcttggctacagcattggagaaatcaagcgcagcaacacttccgaaacaccggagctgcttccttgtggctatctggttggagagaacacgaccatctcagtgactgtgaaagggctcgcagaaaacagcctggactcactggtgtttgagtccttgattcccaagcccatcctgcagcgctacgtctccctcctgatagagcaccgtcggatcattctctctggccccagcggcactgggaaaacctacctggccaaccggctgtctgagtatatagtgcttcgagagggacgggagttgacagacggggttatcgccacctttaacgtggaccataagtccagcaaggaattgcgccagtacctgtccaaccttgctgaccagtgcaacagtgagaacaatgctgtggacatgcccctcgtcatcatcctggacaacctacaccacgtgagctctctgggagagatcttcaatgggctgctcaactgcaagtaccacaaatgcccttacataattggcacaatgaaccaggctacctcttcgactcccaacctgcagcttcaccataacttcagatgggtgctttgtgccaaccacacggagcctgtgaagggtttccttggccgattcctgaggaggaagctcatggaaacagagatcagtgggcgggtgcgcaatatggagctggtaaaaatcattgactggattcccaaggtctggcatcacctcaaccgcttcctggaggctcacagttcctcggacgtcaccatcggcccccggctcttcctgtcatgccccatcgatgtggacggctcgagagtgtggttcaccgacttgtggaactattccattatcccctatctcctggaagccgtcagagaaggactccagctctatggaaggcgcgccccctgggaggatcctgccaagtgggtgatggacacatatccatgggcagccagcccacaacagcacgagtggcctcccctgctgcagttacggcctgaggatgtcggcttcgacggctactccatgcctcgggagggatcgacaagcaagcagatgccccccagtgatgctgaaggtgacccgctgatgaacatgctgatgaggctgcaggaggcagccaactactccagcccccagagctatgacagcgactccaacagcaacagccatcacgatgacatcttggactcctctttggagtccactctgtgacaggggcccggagcccagcgccctcctcttctcctcaccgcattccacctgcatcccccacatcaccctgaagatgacttcctgagccagcccccagccacagccttagagctgcgggaacaccgagaccccccgtccttcagcctcgacctgggtgcaggcatcccgggccagctgcctgcggaccgcttccttccacagcgagaactgcactaccttctgttgtactttaattattgttttgccttgttgctgtgacctccctaagacactgaagatacttctcgggaaaggatcatcgccgttgaaatgaaaagagagacagagagaaaaaaaaaaagagaa

SEQ ID NO: 20035 - DNA, 7777 bp, Homo sapiens
  source 1..7777: mol_type = unassigned DNA
atgctctggcctaggaaccttacaagctgggacgacagcagctccgtcagcagcggcatcagcgacaccatagacaacctcagcactgatgacatcaacaccagctcctccatcagctcttatgccaacacacctgcctcctctcgaaaaaacctggatgtgcagactgatgctgagaagcactcacaggtggagaggaattccctgtggtctggtgatgatgtcaagaaatcagacggaggctcagacagcggcataaaaatggagccaggttccaagtggaggcggaatccttctgatgtgtctgacgagtccgacaaaagcacgtcgggcaagaagaatcctgtcatctcccagacaggctcatggcggcgaggcatgacagctcaggtgggcatcaccatgccaaggacgaagccttcagccccggcaggcgcactgaagaccccaggaactggaaaaacagacgacgcaaaggtgtctgagaaaggaaggctttctcctaaagcctcccaggtgaagcgctccccatcagatgcaggccggagcagtggtgacgaatccaaaaagcccctccccagcagctctaggacacctactgccaatgccaacagctttgggttcaagaagcagagtggttccgccgccggcctggccatgatcacagccagcggggtgactgtcaccagcaggtcagccacactgggcaaaatcccaaagtcatctgcactcgtcagtcggtctgctggtcggaagtcaagtatggatggggctcagaatcaggatgacgggtatctagccctaagctcccggacaaaccttcagtaccggagtttgccgaggcccagtaagtccaacagccggaacggggctgggaacaggtctagcaccagcagcatagattccaacattagcagcaagtccgcaggcctgccagtgcccaaactgagggagccttccaaaacagccctaggcagctctctaccaggtctggtcaaccaaacagacaaggagaaaggcatctcatcagacaacgagagtgtggcttcctgtaactcggtgaaagtgaatccggcagcccagcctgtgtccagtccggctcagaccagtctccagcctggagccaagtacccagatgtggcctctcccacactccgcagactctttggtgggaagcctaccaagcaagtgcccatcgccacagctgaaaacatgaaaaattcggtggtcatctccaatcctcatgccaccatgactcagcaaggtaacctagactccccgtcaggcagtggcgtcctgagcagtgggagcagcagtcctctctacagcaagaatgtggacctcaaccagtctccgctagcctccagccccagctcagcccactcggccccttccaacagcctcacctggggcaccaacgccagcagctcctccgcagttagcaaggatggcctgggctttcagtctgtcagcagcctccacaccagctgtgagtccatcgacatctccctcagcagtggaggggtccccagccacaattcttccactggcctcatcgcctcctccaaggacgactccttgactccctttgtcagaactaacagtgtgaagaccacactgtcagaaaggtatactcccacctcccagcttcgcacgcaagaagatgcaaaagaatggttacggtcccattctgcaggaggccttcaggacaccgctgccaattcccccttttcctctggctccagcgtgacttctccctccggaacaagattcaacttttcccagcttgcgagtcccaccactgtcacccagatgagcttgtccaacccgaccatgctgaggactcacagcctctccaatgctgatgggcagtatgatccatacactgacagccgcttccggaatagctccatgtccctggatgagaagagcagaaccatgagccgttcaggctcattccgggatgggtttgaagaagttcatggatcctcactctccttggtttccagcacatcgtcagtttattctacaccagaagaaaaatgccagtcagagattcgcaagctgcggcgggaactggatgcctcccaggagaaagtttcagctttgaccacccagctgacagcaaatgctcaccttgtggcagcctttgaacagagtcttggtaacatgacaatcaggctccagagtctgaccatgacagctgagcagaaggactcagaactgaatgagttaagaaaaaccattgagctgctaaagaaacagaacgcagctgcccaggctgccattaatggagtaattaacacacctgagctcaactgcaaaggaaacggcactgcccagtctgcagacctccgcatccgcaggcagcactcctcagacagcgtctccagcatcaacagtgccaccagccactccagcgtgggcagcaacatagagagtgactcaaagaagaagaagcggaagaactggttacgcagctccttcaagcaagctttcgggaagaagaagtccccaaaatctgcgtcctctcattcagatattgaggagatgacggattcttctttgccttcctcaccaaagttaccgcacaatgggtccacaggttccaccccactgctgaggaattctcactccaactctctaatttcagaatgcatggatagtgaagctgagaccgtcatgcagctccgaaatgagttaagagacaaggagatgaagctgacggatatccgcttagaagctctcagttctgcccaccagctggaccagctccgggaggccatgaacaggatgcagagtgaaatagagaagctgaaagctgagaatgatcggctgaagtcagagtctcaaggcagtggctgcagccgggctccttcccaagtgtccatctctgcctccccgaggcagtccatgggcctctcccagcacagcttgaacctcactgagtcaaccagcctggacatgttgctggatgacactggtgaatgctcggctcggaaggaaggaggcaggcatgttaagatagttgtcagctttcaggaggaaatgaagtggaaggaggattccagaccacatctctttcttattggctgcattggagttagtggcaagacgaagtgggatgtgctcgatggggtggttagacggctgttcaaagaatacatcattcatgtcgacccagtgagtcagctagggctgaattcagacagcgttcttggctacagcattggagaaatcaagcgcagcaacacttccgaaacaccggagctgcttccttgtggctatctggttggagagaacacgaccatctcagtgactgtgaaagggctcgcagaaaacagcctggactcactggtgtttgagtccttgattcccaagcccatcctgcagcgctacgtctccctcctgatagagcaccgtcggatcattctctctggccccagcggcactgggaaaacctacctggccaaccggctgtctgagtatatagtgcttcgagagggacgggagttgacagacggggttatcgccacctttaacgtggaccataagtccagcaaggaattgcgccagtacctgtccaaccttgctgaccagtgcaacagtgagaacaatgctgtggacatgcccctcgtcatcatcctggacaacctacaccacgtgagctctctgggagagatcttcaatgggctgctcaactgcaagtaccacaaatgcccttacataattggcacaatgaaccaggctacctcttcgactcccaacctgcagcttcaccataacttcagatgggtgctttgtgccaaccacacggagcctgtgaagggtttccttggccgattcctgaggaggaagctcatggaaacagagatcagtgggcgggtgcgcaatatggagctggtaaaaatcattgactggattcccaaggtctggcatcacctcaaccgcttcctggaggctcacagttcctcggacgtcaccatcggcccccggctcttcctgtcatgccccatcgatgtggacggctcgagagtgtggttcaccgacttgtggaactattccattatcccctatctcctggaagccgtcagagaaggactccagctctatggaaggcgcgccccctgggaggatcctgccaagtgggtgatggacacatatccatgggcagccagcccacaacagcacgagtggcctcccctgctgcagttacggcctgaggatgtcggcttcgacggctactccatgcctcgggagggatcgacaagcaagcagatgccccccagtgatgctgaaggtgacccgctgatgaacatgctgatgaggctgcaggaggcagccaactactccagcccccagagctatgacagcgactccaacagcaacagccatcacgatgacatcttggactcctctttggagtccactctgtgacaggggcccggagcccagcgccctcctcttctcctcaccgcattccacctgcatcccccacatcaccctgaagatgacttcctgagccagcccccagccacagccttagagctgcgggaacaccgagaccccccgtccttcagcctcgacctgggtgcaggcatcccgggccagctgcctgcggaccgcttccttccacagcgagaactgcactaccttctgttgtactttaattattgttttgccttgttgctgtgacctccctaagacactgaagatacttctcgggaaaggatcatcgccgttgaaatgaaaagagagacagagagaaaaaaaaaaagagaacccacatgaagctctgaaaccaaacagcatcctgccatgagcttcccagagacagaagagactggagcaaagtcggaaacacagagaagcacggcttcccctcagcacagaccctccagactgggtctcagagccgtgccacccaccctcccacacagccggccacagggagaactggtgctaaccagggtgcttgctttggtcacgttcaacgcactacagagctacgacacagggaaaccttaggagcaaataaaccgtgctttcatgttttttaaatggtgctttccttacccgagaggtattttgcctgttccaatcaaaccaccccattcaggtccatcagcctctgattaatatccgtgagagtgagtgacggagtgagagtgtgagcgagtggatgtggctgtcagtgcagaacagcatgtgtctctttccttctgatatatgaatgaatcaggtttttttttttttttttctgcaaacactgtgtatagtgagacttgttctactttggagaacaggttaccttttgaaaatgaggttgagtttcttcctttctgatgcattgatttttgaagatttttttttcccccttcccctcttggtcagaatcaatcctttggtgaaagtaagaaccgcaggagttgagttttggtttggtcctgctcagttttggtttttagttgtccatcctcacagtcctacacactcgcctcctcctgctagggctgggggtatctgtgtcctttaaaatggatgaggacctggtcctcgacatgtgggtgagccatggaccttgccttcccttctcgtccttgagggtttagaacacacaccaacacctccagcgtccccgccccagcttccggtggggtgatgcggtcaccctgcaaaagacttgcactttcctcagaaccaacatgacgcagctcaataagggtgagggtcactccctcccagaagccccgtctggacgagccttgcctgacctcttcggtgctgaccttcccaaagtgatgccttactggttttgtactaactgtgttcattttacataagtgtcgtgcctgcctggggtttgttttttttgtcattgttttccccattgaaacaaacagggctaaaaagtcatctgttcattaggagaactcaagttgctgtgacttttctcatccaaaagactcatttgtgtggatgcgtgaccatgggaaaaagaaaaaaaaaaagatccattttttaggttcttttcggtctccagctgacaacccaactggacaatgatctgtctggtgcaggagaaggcaaaagtttctacaagtctacatgaccttgctgatacttgttctaatagaaacccagtctgctgtgtcttcaacatactggtattttcattacaaagtatggtaaatttttgagttgtttgtttctgttttgtaaagagaatccttattggacaccagtgaaggtgtctctgttttaatgatcagggtttttattccatcttttgcatttcttctatttctgaaggtttgtctcttggcatctttttttagtttcttaccataagagtttgacccgaaactgctcacttcacattggatgacaccatgttcttcctctttgaaaagaaaaggggaatgtgtcccactagtgaaaggaaaacttttcaacactatccctgctttagtctcagcaaactcagactattctgcttagccttcattagtcatctgggtgtgagtgtgtcttgttctgtttttctttttaataaaacttttaaaccatatatttagcctgtgaccaggggggccaaaccctaagatttctggtaaacctgaagggtggccctcctcagacaatttatctcccagcaatgaccctactacactcgcgtactgtgaatttgggaggaggtaaagttgacttctcctcgtgggcagttttccaatcaccttgtgagtagacacctgccaatattgtttgaaacctttttttaatatgacatcctctcttgtcattctcttctcccctttcccacagacttccctcctgggtccaggttcagaaccaagacttctgtacctagtgctgcctgattggtgaacattgacttcaagtagcatagcccttgtgtgactcacaactccgtgtccttcctaaagtttcgggaagcagggttgtctaatatgcacatttcttattttggtcatatttttactttagtgtcactcaccttttacaaagtgactttgtactcatttagggctctatcggaaatgcttccattttgccttttctacagttaggccaattttgaaatatataaattctatgcaacatttatgttgagttaccaatggaagccaaaagttctcttcccaaactgccaagaatgatacaggccataattgaaatgggaataccttttaagtttcattaggggtggggtgggagtgggacaggaacaagacttgcctagatctttgttgtatcttggggacttttactttgttgtttgatgcttaaacttcaaaattctctgtattcaaatttgattgtggcgaatctacttcaaaaaggaaaaataatccaactttgtggatattaaatggaaggtttgctgttttgatctagttgtttccagtggagcagttttatgaaatatgttctataagatgtacattttttcattgtaacatagaaattgtaaataattgattaaagtgctgcattttgatgaattttttctagccatttttaaagagaaaactaggaattgagtattttgtgtacggtatgtttccatcctccctccccttcctcctcccctcctctctctctcttcctacctatttaattttcatttgtcatgaggtttttggatttgccaatgatctgctggacatcatgccccatgtcatagagaataaagctgatgattgtaccagtcttaaattattcatgattcaataaaattgatgcttatttattc

SEQ ID NO: 20036 - DNA, 10600 bp, Homo sapiens
  source 1..10600: mol_type = unassigned DNA
atggctattgatctctactgcggtttggcttgtctgtggggaatacatgagccccgacaaatctacacagactgggccaatcattacctagccaaatccggccacaagcgtctcatcagggatctccagcaagatgtgacagatggcgtcctcctggcccagattatccaggttgtggcaaatgaaaagattgaagacatcaatggctgtccgaagaacagatcccaaatgattgaaaacatagatgcctgcttgaatttcctggcagctaagggaataaacatccaggggctgtctgcagaagagatcaggaatggaaacctcaaggccattctaggcctcttcttcagcctctcccgatacaagcagcagcagcagcagccccagaagcagcacctctcctcacctctgccgcccgccgtatcccaggtggccggggccccctcccagtgccaggctggcacccctcagcagcaggtgccagtcactccccaagccccgtgccagcctcaccagccagcgccacatcagcagtcaaaagcacaagctgaaatgcagtccagtgcatcatccaaggactcatctcaaagcaaaatcatccgcttcactctgggtcagaaaaagatctctagacttccaggtcctaccgcgagggtatccgctgcaggcagcgaggccaaaacacgcggagggtcaactactgctaacaaccgacgcagccagagctttaacaactatgataaatccaaaccagtcacctccccacccccaccgccaagcagccacgagaaagagcctttggcaagttcagcctcctcccaccccggaatgagtgacaatgcacctgcttccttggagagcggcagcagctccacccctactaattgcagtacctcctcggccatcccgcagcccggtgcagccaccaagccttggcgcagcaaatccctcagcgtgaagcacagtgccacggtatccatgctctcggtcaagcctcctgggcctgaggcccccaggcccacacctgaagccatgaagccggcccccaacaatcagaagtccatgctggaaaagctgaaacttttcaacagtaaagggggctcaaaggcaggtgaggggccggggtcccgggacacaagctgtgagcggctggagactctgcccagcttcgaagagagcgaggagctggaggccgccagtcgcatgctcaccaccgtgggccctgcttccagcagccccaagattgcactcaagggcattgcccagaggacttttagccgggcactgaccaacaagaagagttctctgaaaggcaatgagaaagagaaggagaaacaacagcgggagaaggataaggagaaaagcaaggaccttgccaagagagcctctgtgacggagaggctggacctcaaggaggagccaaaagaagaccccagtggagcagctgtgcccgagatgccaaaaaagtcctccaagattgccagcttcatccccaaaggggggaagctcaacagtgccaagaaggagcccatggccccttcccacagtggaataccaaaaccaggaatgaaaagcatgcccgggaaatccccaagtgccccagcgccttccaaggaaggggagcggagccggagtgggaagctgagctcaggactcccccagcagaagccccagctggacggcagacactccagttcctcttccagcctggcgtcctcagaaggaaaaggcccaggagggaccaccctgaaccacagcatcagcagccagactgtcagtgggtctgtcgggaccacccagaccacaggaagcaataccgtcagtgttcagctacctcagccccagcagcaatacaaccatcccaacactgccacggttgcacctttcctgtacaggtctcagacggacactgaagggaatgttactgccgagtcaagctcaacaggtgtgagcgtggagcccagccacttcaccaagactggacagcctgctctggaagaactcactggggaagatcctgaggctcggcggctgcggacagtgaagaacatcgctgatctgcggcagaatttggaggaaaccatgtccagtttaaggggaactcaggttacacacagcacattggaaaccacgtttgacaccaatgtcaccacggagatgagtggccgtagcatactcagcttgacagggaggcccacacctctgtcctggagactgggccagtccagccctcggctccaagcaggagacgccccctcaatgggcaatgggtatccccctcgagccaacgccagcaggttcatcaacactgagtcaggtcgctatgtgtactccgcccctctgagaaggcagctggcctcccggggcagtagtgtctgccatgtggacgtctcagacaaggcaggagatgagatggacctggaaggcatcagcatggatgcccccggctacatgagcgacggggatgttctgagcaagaacatccggaccgatgacattacaagcggatacatgactgatggtggacttggcctctatacccgtcgcctgaaccggctccctgatgggatggctgtggtacgggagaccctgcaacgaaatacctccctgggcctcggagacgctgacagctgggacgacagcagctccgtcagcagcggcatcagcgacaccatagacaacctcagcactgatgacatcaacaccagctcctccatcagctcttatgccaacacacctgcctcctctcgaaaaaacctggatgtgcagactgatgctgagaagcactcacaggtggagaggaattccctgtggtctggtgatgatgtcaagaaatcagacggaggctcagacagcggcataaaaatggagccaggttccaagtggaggcggaatccttctgatgtgtctgacgagtccgacaaaagcacgtcgggcaagaagaatcctgtcatctcccagacaggctcatggcggcgaggcatgacagctcaggtgggcatcaccatgccaaggacgaagccttcagccccggcaggcgcactgaagaccccaggaactggaaaaacagacgacgcaaaggtgtctgagaaaggaaggctttctcctaaagcctcccaggtgaagcgctccccatcagatgcaggccggagcagtggtgacgaatccaaaaagcccctccccagcagctctaggacacctactgccaatgccaacagctttgggttcaagaagcagagtggttccgccgccggcctggccatgatcacagccagcggggtgactgtcaccagcaggtcagccacactgggcaaaatcccaaagtcatctgcactcgtcagtcggtctgctggtcggaagtcaagtatggatggggctcagaatcaggatgacgggtatctagccctaagctcccggacaaaccttcagtaccggagtttgccgaggcccagtaagtccaacagccggaacggggctgggaacaggtctagcaccagcagcatagattccaacattagcagcaagtccgcaggcctgccagtgcccaaactgagggagccttccaaaacagccctaggcagctctctaccaggtctggtcaaccaaacagacaaggagaaaggcatctcatcagacaacgagagtgtggcttcctgtaactcggtgaaagtgaatccggcagcccagcctgtgtccagtccggctcagaccagtctccagcctggagccaagtacccagatgtggcctctcccacactccgcagactctttggtgggaagcctaccaagcaagtgcccatcgccacagctgaaaacatgaaaaattcggtggtcatctccaatcctcatgccaccatgactcagcaaggtaacctagactccccgtcaggcagtggcgtcctgagcagtgggagcagcagtcctctctacagcaagaatgtggacctcaaccagtctccgctagcctccagccccagctcagcccactcggccccttccaacagcctcacctggggcaccaacgccagcagctcctccgcagttagcaaggatggcctgggctttcagtctgtcagcagcctccacaccagctgtgagtccatcgacatctccctcagcagtggaggggtccccagccacaattcttccactggcctcatcgcctcctccaaggacgactccttgactccctttgtcagaactaacagtgtgaagaccacactgtcagaaagccctctctcttcccctgctgctagccctaagttctgcagaagtactctgcccaggaaacaggacagtgacccgcaccttgataggaacactttgcctaagaaaggactcaggtatactcccacctcccagcttcgcacgcaagaagatgcaaaagaatggttacggtcccattctgcaggaggccttcaggacaccgctgccaattcccccttttcctctggctccagcgtgacttctccctccggaacaagattcaacttttcccagcttgcgagtcccaccactgtcacccagatgagcttgtccaacccgaccatgctgaggactcacagcctctccaatgctgatgggcagtatgatccatacactgacagccgcttccggaatagctccatgtccctggatgagaagagcagaaccatgagccgttcaggctcattccgggatgggtttgaagaagaatcatgggagaaaagttctgtggacaactttgtcagccgtcttcacagctcacttcatttctctcttcctttgttccatcacgcaaggtatgagttagttcatggatcctcactctccttggtttccagcacatcgtcagtttattctacaccagaagaaaaatgccagtcagagattcgcaagctgcggcgggaactggatgcctcccaggagaaagtttcagctttgaccacccagctgacagcaaatgctcaccttgtggcagcctttgaacagagtcttggtaacatgacaatcaggctccagagtctgaccatgacagctgagcagaaggactcagaactgaatgagttaagaaaaaccattgagctgctaaagaaacagaacgcagctgcccaggctgccattaatggagtaattaacacacctgagctcaactgcaaaggaaacggcactgcccagtctgcagacctccgcatccgcaggcagcactcctcagacagcgtctccagcatcaacagtgccaccagccactccagcgtgggcagcaacatagagagtgactcaaagaagaagaagcggaagaactgggtcaatgagttacgcagctccttcaagcaagctttcgggaagaagaagtccccaaaatctgcgtcctctcattcagatattgaggagatgacggattcttctttgccttcctcaccaaagttaccgcacaatgggtccacaggttccaccccactgctgaggaattctcactccaactctctaatttcagaatgcatggatagtgaagctgagaccgtcatgcagctccgaaatgagttaagagacaaggagatgaagctgacggatatccgcttagaagctctcagttctgcccaccagctggaccagctccgggaggccatgaacaggatgcagagtgaaatagagaagctgaaagctgagaatgatcggctgaagtcagagtctcaaggcagtggctgcagccgggctccttcccaagtgtccatctctgcctccccgaggcagtccatgggcctctcccagcacagcttgaacctcactgagtcaaccagcctggacatgttgctggatgacactggtgaatgctcggctcggaaggaaggaggcaggcatgttaagatagttgtcagctttcaggaggaaatgaagtggaaggaggattccagaccacatctctttcttattggctgcattggagttagtggcaagacgaagtgggatgtgctcgatggggtggttagacggctgttcaaagaatacatcattcatgtcgacccagtgagtcagctagggctgaattcagacagcgttcttggctacagcattggagaaatcaagcgcagcaacacttccgaaacaccggagctgcttccttgtggctatctggttggagagaacacgaccatctcagtgactgtgaaagggctcgcagaaaacagcctggactcactggtgtttgagtccttgattcccaagcccatcctgcagcgctacgtctccctcctgatagagcaccgtcggatcattctctctggccccagcggcactgggaaaacctacctggccaaccggctgtctgagtatatagtgcttcgagagggacgggagttgacagacggggttatcgccacctttaacgtggaccataagtccagcaaggaattgcgccagtacctgtccaaccttgctgaccagtgcaacagtgagaacaatgctgtggacatgcccctcgtcatcatcctggacaacctacaccacgtgagctctctgggagagatcttcaatgggctgctcaactgcaagtaccacaaatgcccttacataattggcacaatgaaccaggctacctcttcgactcccaacctgcagcttcaccataacttcagatgggtgctttgtgccaaccacacggagcctgtgaagggtttccttggccgattcctgaggaggaagctcatggaaacagagatcagtgggcgggtgcgcaatatggagctggtaaaaatcattgactggattcccaaggtctggcatcacctcaaccgcttcctggaggctcacagttcctcggacgtcaccatcggcccccggctcttcctgtcatgccccatcgatgtggacggctcgagagtgtggttcaccgacttgtggaactattccattatcccctatctcctggaagccgtcagagaaggactccagctctatggaaggcgcgccccctgggaggatcctgccaagtgggtgatggacacatatccatgggcagccagcccacaacagcacgagtggcctcccctgctgcagttacggcctgaggatgtcggcttcgacggctactccatgcctcgggagggatcgacaagcaagcagatgccccccagtgatgctgaaggtgacccgctgatgaacatgctgatgaggctgcaggaggcagccaactactccagcccccagagctatgacagcgactccaacagcaacagccatcacgatgacatcttggactcctctttggagtccactctgtgacaggggcccggagcccagcgccctcctcttctcctcaccgcattccacctgcatcccccacatcaccctgaagatgacttcctgagccagcccccagccacagccttagagctgcgggaacaccgagaccccccgtccttcagcctcgacctgggtgcaggcatcccgggccagctgcctgcggaccgcttccttccacagcgagaactgcactaccttctgttgtactttaattattgttttgccttgttgctgtgacctccctaagacactgaagatacttctcgggaaaggatcatcgccgttgaaatgaaaagagagacagagagaaaaaaaaaaagagaacccacatgaagctctgaaaccaaacagcatcctgccatgagcttcccagagacagaagagactggagcaaagtcggaaacacagagaagcacggcttcccctcagcacagaccctccagactgggtctcagagccgtgccacccaccctcccacacagccggccacagggagaactggtgctaaccagggtgcttgctttggtcacgttcaacgcactacagagctacgacacagggaaaccttaggagcaaataaaccgtgctttcatgttttttaaatggtgctttccttacccgagaggtattttgcctgttccaatcaaaccaccccattcaggtccatcagcctctgattaatatccgtgagagtgagtgacggagtgagagtgtgagcgagtggatgtggctgtcagtgcagaacagcatgtgtctctttccttctgatatatgaatgaatcaggtttttttttttttttttctgcaaacactgtgtatagtgagacttgttctactttggagaacaggttaccttttgaaaatgaggttgagtttcttcctttctgatgcattgatttttgaagatttttttttcccccttcccctcttggtcagaatcaatcctttggtgaaagtaagaaccgcaggagttgagttttggtttggtcctgctcagttttggtttttagttgtccatcctcacagtcctacacactcgcctcctcctgctagggctgggggtatctgtgtcctttaaaatggatgaggacctggtcctcgacatgtgggtgagccatggaccttgccttcccttctcgtccttgagggtttagaacacacaccaacacctccagcgtccccgccccagcttccggtggggtgatgcggtcaccctgcaaaagacttgcactttcctcagaaccaacatgacgcagctcaataagggtgagggtcactccctcccagaagccccgtctggacgagccttgcctgacctcttcggtgctgaccttcccaaagtgatgccttactggttttgtactaactgtgttcattttacataagtgtcgtgcctgcctggggtttgttttttttgtcattgttttccccattgaaacaaacagggctaaaaagtcatctgttcattaggagaactcaagttgctgtgacttttctcatccaaaagactcatttgtgtggatgcgtgaccatgggaaaaagaaaaaaaaaaagatccattttttaggttcttttcggtctccagctgacaacccaactggacaatgatctgtctggtgcaggagaaggcaaaagtttctacaagtctacatgaccttgctgatacttgttctaatagaaacccagtctgctgtgtcttcaacatactggtattttcattacaaagtatggtaaatttttgagttgtttgtttctgttttgtaaagagaatccttattggacaccagtgaaggtgtctctgttttaatgatcagggtttttattccatcttttgcatttcttctatttctgaaggtttgtctcttggcatctttttttagtttcttaccataagagtttgacccgaaactgctcacttcacattggatgacaccatgttcttcctctttgaaaagaaaaggggaatgtgtcccactagtgaaaggaaaacttttcaacactatccctgctttagtctcagcaaactcagactattctgcttagccttcattagtcatctgggtgtgagtgtgtcttgttctgtttttctttttaataaaacttttaaaccatatatttagcctgtgaccaggggggccaaaccctaagatttctggtaaacctgaagggtggccctcctcagacaatttatctcccagcaatgaccctactacactcgcgtactgtgaatttgggaggaggtaaagttgacttctcctcgtgggcagttttccaatcaccttgtgagtagacacctgccaatattgtttgaaacctttttttaatatgacatcctctcttgtcattctcttctcccctttcccacagacttccctcctgggtccaggttcagaaccaagacttctgtacctagtgctgcctgattggtgaacattgacttcaagtagcatagcccttgtgtgactcacaactccgtgtccttcctaaagtttcgggaagcagggttgtctaatatgcacatttcttattttggtcatatttttactttagtgtcactcaccttttacaaagtgactttgtactcatttagggctctatcggaaatgcttccattttgccttttctacagttaggccaattttgaaatatataaattctatgcaacatttatgttgagttaccaatggaagccaaaagttctcttcccaaactgccaagaatgatacaggccataattgaaatgggaataccttttaagtttcattaggggtggggtgggagtgggacaggaacaagacttgcctagatctttgttgtatcttggggacttttactttgttgtttgatgcttaaacttcaaaattctctgtattcaaatttgattgtggcgaatctacttcaaaaaggaaaaataatccaactttgtggatattaaatggaaggtttgctgttttgatctagttgtttccagtggagcagttttatgaaatatgttctataagatgtacattttttcattgtaacatagaaattgtaaataattgattaaagtgctgcattttgatgaattttttctagccatttttaaagagaaaactaggaattgagtattttgtgtacggtatgtttccatcctccctccccttcctcctcccctcctctctctctcttcctacctatttaattttcatttgtcatgaggtttttggatttgccaatgatctgctggacatcatgccccatgtcatagagaataaagctgatgattgtaccagtcttaaattattcatgattcaataaaattgatgcttatttattc

SEQ ID NO: 20037 - DNA, 10667 bp, Homo sapiens
  source 1..10667: mol_type = unassigned DNA
tctcatgatgccggcagcagtcaccctcattgcaaaggcagtggtgccgagtgaggttcccgagtggattttaagaagacaggaagacctttgaagaggtggtgctgatttccttggctggcgggaactctgtctggctgttgcatgcatcacttttgtgtgggttattttgttcctctgtggatttggaagcatcgctgaaggagagagaggattttatttctgggaaatggaatcggtttctgagtccagccaacagcagaagagaaagccagttatccacggactggaagatcaaaagaggatctacacagactgggccaatcattacctagccaaatccggccacaagcgtctcatcagggatctccagcaagatgtgacagatggcgtcctcctggcccagattatccaggttgtggcaaatgaaaagattgaagacatcaatggctgtccgaagaacagatcccaaatgattgaaaacatagatgcctgcttgaatttcctggcagctaagggaataaacatccaggggctgtctgcagaagagatcaggaatggaaacctcaaggccattctaggcctcttcttcagcctctcccgatacaagcagcagcagcagcagccccagaagcagcacctctcctcacctctgccgcccgccgtatcccaggtggccggggccccctcccagtgccaggctggcacccctcagcagcaggtgccagtcactccccaagccccgtgccagcctcaccagccagcgccacatcagcagtcaaaagcacaagctgaaatgcagtccagacttccaggtcctaccgcgagggtatccgctgcaggcagcgaggccaaaacacgcggagggtcaactactgctaacaaccgacgcagccagagctttaacaactatgataaatccaaaccagtcacctccccacccccaccgccaagcagccacgagaaagagcctttggcaagttcagcctcctcccaccccggaatgagtgacaatgcacctgcttccttggagagcggcagcagctccacccctactaattgcagtacctcctcggccatcccgcagcccggtgcagccaccaagccttggcgcagcaaatccctcagcgtgaagcacagtgccacggtatccatgctctcggtcaagcctcctgggcctgaggcccccaggcccacacctgaagccatgaagccggcccccaacaatcagaagtccatgctggaaaagctgaaacttttcaacagtaaagggggctcaaaggcaggtgaggggccggggtcccgggacacaagctgtgagcggctggagactctgcccagcttcgaagagagcgaggagctggaggccgccagtcgcatgctcaccaccgtgggccctgcttccagcagccccaagattgcactcaagggcattgcccagaggacttttagccgggcactgaccaacaagaagagttctctgaaaggcaatgagaaagagaaggagaaacaacagcgggagaaggataaggagaaaagcaaggaccttgccaagagagcctctgtgacggagaggctggacctcaaggaggagccaaaagaagaccccagtggagcagctgtgcccgagatgccaaaaaagtcctccaagattgccagcttcatccccaaaggggggaagctcaacagtgccaagaaggagcccatggccccttcccacagtggaataccaaaaccaggaatgaaaagcatgcccgggaaatccccaagtgccccagcgccttccaaggaaggggagcggagccggagtgggaagctgagctcaggactcccccagcagaagccccagctggacggcagacactccagttcctcttccagcctggcgtcctcagaaggaaaaggcccaggagggaccaccctgaaccacagcatcagcagccagactgtcagtgggtctgtcgggaccacccagaccacaggaagcaataccgtcagtgttcagctacctcagccccagcagcaatacaaccatcccaacactgccacggttgcacctttcctgtacaggtctcagacggacactgaagggaatgttactgccgagtcaagctcaacaggtgtgagcgtggagcccagccacttcaccaagactggacagcctgctctggaagaactcactggggaagatcctgaggctcggcggctgcggacagtgaagaacatcgctgatctgcggcagaatttggaggaaaccatgtccagtttaaggggaactcaggttacacacagcacattggaaaccacgtttgacaccaatgtcaccacggagatgagtggccgtagcatactcagcttgacagggaggcccacacctctgtcctggagactgggccagtccagccctcggctccaagcaggagacgccccctcaatgggcaatgggtatccccctcgagccaacgccagcaggttcatcaacactgagtcaggtcgctatgtgtactccgcccctctgagaaggcagctggcctcccggggcagtagtgtctgccatgtggacgtctcagacaaggcaggagatgagatggacctggaaggcatcagcatggatgcccccggctacatgagcgacggggatgttctgagcaagaacatccggaccgatgacattacaagcggatacatgactgatggtggacttggcctctatacccgtcgcctgaaccggctccctgatgggatggctgtggtacgggagaccctgcaacgaaatacctccctgggcctcggagacgctgacagctgggacgacagcagctccgtcagcagcggcatcagcgacaccatagacaacctcagcactgatgacatcaacaccagctcctccatcagctcttatgccaacacacctgcctcctctcgaaaaaacctggatgtgcagactgatgctgagaagcactcacaggtggagaggaattccctgtggtctggtgatgatgtcaagaaatcagacggaggctcagacagcggcataaaaatggagccaggttccaagtggaggcggaatccttctgatgtgtctgacgagtccgacaaaagcacgtcgggcaagaagaatcctgtcatctcccagacaggctcatggcggcgaggcatgacagctcaggtgggcatcaccatgccaaggacgaagccttcagccccggcaggcgcactgaagaccccaggaactggaaaaacagacgacgcaaaggtgtctgagaaaggaaggctttctcctaaagcctcccaggtgaagcgctccccatcagatgcaggccggagcagtggtgacgaatccaaaaagcccctccccagcagctctaggacacctactgccaatgccaacagctttgggttcaagaagcagagtggttccgccgccggcctggccatgatcacagccagcggggtgactgtcaccagcaggtcagccacactgggcaaaatcccaaagtcatctgcactcgtcagtcggtctgctggtcggaagtcaagtatggatggggctcagaatcaggatgacgggtatctagccctaagctcccggacaaaccttcagtaccggagtttgccgaggcccagtaagtccaacagccggaacggggctgggaacaggtctagcaccagcagcatagattccaacattagcagcaagtccgcaggcctgccagtgcccaaactgagggagccttccaaaacagccctaggcagctctctaccaggtctggtcaaccaaacagacaaggagaaaggcatctcatcagacaacgagagtgtggcttcctgtaactcggtgaaagtgaatccggcagcccagcctgtgtccagtccggctcagaccagtctccagcctggagccaagtacccagatgtggcctctcccacactccgcagactctttggtgggaagcctaccaagcaagtgcccatcgccacagctgaaaacatgaaaaattcggtggtcatctccaatcctcatgccaccatgactcagcaaggtaacctagactccccgtcaggcagtggcgtcctgagcagtgggagcagcagtcctctctacagcaagaatgtggacctcaaccagtctccgctagcctccagccccagctcagcccactcggccccttccaacagcctcacctggggcaccaacgccagcagctcctccgcagttagcaaggatggcctgggctttcagtctgtcagcagcctccacaccagctgtgagtccatcgacatctccctcagcagtggaggggtccccagccacaattcttccactggcctcatcgcctcctccaaggacgactccttgactccctttgtcagaactaacagtgtgaagaccacactgtcagaaagccctctctcttcccctgctgctagccctaagttctgcagaagtactctgcccaggaaacaggacagtgacccgcaccttgataggaacactttgcctaagaaaggactcaggtatactcccacctcccagcttcgcacgcaagaagatgcaaaagaatggttacggtcccattctgcaggaggccttcaggacaccgctgccaattcccccttttcctctggctccagcgtgacttctccctccggaacaagattcaacttttcccagcttgcgagtcccaccactgtcacccagatgagcttgtccaacccgaccatgctgaggactcacagcctctccaatgctgatgggcagtatgatccatacactgacagccgcttccggaatagctccatgtccctggatgagaagagcagaaccatgagccgttcaggctcattccgggatgggtttgaagaagttcatggatcctcactctccttggtttccagcacatcgtcagtttattctacaccagaagaaaaatgccagtcagagattcgcaagctgcggcgggaactggatgcctcccaggagaaagtttcagctttgaccacccagctgacagcaaatgctcaccttgtggcagcctttgaacagagtcttggtaacatgacaatcaggctccagagtctgaccatgacagctgagcagaaggactcagaactgaatgagttaagaaaaaccattgagctgctaaagaaacagaacgcagctgcccaggctgccattaatggagtaattaacacacctgagctcaactgcaaaggaaacggcactgcccagtctgcagacctccgcatccgcaggcagcactcctcagacagcgtctccagcatcaacagtgccaccagccactccagcgtgggcagcaacatagagagtgactcaaagaagaagaagcggaagaactggttacgcagctccttcaagcaagctttcgggaagaagaagtccccaaaatctgcgtcctctcattcagatattgaggagatgacggattcttctttgccttcctcaccaaagttaccgcacaatgggtccacaggttccaccccactgctgaggaattctcactccaactctctaatttcagaatgcatggatagtgaagctgagaccgtcatgcagctccgaaatgagttaagagacaaggagatgaagctgacggatatccgcttagaagctctcagttctgcccaccagctggaccagctccgggaggccatgaacaggatgcagagtgaaatagagaagctgaaagctgagaatgatcggctgaagtcagagtctcaaggcagtggctgcagccgggctccttcccaagtgtccatctctgcctccccgaggcagtccatgggcctctcccagcacagcttgaacctcactgagtcaaccagcctggacatgttgctggatgacactggtgaatgctcggctcggaaggaaggaggcaggcatgttaagatagttgtcagctttcaggaggaaatgaagtggaaggaggattccagaccacatctctttcttattggctgcattggagttagtggcaagacgaagtgggatgtgctcgatggggtggttagacggctgttcaaagaatacatcattcatgtcgacccagtgagtcagctagggctgaattcagacagcgttcttggctacagcattggagaaatcaagcgcagcaacacttccgaaacaccggagctgcttccttgtggctatctggttggagagaacacgaccatctcagtgactgtgaaagggctcgcagaaaacagcctggactcactggtgtttgagtccttgattcccaagcccatcctgcagcgctacgtctccctcctgatagagcaccgtcggatcattctctctggccccagcggcactgggaaaacctacctggccaaccggctgtctgagtatatagtgcttcgagagggacgggagttgacagacggggttatcgccacctttaacgtggaccataagtccagcaaggaattgcgccagtacctgtccaaccttgctgaccagtgcaacagtgagaacaatgctgtggacatgcccctcgtcatcatcctggacaacctacaccacgtgagctctctgggagagatcttcaatgggctgctcaactgcaagtaccacaaatgcccttacataattggcacaatgaaccaggctacctcttcgactcccaacctgcagcttcaccataacttcagatgggtgctttgtgccaaccacacggagcctgtgaagggtttccttggccgattcctgaggaggaagctcatggaaacagagatcagtgggcgggtgcgcaatatggagctggtaaaaatcattgactggattcccaaggtctggcatcacctcaaccgcttcctggaggctcacagttcctcggacgtcaccatcggcccccggctcttcctgtcatgccccatcgatgtggacggctcgagagtgtggttcaccgacttgtggaactattccattatcccctatctcctggaagccgtcagagaaggactccagctctatggaaggcgcgccccctgggaggatcctgccaagtgggtgatggacacatatccatgggcagccagcccacaacagcacgagtggcctcccctgctgcagttacggcctgaggatgtcggcttcgacggctactccatgcctcgggagggatcgacaagcaagcagatgccccccagtgatgctgaaggtgacccgctgatgaacatgctgatgaggctgcaggaggcagccaactactccagcccccagagctatgacagcgactccaacagcaacagccatcacgatgacatcttggactcctctttggagtccactctgtgacaggggcccggagcccagcgccctcctcttctcctcaccgcattccacctgcatcccccacatcaccctgaagatgacttcctgagccagcccccagccacagccttagagctgcgggaacaccgagaccccccgtccttcagcctcgacctgggtgcaggcatcccgggccagctgcctgcggaccgcttccttccacagcgagaactgcactaccttctgttgtactttaattattgttttgccttgttgctgtgacctccctaagacactgaagatacttctcgggaaaggatcatcgccgttgaaatgaaaagagagacagagagaaaaaaaaaaagagaacccacatgaagctctgaaaccaaacagcatcctgccatgagcttcccagagacagaagagactggagcaaagtcggaaacacagagaagcacggcttcccctcagcacagaccctccagactgggtctcagagccgtgccacccaccctcccacacagccggccacagggagaactggtgctaaccagggtgcttgctttggtcacgttcaacgcactacagagctacgacacagggaaaccttaggagcaaataaaccgtgctttcatgttttttaaatggtgctttccttacccgagaggtattttgcctgttccaatcaaaccaccccattcaggtccatcagcctctgattaatatccgtgagagtgagtgacggagtgagagtgtgagcgagtggatgtggctgtcagtgcagaacagcatgtgtctctttccttctgatatatgaatgaatcaggtttttttttttttttttctgcaaacactgtgtatagtgagacttgttctactttggagaacaggttaccttttgaaaatgaggttgagtttcttcctttctgatgcattgatttttgaagatttttttttcccccttcccctcttggtcagaatcaatcctttggtgaaagtaagaaccgcaggagttgagttttggtttggtcctgctcagttttggtttttagttgtccatcctcacagtcctacacactcgcctcctcctgctagggctgggggtatctgtgtcctttaaaatggatgaggacctggtcctcgacatgtgggtgagccatggaccttgccttcccttctcgtccttgagggtttagaacacacaccaacacctccagcgtccccgccccagcttccggtggggtgatgcggtcaccctgcaaaagacttgcactttcctcagaaccaacatgacgcagctcaataagggtgagggtcactccctcccagaagccccgtctggacgagccttgcctgacctcttcggtgctgaccttcccaaagtgatgccttactggttttgtactaactgtgttcattttacataagtgtcgtgcctgcctggggtttgttttttttgtcattgttttccccattgaaacaaacagggctaaaaagtcatctgttcattaggagaactcaagttgctgtgacttttctcatccaaaagactcatttgtgtggatgcgtgaccatgggaaaaagaaaaaaaaaaagatccattttttaggttcttttcggtctccagctgacaacccaactggacaatgatctgtctggtgcaggagaaggcaaaagtttctacaagtctacatgaccttgctgatacttgttctaatagaaacccagtctgctgtgtcttcaacatactggtattttcattacaaagtatggtaaatttttgagttgtttgtttctgttttgtaaagagaatccttattggacaccagtgaaggtgtctctgttttaatgatcagggtttttattccatcttttgcatttcttctatttctgaaggtttgtctcttggcatctttttttagtttcttaccataagagtttgacccgaaactgctcacttcacattggatgacaccatgttcttcctctttgaaaagaaaaggggaatgtgtcccactagtgaaaggaaaacttttcaacactatccctgctttagtctcagcaaactcagactattctgcttagccttcattagtcatctgggtgtgagtgtgtcttgttctgtttttctttttaataaaacttttaaaccatatatttagcctgtgaccaggggggccaaaccctaagatttctggtaaacctgaagggtggccctcctcagacaatttatctcccagcaatgaccctactacactcgcgtactgtgaatttgggaggaggtaaagttgacttctcctcgtgggcagttttccaatcaccttgtgagtagacacctgccaatattgtttgaaacctttttttaatatgacatcctctcttgtcattctcttctcccctttcccacagacttccctcctgggtccaggttcagaaccaagacttctgtacctagtgctgcctgattggtgaacattgacttcaagtagcatagcccttgtgtgactcacaactccgtgtccttcctaaagtttcgggaagcagggttgtctaatatgcacatttcttattttggtcatatttttactttagtgtcactcaccttttacaaagtgactttgtactcatttagggctctatcggaaatgcttccattttgccttttctacagttaggccaattttgaaatatataaattctatgcaacatttatgttgagttaccaatggaagccaaaagttctcttcccaaactgccaagaatgatacaggccataattgaaatgggaataccttttaagtttcattaggggtggggtgggagtgggacaggaacaagacttgcctagatctttgttgtatcttggggacttttactttgttgtttgatgcttaaacttcaaaattctctgtattcaaatttgattgtggcgaatctacttcaaaaaggaaaaataatccaactttgtggatattaaatggaaggtttgctgttttgatctagttgtttccagtggagcagttttatgaaatatgttctataagatgtacattttttcattgtaacatagaaattgtaaataattgattaaagtgctgcattttgatgaattttttctagccatttttaaagagaaaactaggaattgagtattttgtgtacggtatgtttccatcctccctccccttcctcctcccctcctctctctctcttcctacctatttaattttcatttgtcatgaggtttttggatttgccaatgatctgctggacatcatgccccatgtcatagagaataaagctgatgattgtaccagtcttaaattattcatgattcaataaaattgatgcttatttattc

SEQ ID NO: 20038 - DNA, 9758 bp, Homo sapiens
  source 1..9758: mol_type = unassigned DNA
agatgcagggaagttttgcctcttcctgaaaattatattattagctttttaaaaatcaggatgactgctagttttgtttaaagtatttgttctggaaatactaaagttggagtctaccagactgaggttagaagcattttctttggcagcaagaagataattttatagaagccatgcctgttcttggggttgcctcaaaactgaggcagccagctgttgggtcaaagcctgtgcatactgctcttccgataccaaatcttggcactactgggtcacagcactgttcttcaagacctttggaacttactgaaacagagagctccatgctttcttgtcagcttgcgttaaaatcaacctgtgaatttggagagaagaaacccctccaaggaaaagccaaggagaaagaagacagcaagatttacactgactgggccaaccactacctagcaaaatcaggccacaagcggctgatcaaggacttgcaacaagacattgcagatggagtactcctagcagaaatcatccagattattgcaaatgaaaaagttgaagatatcaatggatgtcctagaagtcagtctcagatgattgaaaatgttgatgtctgccttagttttctagcagccagaggggtaaatgttcaaggtctatctgctgaagaaataagaaatggaaacttaaaagccattctagggctgtttttcagtttatctcgctacaagcagcaacaacaccatcaacaacagtactatcagtccttggtggaacttcagcagcgagttactcacgcttcccctccatcggaagccagccaggccaaaacccagcaagatatgcagtccagtctggcagccagatatgcaactcagtctaatcacagtggaattgcaaccagtcaaaaaaagcctactaggcttccagggccctctagggtgcctgctgcaggaagcagcagcaaggtccagggagcctctaatttaaataggagaagtcagagctttaacagcattgacaaaaacaagcctccaaattatgcaaatggaaacgaaaaagattcctccaaaggacctcaatcgtcttcaggtgtaaatggtaacgtgcagcctcccagtactgctgggcagcctcctgcctctgccatcccttctccaagtgccagcaagccctggcgcagcaagtccatgaatgtcaaacacagtgccacctccaccatgttgactgtaaagcagtcaagtacagccacctcccccacaccatcttcagacagactgaagccacctgtctcagaaggggtcaaaactgctccctcaggacagaaatccatgcttgagaaattcaagctagtcaatgcccggactgctttacgccccccgcagcctcccagttcaggacctagtgatggtgggaaggatgatgatgccttttctgaatctggtgaaatggaaggttttaacagtggtctgaatagtggtggctcaacaaatagcagtcccaaagtgtcacctaagttggcccctccaaaagctggaagcaaaaatctcagcaataaaaagtctttgctacagccaaaggaaaaagaagaaaagaacagggacaaaaataaagtttgcactgaaaaaccagtcaaagaagagaaggatcaggtgacagagatggctccaaaaaagacctccaaaattgcaagcttgatccctaagggcagcaagacaacagcagctaagaaggaaagcttaattccgtcttccagtggtattccaaaaccaggctctaaagttccaacagtaaagcaaaccatttcacctggcagcacagcaagcaaagagtctgagaaattcaggactaccaaggggagcccttcccagtccttatctaagcctataaccatggagaaagcaagtgcttctagttgtcctgcccctttggaaggaagggaagctggccaagcttctccttctggttcctgtaccatgacagtggcacaaagcagtgggcagagcacaggaaatggtgctgtccaactccctcaacagcagcaacatagccacccgaataccgcgacagtggcaccattcatttacagggcacattcagaaaatgaaggtaccgctttaccatcggctgactcctgtaccagtcctacaaagatggacttatcatatagtaagactgctaagcagtgcctggaggagatatctggtgaagaccctgaaacaagaagaatgagaacagttaaaaacatagcagacttgaggcagaatttagaagagactatgtccagtcttcgtgggactcagataagccacagcaccctggagacaacatttgacagcactgtgacaacagaagttaatggaaggaccatacccaacttgacaagtcgacccacccccatgacctggaggttgggccaggcatgtccgcgacttcaggcgggagatgctccctccctgggtgctggctatcctcgcagtggtaccagtcgattcatccacacagacccctcgaggttcatgtataccacgcctctccgtcgagctgctgtctctaggctgggaaacatgtcacagattgacatgagtgagaaagcaagcagtgacctggacatgtcttctgaggtcgatgtgggtggatatatgagtgatggtgatatccttgggaaaagtctcaggactgatgacatcaacagtgggtacatgacagatggaggacttaacctatatactagaagtctgaaccgaataccagacacagcaacttcccgggacatcatccagagaggggttcacgatgtgacagtggatgcagacagctgggatgacagcagttcagtgagcagtggtctcagtgacacccttgataacatcagcactgatgacctgaacaccacatcctctgtcagctcttactccaacatcaccgtcccctctaggaagaatactcagctgaggacagattcagagaaacgctccaccacagacgagacctgggatagtcctgaggaactgaaaaaaccagaagaagattttgacagccatggggatgctggtggcaagtggaagactgtgtcctctggacttcctgaagaccccgagaaggcagggcagaaagcttccctgtctgtttcacagacaggttcctggagaagaggcatgtctgcccaaggaggggcgccatctaggcagaaagctggaacaagtgcactcaaaacacccgggaaaaccgatgatgccaaagcttctgagaaaggaaaagctcccctaaaaggatcatctctacaaagatctccttcagatgcaggaaaaagcagtggagatgaagggaaaaagcccccctcaggcattggaagatcgactgccaccagctcctttggctttaagaaaccaagtggagtagggtcatctgccatgatcaccagcagtggagcaaccataacaagtggctctgcaacactgggtaaaattccaaaatctgctgccattggcgggaagtcaaatgcagggagaaaaaccagtttggacggttcacagaatcaggatgatgttgtgctgcatgttagctcaaagactaccctacaatatcgcagcttgccccgcccttcaaaatccagcaccagtggcattcctggccgaggaggccacagatccagtaccagcagtattgattccaacgtcagcagcaagtctgctggggccaccacctcgaaactgagagaaccaactaaaattgggtcagggcgctcgagtcctgtcaccgtcaaccaaacagacaaggaaaaggaaaaagtagcagtctcagattcagaaagtgtttctttgtcaggttcccccaaatccagccccacctctgccagcgcctgtggtgcacaaggtctcaggcagccaggatccaagtatccagatattgcctcacccacatttcgaaggttgtttggtgccaaggcaggtggcaaatctgcctctgcacctaatactgagggtgtgaaatcttcctcagtaatgcccagccctagtaccacattagcgcggcaaggcagtctggagtcaccgtcgtccggtacgggcagcatgggcagtgctggtgggctaagcggcagcagcagccctctcttcaataaaccctcagacttaactacagatgttataagcttaagtcactcgttggcctccagcccagcatcggttcactctttcacatcaggtggtctcgtgtgggctgccaatatgagcagttcctctgcaggcagcaaggatactccgagctaccagtccatgactagcctccacacgagctctgagtccattgacctccccctcagccatcatggctccttgtctggactgaccacaggcactcacgaggtccagagcctgctcatgagaacgggtagtgtgagatctactctctcagaaagcatgcagcttgacagaaatacactacccaaaaagggactaagatataccccatcatctcggcaggccaaccaagaagagggcaaagagtggttgcgttctcattctactggagggcttcaggacactggcaaccagtcacctctggtttccccttctgccatgtcatcttctgcagctggaaaataccacttttctaacttggtgagcccaacaaatttgtctcagtttaaccttcccgggcccagcatgatgcgctcaaacagcatcccagcccaagactcttccttcgatctctatgatgactcccagctttgtgggagtgccacttctctggaggaaagacctcgtgccatcagtcattcgggctcattcagagacagcatggaagaagttcatggctcttcattatcactggtgtccagcacttcttctctttactctacagctgaggcgggtggatcacttgagcaaatccataaactgcggagagagctggttgcatcacaagaaaaagttgctaccctcacatctcagctttcagcaaatgctcaccttgtagcagcttttgaaaagagcttagggaatatgactggccgattgcaaagtctaactatgacagcggaacaaaaggaatctgaacttatagaactaagagaaaccattgaaatgctgaaggctcagaattctgctgcccaggcggctattcagggagcactgaatggtccagaccatcctcccaaagatcttcgcatcagaagacagcattcctctgaaagtgtttctagtatcaacagtgccacaagccattccagtattggcagtggtaatgatgccgactccaagaagaagaaaaagaaaaactgggtgaactctagaggaagtgagctgagaagttctttcaaacaagcctttgggaagaaaaagtccaccaagcctccttcatcacattctgacattgaagagcttactgattcatcccttccggcatcccccaagttaccccataatgctggtgactgtggctcagcatccatgaagccctcacaatctgcttcagcgatctgtgaatgcacagaagctgaggcagagataattctgcagctgaagagcgagctcagagaaaaggaattaaaattaacggatattcggctggaggccctcagctctgctcatcatcttgatcagatccgggaagccatgaaccggatgcagaatgaaattgaaatactgaaagctgaaaatgaccggttgaaggcagaaactggtaacacagctaagcctactcggccaccgtcagaatcctcaagcagcacctcctcttcatcttccaggcagtcattaggactttctctaaacaatttgaacatcacagaggctgttagctcagatattttgctagatgatgctggtgatgcaactggacataaagatggccgcagtgtgaaaattatagtctccataagcaagggctatggtcgagcaaaggaccaaaaatctcaggcatatttgataggatccattggtgttagtggaaaaaccaagtgggatgtcttagatggtgtaataagacgtctctttaaggaatatgtattccgaattgatacatccactagccttggtctgagctctgactgcattgctagctactgtataggagacttaattagatcccataacctagaagtgcctgaattgctgccttgtggataccttgttggagataataacatcatcactgtgaacctcaaaggggtagaagaaaatagtttggacagttttgtttttgatacgctgattcctaaaccaattacccaaaggtactttaacttgttgatggagcatcacagaattatactctcaggaccgagtggtactggaaagacctatttggcaaacaaacttgctgaatatgtaataaccaaatctggaaggaaaaaaacagaggatgcaattgccacttttaatgtggaccacaagtcaagtaaggaattgcaacaatatctagctaacctggctgaacagtgcagtgctgataataatggagtggagctcccagttgtaataattcttgataatcttcatcatgtgggctctctgagtgatatcttcaatggttttctcaattgtaaatacaacaaatgtccatatattattggaacaatgaatcagggagtttcttcatcaccaaatctagagctgcatcacaatttcaggtgggtattatgtgcaaatcatacagaaccagtgaaaggctttttaggcagatatcttcgaagaaaactcatagagatagaaattgaaaggaacattcgcaataatgacctagtcaaaattatagattggattccgaagacgtggcatcatctcaacagttttttggaaacacacagttcttctgacgttaccattggtccccgactattccttccttgccccatggatgtagaaggttctagagtatggttcatggatctctggaactattctttagtaccttatattctggaggcagtgagagagggtcttcagatgtatgggaaacgcacaccatgggaagatccttcaaagtgggtgcttgacacatatccatggagctcagcaactctgcctcaggagagcccagccttacttcagctgcgaccagaagatgttgggtatgaaagctgcacatccactaaggaagccacaacctcaaagcacattccgcaaactgacacagaaggagatcccctgatgaatatgctaatgaaactccaagaagcagccaattactcgagcacacaaagctgcgacagcgaaagcaccagccaccatgaagacattttggattcatctcttgaatctaccctctagagggtgaaaaaagttaagggaaaagactttgcttttaaaaaaatgtttcaaaagaaaggtattttcactaaaccactgccagtataaaagcaccctgtcaagggccctgacccagagttgtggtctccaaggaggcagcagaactaagtctgaaccgccaagatgctaaattgcaatggaagcttaactttagtttatttctaagcattttttatatctgtggagtaatagaaagctccattactcaactggaaaggaccctaatgacagggcaactgaacagattgcacatgggatagccaaactggactttctttgtttcctctttaaaagtttacaatgcagaccattttttgtcccttccttttgtttcctctgaggggctgttcgccccaggcagggtccatctttctgatctgtccaacctcctttgtgccacacggtgctggtcacagggcttcagtagtgtttgtgttgtgcgctcaccccattccagaacaaatccaagaggccagtcctccataagcacaaatggaattgtgcaaccaccagaaaaacactactgtggcaaactggagaagtgccaatttaattctaactgccacgttctcatgatgtgctccaccaactttttagtatatgagtcactggttttataaggttgtttttaccacagtggtctttttaaaccacctgcccactcccttaacaagagttttataccaattattagtcaacactgataaaaggcttttttagggctttatttgtttgagccttttcagtgaaagaaggaacatttcctatggtgctgtctcactgccttaaaacagatttctatgacagtttaacagttggtttaaatcctaaaccattggtaatttccactgtcttttcatttacaaccaagcaacaccagttaacatagtagcctcatctctatatatctttctcttttttttttttttgaagaaatggataggagaaagatcagtatttttagccttgtgaatagatcgctttgcctatcctccaaaatattaaaataacccagaaatgctctttgaccgtcacttaaaacctaagacatgtggcgaaattccatccagttctaagtgaaagagtttcagaaggcagaagattttgaattattatccagcagggctggaagcactagatgcagcatgagcacaactattcggctttccttccctattgtttttgtttttttaatgagttttgacgcatgttgttttgattgctattgttgtacatgagaaattcagcattaaagaacactgaagcggtaaggtcactgtggaagaggaagcgtttatactgtaaaagaaggttagatttgcacagtctactgggtaggtattgtaaataataatttttaaaacttgcacaaatcaaaacaaacacaaacaaaattgtattttatcctgttggtgttaagaggtgtttcacttgctgagatttcctgtacattgcaaacaaatacagaatgcaaaccctcaaagctgtattatctggtgtgtttgtcctgtatttacagttgtttttgactatgcaggagctatcagtgctagagtgagcatgcttcaaaactgtacatgaagccaatatatttttggataagtaaaactgtctgaaagtacatctgtcatggcaggctttaaagagagtgcatgaaaactgatcagtcattggagaagttaccaccacacacaaaggacaggttttaagtttatgaaacccaagggctaggccatggtatagacttcttctatgagtgtgtgaaaatgtgttacttttaggacgtgtatttggtgctactctctgtgaccaccaatgggtcagttgctatagaacaacaacaccacgaaacatctgtgcagttttcagagtgtcacaaagtcaataggtccttacacggtgctattgccctaagggaaatccgaactgaatttatgcacatagaattgtcaccctgactttgaagcctcaaacatggatcaaatctgttgtgaaacatcaatatatgtagctggatgagtgactagtttcccttgtataatatgtgatctaagaaaattgctaatctttccctgccattttgagaaacacagtccaaacatgagcataaacagaatttcctgcaatacatcccagtaggtccacctagtttacaacttaaactagtttgtgaaacatttgtctgtatacattttatattttgtacattttgatgtaacatatcatgtaaataggcagaaacagtgaaataaatcatctgaaaagttttgtagtctttgtaaagccccaacaataagtacttggtgtcaatggacttaactggatgatgtattttctattggtttattgttcctctagcttgtaaaccagcttgcatatatttttttgcaaatgtgcaccctgtatctgtctaaattattactttgccattaaagtggaattatttattgacaa

SEQ ID NO: 20039 - DNA, 9227 bp, Homo sapiens
  source 1..9227: mol_type = unassigned DNA
agatgcagggaagttttgcctcttcctgaaaattatattattagctttttaaaaatcaggatgactgctagttttgtttaaagtatttgttctggaaatactaaagttggagtctaccagactgaggttagaagcattttctttggcagcaagaagataattttatagaagccatgcctgttcttggggttgcctcaaaactgaggcagccagctgttgggtcaaagcctgtgcatactgctcttccgataccaaatcttggcactactgggtcacagcactgttcttcaagacctttggaacttactgaaacagagagctccatgctttcttgtcagcttgcgttaaaatcaacctgtgaatttggagagaagaaacccctccaaggaaaagccaaggagaaagaagacagcaagatttacactgactgggccaaccactacctagcaaaatcaggccacaagcggctgatcaaggacttgcaacaagacattgcagatggagtactcctagcagaaatcatccagattattgcaaatgaaaaagttgaagatatcaatggatgtcctagaagtcagtctcagatgattgaaaatgttgatgtctgccttagttttctagcagccagaggggtaaatgttcaaggtctatctgctgaagaaataagaaatggaaacttaaaagccattctagggctgtttttcagtttatctcgctacaagcagcaacaacaccatcaacaacagtactatcagtccttggtggaacttcagcagcgagttactcacgcttcccctccatcggaagccagccaggccaaaacccagcaagatatgcagtccagtctggcagccagatatgcaactcagtctaatcacagtggaattgcaaccagtcaaaaaaagcctactaggcttccagggccctctagggtgcctgctgcaggaagcagcagcaaggtccagggagcctctaatttaaataggagaagtcagagctttaacagcattgacaaaaacaagcctccaaattatgcaaatggaaacgaaaaagattcctccaaaggacctcaatcgtcttcaggtgtaaatggtaacgtgcagcctcccagtactgctgggcagcctcctgcctctgccatcccttctccaagtgccagcaagccctggcgcagcaagtccatgaatgtcaaacacagtgccacctccaccatgttgactgtaaagcagtcaagtacagccacctcccccacaccatcttcagacagactgaagccacctgtctcagaaggggtcaaaactgctccctcaggacagaaatccatgcttgagaaattcaagctagtcaatgcccggactgctttacgccccccgcagcctcccagttcaggacctagtgatggtgggaaggatgatgatgccttttctgaatctggtgaaatggaaggttttaacagtggtctgaatagtggtggctcaacaaatagcagtcccaaagtgtcacctaagttggcccctccaaaagctggaagcaaaaatctcagcaataaaaagtctttgctacagccaaaggaaaaagaagaaaagaacagggacaaaaataaagtttgcactgaaaaaccagtcaaagaagagaaggatcaggtgacagagatggctccaaaaaagacctccaaaattgcaagcttgatccctaagggcagcaagacaacagcagctaagaaggaaagcttaattccgtcttccagtggtattccaaaaccaggctctaaagttccaacagtaaagcaaaccatttcacctggcagcacagcaagcaaagagtctgagaaattcaggactaccaaggggagcccttcccagtccttatctaagcctataaccatggagaaagcaagtgcttctagttgtcctgcccctttggaaggaagggaagctggccaagcttctccttctggttcctgtaccatgacagtggcacaaagcagtgggcagagcacaggaaatggtgctgtccaactccctcaacagcagcaacatagccacccgaataccgcgacagtggcaccattcatttacagggcacattcagaaaatgaaggtaccgctttaccatcggctgactcctgtaccagtcctacaaagatggacttatcatatagtaagactgctaagcagtgcctggaggagatatctggtgaagaccctgaaacaagaagaatgagaacagttaaaaacatagcagacttgaggcagaatttagaagagactatgtccagtcttcgtgggactcagataagccacagcaccctggagacaacatttgacagcactgtgacaacagaagttaatggaaggaccatacccaacttgacaagtcgacccacccccatgacctggaggttgggccaggcatgtccgcgacttcaggcgggagatgctccctccctgggtgctggctatcctcgcagtggtaccagtcgattcatccacacagacccctcgaggttcatgtataccacgcctctccgtcgagctgctgtctctaggctgggaaacatgtcacagattgacatgagtgagaaagcaagcagtgacctggacatgtcttctgaggtcgatgtgggtggatatatgagtgatggtgatatccttgggaaaagtctcaggactgatgacatcaacagtgggtacatgacagatggaggacttaacctatatactagaagtctgaaccgaataccagacacagcaacttcccgggacatcatccagagaggggttcacgatgtgacagtggatgcagacagctgggatgacagcagttcagtgagcagtggtctcagtgacacccttgataacatcagcactgatgacctgaacaccacatcctctgtcagctcttactccaacatcaccgtcccctctaggaagaatactcagctgaggacagattcagagaaacgctccaccacagacgagacctgggatagtcctgaggaactgaaaaaaccagaagaagattttgacagccatggggatgctggtggcaagtggaagactgtgtcctctggacttcctgaagaccccgagaaggcagggcagaaagcttccctgtctgtttcacagacaggttcctggagaagaggcatgtctgcccaaggaggggcgccatctaggcagaaagctggaacaagtgcactcaaaacacccgggaaaaccgatgatgccaaagcttctgagaaaggaaaagctcccctaaaaggatcatctctacaaagatctccttcagatgcaggaaaaagcagtggagatgaagggaaaaagcccccctcaggcattggaagatcgactgccaccagctcctttggctttaagaaaccaagtggagtagggtcatctgccatgatcaccagcagtggagcaaccataacaagtggctctgcaacactgggtaaaattccaaaatctgctgccattggcgggaagtcaaatgcagggagaaaaaccagtttggacggttcacagaatcaggatgatgttgtgctgcatgttagctcaaagactaccctacaatatcgcagcttgccccgcccttcaaaatccagcaccagtggcattcctggccgaggaggccacagatccagtaccagcagtattgattccaacgtcagcagcaagtctgctggggccaccacctcgaaactgagagaaccaactaaaattgggtcagggcgctcgagtcctgtcaccgtcaaccaaacagacaaggaaaaggaaaaagtagcagtctcagattcagaaagtgtttctttgtcaggttcccccaaatccagccccacctctgccagcgcctgtggtgcacaaggtctcaggcagccaggatccaagtatccagatattgcctcacccacatttcgaagatataccccatcatctcggcaggccaaccaagaagagggcaaagagtggttgcgttctcattctactggagggcttcaggacactggcaaccagtcacctctggtttccccttctgccatgtcatcttctgcagctggaaaataccacttttctaacttggtgagcccaacaaatttgtctcagtttaaccttcccgggcccagcatgatgcgctcaaacagcatcccagcccaagactcttccttcgatctctatgatgactcccagctttgtgggagtgccacttctctggaggaaagacctcgtgccatcagtcattcgggctcattcagagacagcatggaagaagttcatggctcttcattatcactggtgtccagcacttcttctctttactctacagctgaggcgggtggatcacttgagcaaatccataaactgcggagagagctggttgcatcacaagaaaaagttgctaccctcacatctcagctttcagcaaatgctcaccttgtagcagcttttgaaaagagcttagggaatatgactggccgattgcaaagtctaactatgacagcggaacaaaaggaatctgaacttatagaactaagagaaaccattgaaatgctgaaggctcagaattctgctgcccaggcggctattcagggagcactgaatggtccagaccatcctcccaaagatcttcgcatcagaagacagcattcctctgaaagtgtttctagtatcaacagtgccacaagccattccagtattggcagtggtaatgatgccgactccaagaagaagaaaaagaaaaactgggtgaactctagaggaagtgagctgagaagttctttcaaacaagcctttgggaagaaaaagtccaccaagcctccttcatcacattctgacattgaagagcttactgattcatcccttccggcatcccccaagttaccccataatgctggtgactgtggctcagcatccatgaagccctcacaatctgcttcagcgatctgtgaatgcacagaagctgaggcagagataattctgcagctgaagagcgagctcagagaaaaggaattaaaattaacggatattcggctggaggccctcagctctgctcatcatcttgatcagatccgggaagccatgaaccggatgcagaatgaaattgaaatactgaaagctgaaaatgaccggttgaaggcagaaactggtaacacagctaagcctactcggccaccgtcagaatcctcaagcagcacctcctcttcatcttccaggcagtcattaggactttctctaaacaatttgaacatcacagaggctgttagctcagatattttgctagatgatgctggtgatgcaactggacataaagatggccgcagtgtgaaaattatagtctccataagcaagggctatggtcgagcaaaggaccaaaaatctcaggcatatttgataggatccattggtgttagtggaaaaaccaagtgggatgtcttagatggtgtaataagacgtctctttaaggaatatgtattccgaattgatacatccactagccttggtctgagctctgactgcattgctagctactgtataggagacttaattagatcccataacctagaagtgcctgaattgctgccttgtggataccttgttggagataataacatcatcactgtgaacctcaaaggggtagaagaaaatagtttggacagttttgtttttgatacgctgattcctaaaccaattacccaaaggtactttaacttgttgatggagcatcacagaattatactctcaggaccgagtggtactggaaagacctatttggcaaacaaacttgctgaatatgtaataaccaaatctggaaggaaaaaaacagaggatgcaattgccacttttaatgtggaccacaagtcaagtaaggaattgcaacaatatctagctaacctggctgaacagtgcagtgctgataataatggagtggagctcccagttgtaataattcttgataatcttcatcatgtgggctctctgagtgatatcttcaatggttttctcaattgtaaatacaacaaatgtccatatattattggaacaatgaatcagggagtttcttcatcaccaaatctagagctgcatcacaatttcaggtgggtattatgtgcaaatcatacagaaccagtgaaaggctttttaggcagatatcttcgaagaaaactcatagagatagaaattgaaaggaacattcgcaataatgacctagtcaaaattatagattggattccgaagacgtggcatcatctcaacagttttttggaaacacacagttcttctgacgttaccattggtccccgactattccttccttgccccatggatgtagaaggttctagagtatggttcatggatctctggaactattctttagtaccttatattctggaggcagtgagagagggtcttcagatgtatgggaaacgcacaccatgggaagatccttcaaagtgggtgcttgacacatatccatggagctcagcaactctgcctcaggagagcccagccttacttcagctgcgaccagaagatgttgggtatgaaagctgcacatccactaaggaagccacaacctcaaagcacattccgcaaactgacacagaaggagatcccctgatgaatatgctaatgaaactccaagaagcagccaattactcgagcacacaaagctgcgacagcgaaagcaccagccaccatgaagacattttggattcatctcttgaatctaccctctagagggtgaaaaaagttaagggaaaagactttgcttttaaaaaaatgtttcaaaagaaaggtattttcactaaaccactgccagtataaaagcaccctgtcaagggccctgacccagagttgtggtctccaaggaggcagcagaactaagtctgaaccgccaagatgctaaattgcaatggaagcttaactttagtttatttctaagcattttttatatctgtggagtaatagaaagctccattactcaactggaaaggaccctaatgacagggcaactgaacagattgcacatgggatagccaaactggactttctttgtttcctctttaaaagtttacaatgcagaccattttttgtcccttccttttgtttcctctgaggggctgttcgccccaggcagggtccatctttctgatctgtccaacctcctttgtgccacacggtgctggtcacagggcttcagtagtgtttgtgttgtgcgctcaccccattccagaacaaatccaagaggccagtcctccataagcacaaatggaattgtgcaaccaccagaaaaacactactgtggcaaactggagaagtgccaatttaattctaactgccacgttctcatgatgtgctccaccaactttttagtatatgagtcactggttttataaggttgtttttaccacagtggtctttttaaaccacctgcccactcccttaacaagagttttataccaattattagtcaacactgataaaaggcttttttagggctttatttgtttgagccttttcagtgaaagaaggaacatttcctatggtgctgtctcactgccttaaaacagatttctatgacagtttaacagttggtttaaatcctaaaccattggtaatttccactgtcttttcatttacaaccaagcaacaccagttaacatagtagcctcatctctatatatctttctcttttttttttttttgaagaaatggataggagaaagatcagtatttttagccttgtgaatagatcgctttgcctatcctccaaaatattaaaataacccagaaatgctctttgaccgtcacttaaaacctaagacatgtggcgaaattccatccagttctaagtgaaagagtttcagaaggcagaagattttgaattattatccagcagggctggaagcactagatgcagcatgagcacaactattcggctttccttccctattgtttttgtttttttaatgagttttgacgcatgttgttttgattgctattgttgtacatgagaaattcagcattaaagaacactgaagcggtaaggtcactgtggaagaggaagcgtttatactgtaaaagaaggttagatttgcacagtctactgggtaggtattgtaaataataatttttaaaacttgcacaaatcaaaacaaacacaaacaaaattgtattttatcctgttggtgttaagaggtgtttcacttgctgagatttcctgtacattgcaaacaaatacagaatgcaaaccctcaaagctgtattatctggtgtgtttgtcctgtatttacagttgtttttgactatgcaggagctatcagtgctagagtgagcatgcttcaaaactgtacatgaagccaatatatttttggataagtaaaactgtctgaaagtacatctgtcatggcaggctttaaagagagtgcatgaaaactgatcagtcattggagaagttaccaccacacacaaaggacaggttttaagtttatgaaacccaagggctaggccatggtatagacttcttctatgagtgtgtgaaaatgtgttacttttaggacgtgtatttggtgctactctctgtgaccaccaatgggtcagttgctatagaacaacaacaccacgaaacatctgtgcagttttcagagtgtcacaaagtcaataggtccttacacggtgctattgccctaagggaaatccgaactgaatttatgcacatagaattgtcaccctgactttgaagcctcaaacatggatcaaatctgttgtgaaacatcaatatatgtagctggatgagtgactagtttcccttgtataatatgtgatctaagaaaattgctaatctttccctgccattttgagaaacacagtccaaacatgagcataaacagaatttcctgcaatacatcccagtaggtccacctagtttacaacttaaactagtttgtgaaacatttgtctgtatacattttatattttgtacattttgatgtaacatatcatgtaaataggcagaaacagtgaaataaatcatctgaaaagttttgtagtctttgtaaagccccaacaataagtacttggtgtcaatggacttaactggatgatgtattttctattggtttattgttcctctagcttgtaaaccagcttgcatatatttttttgcaaatgtgcaccctgtatctgtctaaattattactttgccattaaagtggaattatttattgacaa

SEQ ID NO: 20040 - DNA, 9695 bp, Homo sapiens
  source 1..9695: mol_type = unassigned DNA
agatgcagggaagttttgcctcttcctgaaaattatattattagctttttaaaaatcaggatgactgctagttttgtttaaagtatttgttctggaaatactaaagttggagtctaccagactgaggttagaagcattttctttggcagcaagaagataattttatagaagccatgcctgttcttggggttgcctcaaaactgaggcagccagctgttgggtcaaagcctgtgcatactgctcttccgataccaaatcttggcactactgggtcacagcactgttcttcaagacctttggaacttactgaaacagagagctccatgctttcttgtcagcttgcgttaaaatcaacctgtgaatttggagagaagaaacccctccaaggaaaagccaaggagaaagaagacagcaagatttacactgactgggccaaccactacctagcaaaatcaggccacaagcggctgatcaaggacttgcaacaagacattgcagatggagtactcctagcagaaatcatccagattattgcaaatgaaaaagttgaagatatcaatggatgtcctagaagtcagtctcagatgattgaaaatgttgatgtctgccttagttttctagcagccagaggggtaaatgttcaaggtctatctgctgaagaaataagaaatggaaacttaaaagccattctagggctgtttttcagtttatctcgctacaagcagcaacaacaccatcaacaacagtactatcagtccttggtggaacttcagcagcgagttactcacgcttcccctccatcggaagccagccaggccaaaacccagcaagatatgcagtccagtctggcagccagatatgcaactcagtctaatcacagtggaattgcaaccagtcaaaaaaagcctactaggcttccagggccctctagggtgcctgctgcaggaagcagcagcaaggtccagggagcctctaatttaaataggagaagtcagagctttaacagcattgacaaaaacaagcctccaaattatgcaaatggaaacgaaaaagattcctccaaaggacctcaatcgtcttcaggtgtaaatggtaacgtgcagcctcccagtactgctgggcagcctcctgcctctgccatcccttctccaagtgccagcaagccctggcgcagcaagtccatgaatgtcaaacacagtgccacctccaccatgttgactgtaaagcagtcaagtacagccacctcccccacaccatcttcagacagactgaagccacctgtctcagaaggggtcaaaactgctccctcaggacagaaatccatgcttgagaaattcaagctagtcaatgcccggactgctttacgccccccgcagcctcccagttcaggacctagtgatggtgggaaggatgatgatgccttttctgaatctggtgaaatggaaggttttaacagtggtctgaatagtggtggctcaacaaatagcagtcccaaagtgtcacctaagttggcccctccaaaagctggaagcaaaaatctcagcaataaaaagtctttgctacagccaaaggaaaaagaagaaaagaacagggacaaaaataaagtttgcactgaaaaaccagtcaaagaagagaaggatcaggtgacagagatggctccaaaaaagacctccaaaattgcaagcttgatccctaagggcagcaagacaacagcagctaagaaggaaagcttaattccgtcttccagtggtattccaaaaccaggctctaaagttccaacagtaaagcaaaccatttcacctggcagcacagcaagcaaagagtctgagaaattcaggactaccaaggggagcccttcccagtccttatctaagcctataaccatggagaaagcaagtgcttctagttgtcctgcccctttggaaggaagggaagctggccaagcttctccttctggttcctgtaccatgacagtggcacaaagcagtgggcagagcacaggaaatggtgctgtccaactccctcaacagcagcaacatagccacccgaataccgcgacagtggcaccattcatttacagggcacattcagaaaatgaaggtaccgctttaccatcggctgactcctgtaccagtcctacaaagatggacttatcatatagtaagactgctaagcagtgcctggaggagatatctggtgaagaccctgaaacaagaagaatgagaacagttaaaaacatagcagacttgaggcagaatttagaagagactatgtccagtcttcgtgggactcagataagccacagcaccctggagacaacatttgacagcactgtgacaacagaagttaatggaaggaccatacccaacttgacaagtcgacccacccccatgacctggaggttgggccaggcatgtccgcgacttcaggcgggagatgctccctccctgggtgctggctatcctcgcagtggtaccagtcgattcatccacacagacccctcgaggttcatgtataccacgcctctccgtcgagctgctgtctctaggctgggaaacatgtcacagattgacatgagtgagaaagcaagcagtgacctggacatgtcttctgaggtcgatgtgggtggatatatgagtgatggtgatatccttgggaaaagtctcaggactgatgacatcaacagtgggtacatgacagatggaggacttaacctatatactagaagtctgaaccgaataccagacacagcaacttcccgggacatcatccagagaggggttcacgatgtgacagtggatgcagacagctgggatgacagcagttcagtgagcagtggtctcagtgacacccttgataacatcagcactgatgacctgaacaccacatcctctgtcagctcttactccaacatcaccgtcccctctaggaagaatactcagctgaggacagattcagagaaacgctccaccacagacgagacctgggatagtcctgaggaactgaaaaaaccagaagaagattttgacagccatggggatgctggtggcaagtggaagactgtgtcctctggacttcctgaagaccccgagaaggcagggcagaaagcttccctgtctgtttcacagacaggttcctggagaagaggcatgtctgcccaaggaggggcgccatctaggcagaaagctggaacaagtgcactcaaaacacccgggaaaaccgatgatgccaaagcttctgagaaaggaaaagctcccctaaaaggatcatctctacaaagatctccttcagatgcaggaaaaagcagtggagatgaagggaaaaagcccccctcaggcattggaagatcgactgccaccagctcctttggctttaagaaaccaagtggagtagggtcatctgccatgatcaccagcagtggagcaaccataacaagtggctctgcaacactgggtaaaattccaaaatctgctgccattggcgggaagtcaaatgcagggagaaaaaccagtttggacggttcacagaatcaggatgatgttgtgctgcatgttagctcaaagactaccctacaatatcgcagcttgccccgcccttcaaaatccagcaccagtggcattcctggccgaggaggccacagatccagtaccagcagtattgattccaacgtcagcagcaagtctgctggggccaccacctcgaaactgagagaaccaactaaaattgggtcagggcgctcgagtcctgtcaccgtcaaccaaacagacaaggaaaaggaaaaagtagcagtctcagattcagaaagtgtttctttgtcaggttcccccaaatccagccccacctctgccagcgcctgtggtgcacaaggtctcaggcagccaggatccaagtatccagatattgcctcacccacatttcgaaggttgtttggtgccaaggcaggtggcaaatctgcctctgcacctaatactgagggtgtgaaatcttcctcagtaatgcccagccctagtaccacattagcgcggcaaggcagtctggagtcaccgtcgtccggtacgggcagcatgggcagtgctggtgggctaagcggcagcagcagccctctcttcaataaaccctcagacttaactacagatgttataagcttaagtcactcgttggcctccagcccagcatcggttcactctttcacatcaggtggtctcgtgtgggctgccaatatgagcagttcctctgcaggcagcaaggatactccgagctaccagtccatgactagcctccacacgagctctgagtccattgacctccccctcagccatcatggctccttgtctggactgaccacaggcactcacgaggtccagagcctgctcatgagaacgggtagtgtgagatctactctctcagaaagatataccccatcatctcggcaggccaaccaagaagagggcaaagagtggttgcgttctcattctactggagggcttcaggacactggcaaccagtcacctctggtttccccttctgccatgtcatcttctgcagctggaaaataccacttttctaacttggtgagcccaacaaatttgtctcagtttaaccttcccgggcccagcatgatgcgctcaaacagcatcccagcccaagactcttccttcgatctctatgatgactcccagctttgtgggagtgccacttctctggaggaaagacctcgtgccatcagtcattcgggctcattcagagacagcatggaagaagttcatggctcttcattatcactggtgtccagcacttcttctctttactctacagcaattcaaaaaccaaacattcagcaaatccataaactgcggagagagctggttgcatcacaagaaaaagttgctaccctcacatctcagctttcagcaaatgctcaccttgtagcagcttttgaaaagagcttagggaatatgactggccgattgcaaagtctaactatgacagcggaacaaaaggaatctgaacttatagaactaagagaaaccattgaaatgctgaaggctcagaattctgctgcccaggcggctattcagggagcactgaatggtccagaccatcctcccaaagatcttcgcatcagaagacagcattcctctgaaagtgtttctagtatcaacagtgccacaagccattccagtattggcagtggtaatgatgccgactccaagaagaagaaaaagaaaaactggctgagaagttctttcaaacaagcctttgggaagaaaaagtccaccaagcctccttcatcacattctgacattgaagagcttactgattcatcccttccggcatcccccaagttaccccataatgctggtgactgtggctcagcatccatgaagccctcacaatctgcttcagcgatctgtgaatgcacagaagctgaggcagagataattctgcagctgaagagcgagctcagagaaaaggaattaaaattaacggatattcggctggaggccctcagctctgctcatcatcttgatcagatccgggaagccatgaaccggatgcagaatgaaattgaaatactgaaagctgaaaatgaccggttgaaggcagaaactggtaacacagctaagcctactcggccaccgtcagaatcctcaagcagcacctcctcttcatcttccaggcagtcattaggactttctctaaacaatttgaacatcacagaggctgttagctcagatattttgctagatgatgctggtgatgcaactggacataaagatggccgcagtgtgaaaattatagtctccataagcaagggctatggtcgagcaaaggaccaaaaatctcaggcatatttgataggatccattggtgttagtggaaaaaccaagtgggatgtcttagatggtgtaataagacgtctctttaaggaatatgtattccgaattgatacatccactagccttggtctgagctctgactgcattgctagctactgtataggagacttaattagatcccataacctagaagtgcctgaattgctgccttgtggataccttgttggagataataacatcatcactgtgaacctcaaaggggtagaagaaaatagtttggacagttttgtttttgatacgctgattcctaaaccaattacccaaaggtactttaacttgttgatggagcatcacagaattatactctcaggaccgagtggtactggaaagacctatttggcaaacaaacttgctgaatatgtaataaccaaatctggaaggaaaaaaacagaggatgcaattgccacttttaatgtggaccacaagtcaagtaaggaattgcaacaatatctagctaacctggctgaacagtgcagtgctgataataatggagtggagctcccagttgtaataattcttgataatcttcatcatgtgggctctctgagtgatatcttcaatggttttctcaattgtaaatacaacaaatgtccatatattattggaacaatgaatcagggagtttcttcatcaccaaatctagagctgcatcacaatttcaggtgggtattatgtgcaaatcatacagaaccagtgaaaggctttttaggcagatatcttcgaagaaaactcatagagatagaaattgaaaggaacattcgcaataatgacctagtcaaaattatagattggattccgaagacgtggcatcatctcaacagttttttggaaacacacagttcttctgacgttaccattggtccccgactattccttccttgccccatggatgtagaaggttctagagtatggttcatggatctctggaactattctttagtaccttatattctggaggcagtgagagagggtcttcagatgtatgggaaacgcacaccatgggaagatccttcaaagtgggtgcttgacacatatccatggagctcagcaactctgcctcaggagagcccagccttacttcagctgcgaccagaagatgttgggtatgaaagctgcacatccactaaggaagccacaacctcaaagcacattccgcaaactgacacagaaggagatcccctgatgaatatgctaatgaaactccaagaagcagccaattactcgagcacacaaagctgcgacagcgaaagcaccagccaccatgaagacattttggattcatctcttgaatctaccctctagagggtgaaaaaagttaagggaaaagactttgcttttaaaaaaatgtttcaaaagaaaggtattttcactaaaccactgccagtataaaagcaccctgtcaagggccctgacccagagttgtggtctccaaggaggcagcagaactaagtctgaaccgccaagatgctaaattgcaatggaagcttaactttagtttatttctaagcattttttatatctgtggagtaatagaaagctccattactcaactggaaaggaccctaatgacagggcaactgaacagattgcacatgggatagccaaactggactttctttgtttcctctttaaaagtttacaatgcagaccattttttgtcccttccttttgtttcctctgaggggctgttcgccccaggcagggtccatctttctgatctgtccaacctcctttgtgccacacggtgctggtcacagggcttcagtagtgtttgtgttgtgcgctcaccccattccagaacaaatccaagaggccagtcctccataagcacaaatggaattgtgcaaccaccagaaaaacactactgtggcaaactggagaagtgccaatttaattctaactgccacgttctcatgatgtgctccaccaactttttagtatatgagtcactggttttataaggttgtttttaccacagtggtctttttaaaccacctgcccactcccttaacaagagttttataccaattattagtcaacactgataaaaggcttttttagggctttatttgtttgagccttttcagtgaaagaaggaacatttcctatggtgctgtctcactgccttaaaacagatttctatgacagtttaacagttggtttaaatcctaaaccattggtaatttccactgtcttttcatttacaaccaagcaacaccagttaacatagtagcctcatctctatatatctttctcttttttttttttttgaagaaatggataggagaaagatcagtatttttagccttgtgaatagatcgctttgcctatcctccaaaatattaaaataacccagaaatgctctttgaccgtcacttaaaacctaagacatgtggcgaaattccatccagttctaagtgaaagagtttcagaaggcagaagattttgaattattatccagcagggctggaagcactagatgcagcatgagcacaactattcggctttccttccctattgtttttgtttttttaatgagttttgacgcatgttgttttgattgctattgttgtacatgagaaattcagcattaaagaacactgaagcggtaaggtcactgtggaagaggaagcgtttatactgtaaaagaaggttagatttgcacagtctactgggtaggtattgtaaataataatttttaaaacttgcacaaatcaaaacaaacacaaacaaaattgtattttatcctgttggtgttaagaggtgtttcacttgctgagatttcctgtacattgcaaacaaatacagaatgcaaaccctcaaagctgtattatctggtgtgtttgtcctgtatttacagttgtttttgactatgcaggagctatcagtgctagagtgagcatgcttcaaaactgtacatgaagccaatatatttttggataagtaaaactgtctgaaagtacatctgtcatggcaggctttaaagagagtgcatgaaaactgatcagtcattggagaagttaccaccacacacaaaggacaggttttaagtttatgaaacccaagggctaggccatggtatagacttcttctatgagtgtgtgaaaatgtgttacttttaggacgtgtatttggtgctactctctgtgaccaccaatgggtcagttgctatagaacaacaacaccacgaaacatctgtgcagttttcagagtgtcacaaagtcaataggtccttacacggtgctattgccctaagggaaatccgaactgaatttatgcacatagaattgtcaccctgactttgaagcctcaaacatggatcaaatctgttgtgaaacatcaatatatgtagctggatgagtgactagtttcccttgtataatatgtgatctaagaaaattgctaatctttccctgccattttgagaaacacagtccaaacatgagcataaacagaatttcctgcaatacatcccagtaggtccacctagtttacaacttaaactagtttgtgaaacatttgtctgtatacattttatattttgtacattttgatgtaacatatcatgtaaataggcagaaacagtgaaataaatcatctgaaaagttttgtagtctttgtaaagccccaacaataagtacttggtgtcaatggacttaactggatgatgtattttctattggtttattgttcctctagcttgtaaaccagcttgcatatatttttttgcaaatgtgcaccctgtatctgtctaaattattactttgccattaaagtggaattatttattgacaa

SEQ ID NO: 20041 - DNA, 9821 bp, Homo sapiens
  source 1..9821: mol_type = unassigned DNA
agatgcagggaagttttgcctcttcctgaaaattatattattagctttttaaaaatcaggatgactgctagttttgtttaaagtatttgttctggaaatactaaagttggagtctaccagactgaggttagaagcattttctttggcagcaagaagataattttatagaagccatgcctgttcttggggttgcctcaaaactgaggcagccagctgttgggtcaaagcctgtgcatactgctcttccgataccaaatcttggcactactgggtcacagcactgttcttcaagacctttggaacttactgaaacagagagctccatgctttcttgtcagcttgcgttaaaatcaacctgtgaatttggagagaagaaacccctccaaggaaaagccaaggagaaagaagacagcaagatttacactgactgggccaaccactacctagcaaaatcaggccacaagcggctgatcaaggacttgcaacaagacattgcagatggagtactcctagcagaaatcatccagattattgcaaatgaaaaagttgaagatatcaatggatgtcctagaagtcagtctcagatgattgaaaatgttgatgtctgccttagttttctagcagccagaggggtaaatgttcaaggtctatctgctgaagaaataagaaatggaaacttaaaagccattctagggctgtttttcagtttatctcgctacaagcagcaacaacaccatcaacaacagtactatcagtccttggtggaacttcagcagcgagttactcacgcttcccctccatcggaagccagccaggccaaaacccagcaagatatgcagtccagtctggcagccagatatgcaactcagtctaatcacagtggaattgcaaccagtcaaaaaaagcctactaggcttccagggccctctagggtgcctgctgcaggaagcagcagcaaggtccagggagcctctaatttaaataggagaagtcagagctttaacagcattgacaaaaacaagcctccaaattatgcaaatggaaacgaaaaagattcctccaaaggacctcaatcgtcttcaggtgtaaatggtaacgtgcagcctcccagtactgctgggcagcctcctgcctctgccatcccttctccaagtgccagcaagccctggcgcagcaagtccatgaatgtcaaacacagtgccacctccaccatgttgactgtaaagcagtcaagtacagccacctcccccacaccatcttcagacagactgaagccacctgtctcagaaggggtcaaaactgctccctcaggacagaaatccatgcttgagaaattcaagctagtcaatgcccggactgctttacgccccccgcagcctcccagttcaggacctagtgatggtgggaaggatgatgatgccttttctgaatctggtgaaatggaaggttttaacagtggtctgaatagtggtggctcaacaaatagcagtcccaaagtgtcacctaagttggcccctccaaaagctggaagcaaaaatctcagcaataaaaagtctttgctacagccaaaggaaaaagaagaaaagaacagggacaaaaataaagtttgcactgaaaaaccagtcaaagaagagaaggatcaggtgacagagatggctccaaaaaagacctccaaaattgcaagcttgatccctaagggcagcaagacaacagcagctaagaaggaaagcttaattccgtcttccagtggtattccaaaaccaggctctaaagttccaacagtaaagcaaaccatttcacctggcagcacagcaagcaaagagtctgagaaattcaggactaccaaggggagcccttcccagtccttatctaagcctataaccatggagaaagcaagtgcttctagttgtcctgcccctttggaaggaagggaagctggccaagcttctccttctggttcctgtaccatgacagtggcacaaagcagtgggcagagcacaggaaatggtgctgtccaactccctcaacagcagcaacatagccacccgaataccgcgacagtggcaccattcatttacagggcacattcagaaaatgaaggtaccgctttaccatcggctgactcctgtaccagtcctacaaagatggacttatcatatagtaagactgctaagcagtgcctggaggagatatctggtgaagaccctgaaacaagaagaatgagaacagttaaaaacatagcagacttgaggcagaatttagaagagactatgtccagtcttcgtgggactcagataagccacagcaccctggagacaacatttgacagcactgtgacaacagaagttaatggaaggaccatacccaacttgacaagtcgacccacccccatgacctggaggttgggccaggcatgtccgcgacttcaggcgggagatgctccctccctgggtgctggctatcctcgcagtggtaccagtcgattcatccacacagacccctcgaggttcatgtataccacgcctctccgtcgagctgctgtctctaggctgggaaacatgtcacagattgacatgagtgagaaagcaagcagtgacctggacatgtcttctgaggtcgatgtgggtggatatatgagtgatggtgatatccttgggaaaagtctcaggactgatgacatcaacagtgggtacatgacagatggaggacttaacctatatactagaagtctgaaccgaataccagacacagcaacttcccgggacatcatccagagaggggttcacgatgtgacagtggatgcagacagctgggatgacagcagttcagtgagcagtggtctcagtgacacccttgataacatcagcactgatgacctgaacaccacatcctctgtcagctcttactccaacatcaccgtcccctctaggaagaatactcagctgaggacagattcagagaaacgctccaccacagacgagacctgggatagtcctgaggaactgaaaaaaccagaagaagattttgacagccatggggatgctggtggcaagtggaagactgtgtcctctggacttcctgaagaccccgagaaggcagggcagaaagcttccctgtctgtttcacagacaggttcctggagaagaggcatgtctgcccaaggaggggcgccatctaggcagaaagctggaacaagtgcactcaaaacacccgggaaaaccgatgatgccaaagcttctgagaaaggaaaagctcccctaaaaggatcatctctacaaagatctccttcagatgcaggaaaaagcagtggagatgaagggaaaaagcccccctcaggcattggaagatcgactgccaccagctcctttggctttaagaaaccaagtggagtagggtcatctgccatgatcaccagcagtggagcaaccataacaagtggctctgcaacactgggtaaaattccaaaatctgctgccattggcgggaagtcaaatgcagggagaaaaaccagtttggacggttcacagaatcaggatgatgttgtgctgcatgttagctcaaagactaccctacaatatcgcagcttgccccgcccttcaaaatccagcaccagtggcattcctggccgaggaggccacagatccagtaccagcagtattgattccaacgtcagcagcaagtctgctggggccaccacctcgaaactgagagaaccaactaaaattgggtcagggcgctcgagtcctgtcaccgtcaaccaaacagacaaggaaaaggaaaaagtagcagtctcagattcagaaagtgtttctttgtcaggttcccccaaatccagccccacctctgccagcgcctgtggtgcacaaggtctcaggcagccaggatccaagtatccagatattgcctcacccacatttcgaaggttgtttggtgccaaggcaggtggcaaatctgcctctgcacctaatactgagggtgtgaaatcttcctcagtaatgcccagccctagtaccacattagcgcggcaaggcagtctggagtcaccgtcgtccggtacgggcagcatgggcagtgctggtgggctaagcggcagcagcagccctctcttcaataaaccctcagacttaactacagatgttataagcttaagtcactcgttggcctccagcccagcatcggttcactctttcacatcaggtggtctcgtgtgggctgccaatatgagcagttcctctgcaggcagcaaggatactccgagctaccagtccatgactagcctccacacgagctctgagtccattgacctccccctcagccatcatggctccttgtctggactgaccacaggcactcacgaggtccagagcctgctcatgagaacgggtagtgtgagatctactctctcagaaagcatgcagcttgacagaaatacactacccaaaaagggactaagatataccccatcatctcggcaggccaaccaagaagagggcaaagagtggttgcgttctcattctactggagggcttcaggacactggcaaccagtcacctctggtttccccttctgccatgtcatcttctgcagctggaaaataccacttttctaacttggtgagcccaacaaatttgtctcagtttaaccttcccgggcccagcatgatgcgctcaaacagcatcccagcccaagactcttccttcgatctctatgatgactcccagctttgtgggagtgccacttctctggaggaaagacctcgtgccatcagtcattcgggctcattcagagacagcatggaagaagttcatggctcttcattatcactggtgtccagcacttcttctctttactctacagctgaagaaaaggctcattcagagcaaatccataaactgcggagagagctggttgcatcacaagaaaaagttgctaccctcacatctcagctttcagcaaatgctcaccttgtagcagcttttgaaaagagcttagggaatatgactggccgattgcaaagtctaactatgacagcggaacaaaaggaatctgaacttatagaactaagagaaaccattgaaatgctgaaggctcagaattctgctgcccaggcggctattcagggagcactgaatggtccagaccatcctcccaaagatcttcgcatcagaagacagcattcctctgaaagtgtttctagtatcaacagtgccacaagccattccagtattggcagtggtaatgatgccgactccaagaagaagaaaaagaaaaactgggtgaactctagaggaagtgagctgagaagttctttcaaacaagcctttgggaagaaaaagtccaccaagcctccttcatcacattctgacattgaagagcttactgattcatcccttccggcatcccccaagttaccccataatgctggtgactgtggctcagcatccatgaagccctcacaatctgcttcagcgtcaccccttgtctggccaccaaagaaacgacaaaatggccctgtgatctacaagcatagatctcggatctgtgaatgcacagaagctgaggcagagataattctgcagctgaagagcgagctcagagaaaaggaattaaaattaacggatattcggctggaggccctcagctctgctcatcatcttgatcagatccgggaagccatgaaccggatgcagaatgaaattgaaatactgaaagctgaaaatgaccggttgaaggcagaaactggtaacacagctaagcctactcggccaccgtcagaatcctcaagcagcacctcctcttcatcttccaggcagtcattaggactttctctaaacaatttgaacatcacagaggctgttagctcagatattttgctagatgatgctggtgatgcaactggacataaagatggccgcagtgtgaaaattatagtctccataagcaagggctatggtcgagcaaaggaccaaaaatctcaggcatatttgataggatccattggtgttagtggaaaaaccaagtgggatgtcttagatggtgtaataagacgtctctttaaggaatatgtattccgaattgatacatccactagccttggtctgagctctgactgcattgctagctactgtataggagacttaattagatcccataacctagaagtgcctgaattgctgccttgtggataccttgttggagataataacatcatcactgtgaacctcaaaggggtagaagaaaatagtttggacagttttgtttttgatacgctgattcctaaaccaattacccaaaggtactttaacttgttgatggagcatcacagaattatactctcaggaccgagtggtactggaaagacctatttggcaaacaaacttgctgaatatgtaataaccaaatctggaaggaaaaaaacagaggatgcaattgccacttttaatgtggaccacaagtcaagtaaggaattgcaacaatatctagctaacctggctgaacagtgcagtgctgataataatggagtggagctcccagttgtaataattcttgataatcttcatcatgtgggctctctgagtgatatcttcaatggttttctcaattgtaaatacaacaaatgtccatatattattggaacaatgaatcagggagtttcttcatcaccaaatctagagctgcatcacaatttcaggtgggtattatgtgcaaatcatacagaaccagtgaaaggctttttaggcagatatcttcgaagaaaactcatagagatagaaattgaaaggaacattcgcaataatgacctagtcaaaattatagattggattccgaagacgtggcatcatctcaacagttttttggaaacacacagttcttctgacgttaccattggtccccgactattccttccttgccccatggatgtagaaggttctagagtatggttcatggatctctggaactattctttagtaccttatattctggaggcagtgagagagggtcttcagatgtatgggaaacgcacaccatgggaagatccttcaaagtgggtgcttgacacatatccatggagctcagcaactctgcctcaggagagcccagccttacttcagctgcgaccagaagatgttgggtatgaaagctgcacatccactaaggaagccacaacctcaaagcacattccgcaaactgacacagaaggagatcccctgatgaatatgctaatgaaactccaagaagcagccaattactcgagcacacaaagctgcgacagcgaaagcaccagccaccatgaagacattttggattcatctcttgaatctaccctctagagggtgaaaaaagttaagggaaaagactttgcttttaaaaaaatgtttcaaaagaaaggtattttcactaaaccactgccagtataaaagcaccctgtcaagggccctgacccagagttgtggtctccaaggaggcagcagaactaagtctgaaccgccaagatgctaaattgcaatggaagcttaactttagtttatttctaagcattttttatatctgtggagtaatagaaagctccattactcaactggaaaggaccctaatgacagggcaactgaacagattgcacatgggatagccaaactggactttctttgtttcctctttaaaagtttacaatgcagaccattttttgtcccttccttttgtttcctctgaggggctgttcgccccaggcagggtccatctttctgatctgtccaacctcctttgtgccacacggtgctggtcacagggcttcagtagtgtttgtgttgtgcgctcaccccattccagaacaaatccaagaggccagtcctccataagcacaaatggaattgtgcaaccaccagaaaaacactactgtggcaaactggagaagtgccaatttaattctaactgccacgttctcatgatgtgctccaccaactttttagtatatgagtcactggttttataaggttgtttttaccacagtggtctttttaaaccacctgcccactcccttaacaagagttttataccaattattagtcaacactgataaaaggcttttttagggctttatttgtttgagccttttcagtgaaagaaggaacatttcctatggtgctgtctcactgccttaaaacagatttctatgacagtttaacagttggtttaaatcctaaaccattggtaatttccactgtcttttcatttacaaccaagcaacaccagttaacatagtagcctcatctctatatatctttctcttttttttttttttgaagaaatggataggagaaagatcagtatttttagccttgtgaatagatcgctttgcctatcctccaaaatattaaaataacccagaaatgctctttgaccgtcacttaaaacctaagacatgtggcgaaattccatccagttctaagtgaaagagtttcagaaggcagaagattttgaattattatccagcagggctggaagcactagatgcagcatgagcacaactattcggctttccttccctattgtttttgtttttttaatgagttttgacgcatgttgttttgattgctattgttgtacatgagaaattcagcattaaagaacactgaagcggtaaggtcactgtggaagaggaagcgtttatactgtaaaagaaggttagatttgcacagtctactgggtaggtattgtaaataataatttttaaaacttgcacaaatcaaaacaaacacaaacaaaattgtattttatcctgttggtgttaagaggtgtttcacttgctgagatttcctgtacattgcaaacaaatacagaatgcaaaccctcaaagctgtattatctggtgtgtttgtcctgtatttacagttgtttttgactatgcaggagctatcagtgctagagtgagcatgcttcaaaactgtacatgaagccaatatatttttggataagtaaaactgtctgaaagtacatctgtcatggcaggctttaaagagagtgcatgaaaactgatcagtcattggagaagttaccaccacacacaaaggacaggttttaagtttatgaaacccaagggctaggccatggtatagacttcttctatgagtgtgtgaaaatgtgttacttttaggacgtgtatttggtgctactctctgtgaccaccaatgggtcagttgctatagaacaacaacaccacgaaacatctgtgcagttttcagagtgtcacaaagtcaataggtccttacacggtgctattgccctaagggaaatccgaactgaatttatgcacatagaattgtcaccctgactttgaagcctcaaacatggatcaaatctgttgtgaaacatcaatatatgtagctggatgagtgactagtttcccttgtataatatgtgatctaagaaaattgctaatctttccctgccattttgagaaacacagtccaaacatgagcataaacagaatttcctgcaatacatcccagtaggtccacctagtttacaacttaaactagtttgtgaaacatttgtctgtatacattttatattttgtacattttgatgtaacatatcatgtaaataggcagaaacagtgaaataaatcatctgaaaagttttgtagtctttgtaaagccccaacaataagtacttggtgtcaatggacttaactggatgatgtattttctattggtttattgttcctctagcttgtaaaccagcttgcatatatttttttgcaaatgtgcaccctgtatctgtctaaattattactttgccattaaagtggaattatttattga

SEQ ID NO: 20042 - DNA, 7386 bp, Homo sapiens
  source 1..7386: mol_type = unassigned DNA
agatgcagggaagttttgcctcttcctgaaaattatattattagctttttaaaaatcaggatgactgctagttttgtttaaagtatttgttctggaaatactaaagttggagtctaccagactgaggttagaagcattttctttggcagcaagaagataattttatagaagccatgcctgttcttggggttgcctcaaaactgaggcagccagctgttgggtcaaagcctgtgcatactgctcttccgataccaaatcttggcactactgggtcacagcactgttcttcaagacctttggaacttactgaaacagagagctccatgctttcttgtcagcttgcgttaaaatcaacctgtgaatttggagagaagaaacccctccaaggaaaagccaaggagaaagaagacagcaagatttacactgactgggccaaccactacctagcaaaatcaggccacaagcggctgatcaaggacttgcaacaagacattgcagatggagtactcctagcagaaatcatccagattattgcaaatgaaaaagttgaagatatcaatggatgtcctagaagtcagtctcagatgattgaaaatgttgatgtctgccttagttttctagcagccagaggggtaaatgttcaaggtctatctgctgaagaaataagaaatggaaacttaaaagccattctagggctgtttttcagtttatctcgctacaagcagcaacaacaccatcaacaacagtactatcagtccttggtggaacttcagcagcgagttactcacgcttcccctccatcggaagccagccaggccaaaacccagcaagatatgcagtccagtctggcagccagatatgcaactcagtctaatcacagtggaattgcaaccagtcaaaaaaagcctactaggcttccagggccctctagggtgcctgctgcaggaagcagcagcaaggtccagggagcctctaatttaaataggagaagtcagagctttaacagcattgacaaaaacaagcctccaaattatgcaaatggaaacgaaaaagattcctccaaaggacctcaatcgtcttcaggtgtaaatggtaacgtgcagcctcccagtactgctgggcagcctcctgcctctgccatcccttctccaagtgccagcaagccctggcgcagcaagtccatgaatgtcaaacacagtgccacctccaccatgttgactgtaaagcagtcaagtacagccacctcccccacaccatcttcagacagactgaagccacctgtctcagaaggggtcaaaactgctccctcaggacagaaatccatgcttgagaaattcaagctagtcaatgcccggactgctttacgccccccgcagcctcccagttcaggacctagtgatggtgggaaggatgatgatgccttttctgaatctggtgaaatggaaggttttaacagtggtctgaatagtggtggctcaacaaatagcagtcccaaagtgtcacctaagttggcccctccaaaagctggaagcaaaaatctcagcaataaaaagtctttgctacagccaaaggaaaaagaagaaaagaacagggacaaaaataaagtttgcactgaaaaaccagtcaaagaagagaaggatcaggtgacagagatggctccaaaaaagacctccaaaattgcaagcttgatccctaagggcagcaagacaacagcagctaagaaggaaagcttaattccgtcttccagtggtattccaaaaccaggctctaaagttccaacagtaaagcaaaccatttcacctggcagcacagcaagcaaagagtctgagaaattcaggactaccaaggggagcccttcccagtccttatctaagcctataaccatggagaaagcaagtgcttctagttgtcctgcccctttggaaggaagggaagctggccaagcttctccttctggttcctgtaccatgacagtggcacaaagcagtgggcagagcacaggaaatggtgctgtccaactccctcaacagcagcaacatagccacccgaataccgcgacagtggcaccattcatttacagggcacattcagaaaatgaaggtaccgctttaccatcggctgactcctgtaccagtcctacaaagatggacttatcatatagtaagactgctaagcagtgcctggaggagatatctggtgaagaccctgaaacaagaagaatgagaacagttaaaaacatagcagacttgaggcagaatttagaagagactatgtccagtcttcgtgggactcagataagccacagcaccctggagacaacatttgacagcactgtgacaacagaagttaatggaaggaccatacccaacttgacaagtcgacccacccccatgacctggaggttgggccaggcatgtccgcgacttcaggcgggagatgctccctccctgggtgctggctatcctcgcagtggtaccagtcgattcatccacacagacccctcgaggttcatgtataccacgcctctccgtcgagctgctgtctctaggctgggaaacatgtcacagattgacatgagtgagaaagcaagcagtgacctggacatgtcttctgaggtcgatgtgggtggatatatgagtgatggtgatatccttgggaaaagtctcaggactgatgacatcaacagtgggtacatgacagatggaggacttaacctatatactagaagtctgaaccgaataccagacacagcaacttcccgggacatcatccagagaggggttcacgatgtgacagtggatgcagacagctgggatgacagcagttcagtgagcagtggtctcagtgacacccttgataacatcagcactgatgacctgaacaccacatcctctgtcagctcttactccaacatcaccgtcccctctaggaagaatactcagctgaggacagattcagagaaacgctccaccacagacgagacctgggatagtcctgaggaactgaaaaaaccagaagaagattttgacagccatggggatgctggtggcaagtggaagactgtgtcctctggacttcctgaagaccccgagaaggcagggcagaaagcttccctgtctgtttcacagacaggttcctggagaagaggcatgtctgcccaaggaggggcgccatctaggcagaaagctggaacaagtgcactcaaaacacccgggaaaaccgatgatgccaaagcttctgagaaaggaaaagctcccctaaaaggatcatctctacaaagatctccttcagatgcaggaaaaagcagtggagatgaagggaaaaagcccccctcaggcattggaagatcgactgccaccagctcctttggctttaagaaaccaagtggagtagggtcatctgccatgatcaccagcagtggagcaaccataacaagtggctctgcaacactgggtaaaattccaaaatctgctgccattggcgggaagtcaaatgcagggagaaaaaccagtttggacggttcacagaatcaggatgatgttgtgctgcatgttagctcaaagactaccctacaatatcgcagcttgccccgcccttcaaaatccagcaccagtggcattcctggccgaggaggccacagatccagtaccagcagtattgattccaacgtcagcagcaagtctgctggggccaccacctcgaaactgagagaaccaactaaaattgggtcagggcgctcgagtcctgtcaccgtcaaccaaacagacaaggaaaaggaaaaagtagcagtctcagattcagaaagtgtttctttgtcaggttcccccaaatccagccccacctctgccagcgcctgtggtgcacaaggtctcaggcagccaggatccaagtatccagatattgcctcacccacatttcgaaggttgtttggtgccaaggcaggtggcaaatctgcctctgcacctaatactgagggtgtgaaatcttcctcagtaatgcccagccctagtaccacattagcgcggcaaggcagtctggagtcaccgtcgtccggtacgggcagcatgggcagtgctggtgggctaagcggcagcagcagccctctcttcaataaaccctcagacttaactacagatgttataagcttaagtcactcgttggcctccagcccagcatcggttcactctttcacatcaggtggtctcgtgtgggctgccaatatgagcagttcctctgcaggcagcaaggatactccgagctaccagtccatgactagcctccacacgagctctgagtccattgacctccccctcagccatcatggctccttgtctggactgaccacaggcactcacgaggtccagagcctgctcatgagaacgggtagtgtgagatctactctctcagaaagcatgcagcttgacagaaatacactacccaaaaagggactaagatataccccatcatctcggcaggccaaccaagaagagggcaaagagtggttgcgttctcattctactggagggcttcaggacactggcaaccagtcacctctggtttccccttctgccatgtcatcttctgcagctggaaaataccacttttctaacttggtgagcccaacaaatttgtctcagtttaaccttcccgggcccagcatgatgcgctcaaacagcatcccagcccaagactcttccttcgatctctatgatgactcccagctttgtgggagtgccacttctctggaggaaagacctcgtgccatcagtcattcgggctcattcagagacagcatggaagaagttcatggctcttcattatcactggtgtccagcacttcttctctttactctacagctgaagaaaaggctcattcagagcaaatccataaactgcggagagagctggttgcatcacaagaaaaagttgctaccctcacatctcagctttcagcaaatgctcaccttgtagcagcttttgaaaagagcttagggaatatgactggccgattgcaaagtctaactatgacagcggaacaaaaggaatctgaacttatagaactaagagaaaccattgaaatgctgaaggctcagaattctgctgcccaggcggctattcagggagcactgaatggtccagaccatcctcccaaagatcttcgcatcagaagacagcattcctctgaaagtgtttctagtatcaacagtgccacaagccattccagtattggcagtggtaatgatgccgactccaagaagaagaaaaagaaaaactgggtgaactctagaggaagtgagctgagaagttctttcaaacaagcctttgggaagaaaaagtccaccaagcctccttcatcacattctgacattgaagagcttactgattcatcccttccggcatcccccaagttaccccataatgctggtgactgtggctcagcatccatgaagccctcacaatctgcttcagcgatctgtgaatgcacagaagctgaggcagagataattctgcagctgaagagcgagctcagagaaaaggaattaaaattaacggatattcggctggaggccctcagctctgctcatcatcttgatcagatccgggaagccatgaaccggatgcagaatgaaattgaaatactgaaagctgaaaatgaccggttgaaggcagaaactggtaacacagctaagcctactcggccaccgtcagaatcctcaagcagcacctcctcttcatcttccaggcagtcattaggactttctctaaacaatttgaacatcacagaggctgttagctcagatattttgctagatgatgctggtgatgcaactggacataaagatggccgcagtgtgaaaattatagtctccataagcaagggctatggtcgagcaaaggaccaaaaatctcaggcatatttgataggatccattggtgttagtggaaaaaccaagtgggatgtcttagatggtgtaataagacgtctctttaaggaatatgtattccgaattgatacatccactagccttggtctgagctctgactgcattgctagctactgtataggagacttaattagatcccataacctagaagtgcctgaattgctgccttgtggataccttgttggagataataacatcatcactgtgaacctcaaaggggtagaagaaaatagtttggacagttttgtttttgatacgctgattcctaaaccaattacccaaaggtactttaacttgttgatggagcatcacagaattatactctcaggaccgagtggtactggaaagacctatttggcaaacaaacttgctgaatatgtaataaccaaatctggaaggaaaaaaacagaggatgcaattgccacttttaatgtggaccacaagtcaagtaaggaattgcaacaatatctagctaacctggctgaacagtgcagtgctgataataatggagtggagctcccagttgtaataattcttgataatcttcatcatgtgggctctctgagtgatatcttcaatggttttctcaattgtaaatacaacaaatgtccatatattattggaacaatgaatcagggagtttcttcatcaccaaatctagagctgcatcacaatttcaggtgggtattatgtgcaaatcatacagaaccagtgaaaggctttttaggcagatatcttcgaagaaaactcatagagatagaaattgaaaggaacattcgcaataatgacctagtcaaaattatagattggattccgaagacgtggcatcatctcaacagttttttggaaacacacagttcttctgacgttaccattggtccccgactattccttccttgccccatggatgtagaaggttctagagtatggttcatggatctctggaactattctttagtaccttatattctggaggcagtgagagagggtcttcagatgtatgggaaacgcacaccatgggaagatccttcaaagtgggtgcttgacacatatccatggagctcagcaactctgcctcaggagagcccagccttacttcagctgcgaccagaagatgttgggtatgaaagctgcacatccactaaggaagccacaacctcaaagcacattccgcaaactgacacagaaggagatcccctgatgaatatgctaatgaaactccaagaagcagccaattactcgagcacacaaagctgcgacagcgaaagcaccagccaccatgaagacattttggattcatctcttgaatctaccctctagagggtgaaaaaagttaagggaaaagactttgcttttaaaaaaatgtttcaaaagaaaggtattttcactaaaccactgccagtataaaagcaccctgtcaagggccctgacccagagttgt

SEQ ID NO: 20043 - DNA, 1226 bp, Homo sapiens
  source 1..1226: mol_type = unassigned DNA
agcatttagactcccactcacttctgacgcacatgagcttctttttagctcaaaaagtagagttagctacattatagctctcatcctagtagacctcctaacacctttgatcatgaaaaggtgggtattatgtgcaaatcatacagaaccagtgaaaggctttttaggcagatatcttcgaagaaaactcatagagatagaaattgaaaggaacattcgcaataatgacctagtcaaaattatagattggattccgaagacgtggcatcatctcaacagttttttggaaacacacagttcttctgacgttaccattggtccccgactattccttccttgccccatggatgtagaaggttctagagtatggttcatggatctctggaactattctttagtaccttatattctggaggcagtgagagagggtcttcagatgtatgggaaacgcacaccatgggaagatccttcaaagtgggtgcttgacacatatccatggagctcagcaactctgcctcaggagagcccagccttacttcagctgcgaccagaagatgttgggtatgaaagctgcacatccactaaggaagccacaacctcaaagcacattccgcaaactgacacagaaggagatcccctgatgaatatgctaatgaaactccaagaagcagccaattactcgagcacacaaagctgcgacagcgaaagcaccagccaccatgaagacattttggattcatctcttgaatctaccctctagagggtgaaaaaagttaagggaaaagactttgcttttaaaaaaatgtttcaaaagaaaggtattttcactaaaccactgccagtataaaagcaccctgtcaagggccctgacccagagttgtggtctccaaggaggcagcagaactaagtctgaaccgccaagatgctaaattgcaatggaagcttaactttagtttatttctaagcattttttatatctgtggagtaatagaaagctccattactcaactggaaaggaccctaatgacagggcaactgaacagattgcacatgggatagccaaactggactttctttgtttcctctttaaaagtttacaatgcagaccattttttgtcccttccttttgtttcctctgaggggctgttcgccccaggcagggtccatctttctgatctgtccaacctcctttgtgccacacggtgctggtcacagggcttcagtag

SEQ ID NO: 20044 - DNA, 4991 bp, Homo sapiens
  source 1..4991: mol_type = unassigned DNA
ccggcccggcccgcccggcccagccgctcctgctgggcgccccaaccgggtccggcccgggggggcgggggccgcggccgccgaggatggggaaatccaacagcaagttgaagcccgaagttgtggaggagctgaccaggaagacctactttaccgagaaggaggtccagcagtggtacaaaggcttcatcaaggactgccccagtgggcagctggatgcggcaggcttccagaagatctacaagcaattcttcccgttcggagaccccaccaagtttgccacatttgttttcaacgtctttgatgaaaacaaggacgggcgaattgagttctccgagttcatccaggcgctgtcggtgacctcacggggaaccctggatgagaagctacggtgggccttcaagctctacgacttggacaatgatggctacatcaccaggaatgagatgctggacattgtggatgccatttaccagatggtggggaataccgtggagctcccagaggaggagaacactcctgagaagagggtggaccggatctttgccatgatggataagaatgccgacgggaagctgaccctgcaggagttccaggagggttccaaggcagacccgtccattgtgcaggcgctgtccctctacgacgggctggtatagtcccaggctggagctggatgcctgggaaccactcacctccttctgtgccatgaggccacctcagccctgacaccaaccccgtgcgtccacccagccttcttccgcatccacacacagccggctgcccttgacccgggaggccccggctctcctctcccctgtcctgcacccatcccccgcctgaagccaccggctccaattgccagcaacctctgcttgtccggaaaacgacaacacgaaatggaaaaggctacagccctctgcataaaccaaggacttggctgcctcgcaggcagcctccgttcctcccgctctcttgcgcgtgtgcttttgttttttattttgaacagacgttttaaaagaaaaaaaaacaactaccttctgtcctagaagacacagactgacagatggggtgaaggcctggggacctcagagaactctgccttgccctcgtccctcgtccttcggcagccggagaggctgtgggtgggccgagggtgtctaggggttctgcctggtcaacgttatttgtcgtcccatcttttggcagcaaaaccacctgcgtggctaggatgattaattatgaggatgatgattttttttgtgataacagtattgtgctttttgtggggaaagtgaggtttttttttatatacatatataattgatatctttaatttattggttgttaactgttgctgctgcctggtgtgtcctcagctcccagggctgcgggcccaccgtttacatgtgcacgccctgacccacctgcccacgccgacttgggaggatggtggcctgcagcggccaagaagccaaaaaaaattttttttttttcagatactgtgcttgatttttggagaggggagaggtggaaattcctaaatggctaatgcactgttccctccagcccgaatgcctcctgccaaaccccttttccctgctgcctctgtccccgcatccttgttctcccctgggtccgtaacattttttccgaggatgaacaggggacatctttaggtttctcaactcttgctttggtgtttgccgcagcatggaaaacagggcgcctaaggctgggagctggaagaaggggcattgggtacccaggcagagtcaggagaggtggtctttgaagtaagttagcagaaatcaaggggacccccgcctccttgggctggggaggggatttcaagatagttcatgactctctcccgctctgccttccctccttcctatctgctttttccagtaaactgcatggtgtccttccctggccttctcttggctcaaaggctgggagggagggaaggagagaagagttccaggcaatcccatcaatatagtccctacacctggggctgcggcccacatgtcttcacggaggcttccagcggtgcctgccactgaggcaggtgcggccccaggaccatcaccaggaatgcgaggccaccctggaccagaggtaggagcccaaggtccggcccttgctctttgattgtgggcagcctcctgccctctctgggtctcagttgccccatctgcagagcgaggaggcccgggctggttggtcttgaaggcccttttccatgccgacatcatgtcactctaggcctggggttcagtttcctgtggctggtgatgctgtggttaagtttgcttgaccccagcagcccgagggactgtctgagtcacagcacagcccctattgcgtggctgctggtgtgtggggtcagttccagcagatgaatgtgtcatgtggcacaccttgtcccttcccgcagcatttcctggttccccccagacccttgagcgctctttgggacccagaaggagtccttgcacagggaaggcttgaggtgagaagccgcttcccagactgtcagggccaggcctgggtctagaattcttgctgctgctttgcagagtcaacagcccatcagcccatgttttagaggggacactttggtcctcggttcccaccctcagcaagcaggcctccagcccgaggaaggcctctgccgtagtgacgttgccgtgtggggctgcgtggctgttccccttggctggagcattcagccaaccccagcgtcccccctgaggcgttcattggcagccccctaggactgcacgctggccccacggtaaccccccctcccccaccaacatcctgcagggatggggtcagtggttccaccttcacaggccactttgaagggtggattctttgaggcccctgccagtcggctccctgctcagctgctggcccgggcgacctgggactcagcaccaacggctgaagtttctcagctgggctctgacctggggtctggggcagggaacgaacatggtggctttgggctgagaggatgagggaggtctttcccaggtcaaattactttcctttggcctctgcctgaggctcgatttgcctctctggtccaatgggactgacactgttgtacaacctgacctgtggctgagggtgtctgggcttaagcatgtggaccccttcggtgtgtccggccttcctccatcgtcctgccctttggccttttggtttgaagccacaggtgtggcttctggccttagcagatggtatgcttgcggaccgcagcccagcatgccggtgggcccacagcccgagccagcccagagctgccggaagggccgcccttcccggccctggcggggtgctggacactggccattttcactagagtttgcctggcagggaccgatctctgccccctcctctccccaggcctctggctgcagtgatgccgcagaatcctgagccaggtgcctcctgagcagcccgtgcgcctctccacagcggcgtttgccacccaatgcggctcgcttcagatgctctgatgcagagggcacgcccatagtccctctgcagagcctcgcactggggccagggcaggcaccagccccaggcggccagtcggccacggcctgtcctcttcctcgtagcgtctgctcctcactttgtgttgatggtgacttaggagaatgttccgattttccatgatctaagcaggccacgtttaaaataacatcaaggcaagcgtacgtgtcaccctctgtactgacatctcttcccctgaaatgcttttcagtttgacagcccgtttcctagacaagtgcacctggggtttcaggaactttgtgttttttcggagggggttggtggggaggtcgggatgcctgggatcccttcctggagaggcaggctgtctctggaaaaagcctccattgcccacccgccaggcggaaagtcaccctgttcccagcgcggtttcagcatttaattttaagggagctaaggaagcgcggcgcgccccctggtggtggtaagccgccaacgcacctgggggctgcaaccccaccggacgggtggtccggagggaggctggagcggggaggcgaggagggggctgtgagtcctcagaggccctgggccaccacatttctggcagcgtttcccagacacccctctgctaggccatccctggatagcaagtgaattaacttaagggcactgtgatgggaagccttgcccccctcttttttttttttttttaatatctgcggaataaacccaatggttaatttttgaatgaataaaaggcttttgttgaataaacagctggtcccatcttctgtcttggcatcttagcatccaggctcaggctctgccccttctccaggatggggtagccccgagtcgccctccccagtctgcacattccctgttgtccctgttcctgcagtggctcccggccccagggaggcccacctcactcccagcctgactcggtggctggcttccttcaggactttgcgcaagtcagttctgctcattgggtctcaatttccccatcccttggatgggagcaagagtctctgctgggcctgcctcgcaggggcctggtgagacccaaatgtgagtgtcatcatcaaagcccctcacagaagtggaggacggtgcccaagagtagcggtttggactgctgctgcctcccacccggagcctgccacttgggggagaaattggtataatgcttgcaaaaacaaacaaacaaaaggcaatgtcttctggttgtggttatttcctttcctgcttgcctccccagccccctttgagtctctttttggggtgccgtcctgtctgaacctgccggtgtgtgtctctggggccagggtcagggcgaggcccaggggtggacaggggccgtgtagcatgccccagcctccccaagctcctgctgtatgtcgtccatgtcacgccaattaaacacgcttcctggacttgtcctcgcc

SEQ ID NO: 20045 - DNA, 4860 bp, Homo sapiens
  source 1..4860: mol_type = unassigned DNA
gattgagagatggcaacgattaccgagaaggaggtccagcagtggtacaaaggcttcatcaaggactgccccagtgggcagctggatgcggcaggcttccagaagatctacaagcaattcttcccgttcggagaccccaccaagtttgccacatttgttttcaacgtctttgatgaaaacaaggacgggcgaattgagttctccgagttcatccaggcgctgtcggtgacctcacggggaaccctggatgagaagctacggtgggccttcaagctctacgacttggacaatgatggctacatcaccaggaatgagatgctggacattgtggatgccatttaccagatggtggggaataccgtggagctcccagaggaggagaacactcctgagaagagggtggaccggatctttgccatgatggataagaatgccgacgggaagctgaccctgcaggagttccaggagggttccaaggcagacccgtccattgtgcaggcgctgtccctctacgacgggctggtatagtcccaggctggagctggatgcctgggaaccactcacctccttctgtgccatgaggccacctcagccctgacaccaaccccgtgcgtccacccagccttcttccgcatccacacacagccggctgcccttgacccgggaggccccggctctcctctcccctgtcctgcacccatcccccgcctgaagccaccggctccaattgccagcaacctctgcttgtccggaaaacgacaacacgaaatggaaaaggctacagccctctgcataaaccaaggacttggctgcctcgcaggcagcctccgttcctcccgctctcttgcgcgtgtgcttttgttttttattttgaacagacgttttaaaagaaaaaaaaacaactaccttctgtcctagaagacacagactgacagatggggtgaaggcctggggacctcagagaactctgccttgccctcgtccctcgtccttcggcagccggagaggctgtgggtgggccgagggtgtctaggggttctgcctggtcaacgttatttgtcgtcccatcttttggcagcaaaaccacctgcgtggctaggatgattaattatgaggatgatgattttttttgtgataacagtattgtgctttttgtggggaaagtgaggtttttttttatatacatatataattgatatctttaatttattggttgttaactgttgctgctgcctggtgtgtcctcagctcccagggctgcgggcccaccgtttacatgtgcacgccctgacccacctgcccacgccgacttgggaggatggtggcctgcagcggccaagaagccaaaaaaaattttttttttttcagatactgtgcttgatttttggagaggggagaggtggaaattcctaaatggctaatgcactgttccctccagcccgaatgcctcctgccaaaccccttttccctgctgcctctgtccccgcatccttgttctcccctgggtccgtaacattttttccgaggatgaacaggggacatctttaggtttctcaactcttgctttggtgtttgccgcagcatggaaaacagggcgcctaaggctgggagctggaagaaggggcattgggtacccaggcagagtcaggagaggtggtctttgaagtaagttagcagaaatcaaggggacccccgcctccttgggctggggaggggatttcaagatagttcatgactctctcccgctctgccttccctccttcctatctgctttttccagtaaactgcatggtgtccttccctggccttctcttggctcaaaggctgggagggagggaaggagagaagagttccaggcaatcccatcaatatagtccctacacctggggctgcggcccacatgtcttcacggaggcttccagcggtgcctgccactgaggcaggtgcggccccaggaccatcaccaggaatgcgaggccaccctggaccagaggtaggagcccaaggtccggcccttgctctttgattgtgggcagcctcctgccctctctgggtctcagttgccccatctgcagagcgaggaggcccgggctggttggtcttgaaggcccttttccatgccgacatcatgtcactctaggcctggggttcagtttcctgtggctggtgatgctgtggttaagtttgcttgaccccagcagcccgagggactgtctgagtcacagcacagcccctattgcgtggctgctggtgtgtggggtcagttccagcagatgaatgtgtcatgtggcacaccttgtcccttcccgcagcatttcctggttccccccagacccttgagcgctctttgggacccagaaggagtccttgcacagggaaggcttgaggtgagaagccgcttcccagactgtcagggccaggcctgggtctagaattcttgctgctgctttgcagagtcaacagcccatcagcccatgttttagaggggacactttggtcctcggttcccaccctcagcaagcaggcctccagcccgaggaaggcctctgccgtagtgacgttgccgtgtggggctgcgtggctgttccccttggctggagcattcagccaaccccagcgtcccccctgaggcgttcattggcagccccctaggactgcacgctggccccacggtaaccccccctcccccaccaacatcctgcagggatggggtcagtggttccaccttcacaggccactttgaagggtggattctttgaggcccctgccagtcggctccctgctcagctgctggcccgggcgacctgggactcagcaccaacggctgaagtttctcagctgggctctgacctggggtctggggcagggaacgaacatggtggctttgggctgagaggatgagggaggtctttcccaggtcaaattactttcctttggcctctgcctgaggctcgatttgcctctctggtccaatgggactgacactgttgtacaacctgacctgtggctgagggtgtctgggcttaagcatgtggaccccttcggtgtgtccggccttcctccatcgtcctgccctttggccttttggtttgaagccacaggtgtggcttctggccttagcagatggtatgcttgcggaccgcagcccagcatgccggtgggcccacagcccgagccagcccagagctgccggaagggccgcccttcccggccctggcggggtgctggacactggccattttcactagagtttgcctggcagggaccgatctctgccccctcctctccccaggcctctggctgcagtgatgccgcagaatcctgagccaggtgcctcctgagcagcccgtgcgcctctccacagcggcgtttgccacccaatgcggctcgcttcagatgctctgatgcagagggcacgcccatagtccctctgcagagcctcgcactggggccagggcaggcaccagccccaggcggccagtcggccacggcctgtcctcttcctcgtagcgtctgctcctcactttgtgttgatggtgacttaggagaatgttccgattttccatgatctaagcaggccacgtttaaaataacatcaaggcaagcgtacgtgtcaccctctgtactgacatctcttcccctgaaatgcttttcagtttgacagcccgtttcctagacaagtgcacctggggtttcaggaactttgtgttttttcggagggggttggtggggaggtcgggatgcctgggatcccttcctggagaggcaggctgtctctggaaaaagcctccattgcccacccgccaggcggaaagtcaccctgttcccagcgcggtttcagcatttaattttaagggagctaaggaagcgcggcgcgccccctggtggtggtaagccgccaacgcacctgggggctgcaaccccaccggacgggtggtccggagggaggctggagcggggaggcgaggagggggctgtgagtcctcagaggccctgggccaccacatttctggcagcgtttcccagacacccctctgctaggccatccctggatagcaagtgaattaacttaagggcactgtgatgggaagccttgcccccctcttttttttttttttttaatatctgcggaataaacccaatggttaatttttgaatgaataaaaggcttttgttgaataaacagctggtcccatcttctgtcttggcatcttagcatccaggctcaggctctgccccttctccaggatggggtagccccgagtcgccctccccagtctgcacattccctgttgtccctgttcctgcagtggctcccggccccagggaggcccacctcactcccagcctgactcggtggctggcttccttcaggactttgcgcaagtcagttctgctcattgggtctcaatttccccatcccttggatgggagcaagagtctctgctgggcctgcctcgcaggggcctggtgagacccaaatgtgagtgtcatcatcaaagcccctcacagaagtggaggacggtgcccaagagtagcggtttggactgctgctgcctcccacccggagcctgccacttgggggagaaattggtataatgcttgcaaaaacaaacaaacaaaaggcaatgtcttctggttgtggttatttcctttcctgcttgcctccccagccccctttgagtctctttttggggtgccgtcctgtctgaacctgccggtgtgtgtctctggggccagggtcagggcgaggcccaggggtggacaggggccgtgtagcatgccccagcctccccaagctcctgctgtatgtcgtccatgtcacgccaattaaacacgcttcctggacttgtcctcgcc

SEQ ID NO: 20046 - DNA, 6228 bp, Homo sapiens
  source 1..6228: mol_type = unassigned DNA
agccagaggggatagcttcgtcgagaacggaggacaccggcggtccagggtcctgggcagtcgcgccagagctgagcggagggcgcggcgcgagaacgaatctttgtgacattctctctcagcattctttatcccctgtttgctgaagacttcgacaaaagctggtcttagctgttggcattctcctgagaaaaggatagcttcagaaatcagaaaaacatttgggaggtgtctagcccagtggaccttctgaagagcaatgctaagaagacgtttggtttaaagaattaaaaggaagaacaacttaagagcttcttcaaagtttcccgcatgaaaattacttaaacgttgcacacaacgtttcacaaaatcttttgtgaaagaagaaaaggaaattcagtgtgtgagtctcagcaggagttaagctaatgcagcttaaaataatgccgaaaaagaagcgcttatctgcgggcagagtgcccctgattctcttcctgtgccagatgattagtgcactggaagtacctcttgatctggtacagcctccaaccatcacccaacagtctccaaaagattacattattgaccctcgggagaatattgtaatccagtgtgaagccaaagggaaaccgcccccaagcttttcctggacccgtaatgggactcattttgacatcgataaagaccctctggtcaccatgaagcctggcacaggaacgctcataattaacatcatgagcgaagggaaagctgagacctatgaaggagtctatcagtgtacagcaaggaacgaacgcggagctgcagtttctaataacattgttgtccgcccatccagatcaccattgtggaccaaagaaaaacttgaaccaatcacacttcaaagtggtcagtctttagtacttccctgcagacccccaattggattaccaccacctataatattttggatggataattcctttcaaagacttccacaaagtgagagagtttctcaaggtttgaatggggacctttatttttccaatgtcctcccagaggacacccgcgaagactatatctgttatgctagatttaatcatactcaaaccatacagcagaagcaacctatttctgtgaaggtgatttcagtggatgaattgaatgacactatagctgctaatttgagtgacactgagttttatggtgctaaatcaagtagagagaggccaccaacatttttaactccagaaggcaatgcaagtaacaaagaggaattaagaggaaatgtgctttcactggagtgcattgcagaaggactgcctaccccaattatttactgggcaaaggaagatggaatgctacccaaaaacaggacagtttataagaactttgagaaaaccttgcagatcattcatgtttcagaagcagactctggaaattaccaatgtatagcaaaaaacgcattaggagccatccaccataccatttctgttagagttaaagcggctccatactggatcacagcccctcaaaatcttgtgctgtccccaggagaggatgggaccttgatctgcagagctaatggcaaccccaaacccagaattagctggttaacaaatggagtcccaatagaaattgcccctgatgaccccagcagaaaaatagatggcgataccattattttttcaaatgttcaagaaagatcaagtgcagtctatcagtgcaatgcctctaatgaatatggatatttactggcaaacgcatttgtaaatgtgctggctgagccaccacgaatcctcacacctgcaaacacactctaccaggtcattgcaaacaggcctgctttactagactgtgccttctttgggtctcctctcccaaccatcgagtggtttaaaggagctaaaggaagtgctcttcatgaagatatttatgttttacatgaaaatggaactttggaaattcctgtggcccaaaaggacagtacaggaacttatacgtgtgttgcaaggaataaattagggatggcgaagaatgaagttcacttagaaatcaaagatcctacatggatcgttaaacagcccgaatatgcagttgtgcaaagagggagcatggtgtcctttgaatgcaaagtgaaacatgatcacaccttatccctcactgtcctgtggctgaaggacaacagggaactgcccagtgatgaaaggttcactgttgacaaggatcatctagtggtagctgatgtcagtgacgatgacagcgggacctacacgtgtgtggccaacaccactctggacagcgtctccgccagcgctgtgcttagcgttgttgatgtcccaaatcctccctttgacttagaactgacagatcaacttgacaaaagtgttcagctgtcatggaccccaggcgatgacaacaatagccccattacaaaattcatcatcgaatatgaagatgcaatgcacaagccagggctgtggcaccaccaaactgaagtttctggaacacagaccacagcccagctgaagctgtctccttacgtgaactactccttccgcgtgatggcagtgaacagcattgggaagagcttgcccagcgaggcgtctgagcagtatttgacgaaagcctcagaaccagataaaaaccccacagctgtggaaggactgggatcagagcctgataatttggtgattacgtggaagcccttgaatggtttcgaatctaatgggccaggccttcagtacaaagttagctggcgccagaaagatggtgatgatgaatggacatctgtggttgtggcaaatgtatccaaatatattgtctcaggcacgccaacctttgttccatacctgatcaaagttcaggccctgaatgacatggggtttgcccccgagccagctgtagtcatgggacattctggagaagacctcccaatggtggctcctgggaacgtgcgtgtgaatgtggtgaacagtaccttagccgaggtgcactgggacccagtacctctgaaaagcatccgaggacacctacaaggctatcggatttactattggaagacccagagttcatctaaaagaaacagacgtcacattgagaaaaagatcctcaccttccaaggcagcaagactcatggcatgttgccggggctagagccctttagccactacacactgaatgtccgagtggtcaatgggaaaggggagggcccagccagccctgacagagtctttaatactccagaaggagtccccagtgctccctcgtctttgaagattgtgaatccaacactggactctctcactttggaatgggatccaccgagccacccgaatggcattttgacagagtacaccttaaagtatcagccaattaacagcacacatgaattaggccctctggtagatttgaaaattcctgccaacaagacacggtggactttaaaaaatttaaatttcagcactcgatataagttttatttctatgcacaaacatcagcaggatcaggaagtcaaattacagaggaagcagtaacaactgtggatgaagcgatggcaagccggcaggtggatattgcaactcagggctggttcattggtctgatgtgtgctgttgctctccttatcttaattttgctgattgtttgcttcatcagaagaaacaagggtggtaaatatccagttaaagaaaaggaagatgcccatgctgaccctgaaatccagcctatgaaggaagatgatgggacatttggagaatacagtgatgcagaagaccacaagcctttgaaaaaaggaagtcgaactccttcagacaggactgtgaaaaaagaagatagtgacgacagcctagttgactatggagaaggggttaatggccagttcaatgaggatggctcctttattggacaatacagtggtaagaaagagaaagagccggctgaaggaaacgaaagctcagaggcaccttctcctgtcaacgccatgaattcctttgtttaatttttaagctctttgccaatattccatttctctagaatgtttatcctaagcacttgtttgtcagccctctcatactatgaacatatgggtagagagtatattttctgctgtatgttagtattatgagaatagttacagcaaaaacataactcagtcaaatgatatgttaatatgaactggaatgcaaagtgcatactttttcattcaaaatgggtattcttgatttcctcagaactgataaaaaataatgcaacatcaccaacagatcctgttatttcctctgcaggatacagttcaatatgatgcatgaaaaatgctccacatttaaaggacatacccgtgtatgttatgaaaacatggtttgatactttgtttatactaccctcagctgaacccctatatatgaattccgttttcattgtcaagaatgttactgtagtattctctagaacttcaatgtctttgtggacattgttgtgaaattggtgactatgtatagctgtcgttagtctttttgggagactgttaggaacagtttgtacagtatatacttgctaaatgagttcattatgacagtcacattgctgatgcttactgagaactattacctactcttggctcctgttactccgtaggcttcttaatcttccaggcattacagcagcacagtgttctactttttacatcatttctatgttcggttgtttttaggcataaacaatgtgtattgcagtgcatttcggcatttgtgccatactgaaagaatcaaaaacaaatcatccaaattaaatttcaaacattatttcagagaacacagggcaagacacatacagtgccttcagatattaagcattccacaacatcgtgcattctgtatcagctggtccagtccattctgggtcctagattactgtcattgtctaaaagtaacttttaaaaagcagagttcatgaaaactgcaatgctgggaaaagaaggaaacatgaaaataaaaataagacagtttattagaaatagcatttcctcataagcataaaaagaaaatctttgttgccaactgaagcacatgatgattttgtggtcctttatggtttctattacattcagtaagaaagatgtcaacatgctagaaaattaattttaaaactaagttattccaacactaaaagcatacaacagcatgccaacagtaatatattattctccaagactttacctatgtaagtgttcaaaactctgcagcattaaacaacgtgtatgcaaattgttatggatacatttcagaatctaagaaatcaggcaagtgcttaaaaggccaacggtccaagggattacatctgcagtttaaaaagtaaatatatattctatcgtattcataaacaatatctatcaaatgggttacctccaaatatgaaaatctataacaacctatggttgaaggaatgctcagtttcatttgccaataaattggtttctcataacttgcatcaagtttaattttaagtaaagctttttatatgtagatattttgttgaatttgtaaatacacttaaaatgtagatgctatatgcttataggtgttacatacaaataaacatgcaatgtttatgttgtactgtataagaggtaagctaattaatgcagtgaatgggattggaaagcatctacttaaatatctattgggttcccccctccccccaccttttttgctgtgaaactgaaatagtgaacttttctacgtattgacagcagatttttcgatgaaatcttcagagctttgcctatggggcacagtaggcctagtaacctggcatgtttgatatatgtaggtaaagcataatttaaagtaatcccaggtaaagatggccctaaatactttcatgtctctatattcatttttcacagatccacctgtctcttgaaaatataaaaagacaaaacaggtttgccttggcatcagagagcacaaagattaaaagttactttaaatttgccaatattttgggagaacaataaaactacattttttcctcttccatactggtagatgcgaaatttatctgtgcatgaaagggtcacttctgtaatagtgcaacagatttggtattaaaaattaaatgtggttttaaaagttcctctctcttttgtaatttatgttcccaattgagtgtgaatgtccaagtaatggtgtatgtaatggtacaggcaaatgtgactggatttccctcaaaaaagtaactattaaaca

SEQ ID NO: 20047 - DNA, 4182 bp, Homo sapiens
  source 1..4182: mol_type = unassigned DNA
cgcgcgggcgcgggggacggcgcaggggccgcctggctggagcagccagaggggatagcttcgtcgagaacggaggacaccggcggtccagggtcctgggcagtcgcgccagagctgagcggagggcgcggcgcgagaacgaatctttgtgacattctctctcagcattctttatcccctgtttgctgaagacttcgacaaaagctggtcttagctgttggcattctcctgagaaaaggatagcttcagaaatcagaaaaacatttgggaggtgtctagcccagtggaccttctgaagagcaatgctaagaagacgtttggtttaaagaattaaaaggaagaacaacttaagagcttcttcaaagtttcccgcatgaaaattacttaaacgttgcacacaacgtttcacaaaatcttttgtgaaagaagaaaaggaaattcagtgtgtgagtctcagcaggagttaagctaatgcagcttaaaataatgccgaaaaagaagcgcttatctgcgggcagagtgcccctgattctcttcctgtgccagatgattagtgcactggaagtacctcttgatcaaaaatctactgaagtaatggtacagcctccaaccatcacccaacagtctccaaaagattacattattgaccctcgggagaatattgtaatccagtgtgaagccaaagggaaaccgcccccaagcttttcctggacccgtaatgggactcattttgacatcgataaagaccctctggtcaccatgaagcctggcacaggaacgctcataattaacatcatgagcgaagggaaagctgagacctatgaaggagtctatcagtgtacagcaaggaacgaacgcggagctgcagtttctaataacattgttgtccgcccatccagatcaccattgtggaccaaagaaaaacttgaaccaatcacacttcaaagtggtcagtctttagtacttccctgcagacccccaattggattaccaccacctataatattttggatggataattcctttcaaagacttccacaaagtgagagagtttctcaaggtttgaatggggacctttatttttccaatgtcctcccagaggacacccgcgaagactatatctgttatgctagatttaatcatactcaaaccatacagcagaagcaacctatttctgtgaaggtgatttcagtggatgaattgaatgacactatagctgctaatttgagtgacactgagttttatggtgctaaatcaagtagagagaggccaccaacatttttaactccagaaggcaatgcaagtaacaaagaggaattaagaggaaatgtgctttcactggagtgcattgcagaaggactgcctaccccaattatttactgggcaaaggaagatggaatgctacccaaaaacaggacagtttataagaactttgagaaaaccttgcagatcattcatgtttcagaagcagactctggaaattaccaatgtatagcaaaaaacgcattaggagccatccaccataccatttctgttagagttaaagcggctccatactggatcacagcccctcaaaatcttgtgctgtccccaggagaggatgggaccttgatctgcagagctaatggcaaccccaaacccagaattagctggttaacaaatggagtcccaatagaaattgcccctgatgaccccagcagaaaaatagatggcgataccattattttttcaaatgttcaagaaagatcaagtgcagtctatcagtgcaatgcctctaatgaatatggatatttactggcaaacgcatttgtaaatgtgctggctgagccaccacgaatcctcacacctgcaaacacactctaccaggtcattgcaaacaggcctgctttactagactgtgccttctttgggtctcctctcccaaccatcgagtggtttaaaggagctaaaggaagtgctcttcatgaagatatttatgttttacatgaaaatggaactttggaaattcctgtggcccaaaaggacagtacaggaacttatacgtgtgttgcaaggaataaattagggatggcgaagaatgaagttcacttagaaatcaaagatcctacatggatcgttaaacagcccgaatatgcagttgtgcaaagagggagcatggtgtcctttgaatgcaaagtgaaacatgatcacaccttatccctcactgtcctgtggctgaaggacaacagggaactgcccagtgatgaaaggttcactgttgacaaggatcatctagtggtagctgatgtcagtgacgatgacagcgggacctacacgtgtgtggccaacaccactctggacagcgtctccgccagcgctgtgcttagcgttgttgctcctactccaactccagctcccgtttacgatgtcccaaatcctccctttgacttagaactgacagatcaacttgacaaaagtgttcagctgtcatggaccccaggcgatgacaacaatagccccattacaaaattcatcatcgaatatgaagatgcaatgcacaagccagggctgtggcaccaccaaactgaagtttctggaacacagaccacagcccagctgaagctgtctccttacgtgaactactccttccgcgtgatggcagtgaacagcattgggaagagcttgcccagcgaggcgtctgagcagtatttgacgaaagcctcagaaccagataaaaaccccacagctgtggaaggactgggatcagagcctgataatttggtgattacgtggaagcccttgaatggtttcgaatctaatgggccaggccttcagtacaaagttagctggcgccagaaagatggtgatgatgaatggacatctgtggttgtggcaaatgtatccaaatatattgtctcaggcacgccaacctttgttccatacctgatcaaagttcaggccctgaatgacatggggtttgcccccgagccagctgtagtcatgggacattctggagaagacctcccaatggtggctcctgggaacgtgcgtgtgaatgtggtgaacagtaccttagccgaggtgcactgggacccagtacctctgaaaagcatccgaggacacctacaaggctatcggatttactattggaagacccagagttcatctaaaagaaacagacgtcacattgagaaaaagatcctcaccttccaaggcagcaagactcatggcatgttgccggggctagagccctttagccactacacactgaatgtccgagtggtcaatgggaaaggggagggcccagccagccctgacagagtctttaatactccagaaggagtccccagtgctccctcgtctttgaagattgtgaatccaacactggactctctcactttggaatgggatccaccgagccacccgaatggcattttgacagagtacaccttaaagtatcagccaattaacagcacacatgaattaggccctctggtagatttgaaaattcctgccaacaagacacggtggactttaaaaaatttaaatttcagcactcgatataagttttatttctatgcacaaacatcagcaggatcaggaagtcaaattacagaggaagcagtaacaactgtggatgaagctggtattcttccacctgatgtaggtgcaggcaaagttcaagcagtaaatcccaggatcagcaatcttactgctgcagctgctgagacctatgccaatatcagttgggaatatgagggaccagagcatgtgaacttttatgttgaatatggtgtagcaggcagcaaagaagaatggagaaaagaaattgtaaatggttctcggagcttctttgggttaaagggtctaatgccaggaacagcatacaaagttcgagttggtgctgtgggggactctggttttgtgagttcagaggatgtgtttgagacaggcccagcgatggcaagccggcaggtggatattgcaactcagggctggttcattggtctgatgtgtgctgttgctctccttatcttaattttgctgattgtttgcttcatcagaagaaacaagggtggtaaatatccagttaaagaaaaggaagatgcccatgctgaccctgaaatccagcctatgaaggaagatgatgggacatttggagaatacaggctgttttcatttgtttcttctgcatccttttaa

SEQ ID NO: 20048 - DNA, 5782 bp, Homo sapiens
  source 1..5782: mol_type = unassigned DNA
cgtcgagaacggaggacaccggcggtccagggtcctgggcagtcgcgccagagctgagcggagggcgcggcgcgagaacgaatctttgtgacattctctctcagcattctttatcccctgtttgctgaagacttcgacaaaagctggtcttagctgttggcattctcctgagaaaaggatagcttcagaaatcagaaaaacatttgggaggtgtctagcccagtggaccttctgaagagcaatgctaagaagacgtttggtttaaagaattaaaaggaagaacaacttaagagcttcttcaaagtttcccgcatgaaaattacttaaacgttgcacacaacgtttcacaaaatcttttgtgaaagaagaaaaggaaattcagtgtgtgagtctcagcaggagttaagctaatgcagcttaaaataatgccgaaaaagaagcgcttatctgcgggcagagtgcccctgattctcttcctgtgccagatgattagtgcactggaagtacctcttgatccaaaacttcttgaagacttggtacagcctccaaccatcacccaacagtctccaaaagattacattattgaccctcgggagaatattgtaatccagtgtgaagccaaagggaaaccgcccccaagcttttcctggacccgtaatgggactcattttgacatcgataaagaccctctggtcaccatgaagcctggcacaggaacgctcataattaacatcatgagcgaagggaaagctgagacctatgaaggagtctatcagtgtacagcaaggaacgaacgcggagctgcagtttctaataacattgttgtccgcccatccagatcaccattgtggaccaaagaaaaacttgaaccaatcacacttcaaagtggtcagtctttagtacttccctgcagacccccaattggattaccaccacctataatattttggatggataattcctttcaaagacttccacaaagtgagagagtttctcaaggtttgaatggggacctttatttttccaatgtcctcccagaggacacccgcgaagactatatctgttatgctagatttaatcatactcaaaccatacagcagaagcaacctatttctgtgaaggtgatttcagctaaatcaagtagagagaggccaccaacatttttaactccagaaggcaatgcaagtaacaaagaggaattaagaggaaatgtgctttcactggagtgcattgcagaaggactgcctaccccaattatttactgggcaaaggaagatggaatgctacccaaaaacaggacagtttataagaactttgagaaaaccttgcagatcattcatgtttcagaagcagactctggaaattaccaatgtatagcaaaaaacgcattaggagccatccaccataccatttctgttagagttaaagcggctccatactggatcacagcccctcaaaatcttgtgctgtccccaggagaggatgggaccttgatctgcagagctaatggcaaccccaaacccagaattagctggttaacaaatggagtcccaatagaaattgcccctgatgaccccagcagaaaaatagatggcgataccattattttttcaaatgttcaagaaagatcaagtgcagtctatcagtgcaatgcctctaatgaatatggatatttactggcaaacgcatttgtaaatgtgctggctgagccaccacgaatcctcacacctgcaaacacactctaccaggtcattgcaaacaggcctgctttactagactgtgccttctttgggtctcctctcccaaccatcgagtggtttaaaggagctaaaggaagtgctcttcatgaagatatttatgttttacatgaaaatggaactttggaaattcctgtggcccaaaaggacagtacaggaacttatacgtgtgttgcaaggaataaattagggatggcgaagaatgaagttcacttagaaatcaaagatcctacatggatcgttaaacagcccgaatatgcagttgtgcaaagagggagcatggtgtcctttgaatgcaaagtgaaacatgatcacaccttatccctcactgtcctgtggctgaaggacaacagggaactgcccagtgatgaaaggttcactgttgacaaggatcatctagtggtagctgatgtcagtgacgatgacagcgggacctacacgtgtgtggccaacaccactctggacagcgtctccgccagcgctgtgcttagcgttgttgctcctactccaactccagctcccgtttacgatgtcccaaatcctccctttgacttagaactgacagatcaacttgacaaaagtgttcagctgtcatggaccccaggcgatgacaacaatagccccattacaaaattcatcatcgaatatgaagatgcaatgcacaagccagggctgtggcaccaccaaactgaagtttctggaacacagaccacagcccagctgaagctgtctccttacgtgaactactccttccgcgtgatggcagtgaacagcattgggaagagcttgcccagcgaggcgtctgagcagtatttgacgaaagcctcagaaccagataaaaaccccacagctgtggaaggactgggatcagagcctgataatttggtgattacgtggaagcccttgaatggtttcgaatctaatgggccaggccttcagtacaaagttagctggcgccagaaagatggtgatgatgaatggacatctgtggttgtggcaaatgtatccaaatatattgtctcaggcacgccaacctttgttccatacctgatcaaagttcaggccctgaatgacatggggtttgcccccgagccagctgtagtcatgggacattctggagaagacctcccaatggtggctcctgggaacgtgcgtgtgaatgtggtgaacagtaccttagccgaggtgcactgggacccagtacctctgaaaagcatccgaggacacctacaaggctatcggatttactattggaagacccagagttcatctaaaagaaacagacgtcacattgagaaaaagatcctcaccttccaaggcagcaagactcatggcatgttgccggggctagagccctttagccactacacactgaatgtccgagtggtcaatgggaaaggggagggcccagccagccctgacagagtctttaatactccagaaggagtccccagtgctccctcgtctttgaagattgtgaatccaacactggactctctcactttggaatgggatccaccgagccacccgaatggcattttgacagagtacaccttaaagtatcagccaattaacagcacacatgaattaggccctctggtagatttgaaaattcctgccaacaagacacggtggactttaaaaaatttaaatttcagcactcgatataagttttatttctatgcacaaacatcagcaggatcaggaagtcaaattacagaggaagcagtaacaactgtggatgaagctggtattcttccacctgatgtaggtgcaggcaaagcgatggcaagccggcaggtggatattgcaactcagggctggttcattggtctgatgtgtgctgttgctctccttatcttaattttgctgattgtttgcttcatcagaagaaacaagggtggtaaatatccagttaaagaaaaggaagatgcccatgctgaccctgaaatccagcctatgaaggaagatgatgggacatttggagaatacagtgatgcagaagaccacaagcctttgaaaaaaggaagtcgaactccttcagacaggactgtgaaaaaagaagatagtgacgacagcctagttgactatggagaaggggttaatggccagttcaatgaggatggctcctttattggacaatacagtggtaagaaagagaaagagccggctgaaggaaacgaaagctcagaggcaccttctcctgtcaacgccatgaattcctttgtttaatttttaagctctttgccaatattccatttctctagaatgtttatcctaagcacttgtttgtcagccctctcatactatgaacatatgggtagagagtatattttctgctgtatgttagtattatgagaatagttacagcaaaaacataactcagtcaaatgatatgttaatatgaactggaatgcaaagtgcatactttttcattcaaaatgggtattcttgatttcctcagaactgataaaaaataatgcaacatcaccaacagatcctgttatttcctctgcaggatacagttcaatatgatgcatgaaaaatgctccacatttaaaggacatacccgtgtatgttatgaaaacatggtttgatactttgtttatactaccctcagctgaacccctatatatgaattccgttttcattgtcaagaatgttactgtagtattctctagaacttcaatgtctttgtggacattgttgtgaaattggtgactatgtatagctgtcgttagtctttttgggagactgttaggaacagtttgtacagtatatacttgctaaatgagttcattatgacagtcacattgctgatgcttactgagaactattacctactcttggctcctgttactccgtaggcttcttaatcttccaggcattacagcagcacagtgttctactttttacatcatttctatgttcggttgtttttaggcataaacaatgtgtattgcagtgcatttcggcatttgtgccatactgaaagaatcaaaaacaaatcatccaaattaaatttcaaacattatttcagagaacacagggcaagacacatacagtgccttcagatattaagcattccacaacatcgtgcattctgtatcagctggtccagtccattctgggtcctagattactgtcattgtctaaaagtaacttttaaaaagcagagttcatgaaaactgcaatgctgggaaaagaaggaaacatgaaaataaaaataagacagtttattagaaatagcatttcctcataagcataaaaagaaaatctttgttgccaactgaagcacatgatgattttgtggtcctttatggtttctattacattcagtaagaaagatgtcaacatgctagaaaattaattttaaaactaagttattccaacactaaaagcatacaacagcatgccaacagtaatatattattctccaagactttacctatgtaagtgttcaaaactctgcagcattaaacaacgtgtatgcaaattgttatggatacatttcagaatctaagaaatcaggcaagtgcttaaaaggccaacggtccaagggattacatctgcagtttaaaaagtaaatatatattctatcgtattcataaacaatatctatcaaatgggttacctccaaatatgaaaatctataacaacctatggttgaaggaatgctcagtttcatttgccaataaattggtttctcataacttgcatcaagtttaattttaagtaaagctttttatatgtagatattttgttgaatttgtaaatacacttaaaatgtagatgctatatgcttataggtgttacatacaaataaacatgcaatgtttatgttgtactgtataagaggtaagctaattaatgcagtgaatgggattggaaagcatctacttaaatatctattgggttcccccctccccccaccttttttgctgtgaaactgaaatagtgaacttttctacgtattgacagcagatttttcgatgaaatcttcagagctttgcctatggggcaca

SEQ ID NO: 20049 - DNA, 6659 bp, Homo sapiens
  source 1..6659: mol_type = unassigned DNA
cgcgcgggcgcgggggacggcgcaggggccgcctggctggagcagccagaggggatagcttcgtcgagaacggaggacaccggcggtccagggtcctgggcagtcgcgccagagctgagcggagggcgcggcgcgagaacgaatctttgtgacattctctctcagcattctttatcccctgtttgctgaagacttcgacaaaagctggtcttagctgttggcattctcctgagaaaaggatagcttcagaaatcagaaaaacatttgggaggtgtctagcccagtggaccttctgaagagcaatgctaagaagacgtttggtttaaagaattaaaaggaagaacaacttaagagcttcttcaaagtttcccgcatgaaaattacttaaacgttgcacacaacgtttcacaaaatcttttgtgaaagaagaaaaggaaattcagtgtgtgagtctcagcaggagttaagctaatgcagcttaaaataatgccgaaaaagaagcgcttatctgcgggcagagtgcccctgattctcttcctgtgccagatgattagtgcactggaagtacctcttgatccaaaacttcttgaagacttggtacagcctccaaccatcacccaacagtctccaaaagattacattattgaccctcgggagaatattgtaatccagtgtgaagccaaagggaaaccgcccccaagcttttcctggacccgtaatgggactcattttgacatcgataaagaccctctggtcaccatgaagcctggcacaggaacgctcataattaacatcatgagcgaagggaaagctgagacctatgaaggagtctatcagtgtacagcaaggaacgaacgcggagctgcagtttctaataacattgttgtccgcccatccagatcaccattgtggaccaaagaaaaacttgaaccaatcacacttcaaagtggtcagtctttagtacttccctgcagacccccaattggattaccaccacctataatattttggatggataattcctttcaaagacttccacaaagtgagagagtttctcaaggtttgaatggggacctttatttttccaatgtcctcccagaggacacccgcgaagactatatctgttatgctagatttaatcatactcaaaccatacagcagaagcaacctatttctgtgaaggtgatttcagtggatgaattgaatgacactatagctgctaatttgagtgacactgagttttatggtgctaaatcaagtagagagaggccaccaacatttttaactccagaaggcaatgcaagtaacaaagaggaattaagaggaaatgtgctttcactggagtgcattgcagaaggactgcctaccccaattatttactgggcaaaggaagatggaatgctacccaaaaacaggacagtttataagaactttgagaaaaccttgcagatcattcatgtttcagaagcagactctggaaattaccaatgtatagcaaaaaacgcattaggagccatccaccataccatttctgttagagttaaagcggctccatactggatcacagcccctcaaaatcttgtgctgtccccaggagaggatgggaccttgatctgcagagctaatggcaaccccaaacccagaattagctggttaacaaatggagtcccaatagaaattgcccctgatgaccccagcagaaaaatagatggcgataccattattttttcaaatgttcaagaaagatcaagtgcagtctatcagtgcaatgcctctaatgaatatggatatttactggcaaacgcatttgtaaatgtgctggctgagccaccacgaatcctcacacctgcaaacacactctaccaggtcattgcaaacaggcctgctttactagactgtgccttctttgggtctcctctcccaaccatcgagtggtttaaaggagctaaaggaagtgctcttcatgaagatatttatgttttacatgaaaatggaactttggaaattcctgtggcccaaaaggacagtacaggaacttatacgtgtgttgcaaggaataaattagggatggcgaagaatgaagttcacttagaaatcaaagatcctacatggatcgttaaacagcccgaatatgcagttgtgcaaagagggagcatggtgtcctttgaatgcaaagtgaaacatgatcacaccttatccctcactgtcctgtggctgaaggacaacagggaactgcccagtgatgaaaggttcactgttgacaaggatcatctagtggtagctgatgtcagtgacgatgacagcgggacctacacgtgtgtggccaacaccactctggacagcgtctccgccagcgctgtgcttagcgttgttgctcctactccaactccagctcccgtttacgatgtcccaaatcctccctttgacttagaactgacagatcaacttgacaaaagtgttcagctgtcatggaccccaggcgatgacaacaatagccccattacaaaattcatcatcgaatatgaagatgcaatgcacaagccagggctgtggcaccaccaaactgaagtttctggaacacagaccacagcccagctgaagctgtctccttacgtgaactactccttccgcgtgatggcagtgaacagcattgggaagagcttgcccagcgaggcgtctgagcagtatttgacgaaagcctcagaaccagataaaaaccccacagctgtggaaggactgggatcagagcctgataatttggtgattacgtggaagcccttgaatggtttcgaatctaatgggccaggccttcagtacaaagttagctggcgccagaaagatggtgatgatgaatggacatctgtggttgtggcaaatgtatccaaatatattgtctcaggcacgccaacctttgttccatacctgatcaaagttcaggccctgaatgacatggggtttgcccccgagccagctgtagtcatgggacattctggagaagacctcccaatggtggctcctgggaacgtgcgtgtgaatgtggtgaacagtaccttagccgaggtgcactgggacccagtacctctgaaaagcatccgaggacacctacaaggctatcggatttactattggaagacccagagttcatctaaaagaaacagacgtcacattgagaaaaagatcctcaccttccaaggcagcaagactcatggcatgttgccggggctagagccctttagccactacacactgaatgtccgagtggtcaatgggaaaggggagggcccagccagccctgacagagtctttaatactccagaaggagtccccagtgctccctcgtctttgaagattgtgaatccaacactggactctctcactttggaatgggatccaccgagccacccgaatggcattttgacagagtacaccttaaagtatcagccaattaacagcacacatgaattaggccctctggtagatttgaaaattcctgccaacaagacacggtggactttaaaaaatttaaatttcagcactcgatataagttttatttctatgcacaaacatcagcaggatcaggaagtcaaattacagaggaagcagtaacaactgtggatgaagctggtattcttccacctgatgtaggtgcaggcaaagttcaagcagtaaatcccaggatcagcaatcttactgctgcagctgctgagacctatgccaatatcagttgggaatatgagggaccagagcatgtgaacttttatgttgaatatggtgtagcaggcagcaaagaagaatggagaaaagaaattgtaaatggttctcggagcttctttgggttaaagggtctaatgccaggaacagcatacaaagttcgagttggtgctgtgggggactctggttttgtgagttcagaggatgtgtttgagacaggcccagcgatggcaagccggcaggtggatattgcaactcagggctggttcattggtctgatgtgtgctgttgctctccttatcttaattttgctgattgtttgcttcatcagaagaaacaagggtggtaaatatccagttaaagaaaaggaagatgcccatgctgaccctgaaatccagcctatgaaggaagatgatgggacatttggagaatacagtgatgcagaagaccacaagcctttgaaaaaaggaagtcgaactccttcagacaggactgtgaaaaaagaagatagtgacgacagcctagttgactatggagaaggggttaatggccagttcaatgaggatggctcctttattggacaatacagtggtaagaaagagaaagagccggctgaaggaaacgaaagctcagaggcaccttctcctgtcaacgccatgaattcctttgtttaatttttaagctctttgccaatattccatttctctagaatgtttatcctaagcacttgtttgtcagccctctcatactatgaacatatgggtagagagtatattttctgctgtatgttagtattatgagaatagttacagcaaaaacataactcagtcaaatgatatgttaatatgaactggaatgcaaagtgcatactttttcattcaaaatgggtattcttgatttcctcagaactgataaaaaataatgcaacatcaccaacagatcctgttatttcctctgcaggatacagttcaatatgatgcatgaaaaatgctccacatttaaaggacatacccgtgtatgttatgaaaacatggtttgatactttgtttatactaccctcagctgaacccctatatatgaattccgttttcattgtcaagaatgttactgtagtattctctagaacttcaatgtctttgtggacattgttgtgaaattggtgactatgtatagctgtcgttagtctttttgggagactgttaggaacagtttgtacagtatatacttgctaaatgagttcattatgacagtcacattgctgatgcttactgagaactattacctactcttggctcctgttactccgtaggcttcttaatcttccaggcattacagcagcacagtgttctactttttacatcatttctatgttcggttgtttttaggcataaacaatgtgtattgcagtgcatttcggcatttgtgccatactgaaagaatcaaaaacaaatcatccaaattaaatttcaaacattatttcagagaacacagggcaagacacatacagtgccttcagatattaagcattccacaacatcgtgcattctgtatcagctggtccagtccattctgggtcctagattactgtcattgtctaaaagtaacttttaaaaagcagagttcatgaaaactgcaatgctgggaaaagaaggaaacatgaaaataaaaataagacagtttattagaaatagcatttcctcataagcataaaaagaaaatctttgttgccaactgaagcacatgatgattttgtggtcctttatggtttctattacattcagtaagaaagatgtcaacatgctagaaaattaattttaaaactaagttattccaacactaaaagcatacaacagcatgccaacagtaatatattattctccaagactttacctatgtaagtgttcaaaactctgcagcattaaacaacgtgtatgcaaattgttatggatacatttcagaatctaagaaatcaggcaagtgcttaaaaggccaacggtccaagggattacatctgcagtttaaaaagtaaatatatattctatcgtattcataaacaatatctatcaaatgggttacctccaaatatgaaaatctataacaacctatggttgaaggaatgctcagtttcatttgccaataaattggtttctcataacttgcatcaagtttaattttaagtaaagctttttatatgtagatattttgttgaatttgtaaatacacttaaaatgtagatgctatatgcttataggtgttacatacaaataaacatgcaatgtttatgttgtactgtataagaggtaagctaattaatgcagtgaatgggattggaaagcatctacttaaatatctattgggttcccccctccccccaccttttttgctgtgaaactgaaatagtgaacttttctacgtattgacagcagatttttcgatgaaatcttcagagctttgcctatggggcacagtaggcctagtaacctggcatgtttgatatatgtaggtaaagcataatttaaagtaatcccaggtaaagatggccctaaatactttcatgtctctatattcatttttcacagatccacctgtctcttgaaaatataaaaagacaaaacaggtttgccttggcatcagagagcacaaagattaaaagttactttaaatttgccaatattttgggagaacaataaaactacattttttcctcttccatactggtagatgcgaaatttatctgtgcatgaaagggtcacttctgtaatagtgcaacagatttggtattaaaaattaaatgtggttttaaaagttcctctctcttttgtaatttatgttcccaattgagtgtgaatgtccaagtaatggtgtatgtaatggtacaggcaaatgtgactggatttccctcaaaaaagtaactattaaacagtcttgatctctttgtgacttttaa

SEQ ID NO: 20050 - DNA, 6671 bp, Homo sapiens
  source 1..6671: mol_type = unassigned DNA
cgcgcgggcgcgggggacggcgcaggggccgcctggctggagcagccagaggggatagcttcgtcgagaacggaggacaccggcggtccagggtcctgggcagtcgcgccagagctgagcggagggcgcggcgcgagaacgaatctttgtgacattctctctcagcattctttatcccctgtttgctgaagacttcgacaaaagctggtcttagctgttggcattctcctgagaaaaggatagcttcagaaatcagaaaaacatttgggaggtgtctagcccagtggaccttctgaagagcaatgctaagaagacgtttggtttaaagaattaaaaggaagaacaacttaagagcttcttcaaagtttcccgcatgaaaattacttaaacgttgcacacaacgtttcacaaaatcttttgtgaaagaagaaaaggaaattcagtgtgtgagtctcagcaggagttaagctaatgcagcttaaaataatgccgaaaaagaagcgcttatctgcgggcagagtgcccctgattctcttcctgtgccagatgattagtgcactggaagtacctcttgatcaaaaatctactgaagtaatggtacagcctccaaccatcacccaacagtctccaaaagattacattattgaccctcgggagaatattgtaatccagtgtgaagccaaagggaaaccgcccccaagcttttcctggacccgtaatgggactcattttgacatcgataaagaccctctggtcaccatgaagcctggcacaggaacgctcataattaacatcatgagcgaagggaaagctgagacctatgaaggagtctatcagtgtacagcaaggaacgaacgcggagctgcagtttctaataacattgttgtccgcccatccagatcaccattgtggaccaaagaaaaacttgaaccaatcacacttcaaagtggtcagtctttagtacttccctgcagacccccaattggattaccaccacctataatattttggatggataattcctttcaaagacttccacaaagtgagagagtttctcaaggtttgaatggggacctttatttttccaatgtcctcccagaggacacccgcgaagactatatctgttatgctagatttaatcatactcaaaccatacagcagaagcaacctatttctgtgaaggtgatttcagtggatgaattgaatgacactatagctgctaatttgagtgacactgagttttatggtgctaaatcaagtagagagaggccaccaacatttttaactccagaaggcaatgcaagtaacaaagaggaattaagaggaaatgtgctttcactggagtgcattgcagaaggactgcctaccccaattatttactgggcaaaggaagatggaatgctacccaaaaacaggacagtttataagaactttgagaaaaccttgcagatcattcatgtttcagaagcagactctggaaattaccaatgtatagcaaaaaacgcattaggagccatccaccataccatttctgttagagttaaagcggctccatactggatcacagcccctcaaaatcttgtgctgtccccaggagaggatgggaccttgatctgcagagctaatggcaaccccaaacccagaattagctggttaacaaatggagtcccaatagaaattgcccctgatgaccccagcagaaaaatagatggcgataccattattttttcaaatgttcaagaaagatcaagtgcagtctatcagtgcaatgcctctaatgaatatggatatttactggcaaacgcatttgtaaatgtgctggctgagccaccacgaatcctcacacctgcaaacacactctaccaggtcattgcaaacaggcctgctttactagactgtgccttctttgggtctcctctcccaaccatcgagtggtttaaaggagctaaaggaagtgctcttcatgaagatatttatgttttacatgaaaatggaactttggaaattcctgtggcccaaaaggacagtacaggaacttatacgtgtgttgcaaggaataaattagggatggcgaagaatgaagttcacttagaaatcaaagatcctacatggatcgttaaacagcccgaatatgcagttgtgcaaagagggagcatggtgtcctttgaatgcaaagtgaaacatgatcacaccttatccctcactgtcctgtggctgaaggacaacagggaactgcccagtgatgaaaggttcactgttgacaaggatcatctagtggtagctgatgtcagtgacgatgacagcgggacctacacgtgtgtggccaacaccactctggacagcgtctccgccagcgctgtgcttagcgttgttgctcctactccaactccagctcccgtttacgatgtcccaaatcctccctttgacttagaactgacagatcaacttgacaaaagtgttcagctgtcatggaccccaggcgatgacaacaatagccccattacaaaattcatcatcgaatatgaagatgcaatgcacaagccagggctgtggcaccaccaaactgaagtttctggaacacagaccacagcccagctgaagctgtctccttacgtgaactactccttccgcgtgatggcagtgaacagcattgggaagagcttgcccagcgaggcgtctgagcagtatttgacgaaagcctcagaaccagataaaaaccccacagctgtggaaggactgggatcagagcctgataatttggtgattacgtggaagcccttgaatggtttcgaatctaatgggccaggccttcagtacaaagttagctggcgccagaaagatggtgatgatgaatggacatctgtggttgtggcaaatgtatccaaatatattgtctcaggcacgccaacctttgttccatacctgatcaaagttcaggccctgaatgacatggggtttgcccccgagccagctgtagtcatgggacattctggagaagacctcccaatggtggctcctgggaacgtgcgtgtgaatgtggtgaacagtaccttagccgaggtgcactgggacccagtacctctgaaaagcatccgaggacacctacaaggctatcggatttactattggaagacccagagttcatctaaaagaaacagacgtcacattgagaaaaagatcctcaccttccaaggcagcaagactcatggcatgttgccggggctagagccctttagccactacacactgaatgtccgagtggtcaatgggaaaggggagggcccagccagccctgacagagtctttaatactccagaaggagtccccagtgctccctcgtctttgaagattgtgaatccaacactggactctctcactttggaatgggatccaccgagccacccgaatggcattttgacagagtacaccttaaagtatcagccaattaacagcacacatgaattaggccctctggtagatttgaaaattcctgccaacaagacacggtggactttaaaaaatttaaatttcagcactcgatataagttttatttctatgcacaaacatcagcaggatcaggaagtcaaattacagaggaagcagtaacaactgtggatgaagctggtattcttccacctgatgtaggtgcaggcaaagttcaagcagtaaatcccaggatcagcaatcttactgctgcagctgctgagacctatgccaatatcagttgggaatatgagggaccagagcatgtgaacttttatgttgaatatggtgtagcaggcagcaaagaagaatggagaaaagaaattgtaaatggttctcggagcttctttgggttaaagggtctaatgccaggaacagcatacaaagttcgagttggtgctgtgggggactctggttttgtgagttcagaggatgtgtttgagacaggcccagcgatggcaagccggcaggtggatattgcaactcagggctggttcattggtctgatgtgtgctgttgctctccttatcttaattttgctgattgtttgcttcatcagaagaaacaagggtggtaaatatccagttaaagaaaaggaagatgcccatgctgaccctgaaatccagcctatgaaggaagatgatgggacatttggagaatacagttcattgaaaaatgatgcagaagaccacaagcctttgaaaaaaggaagtcgaactccttcagacaggactgtgaaaaaagaagatagtgacgacagcctagttgactatggagaaggggttaatggccagttcaatgaggatggctcctttattggacaatacagtggtaagaaagagaaagagccggctgaaggaaacgaaagctcagaggcaccttctcctgtcaacgccatgaattcctttgtttaatttttaagctctttgccaatattccatttctctagaatgtttatcctaagcacttgtttgtcagccctctcatactatgaacatatgggtagagagtatattttctgctgtatgttagtattatgagaatagttacagcaaaaacataactcagtcaaatgatatgttaatatgaactggaatgcaaagtgcatactttttcattcaaaatgggtattcttgatttcctcagaactgataaaaaataatgcaacatcaccaacagatcctgttatttcctctgcaggatacagttcaatatgatgcatgaaaaatgctccacatttaaaggacatacccgtgtatgttatgaaaacatggtttgatactttgtttatactaccctcagctgaacccctatatatgaattccgttttcattgtcaagaatgttactgtagtattctctagaacttcaatgtctttgtggacattgttgtgaaattggtgactatgtatagctgtcgttagtctttttgggagactgttaggaacagtttgtacagtatatacttgctaaatgagttcattatgacagtcacattgctgatgcttactgagaactattacctactcttggctcctgttactccgtaggcttcttaatcttccaggcattacagcagcacagtgttctactttttacatcatttctatgttcggttgtttttaggcataaacaatgtgtattgcagtgcatttcggcatttgtgccatactgaaagaatcaaaaacaaatcatccaaattaaatttcaaacattatttcagagaacacagggcaagacacatacagtgccttcagatattaagcattccacaacatcgtgcattctgtatcagctggtccagtccattctgggtcctagattactgtcattgtctaaaagtaacttttaaaaagcagagttcatgaaaactgcaatgctgggaaaagaaggaaacatgaaaataaaaataagacagtttattagaaatagcatttcctcataagcataaaaagaaaatctttgttgccaactgaagcacatgatgattttgtggtcctttatggtttctattacattcagtaagaaagatgtcaacatgctagaaaattaattttaaaactaagttattccaacactaaaagcatacaacagcatgccaacagtaatatattattctccaagactttacctatgtaagtgttcaaaactctgcagcattaaacaacgtgtatgcaaattgttatggatacatttcagaatctaagaaatcaggcaagtgcttaaaaggccaacggtccaagggattacatctgcagtttaaaaagtaaatatatattctatcgtattcataaacaatatctatcaaatgggttacctccaaatatgaaaatctataacaacctatggttgaaggaatgctcagtttcatttgccaataaattggtttctcataacttgcatcaagtttaattttaagtaaagctttttatatgtagatattttgttgaatttgtaaatacacttaaaatgtagatgctatatgcttataggtgttacatacaaataaacatgcaatgtttatgttgtactgtataagaggtaagctaattaatgcagtgaatgggattggaaagcatctacttaaatatctattgggttcccccctccccccaccttttttgctgtgaaactgaaatagtgaacttttctacgtattgacagcagatttttcgatgaaatcttcagagctttgcctatggggcacagtaggcctagtaacctggcatgtttgatatatgtaggtaaagcataatttaaagtaatcccaggtaaagatggccctaaatactttcatgtctctatattcatttttcacagatccacctgtctcttgaaaatataaaaagacaaaacaggtttgccttggcatcagagagcacaaagattaaaagttactttaaatttgccaatattttgggagaacaataaaactacattttttcctcttccatactggtagatgcgaaatttatctgtgcatgaaagggtcacttctgtaatagtgcaacagatttggtattaaaaattaaatgtggttttaaaagttcctctctcttttgtaatttatgttcccaattgagtgtgaatgtccaagtaatggtgtatgtaatggtacaggcaaatgtgactggatttccctcaaaaaagtaactattaaacagtcttgatctctttgtgacttttaa

SEQ ID NO: 20051 - DNA, 6287 bp, Homo sapiens
  source 1..6287: mol_type = unassigned DNA
cgcgcgggcgcgggggacggcgcaggggccgcctggctggagcagccagaggggatagcttcgtcgagaacggaggacaccggcggtccagggtcctgggcagtcgcgccagagctgagcggagggcgcggcgcgagaacgaatctttgtgacattctctctcagcattctttatcccctgtttgctgaagacttcgacaaaagctggtcttagctgttggcattctcctgagaaaaggatagcttcagaaatcagaaaaacatttgggaggtgtctagcccagtggaccttctgaagagcaatgctaagaagacgtttggtttaaagaattaaaaggaagaacaacttaagagcttcttcaaagtttcccgcatgaaaattacttaaacgttgcacacaacgtttcacaaaatcttttgtgaaagaagaaaaggaaattcagtgtgtgagtctcagcaggagttaagctaatgcagcttaaaataatgccgaaaaagaagcgcttatctgcgggcagagtgcccctgattctcttcctgtgccagatgattagtgcactggaagtacctcttgatcaaaaatctactgaagtaatggtacagcctccaaccatcacccaacagtctccaaaagattacattattgaccctcgggagaatattgtaatccagtgtgaagccaaagggaaaccgcccccaagcttttcctggacccgtaatgggactcattttgacatcgataaagaccctctggtcaccatgaagcctggcacaggaacgctcataattaacatcatgagcgaagggaaagctgagacctatgaaggagtctatcagtgtacagcaaggaacgaacgcggagctgcagtttctaataacattgttgtccgcccatccagatcaccattgtggaccaaagaaaaacttgaaccaatcacacttcaaagtggtcagtctttagtacttccctgcagacccccaattggattaccaccacctataatattttggatggataattcctttcaaagacttccacaaagtgagagagtttctcaaggtttgaatggggacctttatttttccaatgtcctcccagaggacacccgcgaagactatatctgttatgctagatttaatcatactcaaaccatacagcagaagcaacctatttctgtgaaggtgatttcagctaaatcaagtagagagaggccaccaacatttttaactccagaaggcaatgcaagtaacaaagaggaattaagaggaaatgtgctttcactggagtgcattgcagaaggactgcctaccccaattatttactgggcaaaggaagatggaatgctacccaaaaacaggacagtttataagaactttgagaaaaccttgcagatcattcatgtttcagaagcagactctggaaattaccaatgtatagcaaaaaacgcattaggagccatccaccataccatttctgttagagttaaagcggctccatactggatcacagcccctcaaaatcttgtgctgtccccaggagaggatgggaccttgatctgcagagctaatggcaaccccaaacccagaattagctggttaacaaatggagtcccaatagaaattgcccctgatgaccccagcagaaaaatagatggcgataccattattttttcaaatgttcaagaaagatcaagtgcagtctatcagtgcaatgcctctaatgaatatggatatttactggcaaacgcatttgtaaatgtgctggctgagccaccacgaatcctcacacctgcaaacacactctaccaggtcattgcaaacaggcctgctttactagactgtgccttctttgggtctcctctcccaaccatcgagtggtttaaaggagctaaaggaagtgctcttcatgaagatatttatgttttacatgaaaatggaactttggaaattcctgtggcccaaaaggacagtacaggaacttatacgtgtgttgcaaggaataaattagggatggcgaagaatgaagttcacttagaaatcaaagatcctacatggatcgttaaacagcccgaatatgcagttgtgcaaagagggagcatggtgtcctttgaatgcaaagtgaaacatgatcacaccttatccctcactgtcctgtggctgaaggacaacagggaactgcccagtgatgaaaggttcactgttgacaaggatcatctagtggtagctgatgtcagtgacgatgacagcgggacctacacgtgtgtggccaacaccactctggacagcgtctccgccagcgctgtgcttagcgttgttgctcctactccaactccagctcccgtttacgatgtcccaaatcctccctttgacttagaactgacagatcaacttgacaaaagtgttcagctgtcatggaccccaggcgatgacaacaatagccccattacaaaattcatcatcgaatatgaagatgcaatgcacaagccagggctgtggcaccaccaaactgaagtttctggaacacagaccacagcccagctgaagctgtctccttacgtgaactactccttccgcgtgatggcagtgaacagcattgggaagagcttgcccagcgaggcgtctgagcagtatttgacgaaagcctcagaaccagataaaaaccccacagctgtggaaggactgggatcagagcctgataatttggtgattacgtggaagcccttgaatggtttcgaatctaatgggccaggccttcagtacaaagttagctggcgccagaaagatggtgatgatgaatggacatctgtggttgtggcaaatgtatccaaatatattgtctcaggcacgccaacctttgttccatacctgatcaaagttcaggccctgaatgacatggggtttgcccccgagccagctgtagtcatgggacattctggagaagacctcccaatggtggctcctgggaacgtgcgtgtgaatgtggtgaacagtaccttagccgaggtgcactgggacccagtacctctgaaaagcatccgaggacacctacaaggctatcggatttactattggaagacccagagttcatctaaaagaaacagacgtcacattgagaaaaagatcctcaccttccaaggcagcaagactcatggcatgttgccggggctagagccctttagccactacacactgaatgtccgagtggtcaatgggaaaggggagggcccagccagccctgacagagtctttaatactccagaaggagtccccagtgctccctcgtctttgaagattgtgaatccaacactggactctctcactttggaatgggatccaccgagccacccgaatggcattttgacagagtacaccttaaagtatcagccaattaacagcacacatgaattaggccctctggtagatttgaaaattcctgccaacaagacacggtggactttaaaaaatttaaatttcagcactcgatataagttttatttctatgcacaaacatcagcaggatcaggaagtcaaattacagaggaagcagtaacaactgtggatgaagcgatggcaagccggcaggtggatattgcaactcagggctggttcattggtctgatgtgtgctgttgctctccttatcttaattttgctgattgtttgcttcatcagaagaaacaagggtggtaaatatccagttaaagaaaaggaagatgcccatgctgaccctgaaatccagcctatgaaggaagatgatgggacatttggagaatacagtgatgcagaagaccacaagcctttgaaaaaaggaagtcgaactccttcagacaggactgtgaaaaaagaagatagtgacgacagcctagttgactatggagaaggggttaatggccagttcaatgaggatggctcctttattggacaatacagtggtaagaaagagaaagagccggctgaaggaaacgaaagctcagaggcaccttctcctgtcaacgccatgaattcctttgtttaatttttaagctctttgccaatattccatttctctagaatgtttatcctaagcacttgtttgtcagccctctcatactatgaacatatgggtagagagtatattttctgctgtatgttagtattatgagaatagttacagcaaaaacataactcagtcaaatgatatgttaatatgaactggaatgcaaagtgcatactttttcattcaaaatgggtattcttgatttcctcagaactgataaaaaataatgcaacatcaccaacagatcctgttatttcctctgcaggatacagttcaatatgatgcatgaaaaatgctccacatttaaaggacatacccgtgtatgttatgaaaacatggtttgatactttgtttatactaccctcagctgaacccctatatatgaattccgttttcattgtcaagaatgttactgtagtattctctagaacttcaatgtctttgtggacattgttgtgaaattggtgactatgtatagctgtcgttagtctttttgggagactgttaggaacagtttgtacagtatatacttgctaaatgagttcattatgacagtcacattgctgatgcttactgagaactattacctactcttggctcctgttactccgtaggcttcttaatcttccaggcattacagcagcacagtgttctactttttacatcatttctatgttcggttgtttttaggcataaacaatgtgtattgcagtgcatttcggcatttgtgccatactgaaagaatcaaaaacaaatcatccaaattaaatttcaaacattatttcagagaacacagggcaagacacatacagtgccttcagatattaagcattccacaacatcgtgcattctgtatcagctggtccagtccattctgggtcctagattactgtcattgtctaaaagtaacttttaaaaagcagagttcatgaaaactgcaatgctgggaaaagaaggaaacatgaaaataaaaataagacagtttattagaaatagcatttcctcataagcataaaaagaaaatctttgttgccaactgaagcacatgatgattttgtggtcctttatggtttctattacattcagtaagaaagatgtcaacatgctagaaaattaattttaaaactaagttattccaacactaaaagcatacaacagcatgccaacagtaatatattattctccaagactttacctatgtaagtgttcaaaactctgcagcattaaacaacgtgtatgcaaattgttatggatacatttcagaatctaagaaatcaggcaagtgcttaaaaggccaacggtccaagggattacatctgcagtttaaaaagtaaatatatattctatcgtattcataaacaatatctatcaaatgggttacctccaaatatgaaaatctataacaacctatggttgaaggaatgctcagtttcatttgccaataaattggtttctcataacttgcatcaagtttaattttaagtaaagctttttatatgtagatattttgttgaatttgtaaatacacttaaaatgtagatgctatatgcttataggtgttacatacaaataaacatgcaatgtttatgttgtactgtataagaggtaagctaattaatgcagtgaatgggattggaaagcatctacttaaatatctattgggttcccccctccccccaccttttttgctgtgaaactgaaatagtgaacttttctacgtattgacagcagatttttcgatgaaatcttcagagctttgcctatggggcacagtaggcctagtaacctggcatgtttgatatatgtaggtaaagcataatttaaagtaatcccaggtaaagatggccctaaatactttcatgtctctatattcatttttcacagatccacctgtctcttgaaaatataaaaagacaaaacaggtttgccttggcatcagagagcacaaagattaaaagttactttaaatttgccaatattttgggagaacaataaaactacattttttcctcttccatactggtagatgcgaaatttatctgtgcatgaaagggtcacttctgtaatagtgcaacagatttggtattaaaaattaaatgtggttttaaaagttcctctctcttttgtaatttatgttcccaattgagtgtgaatgtccaagtaatggtgtatgtaatggtacaggcaaatgtgactggatttccctcaaaaaagtaactattaaacagtcttgatctctttgtgacttttaa

SEQ ID NO: 20052 - DNA, 1594 bp, Homo sapiens
  source 1..1594: mol_type = unassigned DNA
gattttccatgggcaggagccagaggacgggctggaccattgcttcgtcctcctctaacagaatctacactagagacgatttgtggctaatggtgcagtttaacttaaaacttctgaggagaacccccatcttcagttatcgtagttcatgacctcccagcagtatgaggatttattaactcatgtctctttaatttcccgcatgaaaattacttaaacgttgcacacaacgtttcacaaaatcttttgtgaaagaagaaaaggaaattcagtgtgtgagtctcagcaggagttaagctaatgcagcttaaaataatgccgaaaaagaagcgcttatctgcgggcagagtgcccctgattctcttcctgtgccagatgattagtgcactggaagtacctcttgatctggtacagcctccaaccatcacccaacagtctccaaaagattacattattgaccctcgggagaatattgtaatccagtgtgaagccaaagggaaaccgcccccaagcttttcctggacccgtaatgggactcattttgacatcgataaagaccctctggtcaccatgaagcctggcacaggaacgctcataattaacatcatgagcgaagggaaagctgagacctatgaaggagtctatcagtgtacagcaaggaacgaacgcggagctgcagtttctaataacattgttgtccgcccatccagatcaccattgtggaccaaagaaaaacttgaaccaatcacacttcaaagtggtcagtctttagtacttccctgcagacccccaattggattaccaccacctataatattttggatggataattcctttcaaagacttccacaaagtgagagagtttctcaaggtttgaatggggacctttatttttccaatgtcctcccagaggacacccgcgaagactatatctgttatgctagatttaatcatactcaaaccatacagcagaagcaacctatttctgtgaaggtgatttcagtggatgaattgaatgacactatagctgctaatttgagtgacactgagttttatggtgctaaatcaagtagagagaggccaccaacatttttaactccagaaggcaatgcaagtaacaaagaggaattaagaggaaatgtgctttcactggagtgcattgcagaaggactgcctaccccaattatttactgggcaaaggaagatggaatgctacccaaaaacaggacagtttataagaactttgagaaaaccttgcagatcattcatgtttcagaagcagactctggaaattaccaatgtatagcaaaaaacgcattaggagccatccaccataccatttctgttagagttaaagcggctccatactggatcacagcccctcaaaatcttgtgctgtccccaggagaggatgggaccttgatctgcagagctaatggcaaccccaaacccagaattagctggttaacaaatggagtcccaatagaaattgcccctgatgaccccagcagaaaaatagatggcgataccattattttttcaaatgttcaagaaagatcaagtgcagtctatcagtgcaatgcctctaatgaat

SEQ ID NO: 20053 - DNA, 562 bp, Homo sapiens
  source 1..562: mol_type = unassigned DNA
acacgcgctcgcaggctgacggaggttggcggtggggcggccgctcaggaatctttgtgacattctctctcagcattctttatcccctgtttgctgaagacttcgacaaaagctggtcttagctgttggcattctcctgagaaaaggatagcttcagaaatcagaaaaacatttgggaggtgtctagcccagtggaccttctgaagagcaatgctaagaagacgtttggtttaaagaattaaaaggaagaacaacttaagagcttcttcaaagtttcccgcatgaaaattacttaaacgttgcacacaacgtttcacaaaatcttttgtgaaagaagaaaaggaaattcagtgtgtgagtctcagcaggagttaagctaatgcagcttaaaataatgccgaaaaagaagcgcttatctgcgggcagagtgcccctgattctcttcctgtgccagatgattagtgcactggaagtacctcttgatccaaaacttcttgaagacttggtacagcctccaaccatcacccaacagtctccaaaagattacattattgaccctcgg

SEQ ID NO: 20054 - DNA, 583 bp, Homo sapiens
  source 1..583: mol_type = unassigned DNA
atttgcaaaggaaacattgaggctgacgagaggagagttggagactgcagaacttgggagctgtccactgctctgcctttgtcacagcccagagcaatgctaagaagacgtttggtttaaagaattaaaaggaagaacaacttaagagcttcttcaaagtttcccgcatgaaaattacttaaacgttgcacacaacgtttcacaaaatcttttgtgaaagaagaaaaggaaattcagtgtgtgagtctcagcaggagttaagctaatgcagcttaaaataatgccgaaaaagaagcgcttatctgcgggcagagtgcccctgattctcttcctgtgccagatgattagtgcactggaagtacctcttgatctggtacagcctccaaccatcacccaacagtctccaaaagattacattattgaccctcgggagaatattgtaatccagtgtgaagccaaagggaaaccgcccccaagcttttcctggacccgtaatgggactcattttgacatcgataaagaccctctggtcaccatgaagcctggcacaggaacgctcataattaacatcatgagcgaaggg

SEQ ID NO: 20055 - DNA, 3915 bp, Homo sapiens
  source 1..3915: mol_type = unassigned DNA
atgcagcttaaaataatgccgaaaaagaagcgcttatctgcgggcagagtgcccctgattctcttcctgtgccagatgattagtgcactggaagtacctcttgatccaaaacttcttgaagacttggtacagcctccaaccatcacccaacagtctccaaaagattacattattgaccctcgggagaatattgtaatccagtgtgaagccaaagggaaaccgcccccaagcttttcctggacccgtaatgggactcattttgacatcgataaagaccctctggtcaccatgaagcctggcacaggaacgctcataattaacatcatgagcgaagggaaagctgagacctatgaaggagtctatcagtgtacagcaaggaacgaacgcggagctgcagtttctaataacattgttgtccgcccatccagatcaccattgtggaccaaagaaaaacttgaaccaatcacacttcaaagtggtcagtctttagtacttccctgcagacccccaattggattaccaccacctataatattttggatggataattcctttcaaagacttccacaaagtgagagagtttctcaaggtttgaatggggacctttatttttccaatgtcctcccagaggacacccgcgaagactatatctgttatgctagatttaatcatactcaaaccatacagcagaagcaacctatttctgtgaaggtgatttcagtggatgaattgaatgacactatagctgctaatttgagtgacactgagttttatggtgctaaatcaagtagagagaggccaccaacatttttaactccagaaggcaatgcaagtaacaaagaggaattaagaggaaatgtgctttcactggagtgcattgcagaaggactgcctaccccaattatttactgggcaaaggaagatggaatgctacccaaaaacaggacagtttataagaactttgagaaaaccttgcagatcattcatgtttcagaagcagactctggaaattaccaatgtatagcaaaaaacgcattaggagccatccaccataccatttctgttagagttaaagcggctccatactggatcacagcccctcaaaatcttgtgctgtccccaggagaggatgggaccttgatctgcagagctaatggcaaccccaaacccagaattagctggttaacaaatggagtcccaatagaaattgcccctgatgaccccagcagaaaaatagatggcgataccattattttttcaaatgttcaagaaagatcaagtgcagtctatcagtgcaatgcctctaatgaatatggatatttactggcaaacgcatttgtaaatgtgctggctgagccaccacgaatcctcacacctgcaaacacactctaccaggtcattgcaaacaggcctgctttactagactgtgccttctttgggtctcctctcccaaccatcgagtggtttaaaggagctaaaggaagtgctcttcatgaagatatttatgttttacatgaaaatggaactttggaaattcctgtggcccaaaaggacagtacaggaacttatacgtgtgttgcaaggaataaattagggatggcgaagaatgaagttcacttagaaatcaaagatcctacatggatcgttaaacagcccgaatatgcagttgtgcaaagagggagcatggtgtcctttgaatgcaaagtgaaacatgatcacaccttatccctcactgtcctgtggctgaaggacaacagggaactgcccagtgatgaaaggttcactgttgacaaggatcatctagtggtagctgatgtcagtgacgatgacagcgggacctacacgtgtgtggccaacaccactctggacagcgtctccgccagcgctgtgcttagcgttgttgctcctactccaactccagctcccgtttacgatgtcccaaatcctccctttgacttagaactgacagatcaacttgacaaaagtgttcagctgtcatggaccccaggcgatgacaacaatagccccattacaaaattcatcatcgaatatgaagatgcaatgcacaagccagggctgtggcaccaccaaactgaagtttctggaacacagaccacagcccagctgaagctgtctccttacgtgaactactccttccgcgtgatggcagtgaacagcattgggaagagcttgcccagcgaggcgtctgagcagtatttgacgaaagcctcagaaccagataaaaaccccacagctgtggaaggactgggatcagagcctgataatttggtgattacgtggaagcccttgaatggtttcgaatctaatgggccaggccttcagtacaaagttagctggcgccagaaagatggtgatgatgaatggacatctgtggttgtggcaaatgtatccaaatatattgtctcaggcacgccaacctttgttccatacctgatcaaagttcaggccctgaatgacatggggtttgcccccgagccagctgtagtcatgggacattctggagaagacctcccaatggtggctcctgggaacgtgcgtgtgaatgtggtgaacagtaccttagccgaggtgcactgggacccagtacctctgaaaagcatccgaggacacctacaaggctatcggatttactattggaagacccagagttcatctaaaagaaacagacgtcacattgagaaaaagatcctcaccttccaaggcagcaagactcatggcatgttgccggggctagagccctttagccactacacactgaatgtccgagtggtcaatgggaaaggggagggcccagccagccctgacagagtctttaatactccagaaggagtccccagtgctccctcgtctttgaagattgtgaatccaacactggactctctcactttggaatgggatccaccgagccacccgaatggcattttgacagagtacaccttaaagtatcagccaattaacagcacacatgaattaggccctctggtagatttgaaaattcctgccaacaagacacggtggactttaaaaaatttaaatttcagcactcgatataagttttatttctatgcacaaacatcagcaggatcaggaagtcaaattacagaggaagcagtaacaactgtggatgaagctggtattcttccacctgatgtaggtgcaggcaaagttcaagcagtaaatcccaggatcagcaatcttactgctgcagctgctgagacctatgccaatatcagttgggaatatgagggaccagagcatgtgaacttttatgttgaatatggtgtagcaggcagcaaagaagaatggagaaaagaaattgtaaatggttctcggagcttctttgggttaaagggtctaatgccaggaacagcatacaaagttcgagttggtgctgtgggggactctggttttgtgagttcagaggatgtgtttgagacaggcccagcgatggcaagccggcaggtggatattgcaactcagggctggttcattggtctgatgtgtgctgttgctctccttatcttaattttgctgattgtttgcttcatcagaagaaacaagggtggtaaatatccagttaaagaaaaggaagatgcccatgctgaccctgaaatccagcctatgaaggaagatgatgggacatttggagaatacagtgatgcagaagaccacaagcctttgaaaaaaggaagtcgaactccttcagacaggactgtgaaaaaagaagatagtgacgacagcctagttgactatggagaaggggttaatggccagttcaatgaggatggctcctttattggacaatacagtggtaagaaagagaaagagccggctgaaggaaacgaaagctcagaggcaccttctcctgtcaacgccatgaattcctttgtttaa

SEQ ID NO: 20056 - DNA, 2687 bp, Homo sapiens
  source 1..2687: mol_type = unassigned DNA
aacagatttctaaaaaatactgaaaatggcaacagccttgcaaggacagtttagcctctaaaagcagttcctttgaagagaaaatactcaattagatgtatacattctgttctgtttaaaactcagttttgtatttttctcattatacttaatgtaaaatgtatcctgttaacagtgaatactttaattggtttgggaatttgtttttattgagaatatatagtgaaaataactgtgaacacagtgttcaccaggggtttttagcatttaatgtgatgattattcagatttctctacttgaattttttaatgaatgaagatttttcaaagttaattattcatataattcctgattaataattgacagatcctaatttggggccacatgtaaaatatatgaaagctcacataacgtggcaattttttactctgagagactgcagcagttcccatctccccttaacctattgccaccaacaccattgatttgttttccagcgatggcaagccggcaggtggatattgcaactcagggctggttcattggtctgatgtgtgctgttgctctccttatcttaattttgctgattgtttgcttcatcagaagaaacaagggtggtaaatatccagttaaagaaaaggaagatgcccatgctgaccctgaaatccagcctatgaaggaagatgatgggacatttggagaatacagtgatgcagaagaccacaagcctttgaaaaaaggaagtcgaactccttcagacaggactgtgaaaaaagaagatagtgacgacagcctagttgactatggagaaggggttaatggccagttcaatgaggatggctcctttattggacaatacagtggtaagaaagagaaagagccggctgaaggaaacgaaagctcagaggcaccttctcctgtcaacgccatgaattcctttgtttaatttttaagctctttgccaatattccatttctctagaatgtttatcctaagcacttgtttgtcagccctctcatactatgaacatatgggtagagagtatattttctgctgtatgttagtattatgagaatagttacagcaaaaacataactcagtcaaatgatatgttaatatgaactggaatgcaaagtgcatactttttcattcaaaatgggtattcttgatttcctcagaactgataaaaaataatgcaacatcaccaacagatcctgttatttcctctgcaggatacagttcaatatgatgcatgaaaaatgctccacatttaaaggacatacccgtgtatgttatgaaaacatggtttgatactttgtttatactaccctcagctgaacccctatatatgaattccgttttcattgtcaagaatgttactgtagtattctctagaacttcaatgtctttgtggacattgttgtgaaattggtgactatgtatagctgtcgttagtctttttgggagactgttaggaacagtttgtacagtatatacttgctaaatgagttcattatgacagtcacattgctgatgcttactgagaactattacctactcttggctcctgttactccgtaggcttcttaatcttccaggcattacagcagcacagtgttctactttttacatcatttctatgttcggttgtttttaggcataaacaatgtgtattgcagtgcatttcggcatttgtgccatactgaaagaatcaaaaacaaatcatccaaattaaatttcaaacattatttcagagaacacagggcaagacacatacagtgccttcagatattaagcattccacaacatcgtgcattctgtatcagctggtccagtccattctgggtcctagattactgtcattgtctaaaagtaacttttaaaaagcagagttcatgaaaactgcaatgctgggaaaagaaggaaacatgaaaataaaaataagacagtttattagaaatagcatttcctcataagcataaaaagaaaatctttgttgccaactgaagcacatgatgattttgtggtcctttatggtttctattacattcagtaagaaagatgtcaacatgctagaaaattaattttaaaactaagttattccaacactaaaagcatacaacagcatgccaacagtaatatattattctccaagactttacctatgtaagtgttcaaaactctgcagcattaaacaacgtgtatgcaaattgttatggatacatttcagaatctaagaaatcaggcaagtgcttaaaaggccaacggtccaagggattacatctgcagtttaaaaagtaaatatatattctatcgtattcatttttcacagatccacctgtctcttgaaaatataaaaagacaaaacaggtttgccttggcatcagagagcacaaagattaaaagttactttaaatttgccaatattttgggagaacaataaaactacattttttcctcttccatactggtagatgcgaaatttatctgtgcatgaaagggtcacttctgtaatagtgcaacagatttggtattaaaaattaaatgtggttttaaaagttcctctctcttttgtaatttatgttcccaattgagtgtgaatgtccaagtaatggtgtatgtaatggtacaggcaaatgtgactggatttccctcaaaaaagtaactattaaacagtcttgatctc

SEQ ID NO: 20057 - DNA, 595 bp, Homo sapiens
  source 1..595: mol_type = unassigned DNA
actttgtttaaaatttccctttgctactgggaggaaatggaaagcagtaagataacttcatttgtaagagcaatgctaagaagacgtttggtttaaagaattaaaaggaagaacaacttaagagcttcttcaaagtttcccgcatgaaaattacttaaacgttgcacacaacgtttcacaaaatcttttgtgaaagaagaaaaggaaattcagtgtgtgagtctcagcaggagttaagctaatgcagcttaaaataatgccgaaaaagaagcgcttatctgcgggcagagtgcccctgattctcttcctgtgccagatgattagtgcactggaagtacctcttgatccaaaacttcttgaagacttggtacagcctccaaccatcacccaacagtctccaaaagattacattattgaccctcgggagaatattgtaatccagtgtgaagccaaagggaaaccgcccccaagcttttcctggacccgtaatgggactcattttgacatcgataaagaccctctggtcaccatgaagcctggcacaggaacgctcataattaacatcatgagcgaagggaaagctgagacctatgaa

SEQ ID NO: 20058 - DNA, 3025 bp, Homo sapiens
  source 1..3025: mol_type = unassigned DNA
agacgcgcgggcgcgggggacggcgcaggggccgcctggctggagcagccagaggggatagcttcgtcgagaacggaggacaccggcggtccagggtcctgggcagtcgcgccagagctgagcggagggcgcggcgcgagaacgaatctttgtgacattctctctcagcattctttatcccctgtttgctgaagacttcgacaaaagctggtcttagctgttggcattctcctgagaaaaggatagcttcagaaatcagaaaaacatttgggaggtgtctagcccagtggaccttctgaagagcaatgctaagaagacgtttggtttaaagaattaaaaggaagaacaacttaagagcttcttcaaagtttcccgcatgaaaattacttaaacgttgcacacaacgtttcacaaaatcttttgtgaaagaagaaaaggaaattcagtgtgtgagtctcagcaggagttaagctaatgcagcttaaaataatgccgaaaaagaagcgcttatctgcgggcagagtgcccctgattctcttcctgtgccagatgattagtgcactggaagtacctcttgatctggtacagcctccaaccatcacccaacagtctccaaaagattacattattgaccctcgggagaatattgtaatccagtgtgaagccaaagggaaaccgcccccaagcttttcctggacccgtaatgggactcattttgacatcgataaagaccctctggtcaccatgaagcctggcacaggaacgctcataattaacatcatgagcgaagggaaagctgagacctatgaaggagtctatcagtgtacagcaaggaacgaacgcggagctgcagtttctaataacattgttgtccgcccatccagatcaccattgtggaccaaagaaaaacttgaaccaatcacacttcaaagtggtcagtctttagtacttccctgcagacccccaattggattaccaccacctataatattttggatggataattcctttcaaagacttccacaaagtgagagagtttctcaaggtttgaatggggacctttatttttccaatgtcctcccagaggacacccgcgaagactatatctgttatgctagatttaatcatactcaaaccatacagcagaagcaacctatttctgtgaaggtgatttcagtggatgaattgaatgacactatagctgctaatttgagtgacactgagttttatggtgctaaatcaagtagagagaggccaccaacatttttaactccagaaggcaatgcaagtaacaaagaggaattaagaggaaatgtgctttcactggagtgcattgcagaaggactgcctaccccaattatttactgggcaaaggaagatggaatgctacccaaaaacaggacagtttataagaactttgagaaaaccttgcagatcattcatgtttcagaagcagactctggaaattaccaatgtatagcaaaaaacgcattaggagccatccaccataccatttctgttagagttaaagcggctccatactggatcacagcccctcaaaatcttgtgctgtccccaggagaggatgggaccttgatctgcagagctaatggcaaccccaaacccagaattagctggttaacaaatggagtcccaatagaaattgcccctgatgaccccagcagaaaaatagatggcgataccattattttttcaaatgttcaagaaagatcaagtgcagtctatcagtgcaatgcctctaatgaatatggatatttactggcaaacgcatttgtaaatgtgctggctgagccaccacgaatcctcacacctgcaaacacactctaccaggtcattgcaaacaggcctgctttactagactgtgccttctttgggtctcctctcccaaccatcgagtggtttaaaggagctaaaggaagtgctcttcatgaagatatttatgttttacatgaaaatggaactttggaaattcctgtggcccaaaaggacagtacaggaacttatacgtgtgttgcaaggaataaattagggatggcgaagaatgaagttcacttagaaatcaaagatcctacatggatcgttaaacagcccgaatatgcagttgtgcaaagagggagcatggtgtcctttgaatgcaaagtgaaacatgatcacaccttatccctcactgtcctgtggctgaaggacaacagggaactgcccagtgatgaaaggttcactgttgacaaggatcatctagtggtagctgatgtcagtgacgatgacagcgggacctacacgtgtgtggccaacaccactctggacagcgtctccgccagcgctgtgcttagcgttgttgatgtcccaaatcctccctttgacttagaactgacagatcaacttgacaaaagtgttcagctgtcatggaccccaggcgatgacaacaatagccccattacaaaattcatcatcgaatatgaagatgcaatgcacaagccagggctgtggcaccaccaaactgaagtttctggaacacagaccacagcccagctgaagctgtctccttacgtgaactactccttccgcgtgatggcagtgaacagcattgggaagagcttgcccagcgaggcgtctgagcagtatttgacgaaagcctcagaaccagataaaaaccccacagctgtggaaggactgggatcagagcctgataatttggtgattacgtggaagcccttgaatggtttcgaatctaatgggccaggccttcagacaagtactgcctctttttaaaatattaggtttgagtccatctaaaggcaaagtcattatgtgttttgagaggatggttttattaaatataaatgtaaatgacaagagagaaaaaggaagagaataactaaatgggtgcctgtcacaggtttgtactaatgtattttcagctgaatcaggaatgagttactgaaactcaaaaccttgaatcgtgcgagcacggtgaaatgtcaatttaatacatgttgaaacattc

SEQ ID NO: 20059 - DNA, 726 bp, Homo sapiens
  source 1..726: mol_type = unassigned DNA
attgtattgccacaaagccaggctgatcaccctgggaggcctgggaggtctgagcagctttggattggctgtcaggagcaggactttaacattttactgcacatgggccagccacagcagggttcaattgccagtgcttttatctgcagaaatgtgctgggatgggcactttgtttaaaatttccctttgctactgggaggaaatggaaagcagtaagataacttcatttgtaagagcaatgctaagaagacgtttggtttaaagaattaaaaggaagaacaacttaagagcttcttcaaagtttcccgcatgaaaattacttaaacgttgcacacaacgtttcacaaaatcttttgtgaaagaagaaaaggaaattcagtgtgtgagtctcagcaggagttaagctaatgcagcttaaaataatgccgaaaaagaagcgcttatctgcgggcagagtgcccctgattctcttcctgtgccagatgattagtgcactggaagtacctcttgatctggtacagcctccaaccatcacccaacagtctccaaaagattacattattgaccctcgggagaatattgtaatccagtgtgaagccaaagggaaaccgcccccaagcttttcctggacccgtaatgggactcattttgacatcgataaagaccctctggtcaccatgaagcctggcacaggaacgctcataattaacatcatgagcgaaggg

SEQ ID NO: 20060 - DNA, 6380 bp, Homo sapiens
  source 1..6380: mol_type = unassigned DNA
cgcgcgggcgcgggggacggcgcaggggccgcctggctggagcagccagaggggatagcttcgtcgagaacggaggacaccggcggtccagggtcctgggcagtcgcgccagagctgagcggagggcgcggcgcgagaacgaatctttgtgacattctctctcagcattctttatcccctgtttgctgaagacttcgacaaaagctggtcttagctgttggcattctcctgagaaaaggatagcttcagaaatcagaaaaacatttgggaggtgtctagcccagtggaccttctgaagagcaatgctaagaagacgtttggtttaaagaattaaaaggaagaacaacttaagagcttcttcaaagtttcccgcatgaaaattacttaaacgttgcacacaacgtttcacaaaatcttttgtgaaagaagaaaaggaaattcagtgtgtgagtctcagcaggagttaagctaatgcagcttaaaataatgccgaaaaagaagcgcttatctgcgggcagagtgcccctgattctcttcctgtgccagatgattagtgcactggaagtacctcttgatcaaaaatctactgaagtaatggtacagcctccaaccatcacccaacagtctccaaaagattacattattgaccctcgggagaatattgtaatccagtgtgaagccaaagggaaaccgcccccaagcttttcctggacccgtaatgggactcattttgacatcgataaagaccctctggtcaccatgaagcctggcacaggaacgctcataattaacatcatgagcgaagggaaagctgagacctatgaaggagtctatcagtgtacagcaaggaacgaacgcggagctgcagtttctaataacattgttgtccgcccatccagatcaccattgtggaccaaagaaaaacttgaaccaatcacacttcaaagtggtcagtctttagtacttccctgcagacccccaattggattaccaccacctataatattttggatggataattcctttcaaagacttccacaaagtgagagagtttctcaaggtttgaatggggacctttatttttccaatgtcctcccagaggacacccgcgaagactatatctgttatgctagatttaatcatactcaaaccatacagcagaagcaacctatttctgtgaaggtgatttcagtggatgaattgaatgacactatagctgctaatttgagtgacactgagttttatggtgctaaatcaagtagagagaggccaccaacatttttaactccagaaggcaatgcaagtaacaaagaggaattaagaggaaatgtgctttcactggagtgcattgcagaaggactgcctaccccaattatttactgggcaaaggaagatggaatgctacccaaaaacaggacagtttataagaactttgagaaaaccttgcagatcattcatgtttcagaagcagactctggaaattaccaatgtatagcaaaaaacgcattaggagccatccaccataccatttctgttagagttaaagcggctccatactggatcacagcccctcaaaatcttgtgctgtccccaggagaggatgggaccttgatctgcagagctaatggcaaccccaaacccagaattagctggttaacaaatggagtcccaatagaaattgcccctgatgaccccagcagaaaaatagatggcgataccattattttttcaaatgttcaagaaagatcaagtgcagtctatcagtgcaatgcctctaatgaatatggatatttactggcaaacgcatttgtaaatgtgctggctgagccaccacgaatcctcacacctgcaaacacactctaccaggtcattgcaaacaggcctgctttactagactgtgccttctttgggtctcctctcccaaccatcgagtggtttaaaggagctaaaggaagtgctcttcatgaagatatttatgttttacatgaaaatggaactttggaaattcctgtggcccaaaaggacagtacaggaacttatacgtgtgttgcaaggaataaattagggatggcgaagaatgaagttcacttagaaatcaaagatcctacatggatcgttaaacagcccgaatatgcagttgtgcaaagagggagcatggtgtcctttgaatgcaaagtgaaacatgatcacaccttatccctcactgtcctgtggctgaaggacaacagggaactgcccagtgatgaaaggttcactgttgacaaggatcatctagtggtagctgatgtcagtgacgatgacagcgggacctacacgtgtgtggccaacaccactctggacagcgtctccgccagcgctgtgcttagcgttgttgctcctactccaactccagctcccgtttacgatgtcccaaatcctccctttgacttagaactgacagatcaacttgacaaaagtgttcagctgtcatggaccccaggcgatgacaacaatagccccattacaaaattcatcatcgaatatgaagatgcaatgcacaagccagggctgtggcaccaccaaactgaagtttctggaacacagaccacagcccagctgaagctgtctccttacgtgaactactccttccgcgtgatggcagtgaacagcattgggaagagcttgcccagcgaggcgtctgagcagtatttgacgaaagcctcagaaccagataaaaaccccacagctgtggaaggactgggatcagagcctgataatttggtgattacgtggaagcccttgaatggtttcgaatctaatgggccaggccttcagtacaaagttagctggcgccagaaagatggtgatgatgaatggacatctgtggttgtggcaaatgtatccaaatatattgtctcaggcacgccaacctttgttccatacctgatcaaagttcaggccctgaatgacatggggtttgcccccgagccagctgtagtcatgggacattctggagaagacctcccaatggtggctcctgggaacgtgcgtgtgaatgtggtgaacagtaccttagccgaggtgcactgggacccagtacctctgaaaagcatccgaggacacctacaaggctatcggatttactattggaagacccagagttcatctaaaagaaacagacgtcacattgagaaaaagatcctcaccttccaaggcagcaagactcatggcatgttgccggggctagagccctttagccactacacactgaatgtccgagtggtcaatgggaaaggggagggcccagccagccctgacagagtctttaatactccagaaggagtccccagtgctccctcgtctttgaagattgtgaatccaacactggactctctcactttggaatgggatccaccgagccacccgaatggcattttgacagagtacaccttaaagtatcagccaattaacagcacacatgaattaggccctctggtagatttgaaaattcctgccaacaagacacggtggactttaaaaaatttaaatttcagcactcgatataagttttatttctatgcacaaacatcagcaggatcaggaagtcaaattacagaggaagcagtaacaactgtggatgaagctggtattcttccacctgatgtaggtgcaggcaaagcgatggcaagccggcaggtggatattgcaactcagggctggttcattggtctgatgtgtgctgttgctctccttatcttaattttgctgattgtttgcttcatcagaagaaacaagggtggtaaatatccagttaaagaaaaggaagatgcccatgctgaccctgaaatccagcctatgaaggaagatgatgggacatttggagaatacagtgatgcagaagaccacaagcctttgaaaaaaggaagtcgaactccttcagacaggactgtgaaaaaagaagatagtgacgacagcctagttgactatggagaaggggttaatggccagttcaatgaggatggctcctttattggacaatacagtggtaagaaagagaaagagccggctgaaggaaacgaaagctcagaggcaccttctcctgtcaacgccatgaattcctttgtttaatttttaagctctttgccaatattccatttctctagaatgtttatcctaagcacttgtttgtcagccctctcatactatgaacatatgggtagagagtatattttctgctgtatgttagtattatgagaatagttacagcaaaaacataactcagtcaaatgatatgttaatatgaactggaatgcaaagtgcatactttttcattcaaaatgggtattcttgatttcctcagaactgataaaaaataatgcaacatcaccaacagatcctgttatttcctctgcaggatacagttcaatatgatgcatgaaaaatgctccacatttaaaggacatacccgtgtatgttatgaaaacatggtttgatactttgtttatactaccctcagctgaacccctatatatgaattccgttttcattgtcaagaatgttactgtagtattctctagaacttcaatgtctttgtggacattgttgtgaaattggtgactatgtatagctgtcgttagtctttttgggagactgttaggaacagtttgtacagtatatacttgctaaatgagttcattatgacagtcacattgctgatgcttactgagaactattacctactcttggctcctgttactccgtaggcttcttaatcttccaggcattacagcagcacagtgttctactttttacatcatttctatgttcggttgtttttaggcataaacaatgtgtattgcagtgcatttcggcatttgtgccatactgaaagaatcaaaaacaaatcatccaaattaaatttcaaacattatttcagagaacacagggcaagacacatacagtgccttcagatattaagcattccacaacatcgtgcattctgtatcagctggtccagtccattctgggtcctagattactgtcattgtctaaaagtaacttttaaaaagcagagttcatgaaaactgcaatgctgggaaaagaaggaaacatgaaaataaaaataagacagtttattagaaatagcatttcctcataagcataaaaagaaaatctttgttgccaactgaagcacatgatgattttgtggtcctttatggtttctattacattcagtaagaaagatgtcaacatgctagaaaattaattttaaaactaagttattccaacactaaaagcatacaacagcatgccaacagtaatatattattctccaagactttacctatgtaagtgttcaaaactctgcagcattaaacaacgtgtatgcaaattgttatggatacatttcagaatctaagaaatcaggcaagtgcttaaaaggccaacggtccaagggattacatctgcagtttaaaaagtaaatatatattctatcgtattcataaacaatatctatcaaatgggttacctccaaatatgaaaatctataacaacctatggttgaaggaatgctcagtttcatttgccaataaattggtttctcataacttgcatcaagtttaattttaagtaaagctttttatatgtagatattttgttgaatttgtaaatacacttaaaatgtagatgctatatgcttataggtgttacatacaaataaacatgcaatgtttatgttgtactgtataagaggtaagctaattaatgcagtgaatgggattggaaagcatctacttaaatatctattgggttcccccctccccccaccttttttgctgtgaaactgaaatagtgaacttttctacgtattgacagcagatttttcgatgaaatcttcagagctttgcctatggggcacagtaggcctagtaacctggcatgtttgatatatgtaggtaaagcataatttaaagtaatcccaggtaaagatggccctaaatactttcatgtctctatattcatttttcacagatccacctgtctcttgaaaatataaaaagacaaaacaggtttgccttggcatcagagagcacaaagattaaaagttactttaaatttgccaatattttgggagaacaataaaactacattttttcctcttccatactggtagatgcgaaatttatctgtgcatgaaagggtcacttctgtaatagtgcaacagatttggtattaaaaattaaatgtggttttaaaagttcctctctcttttgtaatttatgttcccaattgagtgtgaatgtccaagtaatggtgtatgtaatggtacaggcaaatgtgactggatttccctcaaaaaagtaactattaaacagtcttgatctctttgtgacttttaa

SEQ ID NO: 20061 - DNA, 5577 bp, Homo sapiens
  source 1..5577: mol_type = unassigned DNA
gccatgtgaggacacagagagaaggcagccatctgcaagccaggaatagagccctcaccagagacctaatttgccagcatcttgatcatgtacttccagcctccagaactgtgagaaaatgcatttctgttgttaagccacccaatctgtggattttgttatggaagcccgagcaaactaatacaggtgttatttggaagatggagcttcaaagggtgcctggctgaaccggtcaagtattatttttgcgggaggtgataagtggtcagtggatcctcgagtttcaatttcaacattgaataaaagggactacagcctccagatacagaatgtagatgtgacagatgatggcccatacacgtgttctgttcagactcaacatacacccagaacaatgcaggtgcatctaactgtgcaagttcctcctaagatatatgacatctcaaatgatatgaccgtcaatgaaggaaccaacgtcactcttacttgtttggccactgggaaaccagagccttccatttcttggcgacacatctccccatcagcaaaaccatttgaaaatggacaatatttggacatttatggaattacaagggaccaggctggggaatatgaatgcagtgcggaaaatgatgtgtcattcccagatgtgaggaaagtaaaagttgttgtcaactttgctcctactattcaggaaattaaatctggcaccgtgacccccggacgcagtggcctgataagatgtgaaggtgcaggtgtgccgcctccagcctttgaatggtacaaaggagagaagaagctcttcaatggccaacaaggaattattattcaaaattttagcacaagatccattctcactgttaccaacgtgacacaggagcacttcggcaattatacctgtgtggctgccaacaagctaggcacaaccaatgcgagcctgcctcttaaccctccaagtacagcccagtatggaattaccgggagcgctgatgttcttttctcctgctggtaccttgtgttgacactgtcctctttcaccagcatattctacctgaagaatgccattctacaataaattcaaagacccataaaaggcttttaaggattctctgaaagtgctgatggctggatccaatctggtacagtttgttaaaagcagcgtgggatataatcagcagtgcttacatggggatgatcgccttctgtagaattgctcattatgtaaatactttaattctactcttttttgattagctacattaccttgtgaagcagtacacattgtcctttttttaagacgtgaaagctctgaaattacttttagaggatattaattgtgatttcatgtttgtaatctacaacttttcaaaagcattcagtcatggtctgctaggttgcaggctgtagtttacaaaaacgaatattgcagtgaatatgtgattctttaaggctgcaatacaagcattcagttccctgtttcaataagagtcaatccacatttacaaagatgcatttttttcttttttgataaaaaagcaaataatattgccttcagattatttcttcaaaatataacacatatctagatttttctgctcgcatgatattcaggtttcaggaatgagccttgtaatataactggctgtgcagctctgcttctctttcctgtaagttcagcatgggtgtgccttcatacaataatatttttctctttgtctccaactaatataaaatgttttgctaaatcttacaatttgaaagtaaaaataaaccagagtgatcaagttaaaccatacactatctctaagtaacgaaggagctattggactgtaaaaatctcttcctgcactgacaatggggtttgagaattttgccccacactaactcagttcttgtgatgagagacaatttaataacagtatagtaaatataccatatgatttctttagttgtagctaaatgttagatccaccgtgggaaatcattccctttaaaatgacagcacagtccactcaaaggattgcctagcaatacagcatcttttcctttcactagtccaagccaaaaattttaagatgatttgtcagaaagggcacaaagtcctatcacctaatattacaagagttggtaagcgctcatcattaattttattttgtggcagctaagttagtatgacagaggcagtgctcctgtggacaggagcattttgcatattttccatctgaaagtatcactcagttgatagtctggaatgcatgttatatattttaaaacttccaaaatatattataacaaacattctatatcggtatgtagcagaccaatctctaaaatagctaattcttcaataaaatctttctatatagccatttcagtgcaaacaagtaaaatcaaaaaagaccatcctttatttttccttacatgatatatgtaagatgcgatcaaataaagacaaaacaccagtgatgagaatatcttaagataagtaattatcaaattattgtgaatgttaaattatttctactataaagaagcaaaactacatttttgaaggaaaatgctgttactctaacattaatttacaggaatagtttgatggtttcactctttactaaagaaaggccatcaccttgaaagccattttacaggtttgatgaagttaccaatttcagtacacctaaatttctacaaatagtccccttttacaagttgtaacaacaaagaccctataataaaattagatacaagaaattttgcagtggttatacatatttgagatatctagtatgttgccctagcagggatggcttaaaaactgtgattttttttcttcaagtaaaacttagtcccaaagtacatcataaatcaattttaattagaaaaatgaatcttaaatgaggggacataagtatactctttccacaaaatggcaataataaggcataaagctagtaaatctactaactgtaataaatgtatgacattattttgattgatacattaaaaaagagtttttagaacaaatatggcatttaactttattatttatttgcttttaagaaatattctttgtggaattgttgaataaactataaaatattattttgtattgcagctttaaagtggcacactccataataatctacttactagaaatagtggtgctaccacaaaaaatgttaaccatcagtaccattgtttgggagaaagaaacagatcaagaatgcatattattcagtgaccgctttcctagagttaaaatacctcctctttgtaaggtttgtaggtaaattgaggtataaactatggatgaaccaaataattagttcaaagtgttgtcatgattccaaatttgtggagtctggtgtttttaccatagaatgtgacagaagtacagtcatagctcagtagctatatgtatttgcctttatgttagaagagactttcttgagtgacatttttaaatagaggaggtattcactatgtttttctgtatcacagcagcattcctagtccttaggccctcggacagagtgaaatcatgagtatttatgagttcaatattgtcaaataaggctacagtatttgcttttttgtgtgaatgtattgcatataatgttcaagtagatgattttacatttatggacatataaaatgtctgattaccccattttatcagtcctgactgtacaagattgttgcaatttcagaatagcagttttataaattgatttatcttttaatctataacaatttgtgttagctgttcatttcaggattatattttctacaagttccacttgtgggactccttttgttgcccctatttttttttaaagaaggaagaaagaaaaataagtagcagtttaaaaatgagaatggagagaaaagaaaaagaatgaaaaggaaaggcagtaaagagggaaaaaaaggaaggatggaaggaatgaaggaaggaagggaggaaggggagaaggtaggaagaaagaaaggatgagagggaaggaagaatcagagtattagggtagttaacttacacatttgcattcttagtttaactgcaagtggtgtaactacgtttttcaatgatcgcatttgaaacataagtcctattataccattaagttcctattatgcagcaattatataataaaaagtactgcccaagttatagtaatgtgggtgtttttgagacactaaaagatttgagagggagaatttcaaacttaaagccacttttggggggtttataacttaactgaaaaattaatgcttcatcataacatttaagctatatctagaaagtagactggagaactgagaaaattacccaggtaattcagggaaaaaaaaaaatatatatatatataaatacccctacatttgaagtcagaaaactctgaaaaactgaattatcaaagtcaatcatctataatgatcaaatttactgaacaattgttaatttatccattgtgcttagctttgtgacacagccaaaagttacctatttaatcttttcaataaaaattgttttttgaaatccagaaatgatttaaaaagaggtcaggtttttaactatttattgaagtatgtggatgtacagtatttcaatagatatgaatatgaataaatggtatgccttaagattctttgaatatgtatttactttaaagactggaaaaagctcttcctgtcttttagtaaaacatccatatttcataacctgatgtaaaatatgttgtactgtttccaataggtgaatataaactcagtttatcaattaaaatatgtatttgactcattttaaaactctattagcttaagagaaagaaggaagaaataataatttgaagatatttctgctattctctttatttcctgtattacactcatctttctgcttactctaaagcagtacagggtaaaaattctagatgctacagtttcaaatgactccacactatattctttcttgctgttgctgattcctaaaaggtttgatgagctgaactacatctaaactaaaaataaattttctggaaacattttattattaattatttagaacctttacctggtaaaatacagcagagttagcaacagagactaaatatcctgttgataaaatcctgatgatcttacaggctaaacaactgaaaactcaaacgcttgtaagagccaggcagagtgtaatttcttaacagctgggtataaaacaacgggcacctgaaggtattcagatacaatttccttaaaaataccttggtttccaagcaaaacacgttatttggctgagaacctttagtttgtaaataccaaaccataatatacaaatgagatctcaagccaaatgaattttttaagccctctttcccatatctgttcatctatgatagtcaactgaataaatgagaacaatgtgatagataaaacaacaaagcataaaaaagattcatgcttggttttataagctattttgaaatataagtatcattgctattctgagaaatctatatacaccaaagccctccctccacaaaaaaactggaaatgttctaataaatgtctgatttcccc

SEQ ID NO: 20062 - DNA, 5809 bp, Homo sapiens
  source 1..5809: mol_type = unassigned DNA
gaagaggaggaggggaggcaaaaacaccgaaaaacaaaaagagagaaacaacacccaacaactggggtggggggaagaaagaaagaaaagaaacccacccacccaccaaaaaaaaaaaaaaaaaaaaaaaaaaaaaaaaatcctgtggcgcgccgcctggttcccgggaagactcgccagcaccagggggtgggggagtgcgagctgaaagctgctggagagtgagcagccctagcagggatggacatgatgctgttggtgcagggtgcttgttgctcgaaccagtggctggcggcggtgctcctcagcctgtgctgcctgctaccctcctgcctcccggctggacagagtgtggacttcccctgggcggccgtggacaacatgatggtcagaaaaggggacacggcggtgcttaggtgttatttggaagatggagcttcaaagggtgcctggctgaaccggtcaagtattatttttgcgggaggtgataagtggtcagtggatcctcgagtttcaatttcaacattgaataaaagggactacagcctccagatacagaatgtagatgtgacagatgatggcccatacacgtgttctgttcagactcaacatacacccagaacaatgcaggtgcatctaactgtgcaagttcctcctaagatatatgacatctcaaatgatatgaccgtcaatgaaggaaccaacgtcactcttacttgtttggccactgggaaaccagagccttccatttcttggcgacacatctccccatcagcaaaaccatttgaaaatggacaatatttggacatttatggaattacaagggaccaggctggggaatatgaatgcagtgcggaaaatgatgtgtcattcccagatgtgaggaaagtaaaagttgttgtcaactttgctcctactattcaggaaattaaatctggcaccgtgacccccggacgcagtggcctgataagatgtgaaggtgcaggtgtgccgcctccagcctttgaatggtacaaaggagagaagaagctcttcaatggccaacaaggaattattattcaaaattttagcacaagatccattctcactgttaccaacgtgacacaggagcacttcggcaattatacctgtgtggctgccaacaagctaggcacaaccaatgcgagcctgcctcttaaccctccaagtacagcccagtatggaattaccgggagcgctgatgttcttttctcctgctggtaccttgtgttgacactgtcctctttcaccagcatattctacctgaagaatgccattctacaataaattcaaagacccataaaaggcttttaaggattctctgaaagtgctgatggctggatccaatctggtacagtttgttaaaagcagcgtgggatataatcagcagtgcttacatggggatgatcgccttctgtagaattgctcattatgtaaatactttaattctactcttttttgattagctacattaccttgtgaagcagtacacattgtcctttttttaagacgtgaaagctctgaaattacttttagaggatattaattgtgatttcatgtttgtaatctacaacttttcaaaagcattcagtcatggtctgctaggttgcaggctgtagtttacaaaaacgaatattgcagtgaatatgtgattctttaaggctgcaatacaagcattcagttccctgtttcaataagagtcaatccacatttacaaagatgcatttttttcttttttgataaaaaagcaaataatattgccttcagattatttcttcaaaatataacacatatctagatttttctgctcgcatgatattcaggtttcaggaatgagccttgtaatataactggctgtgcagctctgcttctctttcctgtaagttcagcatgggtgtgccttcatacaataatatttttctctttgtctccaactaatataaaatgttttgctaaatcttacaatttgaaagtaaaaataaaccagagtgatcaagttaaaccatacactatctctaagtaacgaaggagctattggactgtaaaaatctcttcctgcactgacaatggggtttgagaattttgccccacactaactcagttcttgtgatgagagacaatttaataacagtatagtaaatataccatatgatttctttagttgtagctaaatgttagatccaccgtgggaaatcattccctttaaaatgacagcacagtccactcaaaggattgcctagcaatacagcatcttttcctttcactagtccaagccaaaaattttaagatgatttgtcagaaagggcacaaagtcctatcacctaatattacaagagttggtaagcgctcatcattaattttattttgtggcagctaagttagtatgacagaggcagtgctcctgtggacaggagcattttgcatattttccatctgaaagtatcactcagttgatagtctggaatgcatgttatatattttaaaacttccaaaatatattataacaaacattctatatcggtatgtagcagaccaatctctaaaatagctaattcttcaataaaatctttctatatagccatttcagtgcaaacaagtaaaatcaaaaaagaccatcctttatttttccttacatgatatatgtaagatgcgatcaaataaagacaaaacaccagtgatgagaatatcttaagataagtaattatcaaattattgtgaatgttaaattatttctactataaagaagcaaaactacatttttgaaggaaaatgctgttactctaacattaatttacaggaatagtttgatggtttcactctttactaaagaaaggccatcaccttgaaagccattttacaggtttgatgaagttaccaatttcagtacacctaaatttctacaaatagtccccttttacaagttgtaacaacaaagaccctataataaaattagatacaagaaattttgcagtggttatacatatttgagatatctagtatgttgccctagcagggatggcttaaaaactgtgattttttttcttcaagtaaaacttagtcccaaagtacatcataaatcaattttaattagaaaaatgaatcttaaatgaggggacataagtatactctttccacaaaatggcaataataaggcataaagctagtaaatctactaactgtaataaatgtatgacattattttgattgatacattaaaaaagagtttttagaacaaatatggcatttaactttattatttatttgcttttaagaaatattctttgtggaattgttgaataaactataaaatattattttgtattgcagctttaaagtggcacactccataataatctacttactagaaatagtggtgctaccacaaaaaatgttaaccatcagtaccattgtttgggagaaagaaacagatcaagaatgcatattattcagtgaccgctttcctagagttaaaatacctcctctttgtaaggtttgtaggtaaattgaggtataaactatggatgaaccaaataattagttcaaagtgttgtcatgattccaaatttgtggagtctggtgtttttaccatagaatgtgacagaagtacagtcatagctcagtagctatatgtatttgcctttatgttagaagagactttcttgagtgacatttttaaatagaggaggtattcactatgtttttctgtatcacagcagcattcctagtccttaggccctcggacagagtgaaatcatgagtatttatgagttcaatattgtcaaataaggctacagtatttgcttttttgtgtgaatgtattgcatataatgttcaagtagatgattttacatttatggacatataaaatgtctgattaccccattttatcagtcctgactgtacaagattgttgcaatttcagaatagcagttttataaattgatttatcttttaatctataacaatttgtgttagctgttcatttcaggattatattttctacaagttccacttgtgggactccttttgttgcccctatttttttttaaagaaggaagaaagaaaaataagtagcagtttaaaaatgagaatggagagaaaagaaaaagaatgaaaaggaaaggcagtaaagagggaaaaaaaggaaggatggaaggaatgaaggaaggaagggaggaaggggagaaggtaggaagaaagaaaggatgagagggaaggaagaatcagagtattagggtagttaacttacacatttgcattcttagtttaactgcaagtggtgtaactacgtttttcaatgatcgcatttgaaacataagtcctattataccattaagttcctattatgcagcaattatataataaaaagtactgcccaagttatagtaatgtgggtgtttttgagacactaaaagatttgagagggagaatttcaaacttaaagccacttttggggggtttataacttaactgaaaaattaatgcttcatcataacatttaagctatatctagaaagtagactggagaactgagaaaattacccaggtaattcagggaaaaaaaaaaatatatatatatataaatacccctacatttgaagtcagaaaactctgaaaaactgaattatcaaagtcaatcatctataatgatcaaatttactgaacaattgttaatttatccattgtgcttagctttgtgacacagccaaaagttacctatttaatcttttcaataaaaattgttttttgaaatccagaaatgatttaaaaagaggtcaggtttttaactatttattgaagtatgtggatgtacagtatttcaatagatatgaatatgaataaatggtatgccttaagattctttgaatatgtatttactttaaagactggaaaaagctcttcctgtcttttagtaaaacatccatatttcataacctgatgtaaaatatgttgtactgtttccaataggtgaatataaactcagtttatcaattaaaatatgtatttgactcattttaaaactctattagcttaagagaaagaaggaagaaataataatttgaagatatttctgctattctctttatttcctgtattacactcatctttctgcttactctaaagcagtacagggtaaaaattctagatgctacagtttcaaatgactccacactatattctttcttgctgttgctgattcctaaaaggtttgatgagctgaactacatctaaactaaaaataaattttctggaaacattttattattaattatttagaacctttacctggtaaaatacagcagagttagcaacagagactaaatatcctgttgataaaatcctgatgatcttacaggctaaacaactgaaaactcaaacgcttgtaagagccaggcagagtgtaatttcttaacagctgggtataaaacaacgggcacctgaaggtattcagatacaatttccttaaaaataccttggtttccaagcaaaacacgttatttggctgagaacctttagtttgtaaataccaaaccataatatacaaatgagatctcaagccaaatgaattttttaagccctctttcccatatctgttcatctatgatagtcaactgaataaatgagaacaatgtgatagataaaacaacaaagcataaaaaagattcatgcttggttttataagctattttgaaatataagtatcattgctattctgagaaatctatatacaccaaagccctccctccacaaaaaaactggaaatgttctaataaatgtctgatttccccca

SEQ ID NO: 20063 - DNA, 927 bp, Homo sapiens
  source 1..927: mol_type = unassigned DNA
atgatgctgttggtgcagggtgcttgttgctcgaaccagtggctggcggcggtgctcctcagcctgtgctgcctgctaccctcctgcctcccggctggacagagtgtggacttcccctgggcggccgtggacaacatgatggtcagaaaaggggacacggcggtgcttaggtgttatttggaagatggagcttcaaagggtgcctggctgaaccggtcaagtattatttttgcgggaggtgataagtggtcagtggatcctcgagtttcaatttcaacattgaataaaagggactacagcctccagatacagaatgtagatgtgacagatgatggcccatacacgtgttctgttcagactcaacatacacccagaacaatgcaggtgcatctaactgtgcaagttcctcctaagatatatgacatctcaaatgatatgaccgtcaatgaaggaaccaacgtcactcttacttgtttggccactgggaaaccagagccttccatttcttggcgacacatctccccatcagttgctcctactattcaggaaattaaatctggcaccgtgacccccggacgcagtggcctgataagatgtgaaggtgcaggtgtgccgcctccagcctttgaatggtacaaaggagagaagaagctcttcaatggccaacaaggaattattattcaaaattttagcacaagatccattctcactgttaccaacgtgacacaggagcacttcggcaattatacctgtgtggctgccaacaagctaggcacaaccaatgcgagcctgcctcttaaccctccaagtacagcccagtatggaattaccgggagcgctgatgttcttttctcctgctggtaccttgtgttgacactgtcctctttcaccagcatattctacctgaagaatgccattctacaataa

SEQ ID NO: 20064 - DNA, 3215 bp, Homo sapiens
  source 1..3215: mol_type = unassigned DNA
aggtctaaaggtcgggaatgcttaccagtgaagcttttccaggacaggacgaagtttttggctgtgggctctctgggacagagtggagcgcctgtggatttagccggggacacaccatcctgctcgcaggtgcctggacaggacaggggacgagggaggaacactctctgaggaagcccaactcctatgagctcctctctggcagcactcaaaccagtgaagcttgggaaagtcattgacctccagtcgttctgctgagaaacatctggctctatttccatggagaccagggaatctgaagatttggaaaagacccggaggaaatcagcaagtgatcaatggaacactgataatgaaccagccaaggtgaaacctgagttactcccagaaaaagaggagacttctcaagctgaccaggatatccaagacaaagagcctcattgccacatcccaattaagagaaattccatcttcaatcgctccataagacgcaaaagcaaagccaaggccagagacaaccccgaacggaacgccagctgcctggcagattcacaggacaatggaaaatctgtaaatgagcccctgaccttgaatatcccctggagcagaatgcctccttgcagaacagcaatgcagacagacccaggagcccaggaaatgagtgagtcgtcctccaccccgggaaatggggccacgcccgaggagtggccggccctggccgacagccccaccacgctcaccgaggccctgcggatgatccaccccattcccgccgactcctggagaaacctcattgaacaaatagggctcctgtatcaggaataccgagataaatcgactctccaagaaatcgaaaccaggaggcaacaggatgcagaaatagaagacaataccaatgggtccccggccagtgaggacaccccggaggaggaagaagaagaggaggaggaggaggagccggccagcccaccagagaggaagactctgccccagatctgcctgctcagtaacccccactcaaggttcaacctctggcaggatcttcccgagatccggagcagcggggtgcttgagatcctacagcccgaggagattaagctgcaggaggccatgttcgagctggtcacttccgaggcgtcctactacaagagtctgaacctgctcgtgtcccacttcatggagaacgagcggataaggaagatcctgcacccgtccgaggcgcacatcctcttctccaacgtcctggacgtgctggctgtcagtgagcggttcctcctggagctggagcaccggatggaggagaacatcgtcatctctgacgtgtgtgacattgtgtaccgttatgcggccgaccacttctctgtctacatcacctacgtcagcaatcagacctaccaggagcggacctataagcagctgctccaggagaaggcagctttccgggagctgatcgcgcagctagagctcgaccccaagtgcagggggctgcccttctcctccttcctcatcctgcctttccagaggatcacacgcctcaagctgttggtccagaacatcctgaagagggtagaagagaggtctgagcgggagtgcactgctttggatgctcacaaggagctggaaatggtggtgaaggcatgcaacgagggcgtcaggaaaatgagccgcacggaacagatgatcagcattcagaagaagatggagttcaagatcaagtcggtgcccatcatctcccactcccgctggctgctgaagcagggtgagctgcagcagatgtcaggccccaagacctcccggaccctgaggaccaagaagctcttccacgaaatttacctcttcctgttcaacgacctgctggtgatctgccggcagattccaggagacaagtaccaggtatttgactcagctccgcggggactgctgcgtgtggaggagctggaggaccagggccagacgctggccaacgtgttcatcctgcggctgctggagaacgcagatgaccgggaggccacctacatgctaaaggcgtcctctcagagtgagatgaagcgttggatgacctcactggcccccaacaggaggaccaagtttgtttcgttcacatcccggctgctggactgcccccaggtccagtgcgtgcacccatacgtggctcagcagccagacgagctgacgctggagctcgccgacatcctcaacatcctggacaagactgacgacgggtggatctttggcgagcgtctgcacgaccaggagagaggctggttccccagctccatgactgaggagatcttgaatcccaagatccggtcccagaacctcaaggaatgtttccgtgtccacaagatggatgaccctcagcgcagccagaacaaggaccgcaggaagctgggcagccggaatcggcaatgacccccacccagggggccagcgggagcagggcctgcatgagaccccgacagaaggtgggggggggggggctctgggaagcacaggccagcacctccccaggtggcaggatctggcttggggtgcccggccctcatccctgcccacgcagtgagtgctcatgtgtcttggccccttgctcgcaaactggataaagggtgcccaagcctctcctgatgcatttgtaaacaagaaggtttcagcagtattacaccacctccctcatgcctccgagggggtggaagggggtgggcacactccagggccccccatgcccctggcccccagggactggaagaggctcccaacccagagtgtccctgtgggaggcaggcagaaggtgacaattgacacgatttcctgcacgcgtcctcctctaccttggaagcagttagaatctaccaggcacagatgaggccgcccttgcctgacggagcttgatgagcagcccttggtctccggttccaggactgagagcccagctgcctctgcccacccttccccaggcctctgccagcctctggctgcacggtcaggccctgccccatggcaggcctgccagagcttggctggggacccctcccgcctctggctccctgatgggctggatgtaacttgtgtcttctagccccttaaggagcccaggtgttttaaggaatgaattggtcactgcatcttgtatcgattatggttctgagaaaagcaaatatcacttttggctgcattaaaagaagcatcatatataaaataaagaagatgaaggtcta

SEQ ID NO: 20065 - DNA, 2286 bp, Homo sapiens
  source 1..2286: mol_type = unassigned DNA
ggagtgctcggcagcggtggcggcggcggctgcagctccggtcgagccgcgcgcgctgcgaccccgctccgcagcccgctagtcgcccccgacccagcccagggccccggcgtggcccccgacccggcccccgcacccgccccgccgccgaccctatggagctgctggccgctgccttcagcgccgcctgcgccgtggaccacgacagttccacctcggaaagcgacgcgcgcgactcggcggcgggacacctgcccggcagtgagtcgtcctccaccccgggaaatggggccacgcccgaggagtggccggccctggccgacagccccaccacgctcaccgaggccctgcggatgatccaccccattcccgccgactcctggagaaacctcattgaacaaatagggctcctgtatcaggaataccgagataaatcgactctccaagaaatcgaaaccaggaggcaacaggatgcagaaatagaagacaataccaatgggtccccggccagtgaggacaccccggaggaggaagaagaagaggaggaggaggaggagccggccagcccaccagagaggaagactctgccccagatctgcctgctcagtaacccccactcaaggttcaacctctggcaggatcttcccgagatccggagcagcggggtgcttgagatcctacagcccgaggagattaagctgcaggaggccatgttcgagctggtcacttccgaggcgtcctactacaagagtctgaacctgctcgtgtcccacttcatggagaacgagcggataaggaagatcctgcacccgtccgaggcgcacatcctcttctccaacgtcctggacgtgctggctgtcagtgagcggttcctcctggagctggagcaccggatggaggagaacatcgtcatctctgacgtgtgtgacattgtgtaccgttatgcggccgaccacttctctgtctacatcacctacgtcagcaatcagacctaccaggagcggacctataagcagctgctccaggagaaggcagctttccgggagctgatcgcgcagctagagctcgaccccaagtgcagggggctgcccttctcctccttcctcatcctgcctttccagaggatcacacgcctcaagctgttggtccagaacatcctgaagagggtagaagagaggtctgagcgggagtgcactgctttggatgctcacaaggagctggaaatggtggtgaaggcatgcaacgagggcgtcaggaaaatgagccgcacggaacagatgatcagcattcagaagaagatggagttcaagatcaagtcggtgcccatcatctcccactcccgctggctgctgaagcagggtgagctgcagcagatgtcaggccccaagacctcccggaccctgaggaccaagaagctcttccacgaaatttacctcttcctgttcaacgacctgctggtgatctgccggcagattccaggagacaagtaccaggtatttgactcagctccgcggggactgctgcgtgtggaggagctggaggaccagggccagacgctggccaacgtgttcatcctgcggctgctggagaacgcagatgaccgggaggccacctacatgctaaaggcgtcctctcagagtgagatgaagcgttggatgacctcactggcccccaacaggaggaccaagtttgtttcgttcacatcccggctgctggactgcccccaggtccagtgcgtgcacccatacgtggctcagcagccagacgagctgacgctggagctcgccgacatcctcaacatcctggacaagactgacgacgggtggatctttggcgagcgtctgcacgaccaggagagaggctggttccccagctccatgactgaggagatcttgaatcccaagatccggtcccagaacctcaaggaatgtttccgtgtccacaagatggatgaccctcagcgcagccagaacaaggaccgcaggaagctgggcagccggaatcggcaatgacccccacccagggggccagcgggagcagggcctgcatgagaccccgacagaaggtgggggggggggggctctgggaagcacaggccagcacctccccaggtggcaggatctggcttggggtgcccggccctcatccctgcccacgcagtgagtgctcatgtgtcttggccccttgctcgcaaactggataaagggtgcccaagcctctcctgatgcatttgtaaacaagaaggtttcagcagtattacaccacctccctcatgcctccgagggg

SEQ ID NO: 20066 - DNA, 1022 bp, Homo sapiens
  source 1..1022: mol_type = unassigned DNA
ggagtgctcggcagcggtggcggcggcggctgcagctccggtcgagccgcgcgcgctgcgaccccgctccgcagcccgctagtcgcccccgacccagcccagggccccggcgtggcccccgacccggcccccgcacccgccccgccgccgaccctatggagctgctggccgctgccttcagcgccgcctgcgccgtggaccacgacagttccacctcggaaagcgacgcgcgcgactcggcggcgggacacctgcccggcagtgagtcgtcctccaccccgggaaatggggccacgcccgaggagtggccggccctggccgacagccccaccacgctcaccgaggccctgcggatgatccaccccattcccgccgactcctggagaaacctcattgaacaaatagggctcctgtatcaggaataccgagataaatcgactctccaagaaatcgaaaccaggaggcaacaggatgcagaaatagaagacaataccaatgggtccccggccagtgaggacaccccggaggaggaagaagaagaggaggaggaggaggagccggccagcccaccagagaggaagactctgccccagatctgcctgctcagtaacccccactcaaggttcaacctctggcaggatcttcccgagatccggagcagcggggtgcttgagatcctacagcccgaggagattaagctgcaggaggccatgttcgagctggtcacttccgaggcgtcctactacaagagtctgaacctgctcgtgtcccacttcatggagaacgagcggataaggaagatcctgcacccgtccgaggcgcacatcctcttctccaacgtcctggacgtgctggctgtcagtgagcggtgaggacgggggggacagccacctccctcagggcccttcttcatccccagggcacatgcttgagacactgatgacaagtgctcgatactggcttctctacttccagatgtttggaatgttccataataaaatataaataaatgaagaactaaa

SEQ ID NO: 20067 - DNA, 1494 bp, Homo sapiens
  source 1..1494: mol_type = unassigned DNA
aaaaaaacaacccaaatcaggctggaatgcacggcccagaggtccacggcgaaccctggatcataaggagaccgtgccatgttcgagctggtcacttccgaggcgtcctactacaagagtctgaacctgctcgtgtcccacttcatggagaacgagcggataaggaagatcctgcacccgtccgaggcgcacatcctcttctccaacgtcctggacgtgctggctgtcagtgagcggttcctcctggagctggagcaccggatggaggagaacatcgtcatctctgacgtgtgtgacattgtgtaccgttatgcggccgaccacttctctgtctacatcacctacgtcagcaatcagacctaccaggagcggacctataagcagctgctccaggagaaggcagctttccgggagctgatcgcgcagctagagctcgaccccaagtgcagggggctgcccttctcctccttcctcatcctgcctttccagaggatcacacgcctcaagctgttggtccagaacatcctgaagagggtagaagagaggtctgagcgggagtgcactgctttggatgctcacaaggagctggaaatggtggtgaaggcatgcaacgagggcgtcaggaaaatgagccgcacggaacagatgatcagcattcagaagaagatggagttcaagatcaagtcggtgcccatcatctcccactcccgctggctgctgaagcagggtgagctgcagcagatgtcaggccccaagacctcccggaccctgaggaccaagaagctcttccacgaaatttacctcttcctgttcaacgacctgctggtgatctgccggcagattccaggagacaagtaccaggtatttgactcagctccgcggggactgctgcgtgtggaggagctggaggaccagggccagacgctggccaacgtgttcatcctgcggctgctggagaacgcagatgaccgggaggccacctacatgctaaaggcgtcctctcagagtgagatgaagcgttggatgacctcactggcccccaacaggaggaccaagtttgtttcgttcacatcccggctgctggactgcccccaggtccagtgcgtgcacccatacgtggctcagcagccagacgagctgacgctggagctcgccgacatcctcaacatcctggacaagactgacgacgggtggatctttggcgagcgtctgcacgaccaggagagaggctggttccccagctccatgactgaggagatcttgaatcccaagatccggtcccagaacctcaaggaatgtttccgtgtccacaagatggatgaccctcagcgcagccagaacaaggaccgcaggaagctgggcagccggaatcggcaatgacccccacccagggggccagcgggagcagggcctgcatgagaccccgacagaaggtgggggggggggggctctgggaagcacaggccagcacctccccaggtggcaggatctggc

SEQ ID NO: 20068 - DNA, 2513 bp, Homo sapiens
  source 1..2513: mol_type = unassigned DNA
aggtctaaaggtcgggaatgcttaccagtgaagcttttccaggacaggacgaagtttttggctgtgggctctctgggacagagtggagcgcctgtggatttagccggggacacaccatcctgctcgcaggtgcctggacaggacaggggacgagggaggaacactctctgaggaagcccaactcctatgagctcctctctggcagcactcaaaccagtgaagcttgggaaagtcattgacctccagtcgttctgctgagaaacatctggctctatttccatggagaccaggatatccaagacaaagagcctcattgccacatcccaattaagagaaattccatcttcaatcgctccataagacgcaaaagcaaagccaaggccagagacaaccccgaacggaacgccagctgcctggcagattcacaggacaatggaaaatctgtaaatgagcccctgaccttgaatatcccctggagcagaatgcctccttgcagaacagcaatgcagacagacccaggagcccaggaaatgagtgagtcgtcctccaccccgggaaatggggccacgcccgaggagtggccggccctggccgacagccccaccacgctcaccgaggccctgcggatgatccaccccattcccgccgactcctggagaaacctcattgaacaaatagggctcctgtatcaggaataccgagataaatcgactctccaagaaatcgaaaccaggaggcaacaggatgcagaaatagaagacaataccaatgggtccccggccagtgaggacaccccggaggaggaagaagaagaggaggaggaggaggagccggccagcccaccagagaggaagactctgccccagatctgcctgctcagtaacccccactcaaggttcaacctctggcaggatcttcccgagatccggagcagcggggtgcttgagatcctacagcccgaggagattaagctgcaggaggccatgttcgagctggtcacttccgaggcgtcctactacaagagtctgaacctgctcgtgtcccacttcatggagaacgagcggataaggaagatcctgcacccgtccgaggcgcacatcctcttctccaacgtcctggacgtgctggctgtcagtgagcggttcctcctggagctggagcaccggatggaggagaacatcgtcatctctgacgtgtgtgacattgtgtaccgttatgcggccgaccacttctctgtctacatcacctacgtcagcaatcagacctaccaggagcggacctataagcagctgctccaggagaaggcagctttccgggagctgatcgcgcagctagagctcgaccccaagtgcagggggctgcccttctcctccttcctcatcctgcctttccagaggatcacacgcctcaagctgttggtccagaacatcctgaagagggtagaagagaggtctgagcgggagtgcactgctttggatgctcacaaggagctggaaatggtggtgaaggcatgcaacgagggcgtcaggaaaatgagccgcacggaacagatgatcagcattcagaagaagatggagttcaagatcaagtcggtgcccatcatctcccactcccgctggctgctgaagcagggtgagctgcagcagatgtcaggccccaagacctcccggaccctgaggaccaagaagctcttccacgaaatttacctcttcctgttcaacgacctgctggtgatctgccggcagattccaggagacaagtaccaggtatttgactcagctccgcggggactgctgcgtgtggaggagctggaggaccagggccagacgctggccaacgtgttcatcctgcggctgctggagaacgcagatgaccgggaggccacctacatgctaaaggcgtcctctcagagtgagatgaagcgttggatgacctcactggcccccaacaggaggaccaagtttgtttcgttcacatcccggctgctggactgcccccaggtccagtgcgtgcacccatacgtggctcagcagccagacgagctgacgctggagctcgccgacatcctcaacatcctggacaagactgacgacgggtggatctttggcgagcgtctgcacgaccaggagagaggctggttccccagctccatgactgaggagatcttgaatcccaagatccggtcccagaacctcaaggaatgtttccgtgtccacaagatggatgaccctcagcgcagccagaacaaggaccgcaggaagctgggcagccggaatcggcaatgacccccacccagggggccagcgggagcagggcctgcatgagaccccgacagaaggtgggggggggggggctctgggaagcacaggccagcacctccccaggtggcaggatctggcttggggtgcccggccctcatccctgcccacgcagtgagtgctcatgtgtcttggccccttgctcgcaaactggataaagggtgcccaagcctctcctgatgcatttgtaaacaa

SEQ ID NO: 20069 - DNA, 1341 bp, Homo sapiens
  source 1..1341: mol_type = unassigned DNA
aatgggagtcatggcagccatggtggtcaggtggagatgacgggcagcagcgtcttcgactacattcaccctggggaccactcagaggtgctggagcaactggggctgcggacgccgacgcccggccccccaaccccgccctccgtctcctcttcctcctcctcttcctcttcgcttgcagatacccccgagatcgaggccagcctcaccaaggtgcccccctcctccctggtccaggagcgctccttctttgtccgcatgaaatccacgctcaccaagagggggctgcacgtcaaggcctcagggtacaaggtcatccacgtgactgggcgccttcgggcccacgccctgggccttgtggccctcgggcacacgttgcccccggcccccctggctgagctgccactccatggacacatgatcgtcttccgtctcagcctgggtctcaccatccttgcttgtgagagcagagtcagcgaccacatggacctggggccctcagagctggtgggccgcagctgctaccagtttgtccacggacaggacgccacgaggatccgccagagccacgtggactcgtgccgggggcttcgtgtggctgcagtctgtggccacagtggctgggagcgggaagagccccggggagcaccatgtgctttgggtcagccacgtgctcagccaagccgagggtggccaaactcctttggatgccttccagcttccagccagcgtggcctgtgaggaggcatccagcccggggccagagcccacagagccggagcctccgacggaagggaagcaggctgccccagcggagaacgaggccccccagacccagggcaaacgcatcaaagtggagcccggcccgagggaaaccaaaggctccgaggacagtggcgacgaggatccctccagccacccggccacaccgaggcccgagttcacctctgtcatccgggcaggggtcctgaagcaggatccggtgcggccatggggcctggcgcctcccggggaccccccgcccaccctcctgcacgcgggcttcctgccgccggtggtgcggggcctgtgcacacccggcaccatccgctacggccccgcggagctgggcctggtgtacccgcacctgcagaggctgggtccgggccccgcgctcccggaggccttttacccgcccctgggcctgccctacccggggcccgcgggcaccaggctgccgcggaagggggactgaggactggcagagctgccggcgccggaccctgcgacaaccggggtcccccaggacagtaggcccggctctgcccgtagccctgagaattaaacgccggctctccctgc

SEQ ID NO: 20070 - DNA, 2042 bp, Homo sapiens
  source 1..2042: mol_type = unassigned DNA
tcatccaggcccccccccccccagctccttgctgggaccctgagccctgcacggatctcagtttccctagaaggtctcccgagggcactaagcgttgcccctggccccctcccgctgcaggagactcggggctcggagcccgcctgagcgagccccccggagatggcggccccctatcccggcagtggcggcggaagcgaggtcaaatgcgtgggaggccgcggcgccagcgtcccctgggactttctacccgggctgatggtcaaggcgccgtccggaccgtgcctgcaggcgcagcgcaaggagaagtcccggaacgcggcgcgctcgcggcgcgggaaggagaacctggagttcttcgagctggccaagcttctcccgctgcccggcgccatctccagccagctggacaaggcttccatcgtgcgcctcagcgtcacctacctccgcctgcgccggttcgccgcgctgggggcgccgccctgggggctgagagccgcggggccgccagctggcctcgccccaggccgccgcggccccgcagcgctggtctccgaagtcttcgagcagcacctgggaggtcacatcttgcagtccctggatggctttgtgttcgccttgaaccaggaaggaaaattcctctacatctcagagacagtctccatctatctgggtctctcacaggtggagatgacgggcagcagcgtcttcgactacattcaccctggggaccactcagaggtgctggagcaactggggctgcggacgccgacgcccggccccccaaccccgccctccgtctcctcttcctcctcctcttcctcttcgcttgcagatacccccgagatcgaggccagcctcaccaaggtgcccccctcctccctggtccaggagcgctccttctttgtccgcatgaaatccacgctcaccaagagggggctgcacgtcaaggcctcagggtacaaggtcatccacgtgactgggcgccttcgggcccacgccctgggccttgtggccctcgggcacacgttgcccccggcccccctggctgagctgccactccatggacacatgatcgtcttccgtctcagcctgggtctcaccatccttgcttgtgagagcagagtcagcgaccacatggacctggggccctcagagctggtgggccgcagctgctaccagtttgtccacggacaggacgccacgaggatccgccagagccacgtggacttgctggacaagggtcaggtgatgactggttactaccgttggctgcagcgtgccgggggcttcgtgtggctgcagtctgtggccacagtggctgggagcgggaagagccccggggagcaccatgtgctttgggtcagccacgtgctcagccaagccgagggtggccaaactcctttggatgccttccagcttccagccagcgtggcctgtgaggaggcatccagcccggggccagagcccacagagccggagcctccgacggaagggaagcaggctgccccagcggagaacgaggccccccagacccagggcaaacgcatcaaagtggagcccggcccgagggaaaccaaaggctccgaggacagtggcgacgaggatccctccagccacccggccacaccgaggcccgagttcacctctgtcatccgggcaggggtcctgaagcaggatccggtgcggccatggggcctggcgcctcccggggaccccccgcccaccctcctgcacgcgggcttcctgccgccggtggtgcggggcctgtgcacacccggcaccatccgctacggccccgcggagctgggcctggtgtacccgcacctgcagaggctgggtccgggccccgcgctcccggaggccttttacccgcccctgggcctgccctacccggggcccgcgggcaccaggctgccgcggaagggggactgaggactggcagagctgccggcgccggaccctgcgacaaccggggtcccccaggacagtaggcccggctctgcccgtagccctgagaattaaacgccggctctccctgc

SEQ ID NO: 20071 - DNA, 4007 bp, Homo sapiens
  source 1..4007: mol_type = unassigned DNA
tttgccgcgcgagcagccggcctctcgcaggagccgagggacccgcgcggctgcggcccaggagcggcggccgcggagcccggagacccgcagccgcggcggcggcggcggcggcggcagcagctagagcagcgcctcccgccgccgcccgggaggagctcgccgcgcccgctcgccgcctcgtctcccagcggcggcgggaggcgcgtctccccggcccagtccgcgcccggccccgcggggccgctccggcccgctccgaggaaaaactgcatagaaaatctaatggatgaagatgagaaagacagagccaagagagcttctcgaaacaagtctgagaagaagcgtcgggaccagttcaatgttctcatcaaagagctcagttccatgctccctggcaacacgcggaaaatggacaaaaccaccgtgttggaaaaggtcatcggatttttgcagaaacacaatgaagtctcagcgcaaacggaaatctgtgacattcagcaagactggaagccttcattcctcagtaatgaagaattcacccagctgatgttggaggcattagatggcttcattatcgcagtgacaacagacggcagcatcatctatgtctctgacagtatcacgcctctccttgggcatttaccgtcggatgtcatggatcagaatttgttaaatttcctcccagaacaagaacattcagaagtttataaaatcctttcttcccatatgcttgtgacggattccccctccccagaatacttaaaatctgacagcgatttagagttttattgccatcttctcagaggcagcttgaacccaaaggaatttccaacttatgaatacataaaatttgtaggaaattttcgctcttacaacaatgtgcctagcccctcctgtaatggttttgacaacaccctttcaagaccttgccgggtgccactaggaaaggaggtttgcttcattgccaccgttcgtctggcaacaccacaattcttaaaggaaatgtgcatagttgacgaacctttagaggaattcacttcaaggcatagcttggaatggaaatttttatttctggatcacagagcacctccaatcataggatacctgccttttgaagtgctgggaacctcaggctatgactactaccacattgatgacctggagctcctggccaggtgtcaccagcacctgatgcagtttggcaaagggaagtcgtgttgctaccggtttctgaccaaaggtcagcagtggatctggctgcagactcactactacatcacctaccatcagtggaactccaagcccgagttcatcgtgtgcacacactcggtggtcagttacgcagatgtccgggtggaaaggaggcaggagctggctctggaagacccgccatccgaggccctccactcctcagcactaaaggacaagggctcaagcctggaacctcggcagcactttaacacactcgacgtgggtgcctcgggccttaataccagtcattcgccatcggcgtcctcaagaagttcccacaaatcctcgcacacagccatgtcagaacccacctccactcccaccaagctgatggcagaggccagcaccccggctttgccaagatcagccaccctgccccaagagttacctgtccccgggctcagccaggcagccaccatgccggcccctctgccttccccatcgtcctgcgacctcacacagcagctcctgcctcagaccgttctgcagagcacgcccgctcccatggcacagttttcggcacagttcagcatgttccagaccatcaaagaccagctagagcagcggacgcggatcctgcaggccaatatccggtggcaacaggaagagctccacaagatccaggagcagctctgcctggtccaggactccaacgtccagatgttcctgcagcagccagctgtatccctgagcttcagcagcacccagcgacctgaggctcagcagcagctacagcaaaggtcagctgcagtgactcagccccagctcggggcgggcccccaacttccagggcagatctcctctgcccaggtcacaagccagcacctgctcagagaatcaagtgtgatatcaacccagggtccaaagccaatgagaagctcacagctaatgcagagcagcggccgctctggaagcagcctagtgtccccgttcagcagcgccacagctgcgctcccgccaagtctgaatctgaccacacctgcttccacctcccaggatgccagccagtgccagcccagcccagacttcagccatgatcggcagctcaggctgttgctgagccagcccatccagcccatgatgcccgggtcctgtgacgcaaggcagccctcggaagtcagcaggacgggacggcaagtcaagtacgcccagagccagaccgtgtttcaaaatccagacgcacaccccgccaacagcagcagcgccccgatgcccgtcctgctgatggggcaggcggtgctccaccccagcttccctgcctcccaaccatcgcccctgcagcctgcacaggcccggcagcagccaccgcagcactacctgcaggtacaggcaccaacctctttgcacagtgagcagcaggactcgctacttctctccacctactcacaacagccagggaccctgggctacccccaaccacccccagcacagccccagcccctacgtcctccccgaagggtcagcagtctgtctgagtcgtcaggcctccagcagccgccccgataatgccccggcactgaagtcgggacacaatcagctttaaccaatggatgaggggggtggccacaggagatggggagaggagtctgaactaaacccctggcttttgtgcacactgcatacgtttcagaactcctggatggtaaccatctctggagtgcagcgcttgctgcagtggaaatgatcaggaatactgaccgtgtttctcttgcctccgaggttcttgggcacactctatagccatactggacaggaaccaggtgccccgtgtaggcatcgtcggtcggtttgccgtcagagatggcgcatctcgctgcatcccccgagagtacaccggttgctctagccacctgcggcccgcccatctgcgctagctggccttcacgctcttgatcgtctttcctttgtattggagaaggactgggtcagagatctgttggagagagagaataaagagattatttttcattatttttaaatggttgtttttgttttaatttgcacagctacacagaggaaataacttaggcactttctgttttttttaaaaaaataataaggtctcatggcttcatttagagaccacagtaacaacagcagcccaccaatcagagaagctggttgttattaaccaagctacagattcacactttctggcctaaaccctaatgggatgaggcttttcaccccaggccatgctggtggtgattttttagcccctaaataaaacactggactatttcctgtttacttcattgattgcaactacaaaggtggactcaaagcaaagcacaatcatgccagccaacattccagaattctgctgagaactccaagtctgtgaggggagaggttttacaagccagacaggcctgggggactgcagtccccaaggagaccctgccacatgctggccctttgagtgagaatgctgcatctttctacatatcttcatgagaatactgagaattggattttccttttcaaaatgcactttgctttttttgtatgttttgttatgttgagatgtttctaaagaaaagattttatgtaattataagatgaagcgtagtgaattgtacagctgttgtaataatgacctatttctatataaaataaaattgtatggcttatgtgtaaattattttgtatctgagataccagttccttttcccaaatataaaagtataaaagttttcttgtgtttttctgtgagtgaaaattttgtaataaattaacaaatttgtacaatt

SEQ ID NO: 20072 - DNA, 2725 bp, Homo sapiens
  source 1..2725: mol_type = unassigned DNA
ggatgtatgcgtatggttttgttgggagatgtgcccctttcccagccgaggagggacgcacctttgacctttctgaagagctgggcaggtcggtaaccagggaagggacaggcaccacccggctaaattcagaaccagtcccgctcctctgcttgccactccttaattgctcaaggaaaaactgcatagaaaatctaatggatgaagatgagaaagacagagccaagagagcttctcgaaacaagtctgagaagaagcgtcgggaccagttcaatgttctcatcaaagagctcagttccatgctccctggcaacacgcggaaaatggacaaaaccaccgtgttggaaaaggtcatcggatttttgcagaaacacaatgaagtctcagcgcaaacggaaatctgtgacattcagcaagactggaagccttcattcctcagtaatgaagaattcacccagctgatgttggaggcattagatggcttcattatcgcagtgacaacagacggcagcatcatctatgtctctgacagtatcacgcctctccttgggcatttaccgtcggatgtcatggatcagaatttgttaaatttcctcccagaacaagaacattcagaagtttataaaatcctttcttcccatatgcttgtgacggattccccctccccagaatacttaaaatctgacagcgatttagagttttattgccatcttctcagaggcagcttgaacccaaaggaatttccaacttatgaatacataaaatttgtaggaaattttcgctcttacaacaatgtgcctagcccctcctgtaatggttttgacaacaccctttcaagaccttgccgggtgccactaggaaaggaggtttgcttcattgccaccgttcgtctggcaacaccacaattcttaaaggaaatgtgcatagttgacgaacctttagaggaattcacttcaaggcatagcttggaatggaaatttttatttctggatcacagagcacctccaatcataggatacctgccttttgaagtgctgggaacctcaggctatgactactaccacattgatgacctggagctcctggccaggtgtcaccagcacctgatgcagtttggcaaagggaagtcgtgttgctaccggtttctgaccaaaggtcagcagtggatctggctgcagactcactactacatcacctaccatcagtggaactccaagcccgagttcatcgtgtgcacacactcggtggtcagttacgcagatgtccgggtggaaaggaggcaggagctggctctggaagacccgccatccgaggccctccactcctcagcactaaaggacaagggctcaagcctggaacctcggcagcactttaacacactcgacgtgggtgcctcgggccttaataccagtcattcgccatcggcgtcctcaagaagttcccacaaatcctcgcacacagccatgtcagaacccacctccactcccaccaagctgatggcagaggccagcaccccggctttgccaagatcagccaccctgccccaagagttacctgtccccgggctcagccaggcagccaccatgccggcccctctgccttccccatcgtcctgcgacctcacacagcagctcctgcctcagaccgttctgcagagcacgcccgctcccatggcacagttttcggcacagttcagcatgttccagaccatcaaagaccagctagagcagcggacgcggatcctgcaggccaatatccggtggcaacaggaagagctccacaagatccaggagcagctctgcctggtccaggactccaacgtccagatgttcctgcagcagccagctgtatccctgagcttcagcagcacccagcgacctgaggctcagcagcagctacagcaaaggtcagctgcagtgactcagccccagctcggggcgggcccccaacttccagggcagatctcctctgcccaggtcacaagccagcacctgctcagagaatcaagtgtgatatcaacccagggtccaaagccaatgagaagctcacagctaatgcagagcagcggccgctctggaagcagcctagtgtccccgttcagcagcgccacagctgcgctcccgccaagtctgaatctgaccacacctgcttccacctcccaggatgccagccagtgccagcccagcccagacttcagccatgatcggcagctcaggctgttgctgagccagcccatccagcccatgatgcccgggtcctgtgacgcaaggcagccctcggaagtcagcaggacgggacggcaagtcaagtacgcccagagccagaccgtgtttcaaaatccagacgcacaccccgccaacagcagcagcgccccgatgcccgtcctgctgatggggcaggcggtgctccaccccagcttccctgcctcccaaccatcgcccctgcagcctgcacaggcccggcagcagccaccgcagcactacctgcaggtacaggcaccaacctctttgcacagtgagcagcaggactcgctacttctctccacctactcacaacagccagggaccctgggctacccccaaccacccccagcacagccccagcccctacgtcctccccgaagggtcagcagtctgtctgagtcgtcaggcctccagcagccgccccgataatgccccggcactgaagtcgggacacaatcagctttaaccaatggatgaggggg

SEQ ID NO: 20073 - DNA, 838 bp, Homo sapiens
  source 1..838: mol_type = unassigned DNA
acgccccccacccgggaggggggagagaggcaaaaagtaagagaggaaaaaaaatagcaggaagatggcgcccaccaagcccagctttcagcaggatccttccaggcgagaacgaataactgcccagcatcctctgcccaaccaatcagaatgtaggaaaatctacagatatgacggaatctactgtgaatctacctaccagaatttacaagcattgagaaaggagaaatcccgagatgctgctcgctcccgccggggaaaagaaaactttgagttctatgaattggccaagttgttgcctcttcctgcagccattaccagccagctcgacaaggcatccatcattcgacttacaattagctatctgaaaatgagggactttgctaaccagggggaccctccgtggaacttgcgaatggaaggccctccacctaacacatcagtaaaagttataggtgcacagcgaaggagaagccccagtgcactagccattgaagtatttgaagcacatttgggaagccacattttgcagtccctggatggctttgtatttgcactaaatcaggaaggaaaatttttgtacatttccgaaacagtctccatctacctaggcctctcacaagtggagctgacaggcagcagtgtctttgactatgtccaccccggagatcacgtggagatggctgagcagctgggcatgaagctcccccctgggcggggtctcctgtcacagggcactgctgaggacggagccagctcagcatcttcctcctctcagtcggagacccccgagccagtggtttgcttcccaccagcgagtgatcagtttcttctgtag

SEQ ID NO: 20074 - DNA, 5847 bp, Homo sapiens
  source 1..5847: mol_type = unassigned DNA
ccgcccgcccacgccccccacccgggaggggggagagaggcaaaaagtaagagaggaaaaaaaatagcaggaagatggcgcccaccaagcccagctttcagcaggatccttccaggcgagaacgtttacaagcattgagaaaggagaaatcccgagatgctgctcgctcccgccggggaaaagaaaactttgagttctatgaattggccaagttgttgcctcttcctgcagccattaccagccagctcgacaaggcatccatcattcgacttacaattagctatctgaaaatgagggactttgctaaccagggggaccctccgtggaacttgcgaatggaaggccctccacctaacacatcagtaaaaggtgcacagcgaaggagaagccccagtgcactagccattgaagtatttgaagcacatttgggaagccacattttgcagtccctggatggctttgtatttgcactaaatcaggaaggaaaatttttgtacatttccgaaacagtctccatctacctaggcctctcacaagtggagctgacaggcagcagtgtctttgactatgtccaccccggagatcacgtggagatggctgagcagctgggcatgaagctcccccctgggcggggtctcctgtcacagggcactgctgaggacggagccagctcagcatcttcctcctctcagtcggagacccccgagccagtggagtcaaccagccccagtctgctaaccactgacaacactcttgagcgttcctttttcatccgaatgaaatctactctgaccaaacgcggtgtgcacatcaaatcatcaggatataaggtgattcacataacaggccggctacgcctgagagtgtcgctgtcccacgggaggaccgtccccagccaaatcatgggtctcgtggttgttgcgcatgccttgcctccccctacgatcaatgaagtcagaattgactgccatatgttcgtcactcgagtaaatatggacctcaatatcatttactgtgaaaataggattagtgattatatggatctgacccctgtagatatcgtagggaagagatgctaccacttcatccatgctgaagacgtggagggcatcaggcacagtcacttggacttgctgaataagggtcagtgtgtgacaaagtactatcgctggatgcagaagaacggaggatatatttggatacagtccagtgccaccatagctattaatgccaagaatgcaaatgaaaagaatatcatctgggtgaattaccttcttagcaatcctgagtacaaggacacacccatggacatcgcacagctcccccatctgccggagaaaacttccgaatcctcggagacatccgactctgagtcagactctaaagacacctcaggtattacagaggacaacgagaactccaagtccgacgagaaggggaaccagtccgagaacagcgaagacccggagcccgaccggaagaagtcgggcaacgcgtgtgacaacgacatgaactgcaacgacgacggccacagctccagtaacccggacagccgcgacagcgacgacagcttcgagcactcggactttgagaaccccaaggcgggcgaggacggcttcggtgctctgggcgcgatgcagatcaaggtggagcgctacgtggagagcgagtcggacctgcggctgcagaactgcgagtcactcacgtccgacagcgccaaggactcggacagcgcaggcgaggcgggcgcgcaggcctccagcaagcaccagaagcgcaagaaaaggcggaaacggcaaaagggcggcagcgccagccgccggcgcctgtccagcgcgtcgagcccaggcggcctggacgcgggcctggtggagcccccgcggctgctgtcctcccccaacagtgcctcggtgctcaagatcaagacggagatctcagaacccatcaatttcgacaatgacagcagcatctggaactacccgcccaaccgggagatctccaggaacgagtccccctacagcatgaccaagccccccagctctgagcacttcccgtccccgcagggcggcggcggtgggggtggcggtggcggggggctgcacgtggccattcccgactcggtcctcaccccgcccggcgccgacggcgcggccgcccgcaagactcagttcggcgcctcggccaccgcggccctggcccccgtcgcctccgacccgctgtcacccccgctctcggcgtccccgcgggacaagcaccccgggaacggcggcgggggcgggggcgggggcggcggcgcggggggcggcggccccagcgcgtccaactccttgctgtacactggggacctggaggcgctgcagaggttgcaggcgggcaacgtcgtgctcccgctggtgcacagggtgaccgggaccctggccgccaccagcacggccgcgcagagggtctacaccacgggcaccatccgctacgcgcccgccgaggtgaccctggccatgcagagcaacctgctgcccaacgcgcacgctgttaacttcgtggacgttaacagccccggctttggcctcgaccccaagacgcccatggagatgctctaccaccacgtgcaccggctcaacatgtcaggaccgttcggcggcgcagtgagcgcagctagcctgacgcagatgcccgccggcaacgtgttcaccacggccgagggactcttctccacgctgcccttccccgtctacagcaacggcatccacgcggcacagactctggagcgcaaggaggactgaggcgccgcccgtcctgggcccggccaggccccgcttggaggaggcatcgtcggcattttcgtttagacctttaattctagcactttgaattcgagcaggtcagcgtcttctctcgccacgacggtccccattccaccccctctttctttcacctgacttattctttcgtgtaaagatatgtttattttttgccttcagagggtcagacgaccagttgcctgccgttttgtcttcttctaaggtgtgtgttgggttgttttgctttcctttgcatctttattaagatgtctttcatgtgtatatgcctctgccatagaatactcagtcttgtggtcaagagagttctcaagtgacaaccattggggtttcttcataaagatcttgatatgatcaagatggaaagagacaagcataaacaatgtgccctgtttgactaagtcaaatgaaatagggtggtttttgtttctgttcctaattcctttaaaaaatagggggaatagtattttagaattttatgcagaatttaattctctttttacggttaagattttaagattttcttacttgcacataaaaataatttgggttcttaaacttaatttctggcctgtgactagaatgtttaaaaaaaaaaaagtcggactaaatgttaattactgaaacattaacttaatttctaaaaccatggtgctatcatttattaatctgtaatgtcttcatacaaaatgcagctcctgggctgggttttgggggaaaaaaaaaaaatgtgttctgtcctggtctggagtccgttgctgcagtctccttggttagttaagacaaagccctcattaacgtttgctgcaggacttaaaattttttacctcccaactaacaaacatagcctcacattaaatttaatgggtcagtaaagccccttttaaaggggctgctggaaaactcaatcaaactgatttgaggagcagtttaggtacatactgccttttgtttagctttttgttttccttactcagtctaactgaggctaattttgcaacttcaataacacttcggagtaaaagaaggaaaatatttaacatgtttttggtttttttcatttcttgcttaaaacaaaaaggaaggttgtatttggggggactggtttgatttgatggaatttctttccctttggttcttatttctgggttgaaaccaataagttttaaaactaaagaatgggttaataagcttcagacagataactgcaactgaaaactgcacattaagtaaaaaaaaaaaaaaagaaaaaaaaaagaaaaagaaaaagaaaaaaaatcctattttgtctttgttgccagaaatcagtgtggtgtcaaacactccaaatgactgtcaagtataaattcttcttccacttcatttttggcagctgtttgttaaggcatctaataacagatgtgagaactgtaatgtgtacaatgtgtatgtgtccttggctgtcagtcccattgcagtttcaatgtgtgtttctatatgcagtatatactaagctaatgtagttgttttgtcctttgtcttatctgtgctctatctctagtccggagtggtacagtcccattcctgcagtcctagtgaatcagtgattcttgggggttagtgggttttgtgtggtggccttcctctgtaatgtcaccctatgctgcttctactgtctgtgaatcttccgttttaccttttaaaattcctgctgttgctttgctggtgtatattctccctacctctcctctctttccctccctttcccatctccccctctccctcctcttcattccttccccatccccaaaatctctttcattctcagagataaaaagactcttaactagctcaaggttaatggagccatttttcccacaacggaattctgggtatgactctgtcttctggagtgcaacacaaagcactgaagaataatgctcagatatattaaataaattgatgccatatagcctcagttgttaacattcccagagtcccttgtgctctacctataagcagtgggtgcttttctttggtttcctttcaggttggctgatggagcaatatataaagcaattaccagtgagacagaaaattctttcaaaggtcaaccaacatttttaagaaacaaaatgggaggggataatggaatctagaattgtcatatatatttgtttacttgtgcaatgctaatatagtaactcggctgtcctttgaatatcactgtgttgagtagattcctctaggacctttgatttcatgagttgggcccaaaccgtggtggaataataacaaaaagaagttaaatgccacaaattttaatagtgagcttacttgaaggatttaagtaggtttaggaggtgaagaaggccgatggagaaatttacagattaattttggaagctctactctagctatcgaacaatcaaaggaatgcacctatcagctacaaagaacagctagacagctgttttttttcttttataaatgtttctgtgttgtgtcaaaatgatttctggtgatttaaactaacagataatcacagctgctgtctaaattcatagtgttgaaaattacaaaatgaaaaaaaaaaaaaaaacacttcattacctgtgaagactgtgtctgtgtttttaactatttcttgtacaaatatatgaaaacttttatgaggagactggtgccaagtagctgaataatggggaaagggatattctgttcgtaaaaatcttagcagtgttaccaactctacgatatatatataaaaaaataattaaaacgttacaaagcgacagctatggtacatttgttttgtgtgaagctaaccggacctaacttcctgagtgcctggcttattttgaaacattttttttcattgaccattgataatgctgcaaatcagaaatgtacatacttcatttacaacagggttctttttatacttttgtagattctcatacatgtcacatacatggttgtctttatgtaacttaattttttcatccgcaggtgccattttcataataaacttctcttggatttgttacta

SEQ ID NO: 20075 - DNA, 2802 bp, Homo sapiens
  source 1..2802: mol_type = unassigned DNA
atggcgcccaccaagcccagctttcagcaggatccttccaggcgagaacgaataactgcccagcatcctctgcccaaccaatcagaatgtaggaaaatctacagatatgacggaatctactgtgaatctacctaccagaatttacaagcattgagaaaggagaaatcccgagatgctgctcgctcccgccggggaaaagaaaactttgagttctatgaattggccaagttgttgcctcttcctgcagccattaccagccagctcgacaaggcatccatcattcgacttacaattagctatctgaaaatgagggactttgctaaccagggggaccctccgtggaacttgcgaatggaaggccctccacctaacacatcagtaaaagttataggtgcacagcgaaggagaagccccagtgcactagccattgaagtatttgaagcacatttgggaagccacattttgcagtccctggatggctttgtatttgcactaaatcaggaaggaaaatttttgtacatttccgaaacagtctccatctacctaggcctctcacaagtggagctgacaggcagcagtgtctttgactatgtccaccccggagatcacgtggagatggctgagcagctgggcatgaagctcccccctgggcggggtctcctgtcacagggcactgctgaggacggagccagctcagcatcttcctcctctcagtcggagacccccgagccagtggagtcaaccagccccagtctgctaaccactgacaacactcttgagcgttcctttttcatccgaatgaaatctactctgaccaaacgcggtgtgcacatcaaatcatcaggatataaggtgattcacataacaggccggctacgcctgagagtgtcgctgtcccacgggaggaccgtccccagccaaatcatgggtctcgtggttgttgcgcatgccttgcctccccctacgatcaatgaagtcagaattgactgccatatgttcgtcactcgagtaaatatggacctcaatatcatttactgtgaaaataggattagtgattatatggatctgacccctgtagatatcgtagggaagagatgctaccacttcatccatgctgaagacgtggagggcatcaggcacagtcacttggacttgctgaataagggtcagtgtgtgacaaagtactatcgctggatgcagaagaacggaggatatatttggatacagtccagtgccaccatagctattaatgccaagaatgcaaatgaaaagaatatcatctgggtgaattaccttcttagcaatcctgagtacaaggacacacccatggacatcgcacagctcccccatctgccggagaaaacttccgaatcctcggagacatccgactctgagtcagactctaaagacacctcaggtattacagaggacaacgagaactccaagtccgacgagaaggggaaccagtccgagaacagcgaagacccggagcccgaccggaagaagtcgggcaacgcgtgtgacaacgacatgaactgcaacgacgacggccacagctccagtaacccggacagccgcgacagcgacgacagcttcgagcactcggactttgagaaccccaaggcgggcgaggacggcttcggtgctctgggcgcgatgcagatcaaggtggagcgctacgtggagagcgagtcggacctgcggctgcagaactgcgagtcactcacgtccgacagcgccaaggactcggacagcgcaggcgaggcgggcgcgcaggcctccagcaagcaccagaagcgcaagaaaaggcggaaacggcaaaagggcggcagcgccagccgccggcgcctgtccagcgcgtcgagcccaggcggcctggacgcgggcctggtggagcccccgcggctgctgtcctcccccaacagtgcctcggtgctcaagatcaagacggagatctcagaacccatcaatttcgacaatgacagcagcatctggaactacccgcccaaccgggagatctccaggaacgagtccccctacagcatgaccaagccccccagctctgagcacttcccgtccccgcagggcggcggcggtgggggtggcggtggcggggggctgcacgtggccattcccgactcggtcctcaccccgcccggcgccgacggcgcggccgcccgcaagactcagttcggcgcctcggccaccgcggccctggcccccgtcgcctccgacccgctgtcacccccgctctcggcgtccccgcgggacaagcaccccgggaacggcggcgggggcgggggcgggggcggcggcgcggggggcggcggccccagcgcgtccaactccttgctgtacactggggacctggaggcgctgcagaggttgcaggcgggcaacgtcgtgctcccgctggtgcacagggtgaccgggaccctggccgccaccagcacggccgcgcagagggtctacaccacgggcaccatccgctacgcgcccgccgaggtgaccctggccatgcagagcaacctgctgcccaacgcgcacgctgttaacttcgtggacgttaacagccccggctttggcctcgaccccaagacgcccatggagatgctctaccaccacgtgcaccggctcaacatgtcaggaccgttcggcggcgcagtgagcgcagctagcctgacgcagatgcccgccggcaacgtgttcaccacggccgagggactcttctccacgctgcccttccccgtctacagcaacggcatccacgcggcacagactctggagcgcaaggaggactga

SEQ ID NO: 20076 - DNA, 2763 bp, Homo sapiens
  source 1..2763: mol_type = unassigned DNA
atggcgcccaccaagcccagctttcagcaggatccttccaggcgagaacgtttacaagcattgagaaaggagaaatcccgagatgctgctcgctcccgccggggaaaagaaaactttgagttctatgaattggccaagttgttgcctcttcctgcagccattaccagccagctcgacaaggcatccatcattcgacttacaattagctatctgaaaatgagggactttgctaaccagggggaccctccgtggaacttgcgaatggaaggccctccacctaacacatcagtaaaagggatacaaatgtggaaatctgaactctgcatgagaaagacaccatgtgaagttataggtgcacagcgaaggagaagccccagtgcactagccattgaagtatttgaagcacatttgggaagccacattttgcagtccctggatggctttgtatttgcactaaatcaggaaggaaaatttttgtacatttccgaaacagtctccatctacctaggcctctcacaagtggagctgacaggcagcagtgtctttgactatgtccaccccggagatcacgtggagatggctgagcagctgggcatgaagctcccccctgggcggggtctcctgtcacagggcactgctgaggacggagccagctcagcatcttcctcctctcagtcggagacccccgagccagtggagtcaaccagccccagtctgctaaccactgacaacactcttgagcgttcctttttcatccgaatgaaatctactctgaccaaacgcggtgtgcacatcaaatcatcaggatataaggtgattcacataacaggccggctacgcctgagagtgtcgctgtcccacgggaggaccgtccccagccaaatcatgggtctcgtggttgttgcgcatgccttgcctccccctacgatcaatgaagtcagaattgactgccatatgttcgtcactcgagtaaatatggacctcaatatcatttactgtgaaaataggattagtgattatatggatctgacccctgtagatatcgtagggaagagatgctaccacttcatccatgctgaagacgtggagggcatcaggcacagtcacttggacttgctgaataagggtcagtgtgtgacaaagtactatcgctggatgcagaagaacggaggatatatttggatacagtccagtgccaccatagctattaatgccaagaatgcaaatgaaaagaatatcatctgggtgaattaccttcttagcaatcctgagtacaaggacacacccatggacatcgcacagctcccccatctgccggagaaaacttccgaatcctcggagacatccgactctgagtcagactctaaagacacctcaggtattacagaggacaacgagaactccaagtccgacgagaaggggaaccagtccgagaacagcgaagacccggagcccgaccggaagaagtcgggcaacgcgtgtgacaacgacatgaactgcaacgacgacggccacagctccagtaacccggacagccgcgacagcgacgacagcttcgagcactcggactttgagaaccccaaggcgggcgaggacggcttcggtgctctgggcgcgatgcagatcaaggtggagcgctacgtggagagcgagtcggacctgcggctgcagaactgcgagtcactcacgtccgacagcgccaaggactcggacagcgcaggcgaggcgggcgcgcaggcctccagcaagcaccagaagcgcaagaaaaggcggaaacggcaaaagggcggcagcgccagccgccggcgcctgtccagcgcgtcgagcccaggcggcctggacgcgggcctggtggagcccccgcggctgctgtcctcccccaacagtgcctcggtgctcaagatcaagacggagatctcagaacccatcaatttcgacaatgacagcagcatctggaactacccgcccaaccgggagatctccaggaacgagtccccctacagcatgaccaagccccccagctctgagcacttcccgtccccgcagggcggcggcggtgggggtggcggtggcggggggctgcacgtggccattcccgactcggtcctcaccccgcccggcgccgacggcgcggccgcccgcaagactcagttcggcgcctcggccaccgcggccctggcccccgtcgcctccgacccgctgtcacccccgctctcggcgtccccgcgggacaagcaccccgggaacggcggcgggggcgggggcgggggcggcggcgcggggggcggcggccccagcgcgtccaactccttgctgtacactggggacctggaggcgctgcagaggttgcaggcgggcaacgtcgtgctcccgctggtgcacagggtgaccgggaccctggccgccaccagcacggccgcgcagagggtctacaccacgggcaccatccgctacgcgcccgccgaggtgaccctggccatgcagagcaacctgctgcccaacgcgcacgctgttaacttcgtggacgttaacagccccggctttggcctcgaccccaagacgcccatggagatgctctaccaccacgtgcaccggctcaacatgtcaggaccgttcggcggcgcagtgagcgcagctagcctgacgcagatgcccgccggcaacgtgttcaccacggccgagggactcttctccacgctgcccttccccgtctacagcaacggcatccacgcggcacagactctggagcgcaaggaggactga

SEQ ID NO: 20077 - DNA, 2531 bp, Homo sapiens
  source 1..2531: mol_type = unassigned DNA
gattttgtcacctgagactgctgttactctgaaaatgatagcattaacttgtctaattctgagaaagacatttgttagctaatgtagactattaatagagcaaacataaaactggttgggtattagcctagcaagtatctgaccagagcattatggcattacttagattacatagatattcagtaagatatttcaggtgtgatttctgcagtgaatacagtgtttacaccagaaaacaatgtcaggaatcctataatgtaatagggaatattattcaccatagtatattaaaagagaacggagccttgctgctgaaccaattttgatctcttcctttggtcttccttccttccttgtttctctctttcttattatttcataatgaaaaaaaagaatgctagactcaaatatttacagtgctttcagaattcaataaaatgcatacataaaaatgattttaatagtaccttgatactgaaaatattatctagctacttatcattgtggtctgatttttaaatttatttctcatcagacacaatacagagcaattcagagcaggtagaattctcctgtcagatgctcacacacaacttcagttgtgccagattctgccctcagcaatgtgagcaaacttcaaacagaaatgcacatgaatagttgaaggaaaatgctggatcccacctgttgcctcttctgggaagtaatatgtctataatgtttataaattttaataacccatacagcgctttatctttcaatattaaatttatattttcctaaagtttgacttctttgggcaatatattttattctctagtatcttagaaaatcaatctactaatgtatgtccattaataaataagtatgctcttatcaagcagttatcagcacatttataaaattacattgaaatcttcattttaaatatgatgttttcttcatctaactgaacgtgctgtgatctttattgagggctggaaacatatttgttgattctgacaaggtgaattgtattcgtgtttaccttctgctccccaagattataattgaaatgaatttttcaaaatagttccttttgatgaagatcccatactgatgaaagttaaatgaacagaagtattagtttgaaatagatacacgaatgtaagcccaacttataaattgattctagttgataatatcaagctacgcctgtaaaccttctgttaggtcttagaaacaataaatacacctcaatgcatggacaattgaaggaaaaaaaccttaacaagtaaaacacaatttttactcattggacttgagtttacaaaatgtaaggccagagttagagtttatggctttagtggacattttctggaactcattttactgtcactctctagttttgaaatagtttttggtagaattttggtgggaaaaaaggaaatacaaagaaagcagtatttgaatgatgacagagtcacatattctaaaccacacattctcactcctttgatttcagtttacaagcattgagaaaggagaaatcccgagatgctgctcgctcccgccggggaaaagaaaactttgagttctatgaattggccaagttgttgcctcttcctgcagccattaccagccagctcgacaaggcatccatcattcgacttacaattagctatctgaaaatgagggactttgctaaccagggggaccctccgtggaacttgcgaatggaaggccctccacctaacacatcagtaaaaggtgcacagcgaaggagaagccccagtgcactagccattgaagtatttgaagcacatttgggaagccacattttgcagtccctggatggctttgtatttgcactaaatcaggaaggaaaatttttgtacatttccgaaacagtctccatctacctaggcctctcacaagtggagctgacaggcagcagtgtctttgactatgtccaccccggagatcacgtggagatggctgagcagctgggcatgaagctcccccctgggcggggtctcctgtcacagggcactgctgaggacggagccagctcagcatcttcctcctctcagtcggagacccccgagccagtggtttgcttcccaccagcgagtgatcagtttcttctgtaggacccctgtcaggaagaacatgcctggatcctacttcagagagaactcagccagggcaaggggctcttgtggctttttgggtgggtgtgagttcatagaggggaaaatcaatactgtaccaggatttagacaatttagcaaaatgcatgaggcagtactttggatgatgaataactacagctgcatggctaacccattggttgtgtaaagtatgggttatcatgttttgtctaaattttcaggcaaaatctagcctgttttgtggcattaggatcatcattatagtagtatgatttttatgctattatacttacgctatgtcccgaatgtttttaaggccagcaaaatggaaacagtagagtacttgcctgaatgcaaataaacttcagtttcaactta

SEQ ID NO: 20078 - DNA, 2926 bp, Homo sapiens
  source 1..2926: mol_type = unassigned DNA
ggggagagaggcaaaaagtaagagaggaaaaaaaatagcaggaagatggcgcccaccaagcccagctttcagcaggatccttccaggcgagaacgtttacaagcattgagaaaggagaaatcccgagatgctgctcgctcccgccggggaaaagaaaactttgagttctatgaattggccaagttgttgcctcttcctgcagccattaccagccagctcgacaaggcatccatcattcgacttacaattagctatctgaaaatgagggactttgctaaccagggggaccctccgtggaacttgcgaatggaaggccctccacctaacacatcagtaaaagttataggtgcacagcgaaggagaagccccagtgcactagccattgaagtatttgaagcacatttgggaagccacattttgcagtccctggatggctttgtatttgcactaaatcaggaaggaaaatttttgtacatttccgaaacagtctccatctacctaggcctctcacaagtggagctgacaggcagcagtgtctttgactatgtccaccccggagatcacgtggagatggctgagcagctgggcatgaagctcccccctgggcggggtctcctgtcacagggcactgctgaggacggagccagctcagcatcttcctcctctcagtcggagacccccgagccagtggagtcaaccagccccagtctgctaaccactgacaacactcttgagcgttcctttttcatccgaatgaaatctactctgaccaaacgcggtgtgcacatcaaatcatcaggatataaggtgattcacataacaggccggctacgcctgagagtgtcgctgtcccacgggaggaccgtccccagccaaatcatgggtctcgtggttgttgcgcatgccttgcctccccctacgatcaatgaagtcagaattgactgccatatgttcgtcactcgagtaaatatggacctcaatatcatttactgtgaaaataggattagtgattatatggatctgacccctgtagatatcgtagggaagagatgctaccacttcatccatgctgaagacgtggagggcatcaggcacagtcacttggacttgctgaataagggtcagtgtgtgacaaagtactatcgctggatgcagaagaacggaggatatatttggatacagtccagtgccaccatagctattaatgccaagaatgcaaatgaaaagaatatcatctgggtgaattaccttcttagcaatcctgagtacaaggacacacccatggacatcgcacagctcccccatctgccggagaaaacttccgaatcctcggagacatccgactctgagtcagactctaaagacacctcaggtattacagaggacaacgagaactccaagtccgacgagaaggggaaccagtccgagaacagcgaagacccggagcccgaccggaagaagtcgggcaacgcgtgtgacaacgacatgaactgcaacgacgacggccacagctccagtaacccggacagccgcgacagcgacgacagcttcgagcactcggactttgagaaccccaaggcgggcgaggacggcttcggtgctctgggcgcgatgcagatcaaggtggagcgctacgtggagagcgagtcggacctgcggctgcagaactgcgagtcactcacgtccgacagcgccaaggactcggacagcgcaggcgaggcgggcgcgcaggcctccagcaagcaccagaagcgcaagaaaaggcggaaacggcaaaagggcggcagcgccagccgccggcgcctgtccagcgcgtcgagcccaggcggcctggacgcgggcctggtggagcccccgcggctgctgtcctcccccaacagtgcctcggtgctcaagatcaagacggagatctcagaacccatcaatttcgacaatgacagcagcatctggaactacccgcccaaccgggagatctccaggaacgagtccccctacagcatgaccaagccccccagctctgagcacttcccgtccccgcagggcggcggcggtgggggtggcggtggcggggggctgcacgtggccattcccgactcggtcctcaccccgcccggcgccgacggcgcggccgcccgcaagactcagttcggcgcctcggccaccgcggccctggcccccgtcgcctccgacccgctgtcacccccgctctcggcgtccccgcgggacaagcaccccgggaacggcggcgggggcgggggcgggggcggcggcgcggggggcggcggccccagcgcgtccaactccttgctgtacactggggacctggaggcgctgcagaggttgcaggcgggcaacgtcgtgctcccgctggtgcacagggtgaccgggaccctggccgccaccagcacggccgcgcagagggtctacaccacgggcaccatccgctacgcgcccgccgaggtgaccctggccatgcagagcaacctgctgcccaacgcgcacgctgttaacttcgtggacgttaacagccccggctttggcctcgaccccaagacgcccatggagatgctctaccaccacgtgcaccggctcaacatgtcaggaccgttcggcggcgcagtgagcgcagctagcctgacgcagatgcccgccggcaacgtgttcaccacggccgagggactcttctccacgctgcccttccccgtctacagcaacggcatccacgcggcacagactctggagcgcaaggaggactgaggcgccgcccgtcctgggcccggccaggccccgcttggaggaggcatcgtcggcattttcgtttagacctttaattctagcactttgaattcgagcaggtcagcgtcttctctcgccacgacggtccccattccaccccctctttctttcacctgacttattctttcgt

SEQ ID NO: 20079 - DNA, 3303 bp, Homo sapiens
  source 1..3303: mol_type = unassigned DNA
gctatataaggcggcgtgaggcaggcgaggggggcagcgcagccgagcggagcccaggagagcagagagcgagcctgagcgagagacggggaagcacggaggaggaagccgccggtgcgtcgggacgggagcgcaggtgctcgggcacccgagctggagctccgcagccgccggtcatgtaccgctccaccaagggcgcctccaaggcgcgccgggaccagatcaacgccgagatccggaacctcaaggagctgctgccgctggccgaagcggacaaggtccggctgtcctacctgcacatcatgagcctcgcctgcatctacactcgcaagggcgtcttcttcgctggtggcactcctctggcgggccccacggggcttctctcagctcaagagcttgaggacatcgtagcggcactacccggctttctgcttgtgttcacagccgaggggaaattgctctacctgtctgagagtgtgagcgagcatctgggccactccatggtggacctggttgcccagggtgacagcatctacgacatcattgacccagctgaccacctcactgtgcgccagcaactcaccctgccctctgccctggacactgatcgcctcttccgctgccgcttcaacacctccaagtccctcaggcgccagagtgcaggcaacaaactcgtgcttattcgaggccgattccatgctcacccacctggagcctactgggcaggaaatcccgtgttcacagctttctgtgcccctctggagccgagaccccgcccaggtcctggccctggccctggccctgcctcgctcttcctggccatgttccagagccgccatgctaaagacctggctctactggacatctccgagagtgtcctaatctacctgggctttgagcgcagtgaactgctttgtaaatcatggtatggactgctgcaccccgaggacctggcccacgcttctgctcaacactaccgcctgttggctgagagtggagatattcaggcagagatggtggtgaggctacaggccaagactggaggctgggcatggatttactgcctgttatactcagaaggtccagagggacccattactgccaataactacccaatcagtgacatggaagcctggagcctccgccagcagttgaactctgaagacacccaggcagcttatgtcctgggcactccgaccatgctgccctcattccctgaaaacattctttcccaggaagagtgctccagcactaacccactcttcaccgcagcactgggggctcccagaagcaccagcttccccagtgctcctgaactgagtgttgtctctgcatcagaagagcttccccgaccctccaaagaactggacttcagttacctgacattcccttctgggcctgagccttctctccaagcagaactaagcaaggatcttgtgtgcactccaccttacacgccccatcagccaggaggctgtgccttcctcttcagcctccatgagcccttccagacccatttgcccaccccatccagcactcttcaagaacagctgactccaagcactgcgaccttctctgatcagttgacgcccagcagtgcaaccttcccagatccactaactagcccactgcaaggccagttgactgaaacctcggtcagaagctatgaagaccagttgactccctgcacctccaccttcccagaccagctgcttcccagcacagccaccttcccagagcctctgggcagccctgcccatgaacagctgactcctcccagcacagcattccaagcacacctggacagccccagccaaaccttcccagagcaactgagccccaaccctaccaagacttactttgcccaggagggatgcagttttctctatgagaagttgcccccaagtcctagcagccctggtaatggggactgcacgctcttggccctagcccagctccggggccccctctctgtggatgtccccctggtgcccgaaggcctgctcacacctgaggcctctccagtcaagcagagtttcttccactactctgaaaaggagcagaatgagatagaccgtctcatccagcagattagccaattggctcagggcatggacagacccttctcagctgaggctggcactggcggactagagccacttggaggactggagcccctggactccaacctgtccctgtcaggggcaggcccccctgtgctcagcctggacctgaaaccctggaaatgccaggagctggacttcctggctgaccctgataacatgttcctggaagagacgcccgtggaagacatcttcatggatctctctaccccagatcccagtgaggaatggggctcaggggatcctgaggcagagggcccaggaggggccccatcgccttgcaacaacctgtccccagaagaccacagcttcctggaggacctggccacatatgaaaccgcctttgagacaggtgtctcagcattcccctatgatgggtttactgatgagttgcatcaactccagagccaagttcaagacagcttccatgaagatggaagtggaggggaaccaacgttttgaataagtctgtgacttaacgtcgtcaagtatggcatattgtcatcaagacgtggagccgctctccacccccccgggactgttggggggattctgagggccagagggggatatatatgattccccaggccctgcaggattttggggggggggaggtgggagggcaagggaggggagcttctttttaaaatcaagagacttcgagcgatcccagtttccatttcaatctgtattcactcgtagtgagtttccttgaatgggatttcaagcggagaatgggggagtctcacttccccgccgccttgccccattggcctgggccagttctccactcctaggggccaagccacccctagccttggtgggggaaaggcagggcccacccgggccagcccgtgccctgaggggctcttgacacccacgtagaattctctacacaccagtaacgggatttcaattccgatggactctgccgccctggcggcccttcctgtgacttttgcgccccgcgcctggggtggggggtgcgaagagacgctacgttcctttccgatggaggaaggcagacctgccgtcacacgtgtgcttgcacgagtgcgtgtacctggtgcgggactcacccggccgccagactgcctgggcctgcccagatggccacctcgtggtgctgcggtgactttgtagccaactttataataaagtccagtttgcctttttggta

SEQ ID NO: 20080 - DNA, 2454 bp, Homo sapiens
  source 1..2454: mol_type = unassigned DNA
ggggaagcacggaggaggaagccgccggtgcgtcgggacgggagcgcaggtgctcgggcacccgagctggagctccgcagccgccggtcatgtaccgctccaccaagggcgcctccaaggcgcgccgggaccagatcaacgccgagatccggaacctcaaggagctgctgccgctggccgaagcggacaaggtccggctgtcctacctgcacatcatgagcctcgcctgcatctacactcgcaagggcgtcttcttcgctggtggcactcctctggcgggccccacggggcttctctcagctcaagagcttgaggacatcgtagcggcactacccggctttctgcttgtgttcacagccgaggggaaattgctctacctgtctgagagtgtgagcgagcatctgggccactccatggtggacctggttgcccagggtgacagcatctacgacatcattgacccagctgaccacctcactgtgcgccagcaactcaccctgccctctgccctggacactgatcgcctcttccgctgccgcttcaacacctccaagtccctcaggcgccagagtgcaggcaacaaactcgtgcttattcgaggccgattccatgctcacccacctggagcctactgggcaggaaatcccgtgttcacagctttctgtgcccctctggagccgagaccccgcccaggtcctggccctggccctggccctgcctcgctcttcctggccatgttccagagccgccatgctaaagacctggctctactggacatctccgagagtggctgagagtggagatattcaggcagagatggtggtgaggctacaggccaagactggaggctgggcatggatttactgcctgttatactcagaaggtccagagggacccattactgccaataactacccaatcagtgacatggaagcctggagcctccgccagcagttgaactctgaagacacccaggcagcttatgtcctgggcactccgaccatgctgccctcattccctgaaaacattctttcccaggaagagtgctccagcactaacccactcttcaccgcagcactgggggctcccagaagcaccagcttccccagtgctcctgaactgagtgttgtctctgcatcagaagagcttccccgaccctccaaagaactggacttcagttacctgacattcccttctgggcctgagccttctctccaagcagaactaagcaaggatcttgtgtgcactccaccttacacgccccatcagccaggaggctgtgccttcctcttcagcctccatgagcccttccagacccatttgcccaccccatccagcactcttcaagaacagctgactccaagcactgcgaccttctctgatcagttgacgcccagcagtgcaaccttcccagatccactaactagcccactgcaaggccagttgactgaaacctcggtcagaagctatgaagaccagttgactccctgcacctccaccttcccagaccagctgcttcccagcacagccaccttcccagagcctctgggcagccctgcccatgaacagctgactcctcccagcacagcattccaagcacacctggacagccccagccaaaccttcccagagcaactgagccccaaccctaccaagacttactttgcccaggagggatgcagttttctctatgagaagttgcccccaagtcctagcagccctggtaatggggactgcacgctcttggccctagcccagctccggggccccctctctgtggatgtccccctggtgcccgaaggcctgctcacacctgaggcctctccagtcaagcagagtttcttccactactctgaaaaggagcagaatgagatagaccgtctcatccagcagattagccaattggctcagggcatggacagacccttctcagctgaggctggcactggcggactagagccacttggaggactggagcccctggactccaacctgtccctgtcaggggcaggcccccctgtgctcagcctggacctgaaaccctggaaatgccaggagctggacttcctggctgaccctgataacatgttcctggaagagacgcccgtggaagacatcttcatggatctctctaccccagatcccagtgaggaatggggctcaggggatcctgaggcagagggcccaggaggggccccatcgccttgcaacaacctgtccccagaagaccacagcttcctggaggacctggccacatatgaaaccgcctttgagacaggtgtctcagcattcccctatgatgggtttactgatgagttgcatcaactccagagccaagttcaagacagcttccatgaagatggaagtggaggggaaccaacgttttgaataagtctgtgacttaacgtcgtcaagtatggcatattgtcatcaagacgtggagccgctctccac

SEQ ID NO: 20081 - DNA, 5437 bp, Homo sapiens
  source 1..5437: mol_type = unassigned DNA
agtgggggcctgatagcgcggcggtgtggaccgcgcggccgaagagcgcggcgcccagagcgcgggccgctcgcggagccacagcccgagccgggtcccagccggagccgagccccagccgagccgagccgggcccggagcgcccggtgcccgcagccatgccggccggccgcgccgcgcgcacctgtgcgctgctcgccctctgcctcctgggcgccggggcccaggatttcgggccgacgcgcttcatctgcacctcggtgcccgtggacgccgacatgtgcgccgcgtccgtggccgccggcggcgccgaggagctccggagcagcgtgctgcagctccgcgagacggtgctgcagcagaaggagaccatcctgagccagaaggagaccatccgcgagctgaccgccaagctgggccgctgcgagagccagagcacgctggaccccggagccggcgaggcccgggcgggcggcggccgcaagcagcccggctcgggcaagaacaccatgggcgacctgtcccggacaccggccgccgagacgctcagccaactcgggcaaactttgcaatcgctcaaaacccgcctggagaacctcgagcagtacagccgcctcaattcctccagccagaccaacagcctcaaggatctgctgcagagcaagatcgatgagctggagaggcaggtgctgtcccgggtgaacaccctggaggagggcaaggggggccccaggaacgacaccgaggagagggtcaagatcgagaccgccctgacctccctgcaccagcggatcagcgagctcgagaaaggtcagaaagacaaccgccctggagacaagttccagctcacattcccactgcggaccaactatatgtatgccaaggtgaagaagagcctgccagagatgtacgccttcactgtctgcatgtggctcaagtccagcgccacgccaggtgtgggcacgcccttctcctacgctgtgcccggccaggccaacgagctggtcctcattgagtggggcaacaaccccatggagatcctcatcaatgacaaggtggccaagttgccttttgtcatcaatgatggcaagtggcaccacatctgtgtcacctggaccacccgggacggggtctgggaggcctaccaggatggcacgcagggtggcagtggcgagaacttggcgccctatcaccccatcaagccccagggcgtgctggtgctgggccaggagcaggacactctgggtggtgggtttgatgccacccaggcatttgtgggtgagctggcccacttcaacatctgggaccgcaagctgacccccggggaggtgtacaacctggccacctgcagcaccaaggctctgtccggcaatgtcatcgcctgggctgaatcccacatcgagatctacggaggggccaccaagtggaccttcgaggcctgtcgccagatcaactgagcacggcaggccaggctgagcccgcccgccctcgccccctgcttgtgcggcgatgatctgttttgtgcgtctcttctctcccttttccccaggaatgaaccgaggccgtcgcccctgcacacgcacacgcacacagcctggttttgtcctcatgcacacgaagcagcccctgctcccatctgtccctgaggaagccccacttctctgtaggagcccggactctctcaggcatgccccattcacagctgaagtgggtgctgcaacgtcttgaacaaggcagaagttggtgagaggatctgtgtgtgcgtgtctacatgtgtgtgtctacgtgtgtgcgtgcgtggctgggggaggccttttctttgaggacgtacctcatttccttctttcttctggctttggaaaaatctcatgatgaaaattcatatttgccaactttgttagctgcgtgcgtgctttggggttggtgcaacctcagtacacgcatttgtctttgtttgcaaacctttctcagagcgacatatctttatattgatgtaataaatgtcttttagtggtttgtcaaaggccgggggcgggggctctctacagagaatttttattttgtaatagaagtgaactgtctctgaagggtgaaggcaggccgtcctgggatggtaccctgtgctctcccgtggaggagaggggatggctgaggacactggcccttaccccagggccagacagcatccatccctgctgtttgcatctgagagcagcatggggcctgggaggtcggcctgtgtgcccagctcagctagctctgccccaggacggccctgccctcgaccttcccacctcctcagatcctgcaaggctggggtctgcccctcccttctcacctctggagctgtgctgcactgcttcagcccagagggccctgagagaggagcgtgccacccacagcccgggaagccgggccccagcacccctctcctttggcctccggcagtgcagaccagaggggaccttttaaggaaagaagccgtgtttcgatgaagacctggccacatggggccactgggacttcaacccagcccatcggtgggaaggtcctttttgggggactttgacagccatatccctcccagcacaccaggcgccaggtgagctggttcagacccctccaggggtactccagagacctcacgtgtggagccaggcctggccagggcaggggcctgaaacccactcctccatctcatggggctcacggcctacagcagcccacaagctgccactggccggcgacactgacacctgagcagtgtccagaacctttttgcctttttttgttccccgtgaaaagcaacatggacatttccttctagtccttccaaggaggggagagaagtgtatgtgcatttgtgtgtgtgtgtgtgtgttgtgtgtgtgtgtgcgctaagtgagaaagagagcaggctcgggaggccctgcccagggtaggaggagcttcctgctttgcaccatctggtggtcgcacgccctgagggcaccccgactctgtctccaggagtctcatcagcaaaccgctgacaagtctttctagaaattctactgcactgcctggctcagctgcagctgcagacatttctgcaggaggagcaggtgtttctgtcttctgttccttctagggccacctgtccccttaaacacaggtccacgttgtgtcaagaacctagtgcatctgtgtgtgtctgtcagtgtctctgtgtcagtgttctcgtgggtgtctgcacggtacccggccgccgttctgcaatgcatcactcccgcagaggggggtgcagatcaggcgccgtgctgcgcgttgttgttcaacagtggctttttcttagataatcgtgcttcctcagcgcccgtcgggttgtggcatccttggatctgcagggatcttctccgtttgcatgttcctcggggtggcgtgttccttgctccctgggtccgacatgtgttcccgcacctgcatggactgccccggttctgtgttgtgtgccgagtgccgcccagtgttctgtgaccacccgtgtagctactgaaaatggctgggtaagcaagtcaagggtgttggaggaggtcaagagagagctcagtttccctctccccctccccaaacacaccaagaagcatttttaacgtgtaggttgagaacaagcctaaaggattcccacagctgggagccagcaagagagcttggagtcgcctctctagaccagatctagccccaccctcactccagccatctcggagcccttgtgtaggcaacgcccggtgcgggctgtgtggggtgctcccctgccagcacctccggccagccccgcccctgccgatctactggaccgcagaccaccttctgcccccgtgggccaggtgggagctgtccgttcaggaccatgagccatcctctgccctgactagcgaggggcagagcacaccccagtgcttacgcctccacccctgcagcctcctggcccgctcaccttcctcacccctcctctgacccacccatggtgccagggccgaagctgacctttagctccctcctgccccttgctagggtctgagccaagcccctcgactccctcactgtgttgacacttggcactttgctggccccgagaaaggtcgatgacacagccgcaaatctaatccacgtagttcccatttactccttaatctgattgatgttccctcttgcactgaataatacatgcctctctcaggtaagccattttataaaacaagaagataaaaagcactgttgaggcagtgtttgcttttgccgagctggtgtccgacagctccctgggtgtccggggtgggagagctgttgacagaagctctccgggccctcaggggcttagatcccacttgagtcgtaagccttcttgcttttgataacacagtattatttctcttactgtagaagaaaaagtttattaccaaacaagagtatttttatgaaagaaaaggacaaacctataaattaactcaacctatatctcccttgaaaatactttcaggctccaccaaaacgtagaactgaaagcatgtattttggaagaaagagatacattttgtatgctttcttttccttttgtagattcccagtttattttctaagactgcaaagatcactttgtcaccagccctgggacctgagaccaagggggtgtcttgtgggcagtgagggggtgaggagaggctggcatgaggttcagtcattccagtgagctccaaagaggggccacctgttctcaaaagcatgttggggaccaggaggtaaaactggccatttatggtgaacctgtgtcttggagctgacttactaagtggaatgagccgaggatttgaatatcagttctaaccttgatagaagaaccttgggttacatgtggttcacattaagaggatagaatcctttggaatcttatggcaaccaaatgtggcttgacgaagtcgtggtttcatctcttaaacacagtgtgtaaatttattcaactaacgatgggaaatgtattacttctgtacacagtggactgaagtgcaatttgttgaaagggaacaagtcattgaagagaaaaaaaaagcccaatacttagagtcccaattttgtctcatttgccaaaaaaaaaaaaaaaaaaaaagcaaaccccctatggttgatattgttataatgtatatactgtataatatgaaagagaatcgatgtatctcactttttcattatttgctaaccaaagctgtacatttttcatatgatctgcagccttttgggtatcaaatgggtcaaaaccatgggacctgccacctcccatcagcaattctggaaatgcactatttctactggtattcttgctttttttttttttttcattttcttgctgaaatgacatgaattgttgagtttatttttacacagtaaagagtggagaaagact

SEQ ID NO: 20082 - DNA, 3957 bp, Homo sapiens
  source 1..3957: mol_type = unassigned DNA
agatcagaaggaaggacctcaggagggagggagagggaaggagcggagattggggaatgaaaaacacccggagaaaggccaggggctgggcccctccctatcccccactgcaggcctcaatgggttggggtagccgctggggtgctgcactgagggggcctgccctgctctgctccctgccagttggtttagaggagggggtggttgctgaccgggcaggatgtcttctagaaataatttttggcctggggaactggtttctttctgggcttcctggcaggaccacggctgctcacccagggattgaccaaggggtgtgtgttcctgggctctgggcctgctactgtgcccattgctggccaggaatgttttgcctggagtcagtcacaccatacccagggtgccacagtatatagatgggctatgggggttggcgcttacgggagaagtggccggtggggagggagaaggtgggccttgtggaaagggaggccaccaggcctggaacctgagctgtgaggacacttactcacctgagagtgtggcggcatcctagagcagtcaccttggggagccctggcgcccagagtactcccagctccttgctgccctgccctctcagcagagctccaggcagagtccctgctccaaggaagggccttggaggtggggagctgcccagcctcacacccaagaggcattggtgggtcagaggcacatctggcctggagggaagtgtgtgggcaccagggcctggctgtcgggtggggagaggcaggagcagagcctgggattgagcgaggagaggctctgagccccgccccatcctggaatcaggtcggttactctcagggtagctagcctcgttcctcctctgcagccacccctgctccttgggttgacttggcttggcggctgtccccattcccttctcatgcccaccacgcagcccagtgttgatgcagcagcccaccaggcactgccccccacccccatctccccaaggatgccagcacatgggcgtgacagcaggccagacctggagcatgaagagcttgggtcagctctttacagactggccctgtgccttggggcaaagtacttgacctgggaagctacccgctctgcgtctccagaatggagaccggagcctgccctggccacgcatcacagagcttggtggggaccgaactcaactcagacaccgataagcacttcacgcaggtgcagatgtcaggactgtgtcttccgcaggtcagaaagacaaccgccctggagacaagttccagctcacattcccactgcggaccaactatatgtatgccaaggtgaagaagagcctgccagagatgtacgccttcactgtctgcatgtggctcaagtccagcgccacgccaggtgtgggcacgcccttctcctacgctgtgcccggccaggccaacgagctggtcctcattgagtggggcaacaaccccatggagatcctcatcaatgacaaggtggccaagttgccttttgtcatcaatgatggcaagtggcaccacatctgtgtcacctggaccacccgggacggggtctgggaggcctaccaggatggcacgcagggtggcagtggcgagaacttggcgccctatcaccccatcaagccccagggcgtgctggtgctgggccaggagcaggacactctgggtggtgggtttgatgccacccaggcatttgtgggtgagctggcccacttcaacatctgggaccgcaagctgacccccggggaggtgtacaacctggccacctgcagcaccaaggctctgtccggcaatgtcatcgcctgggctgaatcccacatcgagatctacggaggggccaccaagtggaccttcgaggcctgtcgccagatcaactgagcacggcaggccaggctgagcccgcccgccctcgccccctgcttgtgcggcgatgatctgttttgtgcgtctcttctctcccttttccccaggaatgaaccgaggccgtcgcccctgcacacgcacacgcacacagcctggttttgtcctcatgcacacgaagcagcccctgctcccatctgtccctgaggaagccccacttctctgtaggagcccggactctctcaggcatgccccattcacagctgaagtgggtgctgcaacgtcttgaacaaggcagaagttgcgcccgtcgggttgtggcatccttggatctgcagggatcttctccgtttgcatgttcctcggggtggcgtgttccttgctccctgggtccgacatgtgttcccgcacctgcatggactgccccggttctgtgttgtgtgccgagtgccgcccagtgttctgtgaccacccgtgtagctactgaaaatggctgggtaagcaagtcaagggtgttggaggaggtcaagagagagctcagtttccctctccccctccccaaacacaccaagaagcatttttaacgtgtaggttgagaacaagcctaaaggattcccacagctgggagccagcaagagagcttggagtcgcctctctagaccagatctagccccaccctcactccagccatctcggagcccttgtgtaggcaacgcccggtgcgggctgtgtggggtgctcccctgccagcacctccggccagccccgcccctgccgatctactggaccgcagaccaccttctgcccccgtgggccaggtgggagctgtccgttcaggaccatgagccatcctctgccctgactagcgaggggcagagcacaccccagtgcttacgcctccacccctgcagcctcctggcccgctcaccttcctcacccctcctctgacccacccatggtgccagggccgaagctgacctttagctccctcctgccccttgctagggtctgagccaagcccctcgactccctcactgtgttgacacttggcactttgctggccccgagaaaggtcgatgacacagccgcaaatctaatccacgtagttcccatttactccttaatctgattgatgttccctcttgcactgaataatacatgcctctctcaggtaagccattttataaaacaagaagataaaaagcactgttgaggcagtgtttgcttttgccgagctggtgtccgacagctccctgggtgtccggggtgggagagctgttgacagaagctctccgggccctcaggggcttagatcccacttgagtcgtaagccttcttgcttttgataacacagtattatttctcttactgtagaagaaaaagtttattaccaaacaagagtatttttatgaaagaaaaggacaaacctataaattaactcaacctatatctcccttgaaaatactttcaggctccaccaaaacgtagaactgaaagcatgtattttggaagaaagagatacattttgtatgctttcttttccttttgtagattcccagtttattttctaagactgcaaagatcactttgtcaccagccctgggacctgagaccaagggggtgtcttgtgggcagtgagggggtgaggagaggctggcatgaggttcagtcattccagtgagctccaaagaggggccacctgttctcaaaagcatgttggggaccaggaggtaaaactggccatttatggtgaacctgtgtcttggagctgacttactaagtggaatgagccgaggatttgaatatcagttctaaccttgatagaagaaccttgggttacatgtggttcacattaagaggatagaatcctttggaatcttatggcaaccaaatgtggcttgacgaagtcgtggtttcatctcttaaacacagtgtgtaaatttattcaactaacgatgggaaatgtattacttctgtacacagtggactgaagtgcaatttgttgaaagggaacaagtcattgaagagaaaaaaaaagcccaatacttagagtcccaattttgtctcatttgcc

SEQ ID NO: 20083 - DNA, 2700 bp, Homo sapiens
  source 1..2700: mol_type = unassigned DNA
agcgcggtgggtgcggctgtgagacggcaggagacttctgccccgcggtgcacgcgaccctcgagacgacagcgcggctactgccagcagcgaaggcgcctcccgcggagcgccccgacggcgcccgctcgcccatgccgagctgagcgcggcagcggcggcgggatgctggcgctgctggccgccagcgtggcgctcgccgtggccgctggggcccaggacagcccggcgcccggtagccgcttcgtgtgcacggcactgcccccagaggcggtgcacgccggctgcccgctgcccgcgatgcccatgcagggcggcgcgcagagtcccgaggaggagctgagggccgcggtgctgcagctgcgcgagaccgtcgtgcagcagaaggagacgctgggcgcgcagcgcgaggccatccgcgagctcacgggcaagctagcgcgctgcgaggggctggcgggcggcaaggcgcgcggcgcgggggccacgggcaaggacactatgggcgacctgccgcgggaccccggccacgtcgtggagcagctcagccgctcgctgcagaccctcaaggaccgcctggagagcctcgagcaccagctcagagcaaacgtgtccaatgctgggctgcccggcgacttccgcgaggtgctccagcagcggctgggggagctggagaggcagcttctgcgcaaggtggcagagctggaggacgagaagtccctgctgcacaatgagacctcggctcaccggcagaagaccgagagcaccctgaacgcgctgctgcagagggtcaccgagctggagcgaggcaatagcgcctttaagtcaccagatgcgttcaaggtgtccctcccactccgcacaaactacctatacggcaagatcaagaagacgctgcctgagctgtacgccttcaccatctgcctgtggctgcggtccagcgcctcaccaggcattggcacccccttctcctatgcggtgccagggcaggccaacgagatcgtgctgatcgagtggggcaacaaccccatcgagctgctcatcaacgacaaggttgcgcagctgcccctgtttgtcagtgacggcaagtggcaccacatctgtgtcacctggacgacacgggatggcatgtgggaggcattccaggacggagagaagctgggcactggggagaacctggccccctggcaccccatcaagcccgggggcgtgctgatccttggacaagagcaggacaccgtggggggtaggtttgatgccactcaggcatttgtcggggagctcagccagttcaacatatgggaccgcgtccttcgcgcacaagaaattgtcaacatcgccaactgctccacaaacatgccgggcaacatcatcccgtgggtggacaataacgtcgatgtgttcggaggggcctccaagtggcccgtggagacgtgtgaggagcgtctccttgacttgtagccgccttctcctctgtccaggaggccgggatcaggctgttgccatggaagttcagggccatagactgccccacttaaactcttgtcagtctgggctcagggttcccagagctcattccccaggaatctctaagaccagggctggggcagtgtctgtcactggcttgtttgttccctaccaatattctgttgctgtttgaagtagtgccagggtcccctgggaagatgcccccaagacacctgccccaagtgggtggatatctgccttcctgctgcaagtggaggcaggtccagcagcccctcttcagagcccctgtaaatgctatcgcagcctgagtcctgccgccttccagttccttggtgtcccgtgcaccccttctgtctgtcccctttcatggctgtgcagccgtcccgctggagtggccatgtcccttgtgcattgagtgcatccccgctggtgactaagctcgcagcaagcggctaccccccgatctgcaaaagggcctctccctttgtgttctatacattgtgaatcttcccgtctgaagaacgcccagcctgcccagacaaagccccgccttccccaaagcagaggggctgtctgtgtctccagaaaggggacatcgggggggaggggggctcagaaaggagaagggctgtgatctccggtcccttcccccatcatccttccttagactgatgctttgactgaatcatcactagctatggcattaaaaggcctctcttctcatctggtgccaaaggttccgttgcagctttttacaaccatccggtgtggtttggaggatttgttttttttttttcccaacagaaaagaacagccattagaagaaggctcccattttctgatgttccgccccactgtgaagagtgtgctcgttttaaattcatgttgattcttgtaagcactggactgtcttcatcaagtatttccctacagaactcctcaagaaaacagagatcatttggctagagattgtctgagtgactccaagctactcactgtattggacgggagtagtaatttattttaaagataaagtgactaagtggggaaatttataaagctaaatattatatattttatttttcatacatgtttgaagtgcaaatctgtggatattccatttgtaggaccaagtcgacatgcccatcctgacattgtatgctacgagaactcttctgatgatggaatttcgattaaagtgcactgaaagat

SEQ ID NO: 20084 - DNA, 1294 bp, Homo sapiens
  source 1..1294: mol_type = unassigned DNA
gcgggtacttaaggcgcggccaccgcggctgcggcagtgcgcccaacagcggactccgagaccagcggatctcggcaaaccctctttctcgaccacccacctaccattcttggaaccatggcggcagtggcggcggcctcggctgaactgctcatcatcggctggtacatcttccgcgtgctgctgcaggtgttcctggaatgctgcatttactgggtaggattcgcttttcgaaatcctccagggacacagcccattgcgagaagtgaggtgttcaggtactccctgcagaagctggcatacacggtgtcgcggaccgggcggcaggtgttgggggagcgcaggcagcgagcccccaactgaggccccagctcccagccctgggcggccgtatcatcaggtgctcctgtgcatctcggccagcacgggagccagtgccgcgcaggaatgtggggtcccctgtgttccctcgccagaggagcacttggcaaggtcagtgaggggccagtagacccccggagaagcagtaccgacaatgacgaagataccagatcccttcccaacccctttgcaccggtcccactaaggggcagggtcgagagaggaggggggatagggggagcagacccctgagatctgggcataggcaccgcattctgatctggacaaagtcgggacagcaccatcccagccccgaagccagggccatgccagcaggccccaccatggaaatcaaaacaccgcaccagccagcagaatggacattctgacatcgccagccgacgccctgaatcttggtgcagcaccaaccgcgtgcctgtgtggcgggactggagggcacagttgaggaaggagggtggttaagaaatacagtggggccctctcgctgtcccttgcccagggcacttgcattccagcctcgctgcatttgctctctcgattcccctttcctcctcactgcctcccaagcccaccctactccaaaataatgtgtcacttgatttggaactattcaagcagtaaaagtaaatgaatcccacctttactaaaacactttctctgaaccccccttgcccctcactgatcttgcttttccctggtctcatgcagttgtggtcaatattgtggtaatcgctaattgtactgattgtttaagtgtgcattagttgtgtctccccagctagattgtaagctcctggaggacagggaccacctctacaaaaaataaaaaaagtacctcccctgtctcgcacagtgtcccaggaccctgcggtgcagtagaggcgcaccaaaa

SEQ ID NO: 20085 - DNA, 1209 bp, Homo sapiens
  source 1..1209: mol_type = unassigned DNA
gtacttaaggcgcggccaccgcggctgcggcagtgcgcccaacagcggactccgagaccagcggatctcggcaaaccctctttctcgaccacccacctaccattcttggaaccatggcggcagtggcggcggcctcggctgaactgctcatcatcggctggtacatcttccgcgtgctgctgcaggtgttcaggtactccctgcagaagctggcatacacggtgtcgcggaccgggcggcaggtgttgggggagcgcaggcagcgagcccccaactgaggccccagctcccagccctgggcggccgtatcatcaggtgctcctgtgcatctcggccagcacgggagccagtgccgcgcaggaatgtggggtcccctgtgttccctcgccagaggagcacttggcaaggtcagtgaggggccagtagacccccggagaagcagtaccgacaatgacgaagataccagatcccttcccaacccctttgcaccggtcccactaaggggcagggtcgagagaggaggggggatagggggagcagacccctgagatctgggcataggcaccgcattctgatctggacaaagtcgggacagcaccatcccagccccgaagccagggccatgccagcaggccccaccatggaaatcaaaacaccgcaccagccagcagaatggacattctgacatcgccagccgacgccctgaatcttggtgcagcaccaaccgcgtgcctgtgtggcgggactggagggcacagttgaggaaggagggtggttaagaaatacagtggggccctctcgctgtcccttgcccagggcacttgcattccagcctcgctgcatttgctctctcgattcccctttcctcctcactgcctcccaagcccaccctactccaaaataatgtgtcacttgatttggaactattcaagcagtaaaagtaaatgaatcccacctttactaaaacactttctctgaaccccccttgcccctcactgatcttgcttttccctggtctcatgcagttgtggtcaatattgtggtaatcgctaattgtactgattgtttaagtgtgcattagttgtgtctccccagctagattgtaagctcctggaggacagggaccacctctacaaaaaataaaaaaagtacctcccctgtctcgcacagtgtcccaggaccctgcggtgcagtagaggcgcaccaaaa

SEQ ID NO: 20086 - DNA, 322 bp, Homo sapiens
  source 1..322: mol_type = unassigned DNA
cagattttgggaagtccaaaatgattagctcagtaaaactcaatctcatcctagttctgtcgctgtccacaatgcatgtgttttggtgttatccagttccatcttctaaggtgtctggaaaatctgattactttctcattctgctgaacagctgcccaaccagattggacaggagcaaagaactagcttttctaaagccaattttggagaagatgtttgtgaaaaggtcctttcgcaatggagttggcacagggatgaaaaaaacttcctttcaaagagcaaaatcatgactaagtgtgcaaaggactcggggaattaatct

SEQ ID NO: 20087 - DNA, 848 bp, Homo sapiens
  source 1..848: mol_type = unassigned DNA
gttgtgctgctctacgcctctacctacgtcctggtgtccctcagcatagacagataccatgccatcgtctaccccatgaaggtcctcattgtgatcgcctggagcctgtcttttctgttctccattcccaccctgatcatatttgggaagaggacactgtccaacggtgaagtgcagtgctgggccctgtggcctgacgactcctactggaccccatacatgaccatcgtggccttcctgggctccttgataaccttcatctgctgttggagtccatacttcctgtttgacattttggacaatttcaacctccttccagacacccaggagcgtttctatgcctctgtgatcattcagaacctgccagcattgaatagtgccatcaaccccctcatctactgtgtcttcagcagctccatctctttcccctgcagggagcaaagatcacaggattccagaatgacgttccgggagagaactgagaggcatgagatgcagattctgtccaagccagaattcatctagaccctagggcagtgccagtgctaggctgagcaccatcagctctcccaggtccttgtcacctgcttgggcacgtgcatggaacccgagccaacttcaccccaccctcgtcattacctgggagatgcacaagacaaatgttctaatgactgcatgcactgcttaagtattggccaacacgaactccccagttattcatgccagccaggaaggaaacgccttccttccccaccattcccagccctccttcccactggccagcacctgaacccagtgaacacaggcattagtggtccagggtcctggcttggagccagtgagtagac

SEQ ID NO: 20088 - DNA, 1410 bp, Homo sapiens
  source 1..1410: mol_type = unassigned DNA
gggctcagggagggctctgtgcctccgttcagcagagctgcagctgctgcccagctctcaggaggcaagctggactccctcactcagctgcaggagcaaggacagtgaggctcaaccccgcctgagccatgccagccaacttcacagagggcagcttcgattccagtgggaccgggcagacgctggattcttccccagtggcttgcactgaaacagtgacttttactgaagtggtggaaggaaaggaatggggttccttctactactcctttaagactgagcaattgataactctgtgggtcctctttgtttttaccattgttggaaactccgttgtgcttttttccacatggaggagaaagaagaagtcaagaatgaccttctttgtgactcagctggccatcacagattctttcacaggactggtcaacatcttgacagatattaattggcgattcactggagacttcacggcacctgacctggtttgccgagtggtccgctatttgcaggttgtgctgctctacgcctctacctacgtcctggtgtccctcagcatagacagataccatgccatcgtctaccccatgaagttccttcaaggagaaaagcaagccagggtcctcattgtgatcgcctggagcctgtcttttctgttctccattcccaccctgatcatatttgggaagaggacactgtccaacggtgaagtgcagtgctgggccctgtggcctgacgactcctactggaccccatacatgaccatcgtggccttcctggtgtacttcatccctctgacaatcatcagcatcatgtatggcattgtgatccgaactatttggattaaaagcaaaacctacgaaacagtgatttccaactgctcagatgggaaactgtgcagcagctataaccgaggactcatctcaaaggcaaaaatcaaggctatcaagtatagcatcatcatcattcttgccttcatctgctgttggagtccatacttcctgtttgacattttggacaatttcaacctccttccagacacccaggagcgtttctatgcctctgtgatcattcagaacctgccagcattgaatagtgccatcaaccccctcatctactgtgtcttcagcagctccatctctttcccctgcagggtcatccgtctccgtcagctccaggaggctgcgctaatgctctgccctcaacgagagaactggaagggtacttggccaggtgtaccttcctgggctcttccaaggtgacagctctcaccctgtgctgcaggtggccctgtgcctggtgccacttctcactgcttaccagggcacaaggacaccagtggttcccaaaatgggtcacagcaggatggcctgcatcagattcaccagggagggctataagaaggcagac

SEQ ID NO: 20089 - DNA, 1567 bp, Homo sapiens
  source 1..1567: mol_type = unassigned DNA
gggctcagggagggctctgtgcctccgttcagcagagctgcagctgctgcccagctctcaggaggcaagctggactccctcactcagctgcaggagcaaggacagtgaggctcaaccccgcctgagccatgccagccaacttcacagagggcagcttcgattccagtgggaccgggcagacgctggattcttccccagtggcttgcactgaaacagtgacttttactgaagtggtggaaggaaaggaatggggttccttctactactcctttaagactgagcaattgataactctgtgggtcctctttgtttttaccattgttggaaactccgttgtgcttttttccacatggaggagaaagaagaagtcaagaatgaccttctttgtgactcagctggccatcacagattctttcacaggactggtcaacatcttgacagatattaattggcgattcactggagacttcacggcacctgacctggtttgccgagtggtccgctatttgcaggttgtgctgctctacgcctctacctacgtcctggtgtccctcagcatagacagataccatgccatcgtctaccccatgaagttccttcaaggagaaaagcaagccagggtcctcattgtgatcgcctggagcctgtcttttctgttctccattcccaccctgatcatatttgggaagaggacactgtccaacggtgaagtgcagtgctgggccctgtggcctgacgactcctactggaccccatacatgaccatcgtggccttcctggtgtacttcatccctctgacaatcatcagcatcatgtatggcattgtgatccgaactatttggattaaaagcaaaacctacgaaacagtgatttccaactgctcagatgggaaactgtgcagcagctataaccgaggactcatctcaaaggcaaaaatcaaggctatcaagtatagcatcatcatcattcttgccttcatctgctgttggagtccatacttcctgtttgacattttggacaatttcaacctccttccagacacccaggagcgtttctatgcctctgtgatcattcagaacctgccagcattgaatagtgccatcaaccccctcatctactgtgtcttcagcagctccatctctttcccctgcagggagcaaagatcacaggattccagaatgacgttccgggagagaactgagaggcatgagatgcagattctgtccaagccagaattcatctagaccctagggcagtgccagtgctaggctgagcaccatcagctctcccaggtccttgtcacctgcttgggcacgtgcatggaacccgagccaacttcaccccaccctcgtcattacctgggagatgcacaagacaaatgttctaatgactgcatgcactgcttaagtattggccaacacgaactccccagttattcatgccagccaggaaggaaacgccttccttccccaccattcccagccctccttcccactggccagcacctgaacccagtgaacacaggcattagtggtccagggtcctggcttggagccagtgagtagac

SEQ ID NO: 20090 - DNA, 1233 bp, Homo sapiens
  source 1..1233: mol_type = unassigned DNA
agccatgccagccaacttcacagagggcagcttcgattccagtgggaccgggcagacgctggattcttccccagtggcttgcactgaaacagtgacttttactgaagtggtggaaggaaaggaatggggttccttctactactcctttaagactgagcaattgataactctgtgggtcctctttgtttttaccattgttggaaactccgttgtgcttttttccacatggaggagaaagaagaagtcaagaatgaccttctttgtgactcagctggccatcacagattctttcacaggactggtcaacatcttgacagatattaattggcgattcactggagacttcacggcacctgacctggtttgccgagtggtccgctatttgcaggttgtgctgctctacgcctctacctacgtcctggtgtccctcagcatagacagataccatgccatcgtctaccccatgaagttccttcaaggagaaaagcaagccagggtcctcattgtgatcgcctggagcctgtcttttctgttctccattcccaccctgatcatatttgggaagaggacactgtccaacggtgaagtgcagtgctgggccctgtggcctgacgactcctactggaccccatacatgaccatcgtggccttcctggtgtacttcatccctctgacaatcatcagcatcatgtatggcattgtgatccgaactatttggattaaaagcaaaacctacgaaacagtgatttccaactgctcagatgggaaactgtgcagcagctataaccgaggactcatctcaaaggcaaaaatcaaggctatcaagtatagcatcatcatcattcttgccttcatctgctgttggagtccatacttcctgtttgacattttggacaatttcaacctccttccagacacccaggagcgtttctatgcctctgtgatcattcagaacctgccagcattgaatagtgccatcaaccccctcatctactgtgtcttcagcagctccatctctttcccctgcagggctaatagcagtgtctacctgttggcctgtgatgtctctgtcctctgggctctggtgctgaccagtgagaaggagagctgtgagtcatggagaaggaagggagcaaagatcacaggattccagaatgacgttccgggagagaactgagaggcatgagatgcagattctgtccaagccagaattcatctagaccctagggcagt

SEQ ID NO: 20091 - DNA, 1369 bp, Homo sapiens
  source 1..1369: mol_type = unassigned DNA
gggctcagggagggctctgtgcctccgttcagcagagctgcagctgctgcccagctctcaggaggcaagctggactccctcactcagctgcaggagcaaggacagtgaggctcaaccccgcctgagccatgccagccaacttcacagagggcagcttcgattccagtgggaccgggcagacgctggattcttccccagtggcttgcactgaaacagtgacttttactgaagtggtggaaggaaaggaatggggttccttctactactcctttaagactgagcaattgataactctgtgggtcctctttgtttttaccattgttggaaactccgttgtgcttttttccacatggaggagaaagaagaagtcaagaatgaccttctttgtgactcagctggccatcacagaaaagcaagccagggtcctcattgtgatcgcctggagcctgtcttttctgttctccattcccaccctgatcatatttgggaagaggacactgtccaacggtgaagtgcagtgctgggccctgtggcctgacgactcctactggaccccatacatgaccatcgtggccttcctggtgtacttcatccctctgacaatcatcagcatcatgtatggcattgtgatccgaactatttggattaaaagcaaaacctacgaaacagtgatttccaactgctcagatgggaaactgtgcagcagctataaccgaggactcatctcaaaggcaaaaatcaaggctatcaagtatagcatcatcatcattcttgccttcatctgctgttggagtccatacttcctgtttgacattttggacaatttcaacctccttccagacacccaggagcgtttctatgcctctgtgatcattcagaacctgccagcattgaatagtgccatcaaccccctcatctactgtgtcttcagcagctccatctctttcccctgcagggagcaaagatcacaggattccagaatgacgttccgggagagaactgagaggcatgagatgcagattctgtccaagccagaattcatctagaccctagggcagtgccagtgctaggctgagcaccatcagctctcccaggtccttgtcacctgcttgggcacgtgcatggaacccgagccaacttcaccccaccctcgtcattacctgggagatgcacaagacaaatgttctaatgactgcatgcactgcttaagtattggccaacacgaactccccagttattcatgccagccaggaaggaaacgccttccttccccaccattcccagccctccttcccactggccagcacctgaacccagtgaacacaggcattagtggtccagggtcctggcttggagccagtgagtagac

SEQ ID NO: 20092 - DNA, 856 bp, Homo sapiens
  source 1..856: mol_type = unassigned DNA
agcacgtagatcctccctgtcatcaggcagagctcttcagtgaggtgggctcagggagggctctgtgcctccgttcagcagagctgcagctgctgcccagctctcaggaggcaagctggactccctcactcagctgcaggagcaaggacagtgaggctcaaccccgcctgagccatgccagccaacttcacagagggcagcttcgattccagtgggaccgggcagacgctggattcttccccagtggcttgcactgaaacagtgacttttactgaagtggtggaaggaaaggaatggggttccttctactactcctttaagactgagcaattgataactctgtgggtcctctttgtttttaccattgttggaaactccgttgtgcttttttccacatggaggagaaagaagaagtcaagaatgaccttctttgtgactcagctggccatcacagattctttcacaggactggtcaacatcttgacagatattaattggcgattcactggagacttcacggcacctgacctggtttgccgagtggtccgctatttgcaggtcatggtaatgaagttattccatattcagaaaatgaatatggaatagttacaatcttcttttgtgctctgaatataaccttgaaagtttggtatgtctgaaagagccttttctattatgtacggctagtattttctcaggggaaatttttaaaaacatatttcaatttctttctgaggatatttgcttccttgtaaataaatgctttcaattgcttattatattagcaatcaattgctgatacacaaattatgacaaaacatggtggcttaaaacaataaacatttattatctcaca

SEQ ID NO: 20093 - DNA, 814 bp, Homo sapiens
  source 1..814: mol_type = unassigned DNA
gggctcagggagggctctgtgcctccgttcagcagagctgcagctgctgcccagctctcaggaggcaagctggactccctcactcagctgcaggagcaaggacagtgaggctcaaccccgcctgagccatgccagccaacttcacagagggcagcttcgattccagtgggaccgggcagacgctggattcttccccagtggcttgcactgaaacagtgacttttactgaagtggtggaaggaaaggaatggggttccttctactactcctttaagactgagcaattgataactctgtgggtcctctttgtttttaccattgttggaaactccgttgtgcttttttccacatggaggagaaagaagaagtcaagaatgaccttctttgtgactcagctggccatcacagtataacaagcccacctgcttgagctgggctgcagtggccagggtaaacatccaaggcaccagtgaaaaatacagagaaggtaaaaggagcaagagttctgaagatggaacctgggatgggggaaagtttcttcaatctttcctaccaacaagaactccaatttttcactcctataaccgtagaagtagaggtaattaggatcatccagcaaatgcttagaggcaaatatccctggatgaggatgccacagcttattttcattatatttcttcgattacagtgtggtaatgcatgttgtatggaactacatattctttcagaatgaaaggatttagaggtggcaagaatatcagcttgaaatttaaagttttttcataaacaataaacaaatgataattgaaaattc

SEQ ID NO: 20094 - DNA, 585 bp, Homo sapiens
  source 1..585: mol_type = unassigned DNA
aaagccctgtcgcgacccgctctctgcaccccatccgctggctctcacccctcggagacgctcgcccgacagcatagtacttgccgcccagccacgcccgcgcgccagccaccatgctaggtaacaagcgactggggctgtccggactgaccctcgccctgtccctgctcgtgtgcctgggtgcgctggccgaggcgtacccctccaagccggacaacccgggcgaggacgcaccagcggaggacatggccagatactactcggcgctgcgacactacatcaacctcatcaccaggcagagatatggaaaacgatccagcccagagacactgatttcagacctcttgatgagagaaagcacagaaaatgttcccagaactcggcttgaagaccctgcaatgtggtgatgggaaatgagacttgctctctggccttttcctattttcagcccatatttcatcgtgtaaaacgagaatccacccatcctaccaatgcatgcagccactgtgctgaattctgcaatgttttcctttgtcatcattgtatatatgtgtgtttaaataaagtatcatgcattcaaaagtg

SEQ ID NO: 20095 - DNA, 565 bp, Homo sapiens
  source 1..565: mol_type = unassigned DNA
cgggactgggacgagagcggattgggggtcgcgtgtggtagcaggaggaggagcgcggggggcagaggagggaggtgctgcgcgtgggtgctctgaatccccaagcccgtccgttgagccttctgtgcctgcagatgctaggtaacaagcgactggggctgtccggactgaccctcgccctgtccctgctcgtgtgcctgggtgcgctggccgaggcgtacccctccaagccggacaacccgggcgaggacgcaccagcggaggacatggccagatactactcggcgctgcgacactacatcaacctcatcaccaggcagagatatggaaaacgatccagcccagagacactgatttcagacctcttgatgagagaaagcacagaaaatgttcccagaactcggcttgaagaccctgcaatgtggtgatgggaaatgagacttgctctctggccttttcctattttcagcccatatttcatcgtgtaaaacgagaatccacccatcctaccaatgcatgcagccactgtgctgaattctgcaatgttttcctttgtcatcattgt

SEQ ID NO: 20096 - DNA, 705 bp, Homo sapiens
  source 1..705: mol_type = unassigned DNA
gcaccccatccgctggctctcacccctcggagacgctcgcccgacagcatagtacttgccgcccagccacgcccgcgcgccagccaccacaagagtttgggcaagaagggagaaaagtgacccagcaggaagaacttccaattcggttttgaatgctaaactggcggggcccccaccttgcactctcgccgcgcgcttcttggtccctgagacttcgaacgaagttgcgcgaagttttcaggtggagcagaggggcaggtcccgaccggacggcgcccggagcccgcaagatgctaggtaacaagcgactggggctgtccggactgaccctcgccctgtccctgctcgtgtgcctgggtgcgctggccgaggcgtacccctccaagccggacaacccgggcgaggacgcaccagcggaggacatggccagatactactcggcgctgcgacactacatcaacctcatcaccaggcagagatatggaaaacgatccagcccagagacactgatttcagacctcttgatgagagaaagcacagaaaatgttcccagaactcggcttgaagaccctgcaatgtggtgatgggaaatgagacttgctctctggccttttcctattttcagcccatatttcatcgtgtaaaacgagaatccacccatcctaccaatgcatgcagccactgtgctgaattctgcaatgtttt

SEQ ID NO: 20097 - DNA, 3029 bp, Homo sapiens
  source 1..3029: mol_type = unassigned DNA
aaactgccctgccttccccggagtcgaggactgtggggattagggcttcctttcccctgcgcgggaggtctgtgtcgaataatgtgtggcttctgttggattgcttttctttccaaaattcctaggcaatgcttccccgaggtgtgcacctttgtgaggtgtttgtggggttgggggagcttcaggcgctactcgcgggacgccgtcacgtgatccgggatgaggtggagttcggctttaaggaggcgtctcttcctagcttcatcaatctttaggatctgagcaggagaaataccagcggatcttccccactctgctcccttccattcccacccttccttctttaataagcaggagcgaaaaagacaaattccaaagaggattgttcagttcaagggaatgaagaattcagaataattttggtaaatggattccaatatggggaataagaataagctgaacagttgacctgctttgaagaaacatactgtccatttgtctaaaataatctataacaaccaaaccaatcaaaatgaattcaacattattttcccaggttgaaaatcattcagtccactctaatttctcagagaagaatgcccagcttctggcttttgaaaatgatgattgtcatctgcccttggccatgatatttaccttagctcttgcttatggagctgtgatcattcttggtgtctctggaaacctggccttgatcataatcatcttgaaacaaaaggagatgagaaatgttaccaacatcctgattgtgaacctttccttctcagacttgcttgttgccatcatgtgtctcccctttacatttgtctacacattaatggaccactgggtctttggtgaggcgatgtgtaagttgaatccttttgtgcaatgtgtttcaatcactgtgtccattttctctctggttctcattgctgtggaacgacatcagctgataatcaaccctcgagggtggagaccaaataatagacatgcttatgtaggtattgctgtgatttgggtccttgctgtggcttcttctttgcctttcctgatctaccaagtaatgactgatgagccgttccaaaatgtaacacttgatgcgtacaaagacaaatacgtgtgctttgatcaatttccatcggactctcataggttgtcttataccactctcctcttggtgctgcagtattttggtccactttgttttatatttatttgctacttcaagatatatatacgcctaaaaaggagaaacaacatgatggacaagatgagagacaataagtacaggtccagtgaaaccaaaagaatcaatatcatgctgctctccattgtggtagcatttgcagtctgctggctccctcttaccatctttaacactgtgtttgattggaatcatcagatcattgctacctgcaaccacaatctgttattcctgctctgccacctcacagcaatgatatccacttgtgtcaaccccatattttatgggttcctgaacaaaaacttccagagagacttgcagttcttcttcaacttttgtgatttccggtctcgggatgatgattatgaaacaatagccatgtccacgatgcacacagatgtttccaaaacttctttgaagcaagcaagcccagtcgcatttaaaaaaatcaacaacaatgatgataatgaaaaaatctgaaactacttatagcctatggtcccggatgacatctgtttaaaaacaagcacaacctgcaacatactttgattacctgttctcccaaggaatggggttgaaatcatttgaaaatgactaagattttcttgtcttgctttttactgcttttgttgtagttgtcataattacatttggaacaaaaggtgtgggctttggggtcttctggaaatagttttgaccagacatctttgaagtgctttttgtgaatttatgcatataatataaagacttttatactgtacttattggaatgaaatttctttaaagtattactattaactgacttcagaagtacctgccatccaatacggtcattagattgggtcatcttgattagattagattagattagattgtcaacagattgggccatccttactttatgataggcatcattttagtgtgttacaatagtaacagtatgcaaaagcagcattcaggagccgaaagatagtctgaagtcattcagaagtggtttgaggtttctgttttttggtggtttttgtttgttttttttttttttcaccttaagggaggatttaatttgctcccaactgattgtcacttaaatgaaaatttaaaaatgaataaaaagacatacttctcagctgcaaatattatggagaattggggcacccacaggaatgaagagagaaagcagctccctaacttcaaaaccattttggtacctgacaacaagagcattttagagtaattaatttaataaagtaaattagtattgctgcaaatagttaaattatatttatttgaattgatggtcaagagattttccattttttttacagactgttcagtgtttgtcaagctttctggcataaatatgtactcaaaaggcatttccgcttacaatttgtagaaacacaaaatgcgttttccatacagcagtgcctatatagtgactgatttttaactttcaatgtccatctttcaaaggaagtaacaccaaggtacaatgttaaaggaatattcactttacctagcagggaaaaatacacaaaaactgcagatacttcatatagcccattttaacttgtataaactgtgtgacttgtggcgtcttataaataatgcactgtaaagattactgaatagttgtgtcatgttaatgtgcctaatttcatgtatcttgtaatcatgattgagcctcagaatcatttggagaaactatattttaaagaacaagacatacttcaatgtattatacagataaagtattacatgtgtttgattttaaaagggcggacattttattaaaatcaatattgtttttgctttttctgag

SEQ ID NO: 20098 - DNA, 559 bp, Homo sapiens
  source 1..559: mol_type = unassigned DNA
attattgtggcgaatttcatgtttcccagcgagccctttgattcctggtttgggctggcgctcgagctctccagccgggtatgacttcggccacaagatggcactgacctgcaaacaaagaaaagcacagtggcaccgactttttcaagcctcgggaaactgccctgccttccccggagtcgaggactgtggggattagggcttcctttcccctgcgcgggagattgttcagttcaagggaatgaagaattcagaataattttggtaaatggattccaatatggggaataagaataagctgaacagttgacctgctttgaagaaacatactgtccatttgtctaaaataatctataacaaccaaaccaatcaaaatgaattcaacattattttcccaggttgaaaatcattcagtccactctaatttctcagagaagaatgcccagcttctggcttttgaaaatgatgattgtcatctgcccttggccatgatatttaccttagctcttgcttatggagctgtgatcattcttggtgtctctggaaacctggccttgat

SEQ ID NO: 20099 - DNA, 1017 bp, Homo sapiens
  source 1..1017: mol_type = unassigned DNA
aatctttaggatctgagcaggagaaataccagcggatcttccccactctgctcccttccattcccacccttccttctttaataagcaggagcgaaaaagacaaattccaaagaggattgttcagttcaagggaatgaagaattcagaataattttggttgtcttataccactctcctcttggtgctgcagtattttggtccactttgttttatatttatttgctacttcaagatatatatacgcctaaaaaggagaaacaacatgatggacaagatgagagacaataagtacaggtccagtgaaaccaaaagaatcaatatcatgctgctctccattgtggtagcatttgcagtctgctggctccctcttaccatctttaacactgtgtttgattggaatcatcagatcattgctacctgcaaccacaatctgttattcctgctctgccacctcacagcaatgatatccacttgtgtcaaccccatattttatgggttcctgaacaaaaacttccagagagacttgcagttcttcttcaacttttgtgatttccggtctcgggatgatgattatgaaacaatagccatgtccacgatgcacacagatgtttccaaaacttctttgaagcaagcaagcccagtcgcatttaaaaaaatcaacaacaatgatgataatgaaaaaatctgaaactacttatagcctatggtcccggatgacatctgtttaaaaacaagcacaacctgcaacatactttgattacctgttctcccaaggaatggggttgaaatcatttgaaaatgactaagattttcttgtcttgctttttactgcttttgttgtagttgtcataattacatttggaacaaaaggtgtgggctttggggtcttctggaaatagttttgaccagacatctttgaagtgctttttgtgaatttatgcatataatataaagacttttatactgtacttattggaatgaaatttctttaaagtattactattaactgacttcaga

SEQ ID NO: 20100 - DNA, 753 bp, Homo sapiens
  source 1..753: mol_type = unassigned DNA
ttgcattcggactgcaaaattctgctgaaagagccttaggctattttccatggtctaaggtaaaatcgttttggctttggtccaacacaacgcctcagttcctttaaaagattaactaaaggtctgtgaacttggaaaaaagaattcccgtttctggaattcgagttctatggatgtttgttattgctcgcatttgttatatgaagacacctcgcaaacaggagcgcaaaccttagagcgcagctgcctcccgggctcgggtcagcgctggaccgcgcggcagctggacggcctgagtggcgccccgcgggctgcgcccccggcctcgccagagacccgctagggttgagccctgacccgggcaccccgcgggctgctgttcccagctccggatgccagccgggctgcagccagagcgcgtccagccgggggcagcgctttgtccatcccccgccccatccccaggaggctccttcgcggatccccgacactctcctcccgggttcggcccgcgcctgctccacccggattgttcagttcaagggaatgaagaattcagaataattttggtaaatggattccaatatggggaataagaataagctgaacagttgacctgctttgaagaaacatactgtccatttgtctaaaataatctataacaaccaaaccaatcaaaatgaattcaacattattttcccaggttgaaaatcattcagtccactctaatttctcagagaagaatgcccagct

SEQ ID NO: 20101 - DNA, 799 bp, Homo sapiens
  source 1..799: mol_type = unassigned DNA
gaaaagcagtagctgtttgttctcgaccctgggccggctctctggcgaagcaagcgagggagcagaaagctaacccgaccaggttccccacccaggactagaccgagtgctcttccgtgactactactttattagtctttattgtcttaaggcagcagtctgttgaacaagccctccccagcaaggaaggagcagagaattatgtaattcatttagataagctagcagtaactttgggaggctgtatgtaacaaggctgacatttcttttccaacacaagtgaggtgaacagccagccaatcctgagtatttgaaaaaatgtatctgcagcaggttatgatcagggagctgtattttcaagtagtaacagcactgcgaagagcaagcaatgaaaggccagcattctaattggaaagaaagaagaggaaatttccctctgcaagggggctaatttgccaactggtgatattgttcagttcaagggaatgaagaattcagaataattttggtaaatggattccaatatggggaataagaataagctgaacagttgacctgctttgaagaaacatactgtccatttgtctaaaataatctataacaaccaaaccaatcaaaatgaattcaacattattttcccaggttgaaaatcattcagtccactctaatttctcagagaagaatgcccagcttctggcttttgaaaatgatgattgtcatctgcccttggccatgatatttaccttagctcttgcttatggagctgtgatcattcttggtgtctctggaaacctggcct

SEQ ID NO: 20102 - DNA, 3626 bp, Homo sapiens
  source 1..3626: mol_type = unassigned DNA
ggcggctgagagaccctggacactgttcctgctccctcgccaccaaaacttctcctccagtcccctcccctgcaggaccatcgcccgcagcctctgcacctgttttcttgtgtttaagggtggggtttgcccccctccccacgctcccatctctgatcctcccaccttcacccgcccaccccgcgagtgagtgcggtgcccaggcgcgcttggcctgagaggtcggcagcagacccggcagcgccaaccgcccagccgctctgactgctccggctgcccgcccgcgcggcgcgggctgtcctggaccctaggaggggacggaaccggacttgcctttgggcaccttccagggccctctccaggtcggctggctaatcatcggacagacggactgcacacatcttgtttccgcgtctccgcaaaaacgcgaggtccaggtcagttgtagactcttgtgctggttgcaggccaagtggacctgtactgaaaatgggtccaataggtgcagaggctgatgagaaccagacagtggaagaaatgaaggtggaacaatacgggccacaaacaactcctagaggtgaactggtccctgaccctgagccagagcttatagatagtaccaagctgattgaggtacaagttgttctcatattggcctactgctccatcatcttgcttggggtaattggcaactccttggtgatccatgtggtgatcaaattcaagagcatgcgcacagtaaccaactttttcattgccaatctggctgtggcagatcttttggtgaacactctgtgtctaccgttcactcttacctataccttaatgggggagtggaaaatgggtcctgtcctgtgccacctggtgccctatgcccagggcctggcagtacaagtatccacaatcaccttgacagtaattgccctggaccggcacaggtgcatcgtctaccacctagagagcaagatctccaagcgaatcagcttcctgattattggcttggcctggggcatcagtgccctgctggcaagtcccctggccatcttccgggagtattcgctgattgagatcatcccggactttgagattgtggcctgtactgaaaagtggcctggcgaggagaagagcatctatggcactgtctatagtctttcttccttgttgatcttgtatgttttgcctctgggcattatatcattttcctacactcgcatttggagtaaattgaagaaccatgtcagtcctggagctgcaaatgaccactaccatcagcgaaggcaaaaaaccaccaaaatgctggtgtgtgtggtggtggtgtttgcggtcagctggctgcctctccatgccttccagcttgccgttgacattgacagccaggtcctggacctgaaggagtacaaactcatcttcacagtgttccacatcatcgccatgtgctccacttttgccaatccccttctctatggctggatgaacagcaactacagaaaggctttcctctcggccttccgctgtgagcagcggttggatgccattcactctgaggtgtccgtgacattcaaggctaaaaagaacctggaggtcagaaagaacagtggccccaatgactctttcacagaggctaccaatgtctaaggaagctgtggtgtgaaaatgtatggatgaattctgaccagagctatgaatctggttgatggcggctcacaagtgaaaactgatttcccattttaaagaagaagtggatctaaatggaagcatctgctgtttaattcctggaaaactggctgggcagagcctgtgtgaaaatactggaattcaaagataaggcaacaaaatggtttacttaacagttggttgggtagtaggttgcattatgagtaaaagcagagagaagtacttttgattattttcctggagtgaagaaaacttgaacaagaaattggtattatcaaagcattgctgagagacggtgggaaaataagttgactttcaaatcacgttaggacctggattgaggaggtgtgcagttcgctgctccctgcttggcttatgaaaacaccactgaacagaaatttctccagggagccacaggctctccttcatcgcattttgatttttttgttcattctctagacaaaatccatcagggaatgctgcaggaaacgattgccaactatacgaatggcttcgaggagataaactgaaatttgctatataattaatattttggcagatgataggggaactcctcaacactcagtgggccaattgttcttaaaaccaattgcacgtttggtgaaagtttcttcaactctgaatcaaaagctgaaattctcagaattacaggaaatgcaaaccatcatttaatttctaatttcaagttacatccgctttatggagatactatttagataacaagaatacaacttgatacttttattgttatacctttttgaacatgtatgatttctgttgttattcctattggagctaagtttgtctacactaaaatttaaatcagactagagaataatttttgtggcatgttgtaacatttcacagtatttacaagctatttttgcacaggtacatagctctcatgtatttaaagaacactgcagtgttattttctttgaaattcatcctccacggacccattcatactaaataaaacaatgtaattacattaaaatggacctatctgtaagaggtactaaaaacactggattcatttcatcttgcaaatgttgtatttcaaaccagtttcacataagttatttgtcttcttttcaaaataattagctatatttttatataatatgaatatatacataaaaattgtttctataaattgtagaacatagatgctacagtattttttatttaattatattatgaataaaattgttatttcaatagtacccaaccaaagatgcttaaaaaccttctatgttcataaaaaataacaactgagatgttaaaatagtcatacgtctttagatgctattaaagtttcattagtcatatttttgtaaatatgacagaatttgtgaatatatttttaaagcaaaaaacttcaacatgcatatgatatatagttacaacattaattttatgaactggagagctttactttgtggatatatttaaaattcatattatagctcctattaaattccttccatgatagatataaaggactggtttttaagtgcactgcacttctggaatactgaaaaagaatgaaaacaatatgttagattaggtgtaagactttaagaagcgaacaaaaagtaatgtatatctgtaatatataatcaaatgattcatttttctgttagactaggcaaattgttcaaaaataacctttttgtcttttaagtagcagtcactttgcttaagatgctaatagaaaactgtggttaaagatttaccctccctcttggtgaattattacactgtaagaaatgtatatgctactgtgttacatgttgtattagtaaattattagaatccaattaatgattcaattaacatatatcttatccaattcattatgtcaattcattaataaaataccttttatgtagaggctttatgttgcaattaaaaagttgggaaaatga

SEQ ID NO: 20103 - DNA, 3518 bp, Homo sapiens
  source 1..3518: mol_type = unassigned DNA
cttgtgtttaagggtggggtttgcccccctccccacgctcccatctctgatcctcccaccttcacccgcccaccccgcgagtgagtgcggtgcccaggcgcgcttggcctgagaggtcggcagcagacccggcagcgccaaccgcccagccgctctgactgctccggctgcccgcccgcgcggcgcgggctgtcctggaccctaggaggggacggaaccggacttgcctttgggcaccttccagggccctctccaggtcggctggctaatcatcggacagacggactgcacacatcttgtttccgcgtctccgcaaaaacgcgaggtccaggttgtagactcttgtgctggttgcaggccaagtggacctgtactgaaaatgggtccaataggtgcagaggctgatgagaaccagacagtggaagaaatgaaggtggaacaatacgggccacaaacaactcctagaggtgaactggtccctgaccctgagccagagcttatagatagtaccaagctgattgaggtacaagttgttctcatattggcctactgctccatcatcttgcttggggtaattggcaactccttggtgatccatgtggtgatcaaattcaagagcatgcgcacagtaaccaactttttcattgccaatctggctgtggcagatcttttggtgaacactctgtgtctaccgttcactcttacctataccttaatgggggagtggaaaatgggtcctgtcctgtgccacctggtgccctatgcccagggcctggcagtacaagtatccacaatcaccttgacagtaattgccctggaccggcacaggtgcatcgtctaccacctagagagcaagatctccaagcgaatcagcttcctgattattggcttggcctggggcatcagtgccctgctggcaagtcccctggccatcttccgggagtattcgctgattgagatcatcccggactttgagattgtggcctgtactgaaaagtggcctggcgaggagaagagcatctatggcactgtctatagtctttcttccttgttgatcttgtatgttttgcctctgggcattatatcattttcctacactcgcatttggagtaaattgaagaaccatgtcagtcctggagctgcaaatgaccactaccatcagcgaaggcaaaaaaccaccaaaatgctggtgtgtgtggtggtggtgtttgcggtcagctggctgcctctccatgccttccagcttgccgttgacattgacagccaggtcctggacctgaaggagtacaaactcatcttcacagtgttccacatcatcgccatgtgctccacttttgccaatccccttctctatggctggatgaacagcaactacagaaaggctttcctctcggccttccgctgtgagcagcggttggatgccattcactctgaggtgtccgtgacattcaaggctaaaaagaacctggaggtcagaaagaacagtggccccaatgactctttcacagaggctaccaatgtctaaggaagctgtggtgtgaaaatgtatggatgaattctgaccagagctatgaatctggttgatggcggctcacaagtgaaaactgatttcccattttaaagaagaagtggatctaaatggaagcatctgctgtttaattcctggaaaactggctgggcagagcctgtgtgaaaatactggaattcaaagataaggcaacaaaatggtttacttaacagttggttgggtagtaggttgcattatgagtaaaagcagagagaagtacttttgattattttcctggagtgaagaaaacttgaacaagaaattggtattatcaaagcattgctgagagacggtgggaaaataagttgactttcaaatcacgttaggacctggattgaggaggtgtgcagttcgctgctccctgcttggcttatgaaaacaccactgaacagaaatttctccagggagccacaggctctccttcatcgcattttgatttttttgttcattctctagacaaaatccatcagggaatgctgcaggaaacgattgccaactatacgaatggcttcgaggagataaactgaaatttgctatataattaatattttggcagatgataggggaactcctcaacactcagtgggccaattgttcttaaaaccaattgcacgtttggtgaaagtttcttcaactctgaatcaaaagctgaaattctcagaattacaggaaatgcaaaccatcatttaatttctaatttcaagttacatccgctttatggagatactatttagataacaagaatacaacttgatacttttattgttatacctttttgaacatgtatgatttctgttgttattcctattggagctaagtttgtctacactaaaatttaaatcagactagagaataatttttgtggcatgttgtaacatttcacagtatttacaagctatttttgcacaggtacatagctctcatgtatttaaagaacactgcagtgttattttctttgaaattcatcctccacggacccattcatactaaataaaacaatgtaattacattaaaatggacctatctgtaagaggtactaaaaacactggattcatttcatcttgcaaatgttgtatttcaaaccagtttcacataagttatttgtcttcttttcaaaataattagctatatttttatataatatgaatatatacataaaaattgtttctataaattgtagaacatagatgctacagtattttttatttaattatattatgaataaaattgttatttcaatagtacccaaccaaagatgcttaaaaaccttctatgttcataaaaaataacaactgagatgttaaaatagtcatacgtctttagatgctattaaagtttcattagtcatatttttgtaaatatgacagaatttgtgaatatatttttaaagcaaaaaacttcaacatgcatatgatatatagttacaacattaattttatgaactggagagctttactttgtggatatatttaaaattcatattatagctcctattaaattccttccatgatagatataaaggactggtttttaagtgcactgcacttctggaatactgaaaaagaatgaaaacaatatgttagattaggtgtaagactttaagaagcgaacaaaaagtaatgtatatctgtaatatataatcaaatgattcatttttctgttagactaggcaaattgttcaaaaataacctttttgtcttttaagtagcagtcactttgcttaagatgctaatagaaaactgtggttaaagatttaccctccctcttggtgaattattacactgtaagaaatgtatatgctactgtgttacatgttgtattagtaaattattagaatccaattaatgattcaattaacatatatcttatccaattcattatgtcaattcattaataaaataccttttatgtagaggctttatgttgcaattaaaaagttgggaaaatgaga

SEQ ID NO: 20104 - DNA, 1843 bp, Homo sapiens
  source 1..1843: mol_type = unassigned DNA
agcgatcgcgctgggccgcgctcccgggagcccagggcctgcagcggccggggcgccccgaggtctgctcattgtgtttttcaggaaaaaggaagggaaagggtgttacaaggaaaggctatcggtaacaactgacctgccacaaagttagaagaaaggattgattcaagaaagactataatatggatttagagctcgacgagtattataacaagacacttgccacagagaataatactgctgccactcggaattctgatttcccagtctgggatgactataaaagcagtgtagatgacttacagtattttctgattgggctctatacatttgtaagtcttcttggctttatggggaatctacttattttaatggctctcatgaaaaagcgtaatcagaagactacggtaaacttcctcataggcaatctggccttttctgatatcttggttgtgctgttttgctcacctttcacactgacgtctgtcttgctggatcagtggatgtttggcaaagtcatgtgccatattatgccttttcttcaatgtgtgtcagttttggtttcaactttaattttaatatcaattgccattgtcaggtatcatatgataaaacatcccatatctaataatttaacagcaaaccatggctactttctgatagctactgtctggacactaggttttgccatctgttctccccttccagtgtttcacagtcttgtggaacttcaagaaacatttggttcagcattgctgagcagcaggtatttatgtgttgagtcatggccatctgattcatacagaattgcctttactatctctttattgctagttcagtatattctgcccttagtttgtcttactgtaagtcatacaagtgtctgcagaagtataagctgtggattgtccaacaaagaaaacagacttgaagaaaatgagatgatcaacttaactcttcatccatccaaaaagagtgggcctcaggtgaaactctctggcagccataaatggagttattcattcatcaaaaaacacagaagaagatatagcaagaagacagcatgtgtgttacctgctccagaaagaccttctcaagagaaccactccagaatacttccagaaaactttggctctgtaagaagtcagctctcttcatccagtaagttcataccaggggtccccacttgctttgagataaaacctgaagaaaattcagatgttcatgaattgagagtaaaacgttctgttacaagaataaaaaagagatctcgaagtgttttctacagactgaccatactgatattagtatttgctgttagttggatgccactacaccttttccatgtggtaactgattttaatgacaatcttatttcaaataggcatttcaagttggtgtattgcatttgtcatttgttgggcatgatgtcctgttgtcttaatccaattctatatgggtttcttaataatgggattaaagctgatttagtgtcccttatacactgtcttcatatgtaataattctcactgtttaccaaggaaagaacaaatgctggggtcatataaaatatatttatgataactatttacatataataaatagaaattttgttaacatggaatttaatttatgtgaaagagttctggattcaaatgtcagttcataatatatggaagataattttatgtgttatagtaggattaatttatttagttgtgcagtcagtgtcaatccaatctgtaatttcactttagaaggttgtattaccttccacttccatgttgtcttataaacaaatgaattgtattttttgttgaaagtaaaagttatatctaaccaa

SEQ ID NO: 20105 - DNA, 1418 bp, Homo sapiens
  source 1..1418: mol_type = unassigned DNA
gtaatgtttttttggttgctgacaaatgtctttttattccaagcaggactataatatggatttagagctcgacgagtattataacaagacacttgccacagagaataatactgctgccactcggaattctgatttcccagtctgggatgactataaaagcagtgtagatgacttacagtattttctgattgggctctatacatttgtaagtcttcttggctttatggggaatctacttattttaatggctctcatgaaaaagcgtaatcagaagactacggtaaacttcctcataggcaatctggccttttctgatatcttggttgtgctgttttgctcacctttcacactgacgtctgtcttgctggatcagtggatgtttggcaaagtcatgtgccatattatgccttttcttcaatgtgtgtcagttttggtttcaactttaattttaatatcaattgccattgtcaggtatcatatgataaaacatcccatatctaataatttaacagcaaaccatggctactttctgatagctactgtctggacactaggttttgccatctgttctccccttccagtgtttcacagtcttgtggaacttcaagaaacatttggttcagcattgctgagcagcaggtatttatgtgttgagtcatggccatctgattcatacagaattgcctttactatctctttattgctagttcagtatattctgcccttagtttgtcttactgtaagtcatacaagtgtctgcagaagtataagctgtggattgtccaacaaagaaaacagacttgaagaaaatgagatgatcaacttaactcttcatccatccaaaaagagtgggcctcaggtgaaactctctggcagccataaatggagttattcattcatcaaaaaacacagaagaagatatagcaagaagacagcatgtgtgttacctgctccagaaagaccttctcaagagaaccactccagaatacttccagaaaactttggctctgtaagaagtcagctctcttcatccagtaagttcataccaggggtccccacttgctttgagataaaacctgaagaaaattcagatgttcatgaattgagagtaaaacgttctgttacaagaataaaaaagagatctcgaagtgttttctacagactgaccatactgatattagtatttgctgttagttggatgccactacaccttttccatgtggtaactgattttaatgacaatcttatttcaaataggcatttcaagttggtgtattgcatttgtcatttgttgggcatgatgtcctgttgtcttaatccaattctatatgggtttcttaataatgggattaaagctgatttagtgtcccttatacactgtcttcatatgtaataattctcactgtttaccaaggaaa

SEQ ID NO: 20106 - DNA, 3183 bp, Homo sapiens
  source 1..3183: mol_type = unassigned DNA
ccctgggagcccgcacccgtctctggtgccagggcgttgtcgggggtcccaagagagcggggtggggaaggtgaagggagcgcggctggaaaaatggggattagggtggcggaacaggcacttgtcaggagtgaagagacagcggagagggtactgggctgaattctttcgtgccgagcaggtccctccggttcccaactcacccgggtggagcaggcgcgggccgaacccgggaggagagtgtcggggatccgcgaaggagcctcctggggatggggcgggggatggacaaagcgctgcccccggctggacgcgctctggctgcagcccggctggcatccggagctgggaacagcagcccgcggggtgcccgggtcagggctcaaccctagcgggtctctggcgaggccgggggcgcagcccgcggggcgccactcaggccgtccagctgccgcgcggtccagcgctgacccgagcccgggaggcagctgcgctctaaggtttgcgctcctgtttgcgaggtgtcttcatataacaaatgcgagcaataacaaacatccatagaactcgaattccagaaacgggaattcttttttccaagttcacagacctttagttaatcttttaaaggaactgaggcgttgtgttggaccaaagccaaaacgattttaccttagaccatggaaaatagcctaaggctctttcagcagaattttgcagtccgaatgcaattttagatttcagatttctcaagggaagagaaactctgctgttagaatttggaagggagggtggtgcatgcctgtgtgtttgtcagctgagcagagctgtatttatctttccaattcaaattgtgccagattctggctttaagaacaaaccatgggaatatttgagaacatggaatcatgctgctgttccacgatcacagcaaaacagacaatagttgatattgtatcattgcaggaggaaaaagaattacatatattttattcttttgtgtgattgtcatcctttgtgaaaagaatgatgtgtattttcataaagcaaaaaattattcaaacaaagaaaccttatttaaatgtacaagtcagacttttaatatcctttgaattccctgcagttcctcctattattcttgagaactatctactttcttaaaatacttaaaatctattcagaaggtttcatttgtctaggtgtcagatatagaagagtttataagaaaattccagtaaacctttaaaaagatattattttttataagttgccatagtttaataaagaacttttatttttcacactttttactcagagattaaagttctgtgtttcagcctggaaattctgatggtgggagatacaactaatacaaaagagaatgagtaaatatagtaattaggtctgctcattgtgtttttcaggaaaaaggaagggaaagggtgttacaaggaaaggctatcggtaacaactgacctgccacaaagttagaagaaaggattgattcaagaaagactataatatggatttagagctcgacgagtattataacaagacacttgccacagagaataatactgctgccactcggaattctgatttcccagtctgggatgactataaaagcagtgtagatgacttacagtattttctgattgggctctatacatttgtaagtcttcttggctttatggggaatctacttattttaatggctctcatgaaaaagcgtaatcagaagactacggtaaacttcctcataggcaatctggccttttctgatatcttggttgtgctgttttgctcacctttcacactgacgtctgtcttgctggatcagtggatgtttggcaaagtcatgtgccatattatgccttttcttcaatgtgtgtcagttttggtttcaactttaattttaatatcaattgccattgtcaggtatcatatgataaaacatcccatatctaataatttaacagcaaaccatggctactttctgatagctactgtctggacactaggttttgccatctgttctccccttccagtgtttcacagtcttgtggaacttcaagaaacatttggttcagcattgctgagcagcaggtatttatgtgttgagtcatggccatctgattcatacagaattgcctttactatctctttattgctagttcagtatattctgcccttagtttgtcttactgtaagtcatacaagtgtctgcagaagtataagctgtggattgtccaacaaagaaaacagacttgaagaaaatgagatgatcaacttaactcttcatccatccaaaaagagtgggcctcaggtgaaactctctggcagccataaatggagttattcattcatcaaaaaacacagaagaagatatagcaagaagacagcatgtgtgttacctgctccagaaagaccttctcaagagaaccactccagaatacttccagaaaactttggctctgtaagaagtcagctctcttcatccagtaagttcataccaggggtccccacttgctttgagataaaacctgaagaaaattcagatgttcatgaattgagagtaaaacgttctgttacaagaataaaaaagagatctcgaagtgttttctacagactgaccatactgatattagtatttgctgttagttggatgccactacaccttttccatgtggtaactgattttaatgacaatcttatttcaaataggcatttcaagttggtgtattgcatttgtcatttgttgggcatgatgtcctgttgtcttaatccaattctatatgggtttcttaataatgggattaaagctgatttagtgtcccttatacactgtcttcatatgtaataattctcactgtttaccaaggaaagaacaaatgctggggtcatataaaatatatttatgataactatttacatataataaatagaaattttgttaacatggaatttaatttatgtgaaagagttctggattcaaatgtcagttcataatatatggaagataattttatgtgttatagtaggattaatttatttagttgtgcagtcagtgtcaatccaatctgtaatttcactttagaaggttgtattaccttccacttccatgttgtcttataaacaaatgaattgtattttttgttgaaagtaaaagttatatctaaccaa

SEQ ID NO: 20107 - DNA, 2687 bp, Homo sapiens
  source 1..2687: mol_type = unassigned DNA
ttggaaataaccaatatttagtttatttcattcgattcttaggggaactggtgaggagcctaagatgattttcccttcctagagaaagaatccaaagtccagggaaatagcgacaggggagttcaagactgcccctgctagtccttccttggctactctccgctgcgatcgcaggatagctctcattagcaggagaatcgggcaagtgtgtggataagtagagagtgtgttgaacaacttgtaacgttttatgaaatacgcattgtcatggttccctaaaaggctttgcggaagccgtttgtctttactaatcaagtctttacttacacaaaagtagaagtagaagtagttttagaaaacatactaacaatcttctatccccttgaagaccagagtagcagaaaacaggtgatttgcattataaaattgcactcactttttcctcctttcagatttcacattacattagcctatttgtgttacggtgtataaaaaatggaacaggcgcctccactacattgttctcctttaaaaatagatcacttacaccctaactttgttttccttaaattcgattcttaacaggagagctttctattatttcagatggagtgaggttgcacgactgggatggaagaaaggaatcccttaaatttgggggaatttctgttctctgttctaagaccattttacttggggtgtgggggtgggcgcggcggtcagggcagtggaacgcagtcgcggctgcgccatccctgcacttccaggcgcgcgggagggaccggcggggacgcgagctgcggactctggcgaactcgggggaggcagacagggggaggcggacacccagccggcaggcgtctcagcctccccgcagccggcgggcttttctcctgacagctccaggaaaggcagaccccttccccagccagccaggtaaggtaaagactgctgttgagcttgctgttactgagggcgcacagaccctggggagaccgaagcttgccactgcgggattctgtggggtaacctgggtctacggaagtttcctgaaagaggggagaagggtttgcatttttcctatggaggattcttctctctctagcatttcgtttgatgtattcaactggtagaagtgagatttcaacaggtagcagagagcgctcacgtggaggaggtttggggcgccgcggcgccacccccacccctcctcgggaccgcgcctatttctaaagttacacgtcgacgaactaacctatgctttaaattcctctttccagccccgtgagtccgcggcgacattgggccgtggggtggctgggaacggtcccctcctccggaaaaaccagagaacggcttggagagctgaaacgagcgtccgcgagcaggtccgtgcagaaccgggcttcaggaccgctgagctccgtagggcgtccttgggggacgccaggtcgccggctcctctgccctcgttgagatggacaacgcctcgttctcggagccctggcccgccaacgcatcgggcccggacccggcgctgagctgctccaacgcgtcgactctggcgccgctgccggcgccgctggcggtggctgtaccagttgtctacgcggtgatctgcgccgtgggtctggcgggcaactccgccgtgctgtacgtgttgctgcgggcgccccgcatgaagaccgtcaccaacctgttcatcctcaacctggccatcgccgacgagctcttcacgctggtgctgcccatcaacatcgccgacttcctgctgcggcagtggcccttcggggagctcatgtgcaagctcatcgtggctatcgaccagtacaacaccttctccagcctctacttcctcaccgtcatgagcgccgaccgctacctggtggtgttggccactgcggagtcgcgccgggtggccggccgcacctacagcgccgcgcgcgcggtgagcctggccgtgtgggggatcgtcacactcgtcgtgctgcccttcgcagtcttcgcccggctagacgacgagcagggccggcgccagtgcgtgctagtctttccgcagcccgaggccttctggtggcgcgcgagccgcctctacacgctcgtgctgggcttcgccatccccgtgtccaccatctgtgtcctctataccaccctgctgtgccggctgcatgccatgcggctggacagccacgccaaggccctggagcgcgccaagaagcgggtgaccttcctggtggtggcaatcctggcggtgtgcctcctctgctggacgccctaccacctgagcaccgtggtggcgctcaccaccgacctcccgcagacgccgctggtcatcgctatctcctacttcatcaccagcctgagctacgccaacagctgcctcaaccccttcctctacgccttcctggacgccagcttccgcaggaacctccgccagctgataacttgccgcgcggcagcctgactcccccagcgtccggctccgcaactgcccgccactcctggccagcgagggaggagccggcgccagagtgcgggaccagacaggccgcctaggcctcctggggaaaccgactcgcgccccatacccgacctagcagatcggaagcgctgcgactgtgcccgcaggttgaccttgccaagccctccaggtgatgcgcggccatgccgggtgaggagaactgagg

SEQ ID NO: 20108 - DNA, 2328 bp, Homo sapiens
  source 1..2328: mol_type = unassigned DNA
acagccacactgcagtatgtcaggaacagtcatggagctgttctcattgtttgcctctccttttcctcctttttaccttctggcccctctcttcattcagagatgctggcagagccattccctaaggttgtagcaagtttaatcatcctccatttgtctggggcaaccaagaaaggaacagaaaagcaaaccacctcagaaacacagaagtcagtgcagtgtggaacttggacaaaacatgcagagggaggtatctttacctctcccaactatcccagcaagtatccccctgaccgggaatgcatctacatcatagaagccgctccaagacagtgcattgaactttactttgatgaaaagtactctattgaaccgtcttgggagtgcaaatttgatcatattgaagttcgagatggaccttttggcttttctccaataattggacgtttctgtggacaacaaaatccacctgtcataaaatccagtggaagatttctatggattaaattttttgctgatggagagctggaatctatgggattttcagctcgatacaatttcacacctgatcctgactttaaggaccttggagctttgaaaccattaccagcgtgtgagtttgagatgggcggttccgaaggaattgtggagtctatacaaattatgaaggaaggcaaagctactgctagcgaggctgttgattgcaagtggtacatccgagcacctccacggtccaagatttacttacgattcttggactatgagatgcagaattcaaatgagtgcaagaggaattttgtggctgtgtatgatggaagcagttccgtggaggatttgaaagctaagttctgtagcactgtggctaatgatgtcatgctacgcacgggtcttggggtgatccgcatgtgggcagatgagggcagtcgaaacagccgatttcagatgctcttcacatcctttcaagaacctccttgtgaaggcaacacattcttctgccatagtaacatgtgtattaataatactttggtctgcaatggactccagaactgtgtgtatccttgggatgaaaatcactgtaaagagaagaggaaaaccagcctgctggaccagctgaccaacaccagtgggactgtcattggcgtgacttcctgcatcgtgatcatcctcattatcatctctgtcatcgtacagatcaaacagcctcgtaaaaagtatgtccaaaggaaatcagactttgaccagacagttttccaggaggtatttgaacctcctcattatgagttatgcactctcagagggacaggagctacagctgactttgcagatgtggcagatgactttgaaaattaccataaactgcggaggtcatcttccaaatgcattcatgaccatcactgtggatcacagctgtccagcactaaaggcagccgcagtaacctcagcacaagagatgcttctatcttgacagagatgcccacacagccaggaaaacccctcatcccacccatgaacagaagaaatatccttgtcatgaaacacagctactcgcaagatgctgcagatgcctgtgacatagatgaaatcgaagaggtgccgaccaccagtcacaggctgtccagacacgataaagccgtccagcggttctgcctcattgggtctctaagcaaacatgaatctgaatacaacacaactagggtctagaaagaaaattcaagagaagaactatttatacaaacatggggactgtgaaaagaaaattctatagtgaattgtgaaaagtggacatatttctaaattcattccactgcctttatccaaacttaagaattacagacatttgttattccttcggcaagacatccccgctgcacactgatatgttcatttcgtaatttggttgctggccaccaagtgctccttagtttttaaatacattttgagattaactggaaacttgaagaagaaattagttcccgattaagactatcccaactttatttttattgtcagtttcacttttgtttctatgttgttttatgtctttgttatataattgtacattgtgtgatatgtgaaaaaaaaacacgaatttggatgaaccttgtgttacatgtacattgttttcattatatagacagcttgagaatagtgcgttcctgaatgattttgaacatgctacagtgaaaagtgacagtgtggaccatggaatcaccagctagaggttatggactatacacacctattattatattctgattaaatacaggaaaaagtaacaagtaaaattactagattgcaataaaaaaattcattttttggtctttcctg

SEQ ID NO: 20109 - DNA, 8003 bp, Homo sapiens
  source 1..8003: mol_type = unassigned DNA
atgacggaccccttcttcctgccttcaatgcctcagcggaagatccccaagggctggagcgaggagcgctgccgctggacatcctcccggggaggctgctccgacctgctgcgcggcgcgtctgagactggggactgagccaccccgccgccgccggcgccgccgccgccgcccgctccgtcgctgccgtcggtctggactggcccccacctcgctgcgccctctccccggccccggccccggctcggggcgtcccggggctcgccctgcgaccgccgcctcccgcgcgccgcgtcctcccgaccccgcggcggcgacgatgcccgggaggagggtcctgacggcggcggcgcggatggtggcggccggcgcccgggtgtgatgcgagcgtcacggtggggatgctgctggctgcgcggcgctgagggccagcgagagcgagagcccgcccggggcggaggacggactcatccggatctggctgcagcgtgggctcggagctcccccttcctctcggtctccctctcggcccccctttatttccttcttgctttgcgtctttaacacctctcgaccctgtcctccccccgccactggaagtcttcccgtctctaaatggaattagtggagcccggagcctctggtgtaacgcacagacatgatccatgggcgcagcgtgcttcacattgtagcaagtttaatcatcctccatttgtctggggcaaccaagaaaggaacagaaaagcaaaccacctcagaaacacagaagtcagtgcagtgtggaacttggacaaaacatgcagagggaggtatctttacctctcccaactatcccagcaagtatccccctgaccgggaatgcatctacatcatagaagccgctccaagacagtgcattgaactttactttgatgaaaagtactctattgaaccgtcttgggagtgcaaatttgatcatattgaagttcgagatggaccttttggcttttctccaataattggacgtttctgtggacaacaaaatccacctgtcataaaatccagtggaagatttctatggattaaattttttgctgatggagagctggaatctatgggattttcagctcgatacaatttcacacctgatcctgactttaaggaccttggagctttgaaaccattaccagcgtgtgagtttgagatgggcggttccgaaggaattgtggagtctatacaaattatgaaggaaggcaaagctactgctagcgaggctgttgattgcaagtggtacatccgagcacctccacggtccaagatttacttacgattcttggactatgagatgcagaattcaaatgagtgcaagaggaattttgtggctgtgtatgatggaagcagttccgtggaggatttgaaagctaagttctgtagcactgtggctaatgatgtcatgctacgcacgggtcttggggtgatccgcatgtgggcagatgagggcagtcgaaacagccgatttcagatgctcttcacatcctttcaagaacctccttgtgaaggcaacacattcttctgccatagtaacatgtgtattaataatactttggtctgcaatggactccagaactgtgtgtatccttgggatgaaaatcactgtaaagagaagaggaaaaccagcctgctggaccagctgaccaacaccagtgggactgtcattggcgtgacttcctgcatcgtgatcatcctcattatcatctctgtcatcgtacagatcaaacagcctcgtaaaaagtatgtccaaaggaaatcagactttgaccagacagttttccaggaggtatttgaacctcctcattatgagttatgcactctcagagggacaggagctacagctgactttgcagatgtggcagatgactttgaaaattaccataaactgcggaggtcatcttccaaatgcattcatgaccatcactgtggatcacagctgtccagcactaaaggcagccgcagtaacctcagcacaagagatgcttctatcttgacagagatgcccacacagccaggaaaacccctcatcccacccatgaacagaagaaatatccttgtcatgaaacacagctactcgcaagatgctgcagatgcctgtgacatagatgaaatcgaagaggtgccgaccaccagtcacaggctgtccagacacgataaagccgtccagcggttctgcctcattgggtctctaagcaaacatgaatctgaatacaacacaactagggtctagaaagaaaattcaagagaagaactatttatacaaacatggggactgtgaaaagaaaattctatagtgaattgtgaaaagtggacatatttctaaattcattccactgcctttatccaaacttaagaattacagacatttgttattccttcggcaagacatccccgctgcacactgatatgttcatttcgtaatttggttgctggccaccaagtgctccttagtttttaaatacattttgagattaactggaaacttgaagaagaaattagttcccgattaagactatcccaactttatttttattgtcagtttcacttttgtttctatgttgttttatgtctttgttatataattgtacattgtgtgatatgtgaaaaaaaaacacgaatttggatgaaccttgtgttacatgtacattgttttcattatatagacagcttgagaatagtgcgttcctgaatgattttgaacatgctacagtgaaaagtgacagtgtggaccatggaatcaccagctagaggttatggactatacacacctattattatattctgattaaatacaggaaaaagtaacaagtaaaattactagattgcaataaaaaaattcattttttggtctttcctgtatacccctgatttcctttttgttttatatcaaagaaagtactgagtttcagaaatcctttttgaagtcaggtattttaccattcatactctacagtagaaatgtttttgattaagcactcagcaatatgaccaaattgacagtttgagaaaataccctgcatgtcagtactggatatttgagttgggaaaatatcctttttgttagacacattgtgaaaagcatgcattgtcaaatactgttgttactcttccatttctttatgtcatatgcttgctacttacgactttttatataaatatatataaaatgtataataatttcctaatttgagttaagagaaatgttttcttccattagagtgattaaaaaactgactcacataaatacacattttatgtcaactctttccaccttttagggtacaggatgtccttcagtattgaggtttacttcccaaaatatttggcttctaaaagtttaggggaatattttcttcttttagaatagggaactctttttaaaactgctttaaaatcacaagcccttttatgaattaaaccaccattatgaattattcttattctcaggtacacataatacacctgaaagcttagtgattatgatgtgtttaacataaagtaaaatcctaaaatatattttactgctattaaattatatacacactctgtaaagtttgatttggtgagtggttattttttaaaatattcaatgtgtaatcttacaaaataaatttttaaaataagaattactatcagtatatatgcttcccaacattttcaaaactactgaattctccaggtttaaagaactctgtccttccactaacagagcagtctggtctactaaaatttggactttgcaattcaagcaggctttgcaaactagatgaattactgttatacttccctactaggaatacaatgtcatatatgttaaaaaataagcaaatagaaaataaatttttataatagaaaagtcaaagagttatcatagccattataaacactctatcttgaaaaaatgtcaagctacagaatcacttcaatgaatttgataaactagggaatcagaaaaggttttgaacatgacaaagattatttttcattgttatgctacatagttttatacacattgcttatgataaaatgtacccttttttatttggcttgactggtttatttattaccatggttccttttttgccctttaatttaaaattaatacaccaaagatttttttaaaggattaatcatatcttatattgctttctccatttagaaatcttcagaggactcctttccctttgaatgataatctcaaaagtatgatataactgtcaagattttttatttgtaacagcaataaaaatagtgaaataagttaggtgaacattttactattaatttgttctataactgtccggcatgtccgtcccctccagtttctcctgaatatacagaatgctgattccctgcttaaaaggtattttcaccagaaatctaccaatgggactttaaaaaaaaacactaaatgaagtataataataagaatgaatagctcacatatatttaacacacagcagcttcatgggaaaacaactgtattttaaatgaagaacaggcctcctcagtgataactctaaaatttctcaacaatgtacagacacagactaatcatgaaagaagataatgacgatgctgggcagtgtctggaggtagccttttctcctggcattcactctagatgctcaaacttgggagtgcagcgctctggcagagttgggagatgttctctggagggctctggcggtgcttatttatcagccagtattgaaatttgtcaatatatcaaaaacgatttagtagctatatcagaccttatcacctgaatgcagcctttggcccacattctaaaggtggtgacacacatagataaggaatgagatgtctcaagacttataagacatgttattttaataaatgattatattttttgataaagtgaattcaaatattaccaacccaagtgctttattgatttaacaagatgatttcaaataatgcattaagttagcctgctgtgttaatttcataaagctattctttttcattttattttttcaagttttcattcacttttcaaaataatggtagcatataatcacatgcaatgccaatgaatccccatattaagcttcgtacttctgtccaaatgtattgtagttgcctaatttcaaggttctaatttggaaatctgatttattttgtatgtttttatatacataccaattttaagcattatcttgcaaagtagacataggtggtgtttgatttgccataattaacttgaatttgattttgtaaccaaaatgtggctgtccacataattggagatcagtgtctttgggcttttaatggagaacaaatcacattgtggtgttgctggtttttctgtttcacatttacttttgctctagaagtatttccgtgagtctgatgactccataagttatgatcctcagtgttaagtaacttagacggttggcattactttaatattcacttaagcttctgtatcatttttttctgtatttttcccttaggaatttaattcgggtcttcctcaaattttacagctttaaaaaaattccatgaatgggttttcctcaacctcagaatatcataataaattacaagatatgaccccctggttcctattaccttgattaaagtggcggcaattaatttactgatgttttgtcagtgaaataaataatagcatcttatgaagtttgtgtatctctgatgaaaatgagtcatgtcagattccctctctgaagggaagttaaataaacaacatttttaaaattctttgaattctaaataaatatgctttgaaaagtgagttagggttttgtctaattgcactgaggcgagctagcttcggtgccatttttctctgtgcccttttccctccatggattcatttctatctattgcactctagcgtaaaggacccagccaagaaattgtaaaatagattcaacaacaaaataaacaggtcttgagttaattatcaatctctatgcacttaattaatatttcccaagcccatcttaaaggtgtaataaggtagaaaaataaaagtacactgttaaaatagccagaaatgtttttataaataatcctgctaaataaatctgaggccctttgttaatttacaattatgattcattttattaataaacttgtttgaattgtaccacaaatttaactgaattgtatcatcaaaataaataaaacagggtaataaaaataacaattagggtgactgatgtcagacactcatatcaactcatcattttcttgtagcctctgattctgtactttcttgtgtattattaaagaggtaaatgctctcttaaaatgcctctagttcctcagaggtaggaaaaataaactcaacctgctttggacttgtgtatttacttgggttggtttccagaatctccttattcctgaaacagtatgatcatgtagttaaactactcctttatatctgtaagtactgtgcagccaacatgttcttttttgtccccaacttctgccatctttccaacctctgaggcatgctattttatagtggtttgctctttgaaaaattgtttttgtgccctctcttaatagtcacagatactgacacaaaacttaaaaatgaccagaaaacaatgtataaattatttaaaataaaacattctttttatatcacattatcaaatttgtactctttattcacttttccattaagtgtgatatcaatatagctaggctgttttgagcttgcacagtctgtctaccaagctccttcctaagtactttgagggtaaaatgaagaaggcagtctaggaaggaacacaattacagagccctgtagaaggcagactgcttacaggagctgtataaggaaaattaagcccaacattatgtgctgtgttggccatcatgcaaagctgattgcaaagccctggttacctccttcatcatcttccatggaagataaaaataaattcaaatgttaattcaatagacatgatgctttataatgaagaagtttgtagcagaaacctgagaatataggtatcttcttaagatcaagagaggctttgtgaataactgaccttctaagcaggtcttgaagaatggagacaatggtcaaatagtagtgcagggagaaatttccacctagagtaattaaagcagatgtaggctcagaagatcatctaattgagctggttggaacatagacaggagacatactaagtatatttgacagagtaggtttgagtttacatcatgatttctgagtgcatggaatactatccaaaggaatttacactttattcaagggagaatattttaagatctcagcagaatggaacttaagatttctactttcagtagaagcctctgacaggtatgtttgctaaattgaatgggagtgaaatacagtagaatcaaaacagtgtagaaacaagacatgagaaagagtaacgggcagattgttagatgtccaggaatatttgtctggcttttttacttctactatactttattgtttcaaggtgatggttgactagcgaacatactgagggtcacatgccaaacaccattttgagtgttttacatgtaatttttttccttggtcatcttagcaattctatgactaattaataatatttgttgttatttattgtacagatgaggaaactgaagagttttagtaacttttttaagattacacaataaacaatgatgaatcaagctttgaagccaacctcaccaaccacaagatcaaccaacactcttcaccaatgtgtaatataaccacgttaatattcaacatagtacgtactgctgaaagaagttgatacttattcatattaaccccgtagttttgtgtttcctcatctgtaaaagtatgtattataacaccttctctccaccttacagcgtgtgaggttcaaatgaccattcattggaagatattttttatatcctataatgcattataaaaataaatcatttttcctaaa

SEQ ID NO: 20110 - DNA, 1849 bp, Homo sapiens
  source 1..1849: mol_type = unassigned DNA
acagccacactgcagtatgtcaggaacagtcatggagctgttctcattgtttgcctctccttttcctcctttttaccttctggcccctctcttcattcagagatgctggcagagccattccctaaggttgtagcaagtttaatcatcctccatttgtctggggcaaccaagaaaggaacagaaaagcaaaccacctcagaaacacagaagtcagtgcagtgtggaacttggacaaaacatgcagagggaggtatctttacctctcccaactatcccagcaagtatccccctgaccgggaatgcatctacatcatagaagccgctccaagacagtgcattgaactttactttgatgaaaagtactctattgaaccgtcttgggagtgcaaatttgatcatattgaagttcgagatggaccttttggcttttctccaataattggacgtttctgtggacaacaaaatccacctgtcataaaatccagtggaagatttctatggattaaattttttgctgatggagagctggaatctatgggattttcagctcgatacaatttcacacctgaataaaaggcaaactccttagcaggatctacagagtgtttcgtgatctctccttctccatcatctcatctctggatgctgtggtgcccagaacgttgatctaacaccatcttgaagcacacatgctgatctccaggtgcaccacgatttgtgcccttgaaaatgctgtttgctcaatctttctggagaaagtttgccacatattcggacttagtaaattagaactcctaccttgaaacccagatgaaggttcaattttccccaggattcctttcctcaccattctcctatgtgagggacttcttgtattataatcttttaatataatattatattttatgtaatattgtgttaaattatattgttttatgtaatatattattttaaatgttattttatatatgatattaaaagattataattatataatctttttcgataatttattcttgtattacaatctttttattataatagtctccactctccccaaaatattgtgaattcttcagctgaggagttttgctttagtttcttatcgccatggactgggaattaacatgtatttaacacattttgctcaaacaatcaaacagtaaaagctgaagagagcgtattattattcgcccattccgagagaaagttgaagatgactgaagaactaaaaatacataaatgaattaagtaattataaacataaatttcctgtagctccaacatgactttgatctgagtaatagtgttgtgaaatagattactacatgattttcattgcttttatattatatatagtaattaatattcagaatagttgattaactttcttaagtgtcacataatttaaaaatgaaattgctgtttgccccagatatgtttttctgtgttctttttaaatttcagtgaaattttcttatactcccttcattaaatctattatctggtttctaaacctttacctatttaatgtctcttttcctttctttctaaaaagtaactggttaaactacagttttgtcatttatgaaattttttctgttattattgtagggatagtcaatattatcattttaaggatagttaaaacttattttgcaattaatacgtattttacagtacactaatatgcatatatgttgtattttattaaaatattaaaatgttttttaaacaaaaatattgtccgaagctctaaataccagagtattgattttaaagtctgccaagacaataatacaagtaacacaactaagcctttctttaaataataaaacgagtatctaaa

SEQ ID NO: 20111 - DNA, 2357 bp, Homo sapiens
  source 1..2357: mol_type = unassigned DNA
gggtgtgatgcgagcgtcacggtggggatgctgctggctgcgcggcgctgagggccagcgagagcgagagcccgcccggggcggaggacggactcatccggatctggctgcagcgtgggctcggagctcccccttcctctcggtctccctctcggcccccctttatttccttcttgctttgcgtctttaacacctctcgaccctgtcctccccccgccactggaagtcttcccgtctctaaatggaattagtggagcccggagcctctggtgtaacgcacagacatgatccatgggcgcagcgtgcttcacattgtagcaagtttaatcatcctccatttgtctggggcaaccaagaaaggaacagaaaagcaaaccacctcagaaacacagaagtcagtgcagtgtggaacttggacaaaacatgcagagggaggtatctttacctctcccaactatcccagcaagtatccccctgaccgggaatgcatctacatcatagaagccgctccaagacagtgcattgaactttactttgatgaaaagtactctattgaaccgtcttgggagtgcaaatttgatcatattgaagttcgagatggaccttttggcttttctccaataattggacgtttctgtggacaacaaaatccacctgtcataaaatccagtggaagatttctatggattaaattttttgctgatggagagctggaatctatgggattttcagctcgatacaatttcacacctgatcctgactttaaggaccttggagctttgaaaccattaccagcgtgtgagtttgagatgggcggttccgaaggaattgtggagtctatacaaattatgaaggaaggcaaagctactgctagcgaggctgttgattgcaagtggtacatccgagcacctccacggtccaagatttacttacgattcttggactatgagatgcagaattcaaatgagtgcaagaggaattttgtggctgtgtatgatggaagcagttccgtggaggatttgaaagctaagttctgtagcactgtggctaatgatgtcatgctacgcacgggtcttggggtgatccgcatgtgggcagatgagggcagtcgaaacagccgatttcagatgctcttcacatcctttcaagaacctccttgtgaaggcaacacattcttctgccatagtaacatgtgtattaataatactttggtctgcaatggactccagaactgtgtgtatccttgggatgaaaatcactgtaaagagaagaggaaaaccagcctgctggaccagctgaccaacaccagtgggactgtcattggcgtgacttcctgcatcgtgatcatcctcattatcatctctgtcatcgtacagatcaaacagcctcgtaaaaagtatgtccaaaggaaatcagactttgaccagacagttttccaggaggtatttgaacctcctcattatgagttatgcactctcagagggacaggagctacagctgactttgcagatgtggcagatgactttgaaaattaccataaactgcggaggtcatcttccaaatgcattcatgaccatcactgtggatcacagctgtccagcactaaaggcagccgcagtaacctcagcacaagagatgcttctatcttgacagagatgcccacacagccaggaaaacccctcatcccacccatgaacagaagaaatatccttgtcatgaaacacagctactcgcaagatgctgcagatgcctgtgacatagatgaaatcgaagaggtgccgaccaccagtcacaggctgtccagacacgataaagccgtccagcggttctgcctcattgggtctctaagcaaacatgaatctgaatacaacacaactagggtctagaaagaaaattcaagatgaggaaactgaagagttttagtaacttttttaagattacacaataaacaatgatgaatcaagctttgaagccaacctcaccaaccacaagatcaaccaacactcttcaccaatgtgtaatataaccacgttaatattcaacatagtacgtactgctgaaagaagttgatacttattcatattaaccccgtagttttgtgtttcctcatctgtaaaagtatgtattataacaccttctctccaccttacagcgtgtgaggttcaaatgaccattcattggaagatattttttatatcctataatgcattataaaaataaatcatttttcctaaatcatgtgtagacttcattttatgatcgacatggaacaaaagtatcatctataaagagtaacaatgtagagtaacccccctcagaacttgtccaccataaaatatatgactttccaaatccaa

SEQ ID NO: 20112 - DNA, 1205 bp, Homo sapiens
  source 1..1205: mol_type = unassigned DNA
agcgaaggtctcgcgaggcctgggcgctgcggcggcaggaggaggacggggaaggacggagccgagccgcggctgcctccctcgctcactccctcgcgcactcgcccgccccctccctccctcccctcccttccccggccccggctctggccccggcccattcgctgttgggtcttctgctagggaggatgtcgggttcgtcgctgcccagcgccctggccctctcgctgttgctggtctctggctccctcctcccagggccaggcgccgctcagaacgctgggtttgtcaagtcgcccatgtcagaaactaagctcacgggggacgcctttgagctgtactgtgacgtggtcgggagccccacgccagagatccagtggtggtacgcagaagtcaaccgggcagagtctttcagacagctgtgggacggtgctcggaagcgccgtgtcaccgtaaacaccgcctacgggtcaaacggcgtgagtgtgctgagaataacccggctcaccttggaggactctgggacttacgagtgcagggccagcaacgaccccaagaggaatgacttgaggcaaaacccctccataacatggattcgagcccaggccaccataagcgtccttcagaagccaaggattgtcaccagtgaagaggtcattattcgagacagccctgttctccctgtcaccctgcagtgtaacctcacctccagctctcacacccttacatacagctactggacaaagaatggggtggaactgagtgccactcgtaagaatgccagcaacatggagtacaggatcaataagccgagagctgaggattcaggcgaataccactgcgtatatcactttgtcagcgctcctaaagcaaacgccaccattgaagtgaaagccgctcctgacatcactggccataaacggagtgagaacaagaatgaagggcaggatgccactatgtattgcaagtcagttggctacccccacccagactggatatggcgcaagaaggagaacgggatgcccatggacattgtcaatacctctggccgcttcttcatcatcaacaaggaaaattacactgagttgaacattgtgaacctgcagatcacggaagaccctggcgagtatgaatggtgcggagccacctggccccactctggcctttcttgggaattctggctgaaattatcatccttgtggtga

SEQ ID NO: 20113 - DNA, 2444 bp, Homo sapiens
  source 1..2444: mol_type = unassigned DNA
cacgacccggagcgaaggtctcgcgaggcctgggcgctgcggcggcaggaggaggacggggaaggacggagccgagccgcggctgcctccctcgctcactccctcgcgcactcgcccgccccctccctccctcccctcccttccccggccccggctctggccccggcccattcgctgttgggtcttctgctagggaggatgtcgggttcgtcgctgcccagcgccctggccctctcgctgttgctggtctctggctccctcctcccagggccaggcgccgctcagaacgctgggtttgtcaagtcgcccatgtcagaaactaagctcacgggggacgcctttgagctgtactgtgacgtggtcgggagccccacgccagagatccagtggtggtacgcagaagtcaaccgggcagagtctttcagacagctgtgggacggtgctcggaagcgccgtgtcaccgtaaacaccgcctacgggtcaaacggcgtgagtgtgctgagaataacccggctcaccttggaggactctgggacttacgagtgcagggccagcaacgaccccaagaggaatgacttgaggcaaaacccctccataacatggattcgagcccaggccaccataagcgtccttcagaagccaaggattgtcaccagtgaagaggtcattattcgagacagccctgttctccctgtcaccctgcagtgtaacctcacctccagctctcacacccttacatacagctactggacaaagaatggggtggaactgagtgccactcgtaagaatgccagcaacatggagtacaggatcaataagccgagagctgaggattcaggcgaataccactgcgtatatcactttgtcagcgctcctaaagcaaacgccaccattgaagtgaaagccgctcctgacatcactggccataaacggagtgagaacaagaatgaagggcaggatgccactatgtattgcaagtcagttggctacccccacccagactggatatggcgcaagaaggagaacgggatgcccatggacattgtcaatacctctggccgcttcttcatcatcaacaaggaaaattacactgagttgaacattgtgaacctgcagatcacggaagaccctggcgagtatgaatgtaatgccaccaacgccattggctccgcctctgttgtcactgtcctcagggtgcggagccacctggccccactctggcctttcttgggaattctggctgaaattatcatccttgtggtgatcattgttgtgtatgagaagaggaagaggccagatgaggttcctgacgatgatgaaccagctggaccaatgaaaaccaactctaccaacaatcacaaagataaaaacttgcgccagagaaacacaaattaagtactgcttacaatatctttaggttcctgaaactggtggcaacatgacctgctaaaattttctgcttggacctctttggttctctcccctttcaagtgagcaacaccacaatgactgtctaaagcatgccttatttagcctctcctgtaagggtgatctagccaggtacattttaaacaatgcttcagtgtagaaggtgtaaactattttgggcttgatgtgctgtgaatgttgcttttttttttcctttgttaaaatatttaaatagaagtgaaaaggtcctctgaggatcagatcatgcatgcgccattttttacttaatgcagctgttaaattggcaaagctctaaaatgcactgctgccatctagtgatacacttttgtaaagtacagcaaaacctacagatatatacagtatataaatatatatatatatatatttatatttttgggggtgggagaaatccaaaataaagtaaatgcttgtttcatttttaagctgctgatattcattccttattgtatgttgtcagatgaggaaattgtgcagttctggtacataaagatgagtaatataaactgaaatctataattttaagggcttaacctgtgactttaataagctggaacagtccactgaatgggtataatgaattgcagtatatacgtatgattgctttttaagtgattatcttttcttctgttaagtcatgtaaattcataaatccttttgcactgatgtgttgaaccttattcttgtacattcattcaatcaaggcaaacttttataatttttcttttgtttccaatgaccttgaaatgttatagcatggtaatattctatgcaactatagttatactttttggtttgacactgtattttttcacattgatttactggttgatgatagattttataacctaacggttctcatgcggtgcgtaattgtagatgcatgtacttgtgtgttttgtgtaattattgaagtgcaatgatgtataaaaaagtggattcacctgtttttaaaaataaaacattgataaaaggtg

SEQ ID NO: 20114 - DNA, 2098 bp, Homo sapiens
  source 1..2098: mol_type = unassigned DNA
cccacgacccggagcgaaggtctcgcgaggcctgggcgctgcggcggcaggaggaggacggggaaggacggagccgagccgcggctgcctccctcgctcactccctcgcgcactcgcccgccccctccctccctcccctcccttccccggccccggctctggccccggcccattcgctgttgggtcttctgctagggaggatgtcgggttcgtcgctgcccagcgccctggccctctcgctgttgctggtctctggctccctcctcccagggccaggcgccgctcagaacgagccaaggattgtcaccagtgaagaggtcattattcgagacagccctgttctccctgtcaccctgcagtgtaacctcacctccagctctcacacccttacatacagctactggacaaagaatggggtggaactgagtgccactcgtaagaatgccagcaacatggagtacaggatcaataagccgagagctgaggattcaggcgaataccactgcgtatatcactttgtcagcgctcctaaagcaaacgccaccattgaagtgaaagccgctcctgacatcactggccataaacggagtgagaacaagaatgaagggcaggatgccactatgtattgcaagtcagttggctacccccacccagactggatatggcgcaagaaggagaacgggatgcccatggacattgtcaatacctctggccgcttcttcatcatcaacaaggaaaattacactgagttgaacattgtgaacctgcagatcacggaagaccctggcgagtatgaatgtaatgccaccaacgccattggctccgcctctgttgtcactgtcctcagggtgcggagccacctggccccactctggcctttcttgggaattctggctgaaattatcatccttgtggtgatcattgttgtgtatgagaagaggaagaggccagatgaggttcctgacgatgatgaaccagctggaccaatgaaaaccaactctaccaacaatcacaaagataaaaacttgcgccagagaaacacaaattaagtactgcttacaatatctttaggttcctgaaactggtggcaacatgacctgctaaaattttctgcttggacctctttggttctctcccctttcaagtgagcaacaccacaatgactgtctaaagcatgccttatttagcctctcctgtaagggtgatctagccaggtacattttaaacaatgcttcagtgtagaaggtgtaaactattttgggcttgatgtgctgtgaatgttgcttttttttttcctttgttaaaatatttaaatagaagtgaaaaggtcctctgaggatcagatcatgcatgcgccattttttacttaatgcagctgttaaattggcaaagctctaaaatgcactgctgccatctagtgatacacttttgtaaagtacagcaaaacctacagatatatacagtatataaatatatatatatatatatttatatttttgggggtgggagaaatccaaaataaagtaaatgcttgtttcatttttaagctgctgatattcattccttattgtatgttgtcagatgaggaaattgtgcagttctggtacataaagatgagtaatataaactgaaatctataattttaagggcttaacctgtgactttaataagctggaacagtccactgaatgggtataatgaattgcagtatatacgtatgattgctttttaagtgattatcttttcttctgttaagtcatgtaaattcataaatccttttgcactgatgtgttgaaccttattcttgtacattcattcaatcaaggcaaacttttataatttttcttttgtttccaatgaccttgaaatgttatagcatggtaatattctatgcaactatagttatactttttggtttgacactgtattttttcacattgatttactggttgatgatagattttataacctaacggttctcatgcggtgcgtaattgtagatgcatgtacttgtgtgttttgtgtaattattgaagtgcaatgatgtataaaaaagtggattcacctgtttttaaaaataaaacattgataaaaggtg

SEQ ID NO: 20115 - DNA, 858 bp, Homo sapiens
  source 1..858: mol_type = unassigned DNA
cattcgctgttgggtcttctgctagggaggatgtcgggttcgtcgctgcccagcgccctggccctctcgctgttgctggtctctggctccctcctcccagggccaggcgccgctcagaacgccgctcctgacatcactggccataaacggagtgagaacaagaatgaagggcaggatgccactatgtattgcaagtcagttggctacccccacccagactggatatggcgcaagaaggagaacgggatgcccatggacattgtcaatacctctggccgcttcttcatcatcaacaaggaaaattacactgagttgaacattgtgaacctgcagatcacggaagaccctggcgagtatgaatgtaatgccaccaacgccattggctccgcctctgttgtcactgtcctcagggtgcggagccacctggccccactctggcctttcttgggaattctggctgaaattatcatccttgtggtgatcattgttgtgtatgagaagaggaagaggccagatgaggttcctgacgatgatgaaccagctggaccaatgaaaaccaactctaccaacaatcacaaagataaaaacttgcgccagagaaacacaaattaagtactgcttacaatatctttaggttcctgaaactggtggcaacatgacctgctaaaattttctgcttggacctctttggttctctcccctttcaagtgagcaacaccacaatgactgtctaaagcatgccttatttagcctctcctgtaagggtgatctagccaggtacattttaaacaatgcttcagtgtagaaggtgtaaactattttgggcttgatgtgctgtgaatgttgcttttttttttc

SEQ ID NO: 20116 - DNA, 1373 bp, Homo sapiens
  source 1..1373: mol_type = unassigned DNA
agcgaaggtctcgcgaggcctgggcgctgcggcggcaggaggaggacggggaaggacggagccgagccgcggctgcctccctcgctcactccctcgcgcactcgcccgccccctccctccctcccctcccttccccggccccggctctggccccggcccattcgctgttgggtcttctgctagggaggatgtcgggttcgtcgctgcccagcgccctggccctctcgctgttgctggtctctggctccctcctcccagggccaggcgccgctcagaacgctgggtttgtcaagtcgcccatgtcagaaactaagctcacgggggacgcctttgagctgtactgtgacgtggtcgggagccccacgccagagatccagtggtggtacgcagaagtcaaccgggcagagtctttcagacagctgtgggacggtgctcggaagcgccgtgtcaccgtaaacaccgcctacgggtcaaacggcgtgagtgtgctgagaataacccggctcaccttggaggactctgggacttacgagtgcagggccagcaacgaccccaagaggaatgacttgaggcaaaacccctccataacatggattcgagcccaggccaccataagcgtccttcagaagccaaggattgtcaccagtgaagaggtcattattcgagacagccctgttctccctgtcaccctgcagtgtaacctcacctccagctctcacacccttacatacagctactggacaaagaatggggtggaactgagtgccactcgtaagaatgccagcaacatggagtacaggatcaataagccgagagctgaggattcaggcgaataccactgcgtatatcactttgtcagcgctcctaaagcaaacgccaccattgaagtgaaagccgctcctgacatcactggccataaacggagtgagaacaagaatgaagggcaggatgccactatgtattgcaagtcagttggctacccccacccagactggatatggcgcaagaaggagaacgggatgcccatggacattgtcaatacctctggccgcttcttcatcatcaacaaggaaaattacactgagttgaacattgtgaacctgcagatcacggaagaccctggcgagtatgaatgtaatgccaccaacgccattggctccgcctctgttgtcactgtcctcagggtgcggagccacctggccccactctggcctttcttgggaattctggctgaaattatcatccttgtggtgatcattgttgtgtatgagaagaggaagaggccagatgaggttcctgacgttccaccgaggaaaaccaactctaccaacaatcacaaagataaaaacttgcgccagagaaacacaaattaa

SEQ ID NO: 20117 - DNA, 1234 bp, Homo sapiens
  source 1..1234: mol_type = unassigned DNA
agttcactcactttcaaagccagctgaaggaaagaggaagtgctagagagagcccccttcagtgtgcttctgacttttacggacttggcttgttagaaggctgaaagatgatggcaggaatgaaaatccagcttgtatgcatgctactcctggctttcagctcctggagtctgtgctcagattcagaagaggaaatgaaagcattagaagcagatttcttgaccaatatgcatacatcaaagattagtaaagcacatgttccctcttggaagatgactctgctaaatgtttgcagtcttgtaaataatttgaacagcccagctgaggaaacaggagaagttcatgaagaggagcttgttgcaagaaggaaacttcctactgctttagatggctttagcttggaagcaatgttgacaatataccagctccacaaaatctgtcacagcagggcttttcaacactgggagttaatccaggaagatattcttgatactggaaatgacaaaaatggaaaggaagaagtcataaagagaaaaattccttatattctgaaacggcagctgtatgagaataaacccagaagaccctacatactcaaaagagattcttactattactgagagaataaatcatttatttacatgtgattgtgattcatcatcccttaattaaatatcaaattatatttgtgtgaaaatgtgacaaacacacttatctgtctcttctacaattgtggtttattgaatgtgatttttctgcactaatataaattagactaagtgttttcaaataaatctaaatcttcagcatgatgtgttgtgtataattggagtagatattaattaagtcacctgtataatgttttgtaattttgcaaaacatatcttgagttgtttaaacagtcaaaatgtttgatattttataccagcttatgagctcaaagtactacagcaaagcctagcctgcatatcattcacccaaaacaaagtaatagcgcctcttttattattttgactgaatgttttatggaattgaaagaaacatacgttcttttcaagacttcctcatgaatctctcaattataggaaaagttattgtgataaaataggaacagctgaaagattgattaatgaactattgttaattcttcctattttaatgaatgacattgaactgaattttttgtctgttaaatgaacttgatagctaataaaaagacaactagccatcaaaa

SEQ ID NO: 20118 - DNA, 1118 bp, Homo sapiens
  source 1..1118: mol_type = unassigned DNA
tttttcatctgtgatatatatatcatttatatatttctgccatcattttaatttccttgctttcttactttgctctgtgtgtacacacataagtgcatgtatatgtgaatataactattgcattttattaaacagaagttatgagatattggcagtatacaactttgtgaactgatgttactaaataaataacactatatttattagactggagtagcaattagaccctaaatgtgatggtttagcacactaggaattcatttcttgctcatgtaacacaagttttaattgcaggggtttttttaatatatttcagattagtaaagcacatgttccctcttggaagatgactctgctaaatgtttgcagtcttgtaaataatttgaacagcccagctgaggaaacaggagaagttcatgaagaggagcttgttgcaagaaggaaacttcctactgctttagatggctttagcttggaagcaatgttgacaatataccagctccacaaaatctgtcacagcagggcttttcaacactgggagttaatccaggaagatattcttgatactggaaatgacaaaaatggaaaggaagaagtcataaagagaaaaattccttatattctgaaacggcagctgtatgagaataaacccagaagaccctacatactcaaaagagattcttactattactgagagaataaatcatttatttacatgtgattgtgattcatcatcccttaattaaatatcaaattatatttgtgtgaaaatgtgacaaacacacttatctgtctcttctacaattgtggtttattgaatgtgatttttctgcactaatataaattagactaagtgttttcaaataaatctaaatcttcagcatgatgtgttgtgtataattggagtagatattaattaagtcacctgtataatgttttgtaattttgcaaaacatatcttgagttgtttaaacagtcaaaatgtttgatattttataccagcttatgagctcaaagtactacagcaaagcctagcctgcatatcattcacccaaaacaaagtaatagcgcctcttttattattttgactgaatgttttatggaattgaaagaaacat

SEQ ID NO: 20119 - DNA, 801 bp, Homo sapiens
  source 1..801: mol_type = unassigned DNA
atagttcactcactttcaaagccagctgaaggaaagaggaagtgctagagagagcccccttcagtgtgcttctgacttttacggacttggcttgttagaaggctgaaagatgatggcaggaatgaaaatccagcttgtatgcatgctactcctggctttcagctcctggagtctgtgctcagattcagaagaggaaatgaaagcattagaagcagatttcttgaccaatatgcatacatcaaagttaatccaggaagatattcttgatactggaaatgacaaaaatggaaaggaagaagtcataaagagaaaaattccttatattctgaaacggcagctgtatgagaataaacccagaagaccctacatactcaaaagagattcttactattactgagagaataaatcatttatttacatgtgattgtgattcatcatcccttaattaaatatcaaattatatttgtgtgaaaatgtgacaaacacacttatctgtctcttctacaattgtggtttattgaatgtgatttttctgcactaatataaattagactaagtgttttcaaataaatctaaatcttcagcatgatgtgttgtgtataattggagtagatattaattaagtcacctgtataatgttttgtaattttgcaaaacatatcttgagttgtttaaacagtcaaaatgtttgatattttataccagcttatgagctcaaagtactacagcaaagcctagcctgcatatcattcacccaaaacaaagtaatagcgcctcttttattattttgactgaatgttt

SEQ ID NO: 20120 - DNA, 4132 bp, Homo sapiens
  source 1..4132: mol_type = unassigned DNA
caagctcgccccgcgcagcccgagccgggctgggcgctgtcctcgggggcctggggaaccgcgcggtttggagatcggaggcacctggaacccgtggcaagcgccgagccgggagacagcccgaggaaccacgggttctggagctaggagccggaagctgggagtccggaggagagcggagcccggagcccggagcccggggcggcgcgtctgggtctggcgcttcccgactggacggcgcgcccgctggtcttcgccacgcgccctcccctgggctcccgttcatcggtccccgcctgagacgcgcccactcctgcccggacttccagccccggaggcgccggacagagccgcggactccagcgcccaccatgcgcctcaacagctccgcgccgggaaccccgggcacgccggccgccgaccccttccagcgggcgcaggccggactggaggaggcgctgctggccccgggcttcggcaacgcttcgggcaacgcgtcggagcgcgtcctggcggcacccagcagcgagctggacgtgaacaccgacatctactccaaggtgctggtgaccgccgtgtacctggcgctcttcgtggtgggcacggtgggcaacacggtgacggcgttcacgctggcgcggaagaagtcgctgcagagcctgcagagcacggtgcattaccacctgggcagcctggcgctgtccgacctgctcaccctgctgctggccatgcccgtggagctgtacaacttcatctgggtgcaccacccctgggccttcggcgacgccggctgccgcggctactacttcctgcgcgacgcctgcacctacgccacggccctcaacgtggccagcctgagtgtggagcgctacctggccatctgccaccccttcaaggccaagaccctcatgtcccgaagccgcaccaagaagttcatcagcgccatctggctcgcctcggccctgctggcggtgcctatgctgttcaccatgggcgagcagaaccgcagcgccgacggccagcacgccggcggcctggtgtgcacccccaccatccacactgccaccgtcaaggtcgtcatacaggtcaacaccttcatgtccttcatattccccatggtggtcatctcggtcctgaacaccatcatcgccaacaagctgaccgtcatggtacgccaggcggccgagcagggccaagtgtgcacggtcgggggcgagcacagcacattcagcatggccatcgagcctggcagggtccaggccctgcggcacggcgtgcgcgtcctacgtgcagtggtcatcgcctttgtggtctgctggctgccctaccacgtgcggcgcctcatgttctgctacatctcggatgagcagtggactccgttcctctatgacttctaccactacttctacatggtgaccaacgcactcttctacgtcagctccaccatcaaccccatcctgtacaacctcgtctctgccaacttccgccacatcttcctggccacactggcctgcctctgcccggtgtggcggcgcaggaggaagaggccagccttctcgaggaaggccgacagcgtgtccagcaaccacaccctctccagcaatgccacccgcgagacgctgtactaggctgtgcgccccggaacgtgtccaggaggagcctggccatgggtccttgcccccgacagacagagcagcccccacccgggagccttgatgggggtcaggcagaggccagcctgcactggagtctgaggcctgggacccccccctcccaccccctaacccatgtttctcattagtgtctcccgggcctgtccccaactcctccccacccctcccccatctcctctttgaaagccagaacaagagagcgctcctctcccagataggaaaagggcctctaacaaggagaaattagtgtgcggcaaaaggcagttttctttgttctcagactaatggatggttccagagaaggaaatgaaaggtgctgggtggggccgggcctccggcggcccggctgctgttcccatgtccacatctctgaggcctgcaccccctctgtctagctcggggagtccagccccagtcccgcaggctccgtggctttgggcctcacgtgcagaccctgccatgcagacccatgcccccctcccccaggcagctccaagaaagctccctgactcgccccttcaggcctggcaagctgggggcccatcgccgtggggagtccctcccaccaccctcgccgcaggcagctgcagcccccagaggggaccacaagcccaaaaaggacaaaaatgggctggcctggaatggcccagaccccagcctcccctcctccctcccatcctcacccaggccaaggcccaggggctctgccaggacaccacatgggagggggctcaggcctcagcctcaagatcttcagctgtggcctctcgggctcggcagaagggacgccggatcaggggcctggtctccagcacctgcccgagtggccgtggccaggatggggtgcgcattccgtgtgctttgcttgtggctgtgcaggctgaggtctggagccaggcccagagctggcttcagggtggggccttgagaaggggaatgtgggacaggggcgatggtgcctggtctctgagtaagatgccaggtcccaggaactcaggcttcaggtgagaaggagcggtgtgtccaggcaccgctggccggcagccctgggctgaggcacagactcatttgtcaccttctggcggcggcagccctggccccggcctccaagcagttgaaaaagctggcgcctccttggtctctaggatccaggctccacagagcacatgactagccaggcccctggcttaagaaggtcgcctaagcctaagagaagacagtcccaggagaagctggccgggaccagccaggagctgggagccacaggaagcaaaagtcagccttttcttcaagggatttccctgtctcagagcagcctttgccccagggaaatgggctctgggctggctgcctgcaccggccatgtcgacccaggacccggacacctggtcttgggctgtgttcagccactttgccttctctggactcagtttccccgtctgagaaatgagagtcgaatgctacagtatctgcagtcgcttggatctggctgttgagttgacgggttccttgaaccccacaaaatccctctccaaccacaggacccttcggctcaccaagaacagggcccaggggagtcaggcctattcgctgcacttcctgccaaactttgcccccacaagcctggtcatcagccaggcagccctcccagtgcccaagggccaccaaccccagggaaacagggccagcacagaggggccttcctcccccacagagcccccatgacatagtctgctctgggcggaagagctttgctgccagccagggatgtccagaggtcagtgcagcccctacccctgctcaggagtgggctcagagtctagcaaatgctaaggcccctcaggctgggctctgaacgaggacctggactcagagccagacagggcagcctcagacccttctctggggctcctggaccttgggccataatttctgagcctcggtttccccatctaaggaacagatgtggtcgttccgccctctcagctggatgagactgtcctggaggatccaccccggaacagacagaatggtgtctctcaggatggtgctctgagagagggcagagtggatgccccactgccctagaccctcggtagacgtggggtctctggggcggggtctgtggctgtgactgaagtcggcttttcccgttgatgtcttgatgctcctatctgtgcacttaccgtaggtagggacacgtgtccacgcaccacagacacacccacgacacctgatctcgtatcactagcttgcggccaggtcatgatgtggccccggaagctggccctgcgtgccatgagtgcgtcggtcatggagtccggagcccctgagccggcccctggtgacggcacagccctcacagctcaaacgcccacccccactcccaccatctgcaggtggtgaaaacaaaccccgtgtatctctcaataaaggtggccgaagggcctcgatgtgga

SEQ ID NO: 20121 - DNA, 1315 bp, Homo sapiens
  source 1..1315: mol_type = unassigned DNA
tgtggctgtcgagaatgggggtctgtgggtacctgttcctgccctggaagtgcctcgtggtcgtgtctctcaggctgctgttccttgtacccacaggagtgcccgtgcgcagcggagatgccaccttccccaaagctatggacaacgtgacggtccggcagggggagagcgccaccctcaggtgcactattgacaaccgggtcacccgggtggcctggctaaaccgcagcaccatcctctatgctgggaatgacaagtggtgcctggatcctcgcgtggtccttctgagcaacacccaaacgcagtacagcatcgagatccagaacgtggatgtgtatgacgagggcccttacacctgctcggtgcagacagacaaccacccaaagacctctagggtccacctcattgtgcaagtatctcccaaaattgtagagatttcttcagatatctccattaatgaagggaacaatattagcctcacctgcatagcaactggtagaccagagcctacggttacttggagacacatctctcccaaagcggttggctttgtgagtgaagacgaatacttggaaattcagggcatcaccagggagcagtcaggggactacgagtgcagtgcctccaatgacgtggccgcgcccgtggtacggagagtaaaggtcaccgtgaactatccaccatacatttcagaagccaagggtacaggtgtccccgtgggacaaaaggggacactgcagtgtgaagcctcagcagtcccctcagcagaattccagtggtacaaggatgacaaaagactgattgaaggaaagaaaggggtgaaagtggaaaacagacctttcctctcaaaactcatcttcttcaatgtctctgaacatgactatgggaactacacttgcgtggcctccaacaagctgggccacaccaatgccagcatcatgctatttggtgagactgtgctctgagctgggcaagaagaggggagagggtgcagaacgggagagctgggtgggagggcccctcaaggccagggtcagaggttagcagggtatcagtggacatggagagggaggaaaaaaaagagagagacacagaaagaaatggagagagagggacagagagacagggaggaggcagacagaaagagaaagaacaagagatacagtttacatgtatacaaagtagtatatgtatagtacatgtataaaagtagatctcagaagtgggaaaaggaaaatgaaaaagaatgttcatgtttcattctataatggaaaagatcccgagataggagaaaaatactttggaatgccaaaaa

SEQ ID NO: 20122 - DNA, 3190 bp, Homo sapiens
  source 1..3190: mol_type = unassigned DNA
aacttacaaagtgttggatgtcccccgttcgaactgagggactgcagaccgcctctgggtagctggatgaagcccaccccgtccccttctggtaccaaagtgcttactcctctccaaagtgccgtgtctgaactgccgctgggaagaagcggctcctgagacgcgcccacacctttcacctgccgcgcgcttccccctcctcggccaccttcccggcggaagcagcgaggagggagccccctttggccgtcctccgtggaaccggttttccgaggctggcaaaagccgaggctggatttgggggaggaatattagactcggaggagtctgcgcgcttttctcctccccgcgcctcccggtcgccgcgggttcaccgctcagtccccgcgctcgctccgcaccccacccacttcctgtgctcgcccggggggcgtgtgccgtgcggctgccggagttcggggaagttgtggctgtcgagaatgggggtctgtgggtacctgttcctgccctggaagtgcctcgtggtcgtgtctctcaggctgctgttccttgtacccacaggagtgcccgtgcgcagcggagatgccaccttccccaaagctatggacaacgtgacggtccggcagggggagagcgccaccctcaggtgcactattgacaaccgggtcacccgggtggcctggctaaaccgcagcaccatcctctatgctgggaatgacaagtggtgcctggatcctcgcgtggtccttctgagcaacacccaaacgcagtacagcatcgagatccagaacgtggatgtgtatgacgagggcccttacacctgctcggtgcagacagacaaccacccaaagacctctagggtccacctcattgtgcaagtatctcccaaaattgtagagatttcttcagatatctccattaatgaagggaacaatattagcctcacctgcatagcaactggtagaccagagcctacggttacttggagacacatctctcccaaagcggttggctttgtgagtgaagacgaatacttggaaattcagggcatcaccagggagcagtcaggggactacgagtgcagtgcctccaatgacgtggccgcgcccgtggtacggagagtaaaggtcaccgtgaactatccaccatacatttcagaagccaagggtacaggtgtccccgtgggacaaaaggggacactgcagtgtgaagcctcagcagtcccctcagcagaattccagtggtacaaggatgacaaaagactgattgaaggaaagaaaggggtgaaagtggaaaacagacctttcctctcaaaactcatcttcttcaatgtctctgaacatgactatgggaactacacttgcgtggcctccaacaagctgggccacaccaatgccagcatcatgctatttggtccaggcgccgtcagcgaggtgagcaacggcacgtcgaggagggcaggctgcgtctggctgctgcctcttctggtcttgcacctgcttctcaaattttgatgtgagtgccacttccccacccgggaaaggctgccgccaccaccaccaccaacacaacagcaatggcaacaccgacagcaaccaatcagatatatacaaatgaaattagaagaaacacagcctcatgggacagaaatttgagggaggggaacaaagaatactttggggggaaaaaagttttaaaaaagaaattgaaaattgccttgcagatatttaggtacaatggagttttcttttcccaaacgggaagaacacagcacacccggcttggacccactgcaagctgcatcgtgcaacctctttggtgccagtgtgggcaagggctcagcctctctgcccacagagtgcccccacgtggaacattctggagctggccatcccaaattcaatcagtccatagagacgaacagaatgagaccttccggcccaagcgtggcgctgcgggcactttggtagactgtgccaccacggcgtgtgttgtgaaacgtgaaataaaaagagcaagaaagaaaaaggaaacaaaataagaccgtctgacagcaacaacggtcccacaaacaagtcacaaaagataccgttaaacttttttttttttttatcattttactacatgaacatcatggataacaagggattctgattcattattaatttcattaattatattttctgatatgagtctagaacttactgcaaaaacaagacaaaactaaaaaaatacaactgagaagggtgaagagaagtatgtttgttaaacagtaaaaatgaatagtatacttcttaactaggtttacaactggtggaccacacaccaggcactaatcacctggtgaggatttggcatatccaccaaaaaatgcatccgatttaaccaacatctccaccagcgctacggactcctcccaattctgacatctcttgcagacaatactatgctctctacacactgtttagaaatggaaaggtgatctgcactgtatcttgggtttgttggctatgcttcctttgatgacatatattatacagtatatatatacatatattttttttgttagagttctagccattttatttctccgcagggtcctttctcagacattactgcatgctgtatatggcgttagctgtgtgttgatcttctaaaagatgatagagtttactggtaattgtgtaatcagctcctgcctttttattttcttgggttatttacatgtcagagacatttataaaaagtgaaaggataaaaaaaaaaaaaaacaactaataccgggcgcagcatctttccaggtgtggctctgcgctaggccaccccaggtggccccgctttctccattctgccctgtggcgttaacagacagcaagcagctgaacaagcagtaccgtcagtacccacttgctttagcccattatgggaatctctgatgcctttgtgaccactggagagtttaatcctcttggtttattttatttcccacctttgtgtgagtgtgtatgaaagagaagaaaatgcaatttttaggtaatcttttttttttttcccctcccctgaaagtctgggaacctgagagtcctcggggaggggtcctggatgtgatgagggaaagggggattgggggatccgggagggtggggttgtctctgacttgacattaaaaagtgttccatgtccctcttca

SEQ ID NO: 20123 - DNA, 3040 bp, Homo sapiens
  source 1..3040: mol_type = unassigned DNA
agagtgtgtgtgcgtgtgtgtgtgtgtgtgtgcccgcgcgcgtgtgttgtagctctgtcaatccttggattagaaccaatgattgcagcttgtaggagggctgtccagggccagattgtacaatgtgtctcagtgccagagtatgagtggagataattacggagaagtcatactctctcacaccctcggctttcttgttgtgtccttcagcaaaacagtggatttaaatctccttgcacaagcttgagagcaacacaatctatcaggaaagaaagaaagaaaaaaaccgaacctgacaaaaaagaagaaaaagaagaagaaaaaaaatcatgaaaaccatccagccaaaaatgcacaattctatctcttgggcaatcttcacggggctggctgctctgtgtctcttccaaggagtgcccgtgcgcagcggagatgccaccttccccaaagctatggacaacgtgacggtccggcagggggagagcgccaccctcaggtgcactattgacaaccgggtcacccgggtggcctggctaaaccgcagcaccatcctctatgctgggaatgacaagtggtgcctggatcctcgcgtggtccttctgagcaacacccaaacgcagtacagcatcgagatccagaacgtggatgtgtatgacgagggcccttacacctgctcggtgcagacagacaaccacccaaagacctctagggtccacctcattgtgcaagtatctcccaaaattgtagagatttcttcagatatctccattaatgaagggaacaatattagcctcacctgcatagcaactggtagaccagagcctacggttacttggagacacatctctcccaaagcggttggctttgtgagtgaagacgaatacttggaaattcagggcatcaccagggagcagtcaggggactacgagtgcagtgcctccaatgacgtggccgcgcccgtggtacggagagtaaaggtcaccgtgaactatccaccatacatttcagaagccaagggtacaggtgtccccgtgggacaaaaggggacactgcagtgtgaagcctcagcagtcccctcagcagaattccagtggtacaaggatgacaaaagactgattgaaggaaagaaaggggtgaaagtggaaaacagacctttcctctcaaaactcatcttcttcaatgtctctgaacatgactatgggaactacacttgcgtggcctccaacaagctgggccacaccaatgccagcatcatgctatttggtccaggcgccgtcagcgaggtgagcaacggcacgtcgaggagggcaggctgcgtctggctgctgcctcttctggtcttgcacctgcttctcaaattttgatgtgagtgccacttccccacccgggaaaggctgccgccaccaccaccaccaacacaacagcaatggcaacaccgacagcaaccaatcagatatatacaaatgaaattagaagaaacacagcctcatgggacagaaatttgagggaggggaacaaagaatactttggggggaaaaaagttttaaaaaagaaattgaaaattgccttgcagatatttaggtacaatggagttttcttttcccaaacgggaagaacacagcacacccggcttggacccactgcaagctgcatcgtgcaacctctttggtgccagtgtgggcaagggctcagcctctctgcccacagagtgcccccacgtggaacattctggagctggccatcccaaattcaatcagtccatagagacgaacagaatgagaccttccggcccaagcgtggcgctgcgggcactttggtagactgtgccaccacggcgtgtgttgtgaaacgtgaaataaaaagagcaagaaagaaaaaggaaacaaaataagaccgtctgacagcaacaacggtcccacaaacaagtcacaaaagataccgttaaacttttttttttttttatcattttactacatgaacatcatggataacaagggattctgattcattattaatttcattaattatattttctgatatgagtctagaacttactgcaaaaacaagacaaaactaaaaaaatacaactgagaagggtgaagagaagtatgtttgttaaacagtaaaaatgaatagtatacttcttaactaggtttacaactggtggaccacacaccaggcactaatcacctggtgaggatttggcatatccaccaaaaaatgcatccgatttaaccaacatctccaccagcgctacggactcctcccaattctgacatctcttgcagacaatactatgctctctacacactgtttagaaatggaaaggtgatctgcactgtatcttgggtttgttggctatgcttcctttgatgacatatattatacagtatatatatacatatattttttttgttagagttctagccattttatttctccgcagggtcctttctcagacattactgcatgctgtatatggcgttagctgtgtgttgatcttctaaaagatgatagagtttactggtaattgtgtaatcagctcctgcctttttattttcttgggttatttacatgtcagagacatttataaaaagtgaaaggataaaaaaaaaaaaaaacaactaataccgggcgcagcatctttccaggtgtggctctgcgctaggccaccccaggtggccccgctttctccattctgccctgtggcgttaacagacagcaagcagctgaacaagcagtaccgtcagtacccacttgctttagcccattatgggaatctctgatgcctttgtgaccactggagagtttaatcctcttggtttattttatttcccacctttgtgtgagtgtgtatgaaagagaagaaaatgcaatttttaggtaatcttttttttttttcccctcccctgaaagtctgggaacctgagagtcctcggggaggggtcctggatgtgatgagggaaagggggattgggggatccgggagggtggggttgtctctgacttgacattaaaaagtgttccatgtccctcttca

SEQ ID NO: 20124 - DNA, 1041 bp, Homo sapiens
  source 1..1041: mol_type = unassigned DNA
atgaacggaaaaagaaacggggaaggtgggaagaggtggaaatggaagggcacaggagtgcccgtgcgcagcggagatgccaccttccccaaagctatggacaacgtgacggtccggcagggggagagcgccaccctcaggtgcactattgacaaccgggtcacccgggtggcctggctaaaccgcagcaccatcctctatgctgggaatgacaagtggtgcctggatcctcgcgtggtccttctgagcaacacccaaacgcagtacagcatcgagatccagaacgtggatgtgtatgacgagggcccttacacctgctcggtgcagacagacaaccacccaaagacctctagggtccacctcattgtgcaagtatctcccaaaattgtagagatttcttcagatatctccattaatgaagggaacaatattagcctcacctgcatagcaactggtagaccagagcctacggttacttggagacacatctctcccaaagcggttggctttgtgagtgaagacgaatacttggaaattcagggcatcaccagggagcagtcaggggactacgagtgcagtgcctccaatgacgtggccgcgcccgtggtacggagagtaaaggtcaccgtgaactatccaccatacatttcagaagccaagggtacaggtgtccccgtgggacaaaaggggacactgcagtgtgaagcctcagcagtcccctcagcagaattccagtggtacaaggatgacaaaagactgattgaaggaaagaaaggggtgaaagtggaaaacagacctttcctctcaaaactcatcttcttcaatgtctctgaacatgactatgggaactacacttgcgtggcctccaacaagctgggccacaccaatgccagcatcatgctatttgaagtgaaaactacagccctgaccccttggaaaggtccaggcgccgtcagcgaggtgagcaacggcacgtcgaggagggcaggctgcgtctggctgctgcctcttctggtcttgcacctgcttctcaaattttga

SEQ ID NO: 20125 - DNA, 1068 bp, Homo sapiens
  source 1..1068: mol_type = unassigned DNA
atgaaaaccatccagccaaaaatgcacaattctatctcttgggcaatcttcacggggctggctgctctgtgtctcttccaaggagtgcccgtgcgcagcggagatgccaccttccccaaagctatggacaacgtgacggtccggcagggggagagcgccaccctcaggtgcactattgacaaccgggtcacccgggtggcctggctaaaccgcagcaccatcctctatgctgggaatgacaagtggtgcctggatcctcgcgtggtccttctgagcaacacccaaacgcagtacagcatcgagatccagaacgtggatgtgtatgacgagggcccttacacctgctcggtgcagacagacaaccacccaaagacctctagggtccacctcattgtgcaagtatctcccaaaattgtagagatttcttcagatatctccattaatgaagggaacaatattagcctcacctgcatagcaactggtagaccagagcctacggttacttggagacacatctctcccaaagcggttggctttgtgagtgaagacgaatacttggaaattcagggcatcaccagggagcagtcaggggactacgagtgcagtgcctccaatgacgtggccgcgcccgtggtacggagagtaaaggtcaccgtgaactatccaccatacatttcagaagccaagggtacaggtgtccccgtgggacaaaaggggacactgcagtgtgaagcctcagcagtcccctcagcagaattccagtggtacaaggatgacaaaagactgattgaaggaaagaaaggggtgaaagtggaaaacagacctttcctctcaaaactcatcttcttcaatgtctctgaacatgactatgggaactacacttgcgtggcctccaacaagctgggccacaccaatgccagcatcatgctatttgaagtgaaaactacagccctgaccccttggaaaggtccaggcgccgtcagcgaggtgagcaacggcacgtcgaggagggcaggctgcgtctggctgctgcctcttctggtcttgcacctgcttctcaaattttga

SEQ ID NO: 20126 - DNA, 1607 bp, Homo sapiens
  source 1..1607: mol_type = unassigned DNA
ggaagttgtggctgtcgagaatgggggtctgtgggtacctgttcctgccctggaagtgcctcgtggtcgtgtctctcaggctgctgttccttgtacccacaggagtgcccgtgcgcagcggagatgccaccttccccaaagctatggacaacgtgacggtccggcagggggagagcgccaccctcaggtgcactattgacaaccgggtcacccgggtggcctggctaaaccgcagcaccatcctctatgctgggaatgacaagtggtgcctggatcctcgcgtggtccttctgagcaacacccaaacgcagtacagcatcgagatccagaacgtggatgtgtatgacgagggcccttacacctgctcggtgcagacagacaaccacccaaagacctctagggtccacctcattgtgcaagtatctcccaaaattgtagagatttcttcagatatctccattaatgaagggaacaatattagcctcacctgcatagcaactggtagaccagagcctacggttacttggagacacatctctcccaaagcggttggctttgtgagtgaagacgaatacttggaaattcagggcatcaccagggagcagtcaggggactacgagtgcagtgcctccaatgacgtggccgcgcccgtggtacggagagtaaaggtcaccgtgaactatccaccatacatttcagaagccaagggtacaggtgtccccgtgggacaaaaggggacactgcagtgtgaagcctcagcagtcccctcagcagaattccagtggtacaaggatgacaaaagactgattgaaggaaagaaaggggtgaaagtggaaaacagacctttcctctcaaaactcatcttcttcaatgtctctgaacatgactatgggaactacacttgcgtggcctccaacaagctgggccacaccaatgccagcatcatgctatttgaagtgaaaactacagccctgaccccttggaaaggtccaggcgccgtcagcgaggtgagcaacggcacgtcgaggagggcaggctgcgtctggctgctgcctcttctggtcttgcacctgcttctcaaattttgatgtgagtgccacttccccacccgggaaaggctgccgccaccaccaccaccaacacaacagcaatggcaacaccgacagcaaccaatcagatatatacaaatgaaattagaagaaacacagcctcatgggacagaaatttgagggaggggaacaaagaatactttggggggaaaaaagttttaaaaaagaaattgaaaattgccttgcagatatttaggtacaatggagttttcttttcccaaacgggaagaacacagcacacccggcttggacccactgcaagctgcatcgtgcaacctctttggtgccagtgtgggcaagggctcagcctctctgcccacagagtgcccccacgtggaacattctggagctggccatcccaaattcaatcagtccatagagacgaacagaatgagaccttccggcccaagcgtggcgctgcgggcactttggtagactgtgccaccacggcgtgtgttgtgaaacgtgaaataaaaagagcaagaaagaaaaaggaaa

SEQ ID NO: 20127 - DNA, 2701 bp, Homo sapiens
  source 1..2701: mol_type = unassigned DNA
gccctttcctggcggctgggtctttaacaccgcccagcgcacatgtcgggggaggcctggcagctgcagctgggagcgcacagacggctgccccgcctgagcgaggcgggcgccgccgcgatgctgcgaggcggacggcgcgggcagcttggctggcacagctgggctgcggggccgggcagcctgctggcttggctgatactggcatctgcgggcgccgcaccctgccccgatgcctgctgcccccacggctcctcgggactgcgatgcacccgggatggggccctggatagcctccaccacctgcccggcgcagagaacctgactgagctctacatcgagaaccagcagcatctgcagcatctggagctccgtgatctgaggggcctgggggagctgagaaacctcaccatcgtgaagagtggtctccgtttcgtggcgccagatgccttccatttcactcctcggctcagtcgcctgaatctctccttcaacgctctggagtctctctcctggaaaactgtgcagggcctctccttacaggaactggtcctgtcggggaaccctctgcactgttcttgtgccctgcgctggctacagcgctgggaggaggagggactgggcggagtgcctgaacagaagctgcagtgtcatgggcaagggcccctggcccacatgcccaatgccagctgtggtgtgcccacgctgaaggtccaggtgcccaatgcctcggtggatgtgggggacgacgtgctgctgcggtgccaggtggaggggcggggcctggagcaggccggctggatcctcacagagctggagcagtcagccacggtgatgaaatctgggggtctgccatccctggggctgaccctggccaatgtcaccagtgacctcaacaggaagaacgtgacgtgctgggcagagaacgatgtgggccgggcagaggtctctgttcaggtcaacgtctccttcccggccagtgtgcagctgcacacggcggtggagatgcaccactggtgcatccccttctctgtggatgggcagccggcaccgtctctgcgctggctcttcaatggctccgtgctcaatgagaccagcttcatcttcactgagttcctggagccggcagccaatgagaccgtgcggcacgggtgtctgcgcctcaaccagcccacccacgtcaacaacggcaactacacgctgctggctgccaaccccttcggccaggcctccgcctccatcatggctgccttcatggacaaccctttcgagttcaaccccgaggaccccatccctgacactaacagcacatctggagacccggtggagaagaaggacgaaacaccttttggggtctcggtggctgtgggcctggccgtctttgcctgcctcttcctttctacgctgctccttgtgctcaacaaatgtggacggagaaacaagtttgggatcaaccgcccggctgtgctggctccagaggatgggctggccatgtccctgcatttcatgacattgggtggcagctccctgtcccccaccgagggcaaaggctctgggctccaaggccacatcatcgagaacccacaatacttcagtgatgcctgtgttcaccacatcaagcgccgggacatcgtgctcaagtgggagctgggggagggcgcctttgggaaggtcttccttgctgagtgccacaacctcctgcctgagcaggacaagatgctggtggctgtcaaggcactgaaggaggcgtccgagagtgctcggcaggacttccagcgtgaggctgagctgctcaccatgctgcagcaccagcacatcgtgcgcttcttcggcgtctgcaccgagggccgccccctgctcatggtctttgagtatatgcggcacggggacctcaaccgcttcctccgatcccatggacctgatgccaagctgctggctggtggggaggatgtggctccaggccccctgggtctggggcagctgctggccgtggctagccaggtcgctgcggggatggtgtacctggcgggtctgcattttgtgcaccgggacctggccacacgcaactgtctagtgggccagggactggtggtcaagattggtgattttggcatgagcagggatatctacagcaccgactattaccgtgtgggaggccgcaccatgctgcccattcgctggatgccgcccgagagcatcctgtaccgtaagttcaccaccgagagcgacgtgtggagcttcggcgtggtgctctgggagatcttcacctacggcaagcagccctggtaccagctctccaacacggaggcaatcgactgcatcacgcagggacgtgagttggagcggccacgtgcctgcccaccagaggtctacgccatcatgcggggctgctggcagcgggagccccagcaacgccacagcatcaaggatgtgcacgcccggctgcaagccctggcccaggcacctcctgtctacctggatgtcctgggctagggggccggcccaggggctgggagtggttagccggaatactggggcctgccctcagcatcccccatagctcccagcagccccagggtgatctcaaagtatctaattcaccctcagcatgtgggaagggacaggtgggggctgggagtagaggatgttcctgcttctctaggcaaggtcccgtcatagcaattatatttattatcccttg

SEQ ID NO: 20128 - DNA, 2609 bp, Homo sapiens
  source 1..2609: mol_type = unassigned DNA
caggagagaaggactgagacgggaatgtggaatgcactgggcaaatggtcactgacacagagtgcagatgcctgcttctgggactcaatgcactgcaccctggtcatctgcggactcagcctgagcttccagagggcctaggagcagtaagggagtgagtgggcaactcggcgcatgaaggaggccgccctcatctgcctggcaccctctgtacccccgatcttgacggtgaagtcctgggacaccatgcagttgcgggctgctagatctcggtgcacaaacttgttggcagcaagctacatcgagaaccagcagcatctgcagcatctggagctccgtgatctgaggggcctgggggagctgagaaacctcaccatcgtgaagagtggtctccgtttcgtggcgccagatgccttccatttcactcctcggctcagtcgcctgaatctctccttcaacgctctggagtctctctcctggaaaactgtgcagggcctctccttacaggaactggtcctgtcggggaaccctctgcactgttcttgtgccctgcgctggctacagcgctgggaggaggagggactgggcggagtgcctgaacagaagctgcagtgtcatgggcaagggcccctggcccacatgcccaatgccagctgtggtgtgcccacgctgaaggtccaggtgcccaatgcctcggtggatgtgggggacgacgtgctgctgcggtgccaggtggaggggcggggcctggagcaggccggctggatcctcacagagctggagcagtcagccacggtgatgaaatctgggggtctgccatccctggggctgaccctggccaatgtcaccagtgacctcaacaggaagaacgtgacgtgctgggcagagaacgatgtgggccgggcagaggtctctgttcaggtcaacgtctccttcccggccagtgtgcagctgcacacggcggtggagatgcaccactggtgcatccccttctctgtggatgggcagccggcaccgtctctgcgctggctcttcaatggctccgtgctcaatgagaccagcttcatcttcactgagttcctggagccggcagccaatgagaccgtgcggcacgggtgtctgcgcctcaaccagcccacccacgtcaacaacggcaactacacgctgctggctgccaaccccttcggccaggcctccgcctccatcatggctgccttcatggacaaccctttcgagttcaaccccgaggaccccatccctgacactaacagcacatctggagacccggtggagaagaaggacgaaacaccttttggggtctcggtggctgtgggcctggccgtctttgcctgcctcttcctttctacgctgctccttgtgctcaacaaatgtggacggagaaacaagtttgggatcaaccgcccggctgtgctggctccagaggatgggctggccatgtccctgcatttcatgacattgggtggcagctccctgtcccccaccgagggcaaaggctctgggctccaaggccacatcatcgagaacccacaatacttcagtgatgcctgtgttcaccacatcaagcgccgggacatcgtgctcaagtgggagctgggggagggcgcctttgggaaggtcttccttgctgagtgccacaacctcctgcctgagcaggacaagatgctggtggctgtcaaggcactgaaggaggcgtccgagagtgctcggcaggacttccagcgtgaggctgagctgctcaccatgctgcagcaccagcacatcgtgcgcttcttcggcgtctgcaccgagggccgccccctgctcatggtctttgagtatatgcggcacggggacctcaaccgcttcctccgatcccatggacctgatgccaagctgctggctggtggggaggatgtggctccaggccccctgggtctggggcagctgctggccgtggctagccaggtcgctgcggggatggtgtacctggcgggtctgcattttgtgcaccgggacctggccacacgcaactgtctagtgggccagggactggtggtcaagattggtgattttggcatgagcagggatatctacagcaccgactattaccgtgtgggaggccgcaccatgctgcccattcgctggatgccgcccgagagcatcctgtaccgtaagttcaccaccgagagcgacgtgtggagcttcggcgtggtgctctgggagatcttcacctacggcaagcagccctggtaccagctctccaacacggaggcaatcgactgcatcacgcagggacgtgagttggagcggccacgtgcctgcccaccagaggtctacgccatcatgcggggctgctggcagcgggagccccagcaacgccacagcatcaaggatgtgcacgcccggctgcaagccctggcccaggcacctcctgtctacctggatgtcctgggctagggggccggcccaggggctgggagtggttagccggaatactggggcctgccctcagcatcccccatagctcccagcagccccagggtgatctcaaagtatctaattcaccctcagcatgtgggaagggacaggtgggggctgggagtagagga

SEQ ID NO: 20129 - DNA, 2432 bp, Homo sapiens
  source 1..2432: mol_type = unassigned DNA
acagacggctgccccgcctgagcgaggcgggcgccgccgcgatgctgcgaggcggacggcgcgggcagcttggctggcacagctgggctgcggggccgggcagcctgctggcttggctgatactggcatctgcgggcgccgcaccctgccccgatgcctgctgcccccacggctcctcgggactgcgatgcacccgggatggggccctggatagcctccaccacctgcccggcgcagagaacctgactgagctctacatcgagaaccagcagcatctgcagcatctggagctccgtgatctgaggggcctgggggagctgagaaacctcaccatcgtgaagagtggtctccgtttcgtggcgccagatgccttccatttcactcctcggctcagtcgcctgaatctctccttcaacgctctggagtctctctcctggaaaactgtgcagggcctctccttacaggaactggtcctgtcggggaaccctctgcactgttcttgtgccctgcgctggctacagcgctgggaggaggagggactgggcggagtgcctgaacagaagctgcagtgtcatgggcaagggcccctggcccacatgcccaatgccagctgtggtgtgcccacgctgaaggtccaggtgcccaatgcctcggtggatgtgggggacgacgtgctgctgcggtgccaggtggaggggcggggcctggagcaggccggctggatcctcacagagctggagcagtcagccacggtgatgaaatctgggggtctgccatccctggggctgaccctggccaatgtcaccagtgacctcaacaggaagaacgtgacgtgctgggcagagaacgatgtgggccgggcagaggtctctgttcaggtcaacgtctccttcccggccagtgtgcagctgcacacggcggtggagatgcaccactggtgcatccccttctctgtggatgggcagccggcaccgtctctgcgctggctcttcaatggctccgtgctcaatgagaccagcttcatcttcactgagttcctggagccggcagccaatgagaccgtgcggcacgggtgtctgcgcctcaaccagcccacccacgtcaacaacggcaactacacgctgctggctgccaaccccttcggccaggcctccgcctccatcatggctgccttcatggacaaccctttcgagttcaaccccgaggaccccatccctgtctccttctcgccggtggacactaacagcacatctggagacccggtggagaagaaggacgaaacaccttttggggtctcggtggctgtgggcctggccgtctttgcctgcctcttcctttctacgctgctccttgtgctcaacaaatgtggacggagaaacaagtttgggatcaaccgcccggctgtgctggctccagaggatgggctggccatgtccctgcatttcatgacattgggtggcagctccctgtcccccaccgagggcaaaggctctgggctccaaggccacatcatcgagaacccacaatacttcagtgatgcctgtgttcaccacatcaagcgccgggacatcgtgctcaagtgggagctgggggagggcgcctttgggaaggtcttccttgctgagtgccacaacctcctgcctgagcaggacaagatgctggtggctgtcaaggcactgaaggaggcgtccgagagtgctcggcaggacttccagcgtgaggctgagctgctcaccatgctgcagcaccagcacatcgtgcgcttcttcggcgtctgcaccgagggccgccccctgctcatggtctttgagtatatgcggcacggggacctcaaccgcttcctccgatcccatggacctgatgccaagctgctggctggtggggaggatgtggctccaggccccctgggtctggggcagctgctggccgtggctagccaggtcgctgcggggatggtgtacctggcgggtctgcattttgtgcaccgggacctggccacacgcaactgtctagtgggccagggactggtggtcaagattggtgattttggcatgagcagggatatctacagcaccgactattaccgtgtgggaggccgcaccatgctgcccattcgctggatgccgcccgagagcatcctgtaccgtaagttcaccaccgagagcgacgtgtggagcttcggcgtggtgctctgggagatcttcacctacggcaagcagccctggtaccagctctccaacacggaggcaatcgactgcatcacgcagggacgtgagttggagcggccacgtgcctgcccaccagaggtctacgccatcatgcggggctgctggcagcgggagccccagcaacgccacagcatcaaggatgtgcacgcccggctgcaagccctggcccaggcacctcctgtctacctggatgtcctgggctag

SEQ ID NO: 20130 - DNA, 4057 bp, Homo sapiens
  source 1..4057: mol_type = unassigned DNA
ggagcaggagcctcgctggctgcttcgctcgcgctctacgcgctcagtccccggcggtagcaggagcctggacccaggcgccgccggcgggcgtgaggcgccggagcccggcctcgaggtgcataccggacccccattcgcatctaacaaggaatctgcgccccagagagtcccgggagcgccgccggtcggtgcccggcgcgccgggccatgcagcgacggccgccgcggagctccgagcagcggtagcgcccccctgtaaagcggttcgctatgccggggccactgtgaaccctgccgcctgccggaacactcttcgctccggaccagctcagcctctgataagctggactcggcacgcccgcaacaagcaccgaggagttaagagagccgcaagcgcagggaaggcctccccgcacgggtgggggaaagcggccggtgcagcgcggggacaggcactcgggctggcactggctgctagggatgtcgtcctggataaggtggcatggacccgccatggcgcggctctggggcttctgctggctggttgtgggcttctggagggccgctttcgcctgtcccacgtcctgcaaatgcagtgcctctcggatctggtgcagcgacccttctcctggcatcgtggcatttccgagattggagcctaacagtgtagatcctgagaacatcaccgaaattttcatcgcaaaccagaaaaggttagaaatcatcaacgaagatgatgttgaagcttatgtgggactgagaaatctgacaattgtggattctggattaaaatttgtggctcataaagcatttctgaaaaacagcaacctgcagcacatcaattttacccgaaacaaactgacgagtttgtctaggaaacatttccgtcaccttgacttgtctgaactgatcctggtgggcaatccatttacatgctcctgtgacattatgtggatcaagactctccaagaggctaaatccagtccagacactcaggatttgtactgcctgaatgaaagcagcaagaatattcccctggcaaacctgcagatacccaattgtggtttgccatctgcaaatctggccgcacctaacctcactgtggaggaaggaaagtctatcacattatcctgtagtgtggcaggtgatccggttcctaatatgtattgggatgttggtaacctggtttccaaacatatgaatgaaacaagccacacacagggctccttaaggataactaacatttcatccgatgacagtgggaagcagatctcttgtgtggcggaaaatcttgtaggagaagatcaagattctgtcaacctcactgtgcattttgcaccaactatcacatttctcgaatctccaacctcagaccaccactggtgcattccattcactgtgaaaggcaaccccaaaccagcgcttcagtggttctataacggggcaatattgaatgagtccaaatacatctgtactaaaatacatgttaccaatcacacggagtaccacggctgcctccagctggataatcccactcacatgaacaatggggactacactctaatagccaagaatgagtatgggaaggatgagaaacagatttctgctcacttcatgggctggcctggaattgacgatggtgcaaacccaaattatcctgatgtaatttatgaagattatggaactgcagcgaatgacatcggggacaccacgaacagaagtaatgaaatcccttccacagacgtcactgataaaaccggtcgggaacatctctcggtctatgctgtggtggtgattgcgtctgtggtgggattttgccttttggtaatgctgtttctgcttaagttggcaagacactccaagtttggcatgaaagatttctcatggtttggatttgggaaagtaaaatcaagacaaggtgttggcccagcctccgttatcagcaatgatgatgactctgccagcccactccatcacatctccaatgggagtaacactccatcttcttcggaaggtggcccagatgctgtcattattggaatgaccaagatccctgtcattgaaaatccccagtactttggcatcaccaacagtcagctcaagccagacacatttgttcagcacatcaagcgacataacattgttctgaaaagggagctaggcgaaggagcctttggaaaagtgttcctagctgaatgctataacctctgtcctgagcaggacaagatcttggtggcagtgaagaccctgaaggatgccagtgacaatgcacgcaaggacttccaccgtgaggccgagctcctgaccaacctccagcatgagcacatcgtcaagttctatggcgtctgcgtggagggcgaccccctcatcatggtctttgagtacatgaagcatggggacctcaacaagttcctcagggcacacggccctgatgccgtgctgatggctgagggcaacccgcccacggaactgacgcagtcgcagatgctgcatatagcccagcagatcgccgcgggcatggtctacctggcgtcccagcacttcgtgcaccgcgatttggccaccaggaactgcctggtcggggagaacttgctggtgaaaatcggggactttgggatgtcccgggacgtgtacagcactgactactacagggtcggtggccacacaatgctgcccattcgctggatgcctccagagagcatcatgtacaggaaattcacgacggaaagcgacgtctggagcctgggggtcgtgttgtgggagattttcacctatggcaaacagccctggtaccagctgtcaaacaatgaggtgatagagtgtatcactcagggccgagtcctgcagcgaccccgcacgtgcccccaggaggtgtatgagctgatgctggggtgctggcagcgagagccccacatgaggaagaacatcaagggcatccataccctccttcagaacttggccaaggcatctccggtctacctggacattctaggctagggcccttttccccagaccgatccttcccaacgtactcctcagacgggctgagaggatgaacatcttttaactgccgctggaggccaccaagctgctctccttcactctgacagtattaacatcaaagactccgagaagctctcgagggaagcagtgtgtacttcttcatccatagacacagtattgacttctttttggcattatctctttctctctttccatctcccttggttgttcctttttctttttttaaattttctttttcttttttttttcgtcttccctgcttcacgattcttaccctttcttttgaatcaatctggcttctgcattactattaactctgcatagacaaaggccttaacaaacgtaatttgttatatcagcagacactccagtttgcccaccacaactaacaatgccttgttgtattcctgcctttgatgtggatgaaaaaaagggaaaacaaatatttcacttaaactttgtcacttctgctgtacagatatcgagagtttctatggattcacttctatttatttattattattactgttcttattgtttttggatggcttaagcctgtgtataaaaaagaaaacttgtgttcaatctgtgaagcctttatctatgggagattaaaaccagagagaaagaagatttattatgaaccgcaatatgggaggaacaaagacaaccactgggatcagctggtgtcagtccctacttaggaaatactcagcaactgttagctgggaagaatgtattcggcaccttcccctgaggacctttctgaggagtaaaaagactactggcctctgtgccatggatgattcttttcccatcaccagaaatgatagcgtgcagtagagagcaaagatggcttccgtgagacacaagatggcgcatagtgtgctcggacacagttttgtcttcgtaggttgtgatgatagcactggtttgtttctcaagcgctatccacagaacctttgtcaacttcagttgaaaagaggtggattcatgtccagagctcatttcggggtcaggtgggaaagcc

SEQ ID NO: 20131 - DNA, 8226 bp, Homo sapiens
  source 1..8226: mol_type = unassigned DNA
ggagcaggagcctcgctggctgcttcgctcgcgctctacgcgctcagtccccggcggtagcaggagcctggacccaggcgccgccggcgggcgtgaggcgccggagcccggcctcgaggtgcataccggacccccattcgcatctaacaaggaatctgcgccccagagagtcccgggagcgccgccggtcggtgcccggcgcgccgggccatgcagcgacggccgccgcggagctccgagcagcggtagcgcccccctgtaaagcggttcgctatgccggggccactgtgaaccctgccgcctgccggaacactcttcgctccggaccagctcagcctctgataagctggactcggcacgcccgcaacaagcaccgaggagttaagagagccgcaagcgcagggaaggcctccccgcacgggtgggggaaagcggccggtgcagcgcggggacaggcactcgggctggcactggctgctagggatgtcgtcctggataaggtggcatggacccgccatggcgcggctctggggcttctgctggctggttgtgggcttctggagggccgctttcgcctgtcccacgtcctgcaaatgcagtgcctctcggatctggtgcagcgacccttctcctggcatcgtggcatttccgagattggagcctaacagtgtagatcctgagaacatcaccgaaattttcatcgcaaaccagaaaaggttagaaatcatcaacgaagatgatgttgaagcttatgtgggactgagaaatctgacaattgtggattctggattaaaatttgtggctcataaagcatttctgaaaaacagcaacctgcagcacatcaattttacccgaaacaaactgacgagtttgtctaggaaacatttccgtcaccttgacttgtctgaactgatcctggtgggcaatccatttacatgctcctgtgacattatgtggatcaagactctccaagaggctaaatccagtccagacactcaggatttgtactgcctgaatgaaagcagcaagaatattcccctggcaaacctgcagatacccaattgtggtttgccatctgcaaatctggccgcacctaacctcactgtggaggaaggaaagtctatcacattatcctgtagtgtggcaggtgatccggttcctaatatgtattgggatgttggtaacctggtttccaaacatatgaatgaaacaagccacacacagggctccttaaggataactaacatttcatccgatgacagtgggaagcagatctcttgtgtggcggaaaatcttgtaggagaagatcaagattctgtcaacctcactgtgcattttgcaccaactatcacatttctcgaatctccaacctcagaccaccactggtgcattccattcactgtgaaaggcaaccccaaaccagcgcttcagtggttctataacggggcaatattgaatgagtccaaatacatctgtactaaaatacatgttaccaatcacacggagtaccacggctgcctccagctggataatcccactcacatgaacaatggggactacactctaatagccaagaatgagtatgggaaggatgagaaacagatttctgctcacttcatgggctggcctggaattgacgatggtgcaaacccaaattatcctgatgtaatttatgaagattatggaactgcagcgaatgacatcggggacaccacgaacagaagtaatgaaatcccttccacagacgtcactgataaaaccggtcgggaacatctctcggtctatgctgtggtggtgattgcgtctgtggtgggattttgccttttggtaatgctgtttctgcttaagttggcaagacactccaagtttggcatgaaagatttctcatggtttggatttgggaaagtaaaatcaagacaaggtgttggcccagcctccgttatcagcaatgatgatgactctgccagcccactccatcacatctccaatgggagtaacactccatcttcttcggaaggtggcccagatgctgtcattattggaatgaccaagatccctgtcattgaaaatccccagtactttggcatcaccaacagtcagctcaagccagacacatggcccagaggttcccccaagaccgcctgataataatttggtatttggaggctcctgtgtcactgcaggaactaaaggaggctaaatccatgcctgatggaggagaagagttctatggttatctgcaaattctggccagacaacatcttgacgtcactccttagcttccataacctagccaagcaagaagttgcctttccaagacaaagcagtgtgctctaatgactaacccctcaaagtactatgccactttaactatagacccatctcctcgatcaatcaggatggcaagatggagctgaggagctcagcaacatcaagtctggagttggtctttaactcaactagctcgtttagacgtgtctgaacaccacatcacctgacagcacggggtggtttcccagtaaaatttacaaactcagctcaagggcagctgtgttgctttcctttccttgactgctgagaaactttttgacagggaacaatggaaacacaccttctgagctgaaacaaacaaacagaaacaaaacatactaaccagcaaaatccccaaatcatcaatcttgggttctcttgaagggcaggagtgtgttttatcttctcccgtcggagcaaacactatagatgtcctccctaaaattctgtcttccctagagcagccttgtaaattagctagggtcctagggttgaggcctaaatcaacttaaaattgtctctaaatatgtacctggatgtgtttgtacttgcagagcatgccctcttcatgtgcctagggctagtaactccctgtggcagaggcatgtaaagtattctgactttttttttttcaacttaattccatttccaatgaaatggatttttaaaaattttctccagagtgtgccatacttctccagctattatagttaatgtgtgtgtatccttgtgtatatgtgtgtttgtgtgtgcatatgtgttttcctagtggttacatgcttactaggcaattatgtaaataagcacagattcataggccagctaggcctgaggaaagaagacattataaagggagggagtattttaacattagctaaagctatcacacaaggcacccattctgctcccctcaacagccacagcccacttcgtccttgtcttaccaataaggggaaaggctggaggtgatatttttcacagaaccgcagaggttttgaacatatttgcaacattactttgagtacacatgagcaaaaattctgaattacatccaggaccccagaagctcattagatcaaagagtgcggggcccctcagagttaccagagattatctgcagacttcagtgcaatcgaatgaccatggtccattttgatggtcagaggtaggactgaaaaacgggtagaaacaattgctttagcgcttccttctgtactttgcctattaatgttttgtctttcaaaaatatattttctcctaattgtttaattggccaaataatggctgctttgggagttgtttgtatgccttggaaggccatggcctgcactttaaaaataagctaagtccattctgcccagcacgagcattaggacagagaatgcacttattttaggatccttaaaaattgcttcttttatggcacactgggttgacgactcatctcgtgggagccttcatggcacattgctgctgttctgcaggtcccaatacaattccttccccctctcagtgccacggcccccccattgctagctacaacaatttgatatcatattcccttttcaactccaaaggagatgataagaagctatcaaataatgctttaaaaaagcaacttgagtttcttaaaagaaaggaaatgaatacatgctgcataattacatttaaaatgtaagccatgttattataagccgcactgagatgaagatttgttagcaaaccagtttcaagcacactcacagtgaagtaaaatcatgtttttagcatctgaccattgggtaatattattctttgttatcaaaagagaaatatcacccaagtatagtatacttagacctcctagaggaaacactccagtcctaagcttggtgtctgaaaagaaaaacaaaaataaagattatggatttaggtcagggagacagagtgatattctgaagactgtgtttactccctcatcatcggccaaccaagatggagttctgcatcctgcacatatcagacatttcagtccaatttcaccaaagcatcagtgatgttctagaagcatcccagcagatggaggatcctaatgtatttgttctgggtatttcccaaggcccagcctgactggagtgtgtgtaccaacaggatgaatccaatcaagctacgcccccattttggtttcggattggccactcttgcatgtgctagtagattgtggaccaggaccagctgagcaaacacagttgcagagtagcctcctatgttgctaagaagctcctgctacccaggtgctttgaacaattgagtgctccctctggttaagtagagatggcaccaccggagtttttcttggatgtgaggctcaatcctttacggcagctattataacaaagtgaaggttttctccctgggaaatgcagcttttctctgtctttactaattctgccagcctgtgagagtaaccaccgtagctgggcttcttctcagattaattgtcatgccaggtctccttcctggggagctgtgatgctgctctgaggttgattgctgaggttgtagtgggtttttgtttgtttttgtttagtttttcttgattgttcttctttctcttgaatggcaagagaagaaacactttctctaacccacggccaggaaggaaatggggagagagctacttcttagttcaacctggttgccacataaaggaatctctctccttggactcagcccctaactggaagcaagagccactgccctctgagactgagagagcagcccgaggaggagatgaatccattctgccctttgtttgggtttgcttcctgtcagtgagagaatgctgaggcagttcctgttatgtgaaactttcatttttaaaaccaggacagtcctaaacagactggaatgagttggtcaatcccagttggtataggcccaatgatttttgctagtaagataggattgtcttcctcacccaaaatgccttcaagtgccctaaaatgggtattttaaaataagaataaataatgtagatttagtagaaaacctggaaaacataagaaacaaagatgaaacgaaaagtcccatgtaattccaccagttagagttaaccactgatatcgtttggatatatggctttctagtcttgtggatatccttttaatctcttgtaatataaagtctgaccatatgtgtccttgcatttgtttgtactggactctgttaatatttctatagtaatggctcactttggggagattgtgctgcacagtgtgtaggaagcacattgggtgtattattcccagttttgtattttgtatttccttggagatgtgcaggggttaagagcgggggtctggccatagctggccacgtcagactctcatatggtaagtatcacagagcacatgaggcctgtgttatgcgctggaaagactcaggaaatgagaggctctcttgttctgacaaggcaggctgagagctctcatttagggtcatcactccagataactccaaatgcagtttattgctcaactgaagcagatgatcactttttgcctccaagttcttcaccctagctagctcctttcaaagagccgagtatgctggatcttaaagggccaaactagttacatctcatacatttcctgatgtttagggatgccttcacttccatcaaggataccttggctgtgcaaggacctctgatagctggagtctccttttggtcactcccagctttgcttaaacttgatggagtttgctgtccagtgatccccggatctttcatcatgaaagccttccttcctctcctgatgtctcaggcctctagacctagactggggttctggcaaggaggcctctatcaatagtatgacatccaataatatgttagtgttgatattttgcacagtaatattaagtttaagagattataaaaatgagttcaaatgaataagttcctgtgatgtaagagattagatatgtgtgatttcagaaccaaaggcaggggggaatcccagaaagaaaacaataatataatcctagtttctatatattatttttattcattactgtatatgggtagagatcaatattctttcttatgctgttactattaattaacacattttttaaccatgccattgaacttttgggtgcattaaagtggaacccaagctcctcattagataataatggcatttggactgagtgccatattcctaaatttccaataaagtggttgatatagagaggacaggataaagccctatagtgtgcagttatatcaaaacagctagtctccactttagggaatgcctttactagagattacatgaaatgtctgcttataaaataagcagagatggcaccactaagcagccacctgaattgttttcctacaggaatgattacttttcagatccatttatgttttcatgctcaatacttactccccttccctgcaacacccaaagagtttacttttgcaagtcatttggtcttcagtctactactgaggaatagagaggcactaactgctttacccaggatcagaactcatgttcttaccttctattaatagagtacttgagccagatggactaactggtctcacattttctctatcttggttttacttccataaacatcaatatctttacccacatgatttttccatcctcccatttttttccatatgtattagggttcaggaactatgatgctaatgatcacatttcttcctagttcctaatttcattagtgccatttcctgatatctacagaaacaattatcaatacatgtagctgcttgagccttatttagaaggctagcctttcttttccaagtgctgtcagaatgtatacatttagtctgtctttttcccttttaggagtctttgttctgggttgatggcaaaattcctctttttacatgtgagatttttgatttcactgaattctacctagatttttatggacattggattttaaagaggaaaacactcattttcttagtaagatattggtgatacatagctatgccattgatttccatactcctgagctttggggagggagacagtggccaagtagcaggcagaataagatcatcactcatgtcctgaatcaatcacactttccttctcggattgtgtatatgctctgccacttcctacatattacatcctgagtttttaagtaaagtggatcttagccagatttgagtctaatggctgattcatcggcatagttcttggcgttaacatctcagtgtcctctttagttctctttgaggattcatgtcattgagggcctttgtgcctccacttgtctcagtatgaggaagaactttggtgtgagggcggagctatgtgaagggttgctgggttgggggattagttcatatggtccccatgccatctatttacttttggagagaggggactttgagtgggtgggtatggatagatgttcctcaaggaaaccctgctggctaatgggcactacatctgtgtattactgtgattctctctgtaagctccccatgtggccaaggacccccctcctaccagggcacttcctgccacctcattgcactggtctcaaccattcagcctgctgctgctgcaccatgttgggctgcggtaggatagggaaggggttctgttgattgctaaatgttgcctaactttatttccctctcccacatttcatgcaagggagcggacctaacacatgacttgcattctcttcctatgttcagaaactccagggcttgcccacgtgtatgtatgagtgaccaatggagcttggaattctttatctatatgatctgtccgaaaatgagatcttttgtactggaatttgtgatgtagttgatcattcagagccaaacgcatataccaataaagacaagactgtcatata

SEQ ID NO: 20132 - DNA, 3708 bp, Homo sapiens
  source 1..3708: mol_type = unassigned DNA
cccccattcgcatctaacaaggaatctgcgccccagagagtcccgggagcgccgccggtcggtgcccggcgcgccgggccatgcagcgacggccgccgcggagctccgagcagcggtagcgcccccctgtaaagcggttcgctatgccggggccactgtgaaccctgccgcctgccggaacactcttcgctccggaccagctcagcctctgataagctggactcggcacgcccgcaacaagcaccgaggagttaagagagccgcaagcgcagggaaggcctccccgcacgggtgggggaaagcggccggtgcagcgcggggacaggcactcgggctggcactggctgctagggatgtcgtcctggataaggtggcatggacccgccatggcgcggctctggggcttctgctggctggttgtgggcttctggagggccgctttcgcctgtcccacgtcctgcaaatgcagtgcctctcggatctggtgcagcgacccttctcctggcatcgtggcatttccgagattggagcctaacagtgtagatcctgagaacatcaccgaaattttcatcgcaaaccagaaaaggttagaaatcatcaacgaagatgatgttgaagcttatgtgggactgagaaatctgacaattgtggattctggattaaaatttgtggctcataaagcatttctgaaaaacagcaacctgcagcacatcaattttacccgaaacaaactgacgagtttgtctaggaaacatttccgtcaccttgacttgtctgaactgatcctggtgggcaatccatttacatgctcctgtgacattatgtggatcaagactctccaagaggctaaatccagtccagacactcaggatttgtactgcctgaatgaaagcagcaagaatattcccctggcaaacctgcagatacccaattgtggtttgccatctgcaaatctggccgcacctaacctcactgtggaggaaggaaagtctatcacattatcctgtagtgtggcaggtgatccggttcctaatatgtattgggatgttggtaacctggtttccaaacatatgaatgaaacaagccacacacagggctccttaaggataactaacatttcatccgatgacagtgggaagcagatctcttgtgtggcggaaaatcttgtaggagaagatcaagattctgtcaacctcactgtgcattttgcaccaactatcacatttctcgaatctccaacctcagaccaccactggtgcattccattcactgtgaaaggcaaccccaaaccagcgcttcagtggttctataacggggcaatattgaatgagtccaaatacatctgtactaaaatacatgttaccaatcacacggagtaccacggctgcctccagctggataatcccactcacatgaacaatggggactacactctaatagccaagaatgagtatgggaaggatgagaaacagatttctgctcacttcatgggctggcctggaattgacgatggtgcaaacccaaattatcctgatgtaatttatgaagattatggaactgcagcgaatgacatcggggacaccacgaacagaagtaatgaaatcccttccacagacgtcactgataaaaccggtcgggaacatctctcggtctatgctgtggtggtgattgcgtctgtggtgggattttgccttttggtaatgctgtttctgcttaagttggcaagacactccaagtttggcatgaaaggcccagcctccgttatcagcaatgatgatgactctgccagcccactccatcacatctccaatgggagtaacactccatcttcttcggaaggtggcccagatgctgtcattattggaatgaccaagatccctgtcattgaaaatccccagtactttggcatcaccaacagtcagctcaagccagacacatttgttcagcacatcaagcgacataacattgttctgaaaagggagctaggcgaaggagcctttggaaaagtgttcctagctgaatgctataacctctgtcctgagcaggacaagatcttggtggcagtgaagaccctgaaggatgccagtgacaatgcacgcaaggacttccaccgtgaggccgagctcctgaccaacctccagcatgagcacatcgtcaagttctatggcgtctgcgtggagggcgaccccctcatcatggtctttgagtacatgaagcatggggacctcaacaagttcctcagggcacacggccctgatgccgtgctgatggctgagggcaacccgcccacggaactgacgcagtcgcagatgctgcatatagcccagcagatcgccgcgggcatggtctacctggcgtcccagcacttcgtgcaccgcgatttggccaccaggaactgcctggtcggggagaacttgctggtgaaaatcggggactttgggatgtcccgggacgtgtacagcactgactactacagggtcggtggccacacaatgctgcccattcgctggatgcctccagagagcatcatgtacaggaaattcacgacggaaagcgacgtctggagcctgggggtcgtgttgtgggagattttcacctatggcaaacagccctggtaccagctgtcaaacaatgaggtgatagagtgtatcactcagggccgagtcctgcagcgaccccgcacgtgcccccaggaggtgtatgagctgatgctggggtgctggcagcgagagccccacatgaggaagaacatcaagggcatccataccctccttcagaacttggccaaggcatctccggtctacctggacattctaggctagggcccttttccccagaccgatccttcccaacgtactcctcagacgggctgagaggatgaacatcttttaactgccgctggaggccaccaagctgctctccttcactctgacagtattaacatcaaagactccgagaagctctcgagggaagcagtgtgtacttcttcatccatagacacagtattgacttctttttggcattatctctttctctctttccatctcccttggttgttcctttttctttttttaaattttctttttcttttttttttcgtcttccctgcttcacgattcttaccctttcttttgaatcaatctggcttctgcattactattaactctgcatagacaaaggccttaacaaacgtaatttgttatatcagcagacactccagtttgcccaccacaactaacaatgccttgttgtattcctgcctttgatgtggatgaaaaaaagggaaaacaaatatttcacttaaactttgtcacttctgctgtacagatatcgagagtttctatggattcacttctatttatttattattattactgttcttattgtttttggatggcttaagcctgtgtataaaaaagaaaacttgtgttcaatctgtgaagcctttatctatgggagattaaaaccagagagaaagaagatttattatgaaccgcaatatgggaggaacaaagacaaccactgggatcagctggtgtcagtccctacttaggaaatactcagcaactgttagctgggaagaatgtattcggcaccttcccctgaggacctttctgaggagtaaaaagactactggcctctgtgccatggatgattcttttcccatcaccagaaatgatagcgtgcagtagagagcaaagatggctt

SEQ ID NO: 20133 - DNA, 6646 bp, Homo sapiens
  source 1..6646: mol_type = unassigned DNA
aagcgcagggaaggcctccccgcacgggtgggggaaagcggccggtgcagcgcggggacaggcactcgggctggcactggctgctagggatgtcgtcctggataaggtggcatggacccgccatggcgcggctctggggcttctgctggctggttgtgggcttctggagggccgctttcgcctgtcccacgtcctgcaaatgcagtgcctctcggatctggtgcagcgacccttctcctggcatcgtggcatttccgagattggagcctaacagtgtagatcctgagaacatcaccgaaattttcatcgcaaaccagaaaaggttagaaatcatcaacgaagatgatgttgaagcttatgtgggactgagaaatctgacaattgtggattctggattaaaatttgtggctcataaagcatttctgaaaaacagcaacctgcagcacatcaattttacccgaaacaaactgacgagtttgtctaggaaacatttccgtcaccttgacttgtctgaactgatcctggtgggcaatccatttacatgctcctgtgacattatgtggatcaagactctccaagaggctaaatccagtccagacactcaggatttgtactgcctgaatgaaagcagcaagaatattcccctggcaaacctgcagatacccaattgtggtttgccatctgcaaatctggccgcacctaacctcactgtggaggaaggaaagtctatcacattatcctgtagtgtggcaggtgatccggttcctaatatgtattgggatgttggtaacctggtttccaaacatatgaatgaaacaagccacacacagggctccttaaggataactaacatttcatccgatgacagtgggaagcagatctcttgtgtggcggaaaatcttgtaggagaagatcaagattctgtcaacctcactgtgcattttgcaccaactatcacatttctcgaatctccaacctcagaccaccactggtgcattccattcactgtgaaaggcaaccccaaaccagcgcttcagtggttctataacggggcaatattgaatgagtccaaatacatctgtactaaaatacatgttaccaatcacacggagtaccacggctgcctccagctggataatcccactcacatgaacaatggggactacactctaatagccaagaatgagtatgggaaggatgagaaacagatttctgctcacttcatgggctggcctggaattgacgatggtgcaaacccaaattatcctgatgtaatttatgaagattatggaactgcagcgaatgacatcggggacaccacgaacagaagtaatgaaatcccttccacagacgtcactgataaaaccggtcgggaacatctctcggtctatgctgtggtggtgattgcgtctgtggtgggattttgccttttggtaatgctgtttctgcttaagttggcaagacactccaagtttggcatgaaaggttttgttttgtttcataagatcccactggatgggtagctgaaataaaggaaaagacagagaaaggggctgtggtgcttgttggttgatgctgccatgtaagctggactcctgggactgctgttggcttatcccgggaagtgctgcttatctggggttttctggtagatgtgggcggtgtttggaggctgtactatatgaagcctgcatatactgtgagctgtgattggggaacaccaatgcagaggtaactctcaggcagctaagcagcacctcaagaaaacatgttaaattaatgcttctcttcttacagtagttcaaatacaaaactgaaatgaaatcccattggattgtacttctcttctgaaaagtgtgctttttgaccctactggacatttattgacttaattgcttctgtttattaaaattgacctgcaaagttaaaaaaaaattaaagttgagaacaggtataagtgcacactgaatagtctaatctacatgtaacacatattttagtgtgattttctatactctaatcagcactgaattcagagggtttgactttttcatctataacacagtgactaaaagagttaagggtatatataccatcactttgggacttggtagtattattaaaaggttatttccttcactgtcaataaaagtccaaatgtttagcttaggtctgagagtcaaacaatgttaaggattgtcttaaagttccttagccagcaaaacaaaacaaaacaaaacaaacaaatgaaaaacgtttaaaaagaagaagaagaaaaaaaacaagaacaagcagcaacagctgttttgttggggctatagatttaagttaggcatagtcaatttcagaataactaagagtggaatatatgcatatggtgaaattataaccttgcccttttttatttgccctctgcgatccacctgctttttagaagtctgccgagtgagaaggccacagtatctcatgctgtttgcattacagaactgcagcttttctactctgaaaaggcctgggagcagaatggctggcctgctgtgagcaggagaggagattctaagaaggatagtcccccctacaacatactgtcatactgctgggttttcatgggtaggaaagcttgtcctgaccccagcagcaaagaggtggcaggtcgctaatgaatatatgctttataatgtccttcttcattgctgagagggcagccttagagctgtggatttctgcatcccccctgagtctgacccatggacacctgtttcattcactttagcatcacagtgacctttgtatgctctgttcagtctgtgtcaggcagtatgcttgtcctgaagagaggtttggctatccccaccccaccccaccccaccctgttccttttttatcaggaggacttcagagccaggcctgcagcattttgtttgaaaacacaatcagctctgacagttagacatgcacacagacgccatagctggattggaaacattgatgttttaaaaatttattttttttggaaatagttgcacaaatgctgcaatttagctttaaggttctatagatttttaactagtccaacacagtcagaaacattgttttgaatcctctgtaaaccaaggcattaatcttaataaaccaggatccatttaggtaccacttgatataaaaaggatatccataatgaatattttatactgcatcctttacattagccactaaatacgttattgcttgatgaagacctttcacagaatcctatggattgcagcatttcacttggctacttcatacccatgccttaaagaggggcagtttctcaaaagcagaaacatgccgccagttctcaagttttcctcctaactccatttgaatgtaagggcagctggcccccaatgtggggaggtccgaacattttctgaattcccattttcttgttcgcggctaaatgacagtttctgtcattacttagattccgatctttcccaaaggtgttgatttacaaagaggccagctaatagcagaaatcatgaccctgaaagagagatgaaattcaagctgtgagccaggcaggagctcagtatggcaaaggttcttgagaatcagccatttggtacaaaaaagatttttaaagcttttatgttataccatggagccatagaaaggctatggattgtttaagaactattttaaagtgttccagacccaaaaaggaaaaataaaaaaaaaggaatatttgtacccaacagctagaaggattgcaaggtagatttttgttttaaaatggagagaagtggacagataaggccatttaatatatcaaagatcagttgacatctcctagggaatgatgaaaacagcaggctattagaaaattatttcatatagttctcgtgttcttttcttttttttaatccctgaagggatgatcagtaacatagcttctcttttctgtactctagaccaccccttttcatcattttgctttttatgtctcccataagaaatgtgctttttagagcttcctaatgcatgtgttgcattattgcagcattagaaaaggagaggtagcatttttgctgaaatcgggcctgtcactctccaataaaggttctggcacttcaatgccaggcaggtctcctaaatgaacagaatgatctgtgtgagccgatgcctgcccttccagaggggccactgtccccagccgcagccaactgtgtcccacaggaatgggagcctaggtttccaaatcttgtgattctttaggagaaacatgaaacctggatttcgtgtgaaatgtcccgattgttaaaaagttggctcaattatttttaaaacattttgtaagccaacaaaagtctgtgggctgccagtttattacttttgtcttaaaacatgatcattgttctctcacggtatccttctgtcttcccgttgcaaattcacttttctttcttcctgacattgccattgagggctttgttaccacaagctaagaaactgagtttaacagcccagttatctgcaacatgtcaattacctttgctcctctcctgtgattcccaccatgctgtgaccctcagctgtctccctttgctgggaattctgcaccaatgtctcccctcaacccattccctggttggtcctactcccgtgtggccagagacatcctagcaaatccttcctcctattatatctgacactaatttcttttcaacagcgctcatgtctcttggcccagtcaggtgctgccaggtttagataggaaagtacatgtcccattttcatgggtgcccttaatgtggtccacgtcctatatcttattatatttactcatggctcaatgggggcctccagagaccctctcaggctgctgagctagactaaggaatgcatccaccgtcatcacatgagacactgactctgtgacgacaaaagtacaaacagtctgaggctaagaaaggttcatctcacaacaggaaaaacaaatctcaacacacattagagataattgattcaggggttttctctcccagtctcccagcagggactgatttcatttctgacccactaggttttctttccagaaataggtagcaaggacaagaactaaacaatcccagccccacccagcaacacagaacacaggagtttgcttttggcttctcactctccaagtaaccctgaattaggcccagaatggctgaggcttggagcatctcctcagacagagcagaggcgacacctcttcaggggtgtgtggagtaaatagctcgaagagctgaagacagaaaaccagtttcacgccaggtgcgagagagagcataatggagggaagcccgctttctctctcctcttcttttctctttatttctttagagcacttgacttttttttctctctctctctagtattctaaactgaccccatgaccaactgagaatttatttttgtttcattggttgtttcacagaattagaacacacacgactttttattcctccattgcaaaatggaatcaagatactacacaagacctgtgctttcttcctttgcatgatttacacctccgcctgttttggtgctagctgtctagaacttctctcttggtttgaatctgattccttcacactacactagaagtttatttcatcttgttttgtctagactccagatacagagggacagctggactgaggacaagcaattccatctagcatagggtctctcagggttggtgcatccagccacatgggcagggccagtcacatctagtctatgtccccagagcccttggagttgcgcagcttagctgacttgactccaaggaaattagtacagaagtaaccactctattaagtgtgttctgctatgttcacatgcctgtagtacctgcaaaccatgccaggttcatctaaagacataggggaagattaaggactcttttggacagaccatgaattgaatttgctgccaggtgctgccagactgaatttggctgacagaactcccagcccaggaaagttccatgacaatgactgtcgcagaaggaaatttcccactaaagtcagtccattttcaagttttggtcttcagagacaaaagaacgtcccagccacctgattttgatggtgaggtaactctaagttgaattcaggctagtgttgcagtatagctttggcatgttcatgagtgagcacccagaatgtgttgaaccaacccccacccctaactactgactatgactgcagtgggtttttatggggaaaaaaagtgtgaaaagcaaaaagaaaggaacagagattttttatcacctttattgtaagacagtccatttatgaattgagtataaacacatacaaagtaacaagagattcctaagaaacgcaaatccttgagtttcacgcacttcatgttcaaccatttgctgtaatccagaggcagcctgtgaatcattctcatgccctgttttttttttttttttcctataatgttctgggtttaaaagccatcttttccacattttctgtaaataatggataatcattttaaaaatttttatttttagtgctgttttaacaatgtagatagatcataaatgtacttgctgaattcaatcatttttaacaagccaataaagtttgataattca

SEQ ID NO: 20134 - DNA, 8178 bp, Homo sapiens
  source 1..8178: mol_type = unassigned DNA
ggagcaggagcctcgctggctgcttcgctcgcgctctacgcgctcagtccccggcggtagcaggagcctggacccaggcgccgccggcgggcgtgaggcgccggagcccggcctcgaggtgcataccggacccccattcgcatctaacaaggaatctgcgccccagagagtcccgggagcgccgccggtcggtgcccggcgcgccgggccatgcagcgacggccgccgcggagctccgagcagcggtagcgcccccctgtaaagcggttcgctatgccggggccactgtgaaccctgccgcctgccggaacactcttcgctccggaccagctcagcctctgataagctggactcggcacgcccgcaacaagcaccgaggagttaagagagccgcaagcgcagggaaggcctccccgcacgggtgggggaaagcggccggtgcagcgcggggacaggcactcgggctggcactggctgctagggatgtcgtcctggataaggtggcatggacccgccatggcgcggctctggggcttctgctggctggttgtgggcttctggagggccgctttcgcctgtcccacgtcctgcaaatgcagtgcctctcggatctggtgcagcgacccttctcctggcatcgtggcatttccgagattggagcctaacagtgtagatcctgagaacatcaccgaaattttcatcgcaaaccagaaaaggttagaaatcatcaacgaagatgatgttgaagcttatgtgggactgagaaatctgacaattgtggattctggattaaaatttgtggctcataaagcatttctgaaaaacagcaacctgcagcacatcaattttacccgaaacaaactgacgagtttgtctaggaaacatttccgtcaccttgacttgtctgaactgatcctggtgggcaatccatttacatgctcctgtgacattatgtggatcaagactctccaagaggctaaatccagtccagacactcaggatttgtactgcctgaatgaaagcagcaagaatattcccctggcaaacctgcagatacccaattgtggtttgccatctgcaaatctggccgcacctaacctcactgtggaggaaggaaagtctatcacattatcctgtagtgtggcaggtgatccggttcctaatatgtattgggatgttggtaacctggtttccaaacatatgaatgaaacaagccacacacagggctccttaaggataactaacatttcatccgatgacagtgggaagcagatctcttgtgtggcggaaaatcttgtaggagaagatcaagattctgtcaacctcactgtgcattttgcaccaactatcacatttctcgaatctccaacctcagaccaccactggtgcattccattcactgtgaaaggcaaccccaaaccagcgcttcagtggttctataacggggcaatattgaatgagtccaaatacatctgtactaaaatacatgttaccaatcacacggagtaccacggctgcctccagctggataatcccactcacatgaacaatggggactacactctaatagccaagaatgagtatgggaaggatgagaaacagatttctgctcacttcatgggctggcctggaattgacgatggtgcaaacccaaattatcctgatgtaatttatgaagattatggaactgcagcgaatgacatcggggacaccacgaacagaagtaatgaaatcccttccacagacgtcactgataaaaccggtcgggaacatctctcggtctatgctgtggtggtgattgcgtctgtggtgggattttgccttttggtaatgctgtttctgcttaagttggcaagacactccaagtttggcatgaaaggcccagcctccgttatcagcaatgatgatgactctgccagcccactccatcacatctccaatgggagtaacactccatcttcttcggaaggtggcccagatgctgtcattattggaatgaccaagatccctgtcattgaaaatccccagtactttggcatcaccaacagtcagctcaagccagacacatggcccagaggttcccccaagaccgcctgataataatttggtatttggaggctcctgtgtcactgcaggaactaaaggaggctaaatccatgcctgatggaggagaagagttctatggttatctgcaaattctggccagacaacatcttgacgtcactccttagcttccataacctagccaagcaagaagttgcctttccaagacaaagcagtgtgctctaatgactaacccctcaaagtactatgccactttaactatagacccatctcctcgatcaatcaggatggcaagatggagctgaggagctcagcaacatcaagtctggagttggtctttaactcaactagctcgtttagacgtgtctgaacaccacatcacctgacagcacggggtggtttcccagtaaaatttacaaactcagctcaagggcagctgtgttgctttcctttccttgactgctgagaaactttttgacagggaacaatggaaacacaccttctgagctgaaacaaacaaacagaaacaaaacatactaaccagcaaaatccccaaatcatcaatcttgggttctcttgaagggcaggagtgtgttttatcttctcccgtcggagcaaacactatagatgtcctccctaaaattctgtcttccctagagcagccttgtaaattagctagggtcctagggttgaggcctaaatcaacttaaaattgtctctaaatatgtacctggatgtgtttgtacttgcagagcatgccctcttcatgtgcctagggctagtaactccctgtggcagaggcatgtaaagtattctgactttttttttttcaacttaattccatttccaatgaaatggatttttaaaaattttctccagagtgtgccatacttctccagctattatagttaatgtgtgtgtatccttgtgtatatgtgtgtttgtgtgtgcatatgtgttttcctagtggttacatgcttactaggcaattatgtaaataagcacagattcataggccagctaggcctgaggaaagaagacattataaagggagggagtattttaacattagctaaagctatcacacaaggcacccattctgctcccctcaacagccacagcccacttcgtccttgtcttaccaataaggggaaaggctggaggtgatatttttcacagaaccgcagaggttttgaacatatttgcaacattactttgagtacacatgagcaaaaattctgaattacatccaggaccccagaagctcattagatcaaagagtgcggggcccctcagagttaccagagattatctgcagacttcagtgcaatcgaatgaccatggtccattttgatggtcagaggtaggactgaaaaacgggtagaaacaattgctttagcgcttccttctgtactttgcctattaatgttttgtctttcaaaaatatattttctcctaattgtttaattggccaaataatggctgctttgggagttgtttgtatgccttggaaggccatggcctgcactttaaaaataagctaagtccattctgcccagcacgagcattaggacagagaatgcacttattttaggatccttaaaaattgcttcttttatggcacactgggttgacgactcatctcgtgggagccttcatggcacattgctgctgttctgcaggtcccaatacaattccttccccctctcagtgccacggcccccccattgctagctacaacaatttgatatcatattcccttttcaactccaaaggagatgataagaagctatcaaataatgctttaaaaaagcaacttgagtttcttaaaagaaaggaaatgaatacatgctgcataattacatttaaaatgtaagccatgttattataagccgcactgagatgaagatttgttagcaaaccagtttcaagcacactcacagtgaagtaaaatcatgtttttagcatctgaccattgggtaatattattctttgttatcaaaagagaaatatcacccaagtatagtatacttagacctcctagaggaaacactccagtcctaagcttggtgtctgaaaagaaaaacaaaaataaagattatggatttaggtcagggagacagagtgatattctgaagactgtgtttactccctcatcatcggccaaccaagatggagttctgcatcctgcacatatcagacatttcagtccaatttcaccaaagcatcagtgatgttctagaagcatcccagcagatggaggatcctaatgtatttgttctgggtatttcccaaggcccagcctgactggagtgtgtgtaccaacaggatgaatccaatcaagctacgcccccattttggtttcggattggccactcttgcatgtgctagtagattgtggaccaggaccagctgagcaaacacagttgcagagtagcctcctatgttgctaagaagctcctgctacccaggtgctttgaacaattgagtgctccctctggttaagtagagatggcaccaccggagtttttcttggatgtgaggctcaatcctttacggcagctattataacaaagtgaaggttttctccctgggaaatgcagcttttctctgtctttactaattctgccagcctgtgagagtaaccaccgtagctgggcttcttctcagattaattgtcatgccaggtctccttcctggggagctgtgatgctgctctgaggttgattgctgaggttgtagtgggtttttgtttgtttttgtttagtttttcttgattgttcttctttctcttgaatggcaagagaagaaacactttctctaacccacggccaggaaggaaatggggagagagctacttcttagttcaacctggttgccacataaaggaatctctctccttggactcagcccctaactggaagcaagagccactgccctctgagactgagagagcagcccgaggaggagatgaatccattctgccctttgtttgggtttgcttcctgtcagtgagagaatgctgaggcagttcctgttatgtgaaactttcatttttaaaaccaggacagtcctaaacagactggaatgagttggtcaatcccagttggtataggcccaatgatttttgctagtaagataggattgtcttcctcacccaaaatgccttcaagtgccctaaaatgggtattttaaaataagaataaataatgtagatttagtagaaaacctggaaaacataagaaacaaagatgaaacgaaaagtcccatgtaattccaccagttagagttaaccactgatatcgtttggatatatggctttctagtcttgtggatatccttttaatctcttgtaatataaagtctgaccatatgtgtccttgcatttgtttgtactggactctgttaatatttctatagtaatggctcactttggggagattgtgctgcacagtgtgtaggaagcacattgggtgtattattcccagttttgtattttgtatttccttggagatgtgcaggggttaagagcgggggtctggccatagctggccacgtcagactctcatatggtaagtatcacagagcacatgaggcctgtgttatgcgctggaaagactcaggaaatgagaggctctcttgttctgacaaggcaggctgagagctctcatttagggtcatcactccagataactccaaatgcagtttattgctcaactgaagcagatgatcactttttgcctccaagttcttcaccctagctagctcctttcaaagagccgagtatgctggatcttaaagggccaaactagttacatctcatacatttcctgatgtttagggatgccttcacttccatcaaggataccttggctgtgcaaggacctctgatagctggagtctccttttggtcactcccagctttgcttaaacttgatggagtttgctgtccagtgatccccggatctttcatcatgaaagccttccttcctctcctgatgtctcaggcctctagacctagactggggttctggcaaggaggcctctatcaatagtatgacatccaataatatgttagtgttgatattttgcacagtaatattaagtttaagagattataaaaatgagttcaaatgaataagttcctgtgatgtaagagattagatatgtgtgatttcagaaccaaaggcaggggggaatcccagaaagaaaacaataatataatcctagtttctatatattatttttattcattactgtatatgggtagagatcaatattctttcttatgctgttactattaattaacacattttttaaccatgccattgaacttttgggtgcattaaagtggaacccaagctcctcattagataataatggcatttggactgagtgccatattcctaaatttccaataaagtggttgatatagagaggacaggataaagccctatagtgtgcagttatatcaaaacagctagtctccactttagggaatgcctttactagagattacatgaaatgtctgcttataaaataagcagagatggcaccactaagcagccacctgaattgttttcctacaggaatgattacttttcagatccatttatgttttcatgctcaatacttactccccttccctgcaacacccaaagagtttacttttgcaagtcatttggtcttcagtctactactgaggaatagagaggcactaactgctttacccaggatcagaactcatgttcttaccttctattaatagagtacttgagccagatggactaactggtctcacattttctctatcttggttttacttccataaacatcaatatctttacccacatgatttttccatcctcccatttttttccatatgtattagggttcaggaactatgatgctaatgatcacatttcttcctagttcctaatttcattagtgccatttcctgatatctacagaaacaattatcaatacatgtagctgcttgagccttatttagaaggctagcctttcttttccaagtgctgtcagaatgtatacatttagtctgtctttttcccttttaggagtctttgttctgggttgatggcaaaattcctctttttacatgtgagatttttgatttcactgaattctacctagatttttatggacattggattttaaagaggaaaacactcattttcttagtaagatattggtgatacatagctatgccattgatttccatactcctgagctttggggagggagacagtggccaagtagcaggcagaataagatcatcactcatgtcctgaatcaatcacactttccttctcggattgtgtatatgctctgccacttcctacatattacatcctgagtttttaagtaaagtggatcttagccagatttgagtctaatggctgattcatcggcatagttcttggcgttaacatctcagtgtcctctttagttctctttgaggattcatgtcattgagggcctttgtgcctccacttgtctcagtatgaggaagaactttggtgtgagggcggagctatgtgaagggttgctgggttgggggattagttcatatggtccccatgccatctatttacttttggagagaggggactttgagtgggtgggtatggatagatgttcctcaaggaaaccctgctggctaatgggcactacatctgtgtattactgtgattctctctgtaagctccccatgtggccaaggacccccctcctaccagggcacttcctgccacctcattgcactggtctcaaccattcagcctgctgctgctgcaccatgttgggctgcggtaggatagggaaggggttctgttgattgctaaatgttgcctaactttatttccctctcccacatttcatgcaagggagcggacctaacacatgacttgcattctcttcctatgttcagaaactccagggcttgcccacgtgtatgtatgagtgaccaatggagcttggaattctttatctatatgatctgtccgaaaatgagatcttttgtactggaatttgtgatgtagttgatcattcagagccaaacgcatataccaataaagacaagactgtcatata

SEQ ID NO: 20135 - DNA, 5560 bp, Homo sapiens
  source 1..5560: mol_type = unassigned DNA
aagacggattctcagacaaggcttgcaaatgccccgcagccatcatttaactgcacccgcagaatagttacggtttgtcacccgaccctcccggatcgcctaatttgtccctagtgagaccccgaggctctgcccgcgcctggcttcttcgtagctggatgcatatcgtgctccgggcagcgcgggcgcagggcacgcgttcgcgcacaccctagcacacatgaacacgcgcaagagctgaaccaagcacggtttccatttcaaaaagggagacagcctctaccgcgattgtagaagagactgtggtgtgaattagggaccgggaggcgtcgaacggaggaacggttcatcttagagactaattttctggagtttctgcccctgctctgcgtcagccctcacgtcacttcgccagcagtagcagaggcggcggcggcggctcccggaattgggttggagcaggagcctcgctggctgcttcgctcgcgctctacgcgctcagtccccggcggtagcaggagcctggacccaggcgccgccggcgggcgtgaggcgccggagcccggcctcgaggtgcataccggacccccattcgcatctaacaaggaatctgcgccccagagagtcccgggagcgccgccggtcggtgcccggcgcgccgggccatgcagcgacggccgccgcggagctccgagcagcggtagcgcccccctgtaaagcggttcgctatgccggggccactgtgaaccctgccgcctgccggaacactcttcgctccggaccagctcagcctctgataagctggactcggcacgcccgcaacaagcaccgaggagttaagagagccgcaagcgcagggaaggcctccccgcacgggtgggggaaagcggccggtgcagcgcggggacaggcactcgggctggcactggctgctagggatgtcgtcctggataaggtggcatggacccgccatggcgcggctctggggcttctgctggctggttgtgggcttctggagggccgctttcgcctgtcccacgtcctgcaaatgcagtgcctctcggatctggtgcagcgacccttctcctggcatcgtggcatttccgagattggagcctaacagtgtagatcctgagaacatcaccgaaattttcatcgcaaaccagaaaaggttagaaatcatcaacgaagatgatgttgaagcttatgtgggactgagaaatctgacaattgtggattctggattaaaatttgtggctcataaagcatttctgaaaaacagcaacctgcagcacatcaattttacccgaaacaaactgacgagtttgtctaggaaacatttccgtcaccttgacttgtctgaactgatcctggtgggcaatccatttacatgctcctgtgacattatgtggatcaagactctccaagaggctaaatccagtccagacactcaggatttgtactgcctgaatgaaagcagcaagaatattcccctggcaaacctgcagatacccaattgtggtttgccatctgcaaatctggccgcacctaacctcactgtggaggaaggaaagtctatcacattatcctgtagtgtggcaggtgatccggttcctaatatgtattgggatgttggtaacctggtttccaaacatatgaatgaaacaagccacacacagggctccttaaggataactaacatttcatccgatgacagtgggaagcagatctcttgtgtggcggaaaatcttgtaggagaagatcaagattctgtcaacctcactgtgcattttgcaccaactatcacatttctcgaatctccaacctcagaccaccactggtgcattccattcactgtgaaaggcaaccccaaaccagcgcttcagtggttctataacggggcaatattgaatgagtccaaatacatctgtactaaaatacatgttaccaatcacacggagtaccacggctgcctccagctggataatcccactcacatgaacaatggggactacactctaatagccaagaatgagtatgggaaggatgagaaacagatttctgctcacttcatgggctggcctggaattgacgatggtgcaaacccaaattatcctgatgtaatttatgaagattatggaactgcagcgaatgacatcggggacaccacgaacagaagtaatgaaatcccttccacagacgtcactgataaaaccggtcgggaacatctctcggtctatgctgtggtggtgattgcgtctgtggtgggattttgccttttggtaatgctgtttctgcttaagttggcaagacactccaagtttggcatgaaaggcccagcctccgttatcagcaatgatgatgactctgccagcccactccatcacatctccaatgggagtaacactccatcttcttcggaaggtggcccagatgctgtcattattggaatgaccaagatccctgtcattgaaaatccccagtactttggcatcaccaacagtcagctcaagccagacacatttgttcagcacatcaagcgacataacattgttctgaaaagggagctaggcgaaggagcctttggaaaagtgttcctagctgaatgctataacctctgtcctgagcaggacaagatcttggtggcagtgaagaccctgaaggatgccagtgacaatgcacgcaaggacttccaccgtgaggccgagctcctgaccaacctccagcatgagcacatcgtcaagttctatggcgtctgcgtggagggcgaccccctcatcatggtctttgagtacatgaagcatggggacctcaacaagttcctcagggcacacggccctgatgccgtgctgatggctgagggcaacccgcccacggaactgacgcagtcgcagatgctgcatatagcccagcagatcgccgcgggcatggtctacctggcgtcccagcacttcgtgcaccgcgatttggccaccaggaactgcctggtcggggagaacttgctggtgaaaatcggggactttgggatgtcccgggacgtgtacagcactgactactacagggtcggtggccacacaatgctgcccattcgctggatgcctccagagagcatcatgtacaggaaattcacgacggaaagcgacgtctggagcctgggggtcgtgttgtgggagattttcacctatggcaaacagccctggtaccagctgtcaaacaatgaggtgatagagtgtatcactcagggccgagtcctgcagcgaccccgcacgtgcccccaggaggtgtatgagctgatgctggggtgctggcagcgagagccccacatgaggaagaacatcaagggcatccataccctccttcagaacttggccaaggcatctccggtctacctggacattctaggctagggcccttttccccagaccgatccttcccaacgtactcctcagacgggctgagaggatgaacatcttttaactgccgctggaggccaccaagctgctctccttcactctgacagtattaacatcaaagactccgagaagctctcgagggaagcagtgtgtacttcttcatccatagacacagtattgacttctttttggcattatctctttctctctttccatctcccttggttgttcctttttctttttttaaattttctttttcttttttttttcgtcttccctgcttcacgattcttaccctttcttttgaatcaatctggcttctgcattactattaactctgcatagacaaaggccttaacaaacgtaatttgttatatcagcagacactccagtttgcccaccacaactaacaatgccttgttgtattcctgcctttgatgtggatgaaaaaaagggaaaacaaatatttcacttaaactttgtcacttctgctgtacagatatcgagagtttctatggattcacttctatttatttattattattactgttcttattgtttttggatggcttaagcctgtgtataaaaaagaaaacttgtgttcaatctgtgaagcctttatctatgggagattaaaaccagagagaaagaagatttattatgaaccgcaatatgggaggaacaaagacaaccactgggatcagctggtgtcagtccctacttaggaaatactcagcaactgttagctgggaagaatgtattcggcaccttcccctgaggacctttctgaggagtaaaaagactactggcctctgtgccatggatgattcttttcccatcaccagaaatgatagcgtgcagtagagagcaaagatggcttccgtgagacacaagatggcgcatagtgtgctcggacacagttttgtcttcgtaggttgtgatgatagcactggtttgtttctcaagcgctatccacagaacctttgtcaacttcagttgaaaagaggtggattcatgtccagagctcatttcggggtcaggtgggaaagccaagaacttggaaaagataagacaagctataaattcggaggcaagtttcttttacaatgaacttttcagatctcacttccctccgacccctaacttccatgcccacccgtccttttaactgtgcaagcaaaattgtgcatggtcttcgtcgattaataccttgtgtgcagacactactgctccagacgtcgtttccctgataggtagagcagatccataaaaaggtatgacttatacaattaggggaagctaatggagtttattagctgagtatcaatgtctctgcgttgtacggtggtgatgggttttaatgaatatggaccctgaagcctggaaatcctcatccacgtcgaacccacaggactgtgggaagggcagaatcaatccctaagggaaaggaaacctcaccctgagggcatcacatgcactcatgttcagtgtacacaggtcaagtcccttgctctgggctctagttgggagagtggtttcattccaagtgtactccattgtcagtatgctgtttttgtttccttcactccattcaaaaagtcaaaatacaaaatttggcacagcatgccaacgggaggctgtgcccagaccaagcactggaagtgtgcttctaggcatagtcattggttttgcaaaaagagggctcaaatttaaatagaaatttacagctatttgaatggtcagatataccaagaaagaaaaatatttctgttcctcaagaaaacttgctaccctctgtgaggggaattttgctaaacttgacatctttataacatgagccagattgaaagggagtgattttcattcatcttaggtcatgttatttcatatttgtttctgaaggtgcgatagctctgttttaggttttgcttgcgcctgttaattactggaacaccttatttttcattaaaggctttgaaagccaattctcaaaaattcaaaagtgcaaattaacagaacaaaaggaaatccagtagcaactgcagtcaagcgagggagttgacaagataaaccttacgtccattcaagttatatgctggcctatgagagatgagagttgggtcgtttgttctctttgttgatgattt

SEQ ID NO: 20136 - DNA, 5608 bp, Homo sapiens
  source 1..5608: mol_type = unassigned DNA
aagacggattctcagacaaggcttgcaaatgccccgcagccatcatttaactgcacccgcagaatagttacggtttgtcacccgaccctcccggatcgcctaatttgtccctagtgagaccccgaggctctgcccgcgcctggcttcttcgtagctggatgcatatcgtgctccgggcagcgcgggcgcagggcacgcgttcgcgcacaccctagcacacatgaacacgcgcaagagctgaaccaagcacggtttccatttcaaaaagggagacagcctctaccgcgattgtagaagagactgtggtgtgaattagggaccgggaggcgtcgaacggaggaacggttcatcttagagactaattttctggagtttctgcccctgctctgcgtcagccctcacgtcacttcgccagcagtagcagaggcggcggcggcggctcccggaattgggttggagcaggagcctcgctggctgcttcgctcgcgctctacgcgctcagtccccggcggtagcaggagcctggacccaggcgccgccggcgggcgtgaggcgccggagcccggcctcgaggtgcataccggacccccattcgcatctaacaaggaatctgcgccccagagagtcccgggagcgccgccggtcggtgcccggcgcgccgggccatgcagcgacggccgccgcggagctccgagcagcggtagcgcccccctgtaaagcggttcgctatgccggggccactgtgaaccctgccgcctgccggaacactcttcgctccggaccagctcagcctctgataagctggactcggcacgcccgcaacaagcaccgaggagttaagagagccgcaagcgcagggaaggcctccccgcacgggtgggggaaagcggccggtgcagcgcggggacaggcactcgggctggcactggctgctagggatgtcgtcctggataaggtggcatggacccgccatggcgcggctctggggcttctgctggctggttgtgggcttctggagggccgctttcgcctgtcccacgtcctgcaaatgcagtgcctctcggatctggtgcagcgacccttctcctggcatcgtggcatttccgagattggagcctaacagtgtagatcctgagaacatcaccgaaattttcatcgcaaaccagaaaaggttagaaatcatcaacgaagatgatgttgaagcttatgtgggactgagaaatctgacaattgtggattctggattaaaatttgtggctcataaagcatttctgaaaaacagcaacctgcagcacatcaattttacccgaaacaaactgacgagtttgtctaggaaacatttccgtcaccttgacttgtctgaactgatcctggtgggcaatccatttacatgctcctgtgacattatgtggatcaagactctccaagaggctaaatccagtccagacactcaggatttgtactgcctgaatgaaagcagcaagaatattcccctggcaaacctgcagatacccaattgtggtttgccatctgcaaatctggccgcacctaacctcactgtggaggaaggaaagtctatcacattatcctgtagtgtggcaggtgatccggttcctaatatgtattgggatgttggtaacctggtttccaaacatatgaatgaaacaagccacacacagggctccttaaggataactaacatttcatccgatgacagtgggaagcagatctcttgtgtggcggaaaatcttgtaggagaagatcaagattctgtcaacctcactgtgcattttgcaccaactatcacatttctcgaatctccaacctcagaccaccactggtgcattccattcactgtgaaaggcaaccccaaaccagcgcttcagtggttctataacggggcaatattgaatgagtccaaatacatctgtactaaaatacatgttaccaatcacacggagtaccacggctgcctccagctggataatcccactcacatgaacaatggggactacactctaatagccaagaatgagtatgggaaggatgagaaacagatttctgctcacttcatgggctggcctggaattgacgatggtgcaaacccaaattatcctgatgtaatttatgaagattatggaactgcagcgaatgacatcggggacaccacgaacagaagtaatgaaatcccttccacagacgtcactgataaaaccggtcgggaacatctctcggtctatgctgtggtggtgattgcgtctgtggtgggattttgccttttggtaatgctgtttctgcttaagttggcaagacactccaagtttggcatgaaagatttctcatggtttggatttgggaaagtaaaatcaagacaaggtgttggcccagcctccgttatcagcaatgatgatgactctgccagcccactccatcacatctccaatgggagtaacactccatcttcttcggaaggtggcccagatgctgtcattattggaatgaccaagatccctgtcattgaaaatccccagtactttggcatcaccaacagtcagctcaagccagacacatttgttcagcacatcaagcgacataacattgttctgaaaagggagctaggcgaaggagcctttggaaaagtgttcctagctgaatgctataacctctgtcctgagcaggacaagatcttggtggcagtgaagaccctgaaggatgccagtgacaatgcacgcaaggacttccaccgtgaggccgagctcctgaccaacctccagcatgagcacatcgtcaagttctatggcgtctgcgtggagggcgaccccctcatcatggtctttgagtacatgaagcatggggacctcaacaagttcctcagggcacacggccctgatgccgtgctgatggctgagggcaacccgcccacggaactgacgcagtcgcagatgctgcatatagcccagcagatcgccgcgggcatggtctacctggcgtcccagcacttcgtgcaccgcgatttggccaccaggaactgcctggtcggggagaacttgctggtgaaaatcggggactttgggatgtcccgggacgtgtacagcactgactactacagggtcggtggccacacaatgctgcccattcgctggatgcctccagagagcatcatgtacaggaaattcacgacggaaagcgacgtctggagcctgggggtcgtgttgtgggagattttcacctatggcaaacagccctggtaccagctgtcaaacaatgaggtgatagagtgtatcactcagggccgagtcctgcagcgaccccgcacgtgcccccaggaggtgtatgagctgatgctggggtgctggcagcgagagccccacatgaggaagaacatcaagggcatccataccctccttcagaacttggccaaggcatctccggtctacctggacattctaggctagggcccttttccccagaccgatccttcccaacgtactcctcagacgggctgagaggatgaacatcttttaactgccgctggaggccaccaagctgctctccttcactctgacagtattaacatcaaagactccgagaagctctcgagggaagcagtgtgtacttcttcatccatagacacagtattgacttctttttggcattatctctttctctctttccatctcccttggttgttcctttttctttttttaaattttctttttcttttttttttcgtcttccctgcttcacgattcttaccctttcttttgaatcaatctggcttctgcattactattaactctgcatagacaaaggccttaacaaacgtaatttgttatatcagcagacactccagtttgcccaccacaactaacaatgccttgttgtattcctgcctttgatgtggatgaaaaaaagggaaaacaaatatttcacttaaactttgtcacttctgctgtacagatatcgagagtttctatggattcacttctatttatttattattattactgttcttattgtttttggatggcttaagcctgtgtataaaaaagaaaacttgtgttcaatctgtgaagcctttatctatgggagattaaaaccagagagaaagaagatttattatgaaccgcaatatgggaggaacaaagacaaccactgggatcagctggtgtcagtccctacttaggaaatactcagcaactgttagctgggaagaatgtattcggcaccttcccctgaggacctttctgaggagtaaaaagactactggcctctgtgccatggatgattcttttcccatcaccagaaatgatagcgtgcagtagagagcaaagatggcttccgtgagacacaagatggcgcatagtgtgctcggacacagttttgtcttcgtaggttgtgatgatagcactggtttgtttctcaagcgctatccacagaacctttgtcaacttcagttgaaaagaggtggattcatgtccagagctcatttcggggtcaggtgggaaagccaagaacttggaaaagataagacaagctataaattcggaggcaagtttcttttacaatgaacttttcagatctcacttccctccgacccctaacttccatgcccacccgtccttttaactgtgcaagcaaaattgtgcatggtcttcgtcgattaataccttgtgtgcagacactactgctccagacgtcgtttccctgataggtagagcagatccataaaaaggtatgacttatacaattaggggaagctaatggagtttattagctgagtatcaatgtctctgcgttgtacggtggtgatgggttttaatgaatatggaccctgaagcctggaaatcctcatccacgtcgaacccacaggactgtgggaagggcagaatcaatccctaagggaaaggaaacctcaccctgagggcatcacatgcactcatgttcagtgtacacaggtcaagtcccttgctctgggctctagttgggagagtggtttcattccaagtgtactccattgtcagtatgctgtttttgtttccttcactccattcaaaaagtcaaaatacaaaatttggcacagcatgccaacgggaggctgtgcccagaccaagcactggaagtgtgcttctaggcatagtcattggttttgcaaaaagagggctcaaatttaaatagaaatttacagctatttgaatggtcagatataccaagaaagaaaaatatttctgttcctcaagaaaacttgctaccctctgtgaggggaattttgctaaacttgacatctttataacatgagccagattgaaagggagtgattttcattcatcttaggtcatgttatttcatatttgtttctgaaggtgcgatagctctgttttaggttttgcttgcgcctgttaattactggaacaccttatttttcattaaaggctttgaaagccaattctcaaaaattcaaaagtgcaaattaacagaacaaaaggaaatccagtagcaactgcagtcaagcgagggagttgacaagataaaccttacgtccattcaagttatatgctggcctatgagagatgagagttgggtcgtttgttctctttgttgatgattt

SEQ ID NO: 20137 - DNA, 1791 bp, Homo sapiens
  source 1..1791: mol_type = unassigned DNA
gagtgcgcatgcatttttccttccacagaaaacatacaaccatgtttctgccaacgtagttgaccaagataacctgttttttaattttcatcgcaaaccagaaaaggttagaaatcatcaacgaagatgatgttgaagcttatgtgggactgagaaatctgacaattgtggattctggattaaaatttgtggctcataaagcatttctgaaaaacagcaacctgcagcacatcaattttacccgaaacaaactgacgagtttgtctaggaaacatttccgtcaccttgacttgtctgaactgatcctggtgggcaatccatttacatgctcctgtgacattatgtggatcaagactctccaagaggctaaatccagtccagacactcaggatttgtactgcctgaatgaaagcagcaagaatattcccctggcaaacctgcagatacccaattgtggtttgccatctgcaaatctggccgcacctaacctcactgtggaggaaggaaagtctatcacattatcctgtagtgtggcaggtgatccggttcctaatatgtattgggatgttggtaacctggtttccaaacatatgaatgaaacaagccacacacagggctccttaaggataactaacatttcatccgatgacagtgggaagcagatctcttgtgtggcggaaaatcttgtaggagaagatcaagattctgtcaacctcactgtgcattttgcaccaactatcacatttctcgaatctccaacctcagaccaccactggtgcattccattcactgtgaaaggcaaccccaaaccagcgcttcagtggttctataacggggcaatattgaatgagtccaaatacatctgtactaaaatacatgttaccaatcacacggagtaccacggctgcctccagctggataatcccactcacatgaacaatggggactacactctaatagccaagaatgagtatgggaaggatgagaaacagatttctgctcacttcatgggctggcctggaattgacgatggtgcaaacccaaattatcctgatgtaatttatgaagattatggaactgcagcgaatgacatcggggacaccacgaacagaagtaatgaaatcccttccacagacgtcactgataaaaccggtcgggaacatctctcggtctatgctgtggtggtgattgcgtctgtggtgggattttgccttttggtaatgctgtttctgcttaagttggcaagacactccaagtttggcatgaaaggttttgttttgtttcataagatcccactggatgggtagctgaaataaaggaaaagacagagaaaggggctgtggtgcttgttggttgatgctgccatgtaagctggactcctgggactgctgttggcttatcccgggaagtgctgcttatctggggttttctggtagatgtgggcggtgtttggaggctgtactatatgaagcctgcatatactgtgagctgtgattggggaacaccaatgcagaggtaactctcaggcagctaagcagcacctcaagaaaacatgttaaattaatgcttctcttcttacagtagttcaaatacaaaactgaaatgaaatcccattggattgtacttctcttctgaaaagtgtgctttttgaccctactggacatttattgacttaattgcttctgtttattaaaattgacctgcaaagttaaaaaaaaattaaagttgagaacaggtataagtgcacactgaatagtctaatctacatgtaacacatattttagtgtgatt

SEQ ID NO: 20138 - DNA, 7111 bp, Homo sapiens
  source 1..7111: mol_type = unassigned DNA
gcgtcagccctcacgtcacttcgccagcagtagcagaggcggcggcggcggctcccggaattgggttggagcaggagcctcgctggctgcttcgctcgcgctctacgcgctcagtccccggcggtagcaggagcctggacccaggcgccgccggcgggcgtgaggcgccggagcccggcctcgaggtgcataccggacccccattcgcatctaacaaggaatctgcgccccagagagtcccgggagcgccgccggtcggtgcccggcgcgccgggccatgcagcgacggccgccgcggagctccgagcagcggtagcgcccccctgtaaagcggttcgctatgccggggccactgtgaaccctgccgcctgccggaacactcttcgctccggaccagctcagcctctgataagctggactcggcacgcccgcaacaagcaccgaggagttaagagagccgcaagcgcagggaaggcctccccgcacgggtgggggaaagcggccggtgcagcgcggggacaggcactcgggctggcactggctgctagggatgtcgtcctggataaggtggcatggacccgccatggcgcggctctggggcttctgctggctggttgtgggcttctggagggccgctttcgcctgtcccacgtcctgcaaatgcagtgcctctcggatctggtgcagcgacccttctcctggcatcgtggcatttccgagattggagcctaacagtgtagatcctgagaacatcaccgaaattttcatcgcaaaccagaaaaggttagaaatcatcaacgaagatgatgttgaagcttatgtgggactgagaaatctgacaattgtggattctggattaaaatttgtggctcataaagcatttctgaaaaacagcaacctgcagcacatcaattttacccgaaacaaactgacgagtttgtctaggaaacatttccgtcaccttgacttgtctgaactgatcctggtgggcaatccatttacatgctcctgtgacattatgtggatcaagactctccaagaggctaaatccagtccagacactcaggatttgtactgcctgaatgaaagcagcaagaatattcccctggcaaacctgcagatacccaattgtggtttgccatctgcaaatctggccgcacctaacctcactgtggaggaaggaaagtctatcacattatcctgtagtgtggcaggtgatccggttcctaatatgtattgggatgttggtaacctggtttccaaacatatgaatgaaacaagccacacacagggctccttaaggataactaacatttcatccgatgacagtgggaagcagatctcttgtgtggcggaaaatcttgtaggagaagatcaagattctgtcaacctcactgtgcattttgcaccaactatcacatttctcgaatctccaacctcagaccaccactggtgcattccattcactgtgaaaggcaaccccaaaccagcgcttcagtggttctataacggggcaatattgaatgagtccaaatacatctgtactaaaatacatgttaccaatcacacggagtaccacggctgcctccagctggataatcccactcacatgaacaatggggactacactctaatagccaagaatgagtatgggaaggatgagaaacagatttctgctcacttcatgggctggcctggaattgacgatggtgcaaacccaaattatcctgatgtaatttatgaagattatggaactgcagcgaatgacatcggggacaccacgaacagaagtaatgaaatcccttccacagacgtcactgataaaaccggtcgggaacatctctcggtctatgctgtggtggtgattgcgtctgtggtgggattttgccttttggtaatgctgtttctgcttaagttggcaagacactccaagtttggcatgaaaggttttgttttgtttcataagatcccactggatgggtagctgaaataaaggaaaagacagagaaaggggctgtggtgcttgttggttgatgctgccatgtaagctggactcctgggactgctgttggcttatcccgggaagtgctgcttatctggggttttctggtagatgtgggcggtgtttggaggctgtactatatgaagcctgcatatactgtgagctgtgattggggaacaccaatgcagaggtaactctcaggcagctaagcagcacctcaagaaaacatgttaaattaatgcttctcttcttacagtagttcaaatacaaaactgaaatgaaatcccattggattgtacttctcttctgaaaagtgtgctttttgaccctactggacatttattgacttaattgcttctgtttattaaaattgacctgcaaagttaaaaaaaaattaaagttgagaacaggtataagtgcacactgaatagtctaatctacatgtaacacatattttagtgtgattttctatactctaatcagcactgaattcagagggtttgactttttcatctataacacagtgactaaaagagttaagggtatatataccatcactttgggacttggtagtattattaaaaggttatttccttcactgtcaataaaagtccaaatgtttagcttaggtctgagagtcaaacaatgttaaggattgtcttaaagttccttagccagcaaaacaaaacaaaacaaaacaaacaaatgaaaaacgtttaaaaagaagaagaagaaaaaaaacaagaacaagcagcaacagctgttttgttggggctatagatttaagttaggcatagtcaatttcagaataactaagagtggaatatatgcatatggtgaaattataaccttgcccttttttatttgccctctgcgatccacctgctttttagaagtctgccgagtgagaaggccacagtatctcatgctgtttgcattacagaactgcagcttttctactctgaaaaggcctgggagcagaatggctggcctgctgtgagcaggagaggagattctaagaaggatagtcccccctacaacatactgtcatactgctgggttttcatgggtaggaaagcttgtcctgaccccagcagcaaagaggtggcaggtcgctaatgaatatatgctttataatgtccttcttcattgctgagagggcagccttagagctgtggatttctgcatcccccctgagtctgacccatggacacctgtttcattcactttagcatcacagtgacctttgtatgctctgttcagtctgtgtcaggcagtatgcttgtcctgaagagaggtttggctatccccaccccaccccaccccaccctgttccttttttatcaggaggacttcagagccaggcctgcagcattttgtttgaaaacacaatcagctctgacagttagacatgcacacagacgccatagctggattggaaacattgatgttttaaaaatttattttttttggaaatagttgcacaaatgctgcaatttagctttaaggttctatagatttttaactagtccaacacagtcagaaacattgttttgaatcctctgtaaaccaaggcattaatcttaataaaccaggatccatttaggtaccacttgatataaaaaggatatccataatgaatattttatactgcatcctttacattagccactaaatacgttattgcttgatgaagacctttcacagaatcctatggattgcagcatttcacttggctacttcatacccatgccttaaagaggggcagtttctcaaaagcagaaacatgccgccagttctcaagttttcctcctaactccatttgaatgtaagggcagctggcccccaatgtggggaggtccgaacattttctgaattcccattttcttgttcgcggctaaatgacagtttctgtcattacttagattccgatctttcccaaaggtgttgatttacaaagaggccagctaatagcagaaatcatgaccctgaaagagagatgaaattcaagctgtgagccaggcaggagctcagtatggcaaaggttcttgagaatcagccatttggtacaaaaaagatttttaaagcttttatgttataccatggagccatagaaaggctatggattgtttaagaactattttaaagtgttccagacccaaaaaggaaaaataaaaaaaaaggaatatttgtacccaacagctagaaggattgcaaggtagatttttgttttaaaatggagagaagtggacagataaggccatttaatatatcaaagatcagttgacatctcctagggaatgatgaaaacagcaggctattagaaaattatttcatatagttctcgtgttcttttcttttttttaatccctgaagggatgatcagtaacatagcttctcttttctgtactctagaccaccccttttcatcattttgctttttatgtctcccataagaaatgtgctttttagagcttcctaatgcatgtgttgcattattgcagcattagaaaaggagaggtagcatttttgctgaaatcgggcctgtcactctccaataaaggttctggcacttcaatgccaggcaggtctcctaaatgaacagaatgatctgtgtgagccgatgcctgcccttccagaggggccactgtccccagccgcagccaactgtgtcccacaggaatgggagcctaggtttccaaatcttgtgattctttaggagaaacatgaaacctggatttcgtgtgaaatgtcccgattgttaaaaagttggctcaattatttttaaaacattttgtaagccaacaaaagtctgtgggctgccagtttattacttttgtcttaaaacatgatcattgttctctcacggtatccttctgtcttcccgttgcaaattcacttttctttcttcctgacattgccattgagggctttgttaccacaagctaagaaactgagtttaacagcccagttatctgcaacatgtcaattacctttgctcctctcctgtgattcccaccatgctgtgaccctcagctgtctccctttgctgggaattctgcaccaatgtctcccctcaacccattccctggttggtcctactcccgtgtggccagagacatcctagcaaatccttcctcctattatatctgacactaatttcttttcaacagcgctcatgtctcttggcccagtcaggtgctgccaggtttagataggaaagtacatgtcccattttcatgggtgcccttaatgtggtccacgtcctatatcttattatatttactcatggctcaatgggggcctccagagaccctctcaggctgctgagctagactaaggaatgcatccaccgtcatcacatgagacactgactctgtgacgacaaaagtacaaacagtctgaggctaagaaaggttcatctcacaacaggaaaaacaaatctcaacacacattagagataattgattcaggggttttctctcccagtctcccagcagggactgatttcatttctgacccactaggttttctttccagaaataggtagcaaggacaagaactaaacaatcccagccccacccagcaacacagaacacaggagtttgcttttggcttctcactctccaagtaaccctgaattaggcccagaatggctgaggcttggagcatctcctcagacagagcagaggcgacacctcttcaggggtgtgtggagtaaatagctcgaagagctgaagacagaaaaccagtttcacgccaggtgcgagagagagcataatggagggaagcccgctttctctctcctcttcttttctctttatttctttagagcacttgacttttttttctctctctctctagtattctaaactgaccccatgaccaactgagaatttatttttgtttcattggttgtttcacagaattagaacacacacgactttttattcctccattgcaaaatggaatcaagatactacacaagacctgtgctttcttcctttgcatgatttacacctccgcctgttttggtgctagctgtctagaacttctctcttggtttgaatctgattccttcacactacactagaagtttatttcatcttgttttgtctagactccagatacagagggacagctggactgaggacaagcaattccatctagcatagggtctctcagggttggtgcatccagccacatgggcagggccagtcacatctagtctatgtccccagagcccttggagttgcgcagcttagctgacttgactccaaggaaattagtacagaagtaaccactctattaagtgtgttctgctatgttcacatgcctgtagtacctgcaaaccatgccaggttcatctaaagacataggggaagattaaggactcttttggacagaccatgaattgaatttgctgccaggtgctgccagactgaatttggctgacagaactcccagcccaggaaagttccatgacaatgactgtcgcagaaggaaatttcccactaaagtcagtccattttcaagttttggtcttcagagacaaaagaacgtcccagccacctgattttgatggtgaggtaactctaagttgaattcaggctagtgttgcagtatagctttggcatgttcatgagtgagcacccagaatgtgttgaaccaacccccacccctaactactgactatgactgcagtgggtttttatggggaaaaaaagtgtgaaaagcaaaaagaaaggaacagagattttttatcacctttattgtaagacagtccatttatgaattgagtataaacacatacaaagtaacaagagattcctaagaaacgcaaatccttgagtttcacgcacttcatgttcaaccatttgctgtaatccagaggcagcctgtgaatcattctcatgccctgttttttttttttttttcctataatgttctgggtttaaaagccatcttttccacattttctgtaaataatggataatcattttaaaaatttttatttttagtgctgttttaacaatgtagatagatcataaatgtacttgctgaattcaatcatttttaacaagccaataaagtttgataattcatctc

SEQ ID NO: 20139 - DNA, 3979 bp, Homo sapiens
  source 1..3979: mol_type = unassigned DNA
gatcgccgagccggccaccatgcccggcagaccgcgccactaggcgctcctcgcggctcccacccggcggcggcggcggcggcggcggcgtccgcgatggtttcagacgctgaaggattttgcatctgatcgctcggcgtttcaaagaagcagcgatcggagatggatgtctctctttgcccagccaagtgtagtttctggcggattttcttgctgggaagcgtctggctggactatgtgggctccgtgctggcttgccctgcaaattgtgtctgcagcaagactgagatcaattgccggcggccggacgatgggaacctcttccccctcctggaagggcaggattcagggaacagcaatgggaacgccagtatcaacatcacggacatctcaaggaatatcacttccatacacatagagaactggcgcagtcttcacacgctcaacgccgtggacatggagctctacaccggacttcaaaagctgaccatcaagaactcaggacttcggagcattcagcccagagcctttgccaagaacccccatttgcgttatataaacctgtcaagtaaccggctcaccacactctcgtggcagctcttccagacgctgagtcttcgggaattgcagttggagcagaactttttcaactgcagctgtgacatccgctggatgcagctctggcaggagcagggggaggccaagctcaacagccagaacctctactgcatcaacgctgatggctcccagcttcctctcttccgcatgaacatcagtcagtgtgaccttcctgagatcagcgtgagccacgtcaacctgaccgtacgagagggtgacaacgctgttatcacttgcaatggctctggatcaccccttcctgatgtggactggatagtcactgggctgcagtccatcaacactcaccagaccaatctgaactggaccaatgttcatgccatcaacttgacgctggtgaatgtgacgagtgaggacaatggcttcaccctgacgtgcattgcagagaacgtggtgggcatgagcaatgccagtgttgccctcactgtctactatcccccacgtgtggtgagcctggaggagcctgagctgcgcctggagcactgcatcgagtttgtggtgcgtggcaaccccccaccaacgctgcactggctgcacaatgggcagcctctgcgggagtccaagatcatccatgtggaatactaccaagagggagagatttccgagggctgcctgctcttcaacaagcccacccactacaacaatggcaactataccctcattgccaaaaacccactgggcacagccaaccagaccatcaatggccacttcctcaaggagccctttccagagagcacggataactttatcttgtttgacgaagtgagtcccacacctcctatcactgtgacccacaaaccagaagaagacacttttggggtatccatagcagttggacttgctgcttttgcctgtgtcctgttggtggttctcttcgtcatgatcaacaaatatggtcgacggtccaaatttggaatgaagggtcccgtggctgtcatcagtggtgaggaggactcagccagcccactgcaccacatcaaccacggcatcaccacgccctcgtcactggatgccgggcccgacactgtggtcattggcatgactcgcatccctgtcattgagaacccccagtacttccgtcagggacacaactgccacaagccggacacgtgggtcttttcaaacatagacaatcatgggatattaaacttgaaggacaatagagatcatctagtcccatcaactcactatatatatgaggaacctgaggtccagagtggggaagtgtcttacccaaggtcacatggtttcagagaaattatgttgaatccaataagccttcccggacattccaagcctcttaaccatggcatctatgttgaggatgtcaatgtttatttcagcaaaggacgtcatggcttttaaaaactccttttaagcctccttgttttgatgtcaccttggtaggctgggccctctgagaggttggaagctctaggcattgttctctttggatccagggatgctaagtagaaactgcatgagccaccagtgccccggcaccctttaacaccaccagatgggtgttttcccccatccaccactggcagggttgccccttccctccaatcatcactgtgctccttttttcccggcctacgaggcagctcctgccactatctttagagccaataaagagaattaaaaacctgtgcaccaggagcatcttttaaatacactagccattctcttgctttacaaaaacaacctaaccatcacaagaaagcctgatgaagtccagccgtgctccagcctcactttccctgcttggaagcgtggggtctccctggctctcccaggataccatgctgtcctcttagtgacctcgtcgccctgcaacctccagtggggaagagtcacagagagcacctaagcagaggtggagacggcgcggtaagaggagggggagccaggctcaagtattggcaccaagttaggtctcagaggaaagaatggaaaccaatcactttacatttttatttttattttcggtggaaaaatcatccttttttgggacatacttgccccctacttcctcttctctctggaacggctcacaatgagtgtgacattagaaaactccttgcagaggagagtttctccaggctcttcctgggcccttagatctgcagttccgacaagctttggctgcaggaggttttacccatgaactggccatcctactaggaccacaagggaccaagggaatcagggacaaaggcccttcctgccagcccatgatcccgggattggctctcttcccctacttccacttattcttgactctgagaacttttggaacccaatggaatcagcatttcaaggtcaagatgaactgaaggggaagagaagtaaaacttggcctcctccagcccctctcatggcaccaatggaagtgtcctcctgttctctggtcaatatgtgtgtttactttgcttgctttgactcatgccttactccatggccaccctctcccaaagagggggctcgcttcccccattttcaacttgatccactgaggagagggaagggggtgactttcccttcttcagtaggaaaggcacatttgtagggcctgaaactctcccgtatttgctgactcattggtggagtagacttctggctcccagctccactggcccatggggcctccattgtatgaagtcagcataggctgcccacctaatggtggagagcatgaaactgggagcatcctgtggggggcttgtgggggaaaaaggtggttgttttaacccaccgttgttttggggtggtgttgcacactagtagagaatagagtctatgcctttggcaaatttaactgggagtttggattcccacttaagggttttacttcttgggtcctgtggatggtggttcttcgtgtcaggatcccagcccgattctgcaaatgcctccatggggtttaaaaacatgaggctttccaagttcttgcccagtatctggggcagcctccagagtatcacctgggagttcaggttctctccagggctccaggtgtgtgtttatctcgccccctccagctctcctcatcctgctccccattgctccatgtcaggctgttccccattgtgccctgctgatgctttgggtccagggcctcctcccaagtgtggctttaaggagtaagcttgaggatgatgttttttaattattgtaaatcattacctcatttccagcctcccaggctccatccatcccagcatcttttattctgccattttcctcaccttgtgctatgacaatggggcgttgtgtttccacagagacttataggagtgttcagtgtatagtttcttaataaacactttattttctaatg

SEQ ID NO: 20140 - DNA, 2088 bp, Homo sapiens
  source 1..2088: mol_type = unassigned DNA
gatcgccgagccggccaccatgcccggcagaccgcgccactaggcgctcctcgcggctcccacccggcggcggcggcggcggcggcggcgtccgcgatggtttcagacgctgaaggattttgcatctgatcgctcggcgtttcaaagaagcagcgatcggagatggatgtctctctttgcccagccaagtgtagtttctggcggattttcttgctgggaagcgtctggctggactatgtgggctccgtgctggcttgccctgcaaattgtgtctgcagcaagactgagatcaattgccggcggccggacgatgggaacctcttccccctcctggaagggcaggattcagggaacagcaatgggaacgccagtatcaacatcacggacatctcaaggaatatcacttccatacacatagagaactggcgcagtcttcacacgctcaacgccgtggacatggagctctacaccggacttcaaaagctgaccatcaagaactcaggacttcggagcattcagcccagagcctttgccaagaacccccatttgcgttatataaacctgtcaagtaaccggctcaccacactctcgtggcagctcttccagacgctgagtcttcgggaattgcagttggagcagaactttttcaactgcagctgtgacatccgctggatgcagctctggcaggagcagggggaggccaagctcaacagccagaacctctactgcatcaacgctgatggctcccagcttcctctcttccgcatgaacatcagtcagtgtgaccttcctgagatcagcgtgagccacgtcaacctgaccgtacgagagggtgacaacgctgttatcacttgcaatggctctggatcaccccttcctgatgtggactggatagtcactgggctgcagtccatcaacactcaccagaccaatctgaactggaccaatgttcatgccatcaacttgacgctggtgaatgtgacgagtgaggacaatggcttcaccctgacgtgcattgcagagaacgtggtgggcatgagcaatgccagtgttgccctcactgtctactatcccccacgtgtggtgagcctggaggagcctgagctgcgcctggagcactgcatcgagtttgtggtgcgtggcaaccccccaccaacgctgcactggctgcacaatgggcagcctctgcgggagtccaagatcatccatgtggaatactaccaagagggagagatttccgagggctgcctgctcttcaacaagcccacccactacaacaatggcaactataccctcattgccaaaaacccactgggcacagccaaccagaccatcaatggccacttcctcaaggagccctttccagagagcacggataactttatcttgtttgacgaagtgagtcccacacctcctatcactgtgacccacaaaccagaagaagacacttttggggtatccatagcagttggacttgctgcttttgcctgtgtcctgttggtggttctcttcgtcatgatcaacaaatatggtcgacggtccaaatttggaatgaagggtcccgtggctgtcatcagtggtgaggaggactcagccagcccactgcaccacatcaaccacggcatcaccacgccctcgtcactggatgccgggcccgacactgtggtcattggcatgactcgcatccctgtcattgagaacccccagtacttccgtcagggacacaactgccacaagccggacacgtatgtgcagcacattaagaggagagacatcgtgctgaagcgagaactgggtgagggagcctttggaaaggtcttcctggccgagtgctacaacctcagcccgaccaaggacaagatgcttgtggctgtgaaggccctgaaggatcccaccctggctgcccggaaggatttccagagggaggccgagctgctcaccaacctgcagcatgagcacattgtcaagttctatggagtgtgcggcgatggggaccccctcatcatggtctttgaatacatgaagcatggagacctgaataagttcctcagcagtatctccagccccaagagccaccagcagggttaa

SEQ ID NO: 20141 - DNA, 2784 bp, Homo sapiens
  source 1..2784: mol_type = unassigned DNA
gatcgccgagccggccaccatgcccggcagaccgcgccactaggcgctcctcgcggctcccacccggcggcggcggcggcggcggcggcgtccgcgatggtttcagacgctgaaggattttgcatctgatcgctcggcgtttcaaagaagcagcgatcggagatggatgtctctctttgcccagccaagtgtagtttctggcggattttcttgctgggaagcgtctggctggactatgtgggctccgtgctggcttgccctgcaaattgtgtctgcagcaagactgagatcaattgccggcggccggacgatgggaacctcttccccctcctggaagggcaggattcagggaacagcaatgggaacgccagtatcaacatcacggacatctcaaggaatatcacttccatacacatagagaactggcgcagtcttcacacgctcaacgccgtggacatggagctctacaccggacttcaaaagctgaccatcaagaactcaggacttcggagcattcagcccagagcctttgccaagaacccccatttgcgttatataaacctgtcaagtaaccggctcaccacactctcgtggcagctcttccagacgctgagtcttcgggaattgcagttggagcagaactttttcaactgcagctgtgacatccgctggatgcagctctggcaggagcagggggaggccaagctcaacagccagaacctctactgcatcaacgctgatggctcccagcttcctctcttccgcatgaacatcagtcagtgtgaccttcctgagatcagcgtgagccacgtcaacctgaccgtacgagagggtgacaacgctgttatcacttgcaatggctctggatcaccccttcctgatgtggactggatagtcactgggctgcagtccatcaacactcaccagaccaatctgaactggaccaatgttcatgccatcaacttgacgctggtgaatgtgacgagtgaggacaatggcttcaccctgacgtgcattgcagagaacgtggtgggcatgagcaatgccagtgttgccctcactgtctactatcccccacgtgtggtgagcctggaggagcctgagctgcgcctggagcactgcatcgagtttgtggtgcgtggcaaccccccaccaacgctgcactggctgcacaatgggcagcctctgcgggagtccaagatcatccatgtggaatactaccaagagggagagatttccgagggctgcctgctcttcaacaagcccacccactacaacaatggcaactataccctcattgccaaaaacccactgggcacagccaaccagaccatcaatggccacttcctcaaggagccctttccagagagcacggataactttatcttgtttgacgaagtgagtcccacacctcctatcactgtgacccacaaaccagaagaagacacttttggggtatccatagcagttggacttgctgcttttgcctgtgtcctgttggtggttctcttcgtcatgatcaacaaatatggtcgacggtccaaatttggaatgaagggtcccgtggctgtcatcagtggtgaggaggactcagccagcccactgcaccacatcaaccacggcatcaccacgccctcgtcactggatgccgggcccgacactgtggtcattggcatgactcgcatccctgtcattgagaacccccagtacttccgtcagggacacaactgccacaagccggacacgtatgtgcagcacattaagaggagagacatcgtgctgaagcgagaactgggtgagggagcctttggaaaggtcttcctggccgagtgctacaacctcagcccgaccaaggacaagatgcttgtggctgtgaaggccctgaaggatcccaccctggctgcccggaaggatttccagagggaggccgagctgctcaccaacctgcagcatgagcacattgtcaagttctatggagtgtgcggcgatggggaccccctcatcatggtctttgaatacatgaagcatggagacctgaataagttcctcagggcccatgggccagatgcaatgatccttgtggatggacagccacgccaggccaagggtgagctggggctctcccaaatgctccacattgccagtcagatcgcctcgggtatggtgtacctggcctcccagcactttgtgcaccgagacctggccaccaggaactgcctggttggagcgaatctgctagtgaagattggggacttcggcatgtccagagatgtctacagcacggattattacagggtgggaggacacaccatgctccccattcgctggatgcctcctgaaagcatcatgtaccggaagttcactacagagagtgatgtatggagcttcggggtgatcctctgggagatcttcacctatggaaagcagccatggttccaactctcaaacacggaggtcattgagtgcattacccaaggtcgtgttttggagcggccccgagtctgccccaaagaggtgtacgatgtcatgctggggtgctggcagagggaaccacagcagcggttgaacatcaaggagatctacaaaatcctccatgctttggggaaggccaccccaatctacctggacattcttggctagtggtggctggtggtcatgaattcatactctgttgcctcctctctccctgcctcacatctcccttccacctcacaactccttccatccttgactgaagcgaacatcttcatataaactcaagtgcctgctacacatacaacactg

SEQ ID NO: 20142 - DNA, 2802 bp, Homo sapiens
  source 1..2802: mol_type = unassigned DNA
gatcgccgagccggccaccatgcccggcagaccgcgccactaggcgctcctcgcggctcccacccggcggcggcggcggcggcggcggcgtccgcgatggtttcagacgctgaaggattttgcatctgatcgctcggcgtttcaaagaagcagcgatcggagatggatgtctctctttgcccagccaagtgtagtttctggcggattttcttgctgggaagcgtctggctggactatgtgggctccgtgctggcttgccctgcaaattgtgtctgcagcaagactgagatcaattgccggcggccggacgatgggaacctcttccccctcctggaagggcaggattcagggaacagcaatgggaacgccagtatcaacatcacggacatctcaaggaatatcacttccatacacatagagaactggcgcagtcttcacacgctcaacgccgtggacatggagctctacaccggacttcaaaagctgaccatcaagaactcaggacttcggagcattcagcccagagcctttgccaagaacccccatttgcgttatataaacctgtcaagtaaccggctcaccacactctcgtggcagctcttccagacgctgagtcttcgggaattgcagttggagcagaactttttcaactgcagctgtgacatccgctggatgcagctctggcaggagcagggggaggccaagctcaacagccagaacctctactgcatcaacgctgatggctcccagcttcctctcttccgcatgaacatcagtcagtgtgaccttcctgagatcagcgtgagccacgtcaacctgaccgtacgagagggtgacaacgctgttatcacttgcaatggctctggatcaccccttcctgatgtggactggatagtcactgggctgcagtccatcaacactcaccagaccaatctgaactggaccaatgttcatgccatcaacttgacgctggtgaatgtgacgagtgaggacaatggcttcaccctgacgtgcattgcagagaacgtggtgggcatgagcaatgccagtgttgccctcactgtctactatcccccacgtgtggtgagcctggaggagcctgagctgcgcctggagcactgcatcgagtttgtggtgcgtggcaaccccccaccaacgctgcactggctgcacaatgggcagcctctgcgggagtccaagatcatccatgtggaatactaccaagagggagagatttccgagggctgcctgctcttcaacaagcccacccactacaacaatggcaactataccctcattgccaaaaacccactgggcacagccaaccagaccatcaatggccacttcctcaaggagccctttccagttgacgaagtgagtcccacacctcctatcactgtgacccacaaaccagaagaagacacttttggggtatccatagcagttggacttgctgcttttgcctgtgtcctgttggtggttctcttcgtcatgatcaacaaatatggtcgacggtccaaatttggaatgaagggtcccgtggctgtcatcagtggtgaggaggactcagccagcccactgcaccacatcaaccacggcatcaccacgccctcgtcactggatgccgggcccgacactgtggtcattggcatgactcgcatccctgtcattgagaacccccagtacttccgtcagggacacaactgccacaagccggacacgtatgtgcagcacattaagaggagagacatcgtgctgaagcgagaactgggtgagggagcctttggaaaggtcttcctggccgagtgctacaacctcagcccgaccaaggacaagatgcttgtggctgtgaaggccctgaaggatcccaccctggctgcccggaaggatttccagagggaggccgagctgctcaccaacctgcagcatgagcacattgtcaagttctatggagtgtgcggcgatggggaccccctcatcatggtctttgaatacatgaagcatggagacctgaataagttcctcagggcccatgggccagatgcaatgatccttgtggatggacagccacgccaggccaagggtgagctggggctctcccaaatgctccacattgccagtcagatcgcctcgggtatggtgtacctggcctcccagcactttgtgcaccgagacctggccaccaggaactgcctggttggagcgaatctgctagtgaagattggggacttcggcatgtccagagatgtctacagcacggattattacaggctctttaatccatctggaaatgatttttgtatatggtgtgaggtgggaggacacaccatgctccccattcgctggatgcctcctgaaagcatcatgtaccggaagttcactacagagagtgatgtatggagcttcggggtgatcctctgggagatcttcacctatggaaagcagccatggttccaactctcaaacacggaggtcattgagtgcattacccaaggtcgtgttttggagcggccccgagtctgccccaaagaggtgtacgatgtcatgctggggtgctggcagagggaaccacagcagcggttgaacatcaaggagatctacaaaatcctccatgctttggggaaggccaccccaatctacctggacattcttggctagtggtggctggtggtcatgaattcatactctgttgcctcctctctccctgcctcacatctcccttccacctcacaactccttccatccttgactgaagcgaacatcttcatataaactcaagtgcctgctacacatacaacactg

SEQ ID NO: 20143 - DNA, 2826 bp, Homo sapiens
  source 1..2826: mol_type = unassigned DNA
gatcgccgagccggccaccatgcccggcagaccgcgccactaggcgctcctcgcggctcccacccggcggcggcggcggcggcggcggcgtccgcgatggtttcagacgctgaaggattttgcatctgatcgctcggcgtttcaaagaagcagcgatcggagatggatgtctctctttgcccagccaagtgtagtttctggcggattttcttgctgggaagcgtctggctggactatgtgggctccgtgctggcttgccctgcaaattgtgtctgcagcaagactgagatcaattgccggcggccggacgatgggaacctcttccccctcctggaagggcaggattcagggaacagcaatgggaacgccagtatcaacatcacggacatctcaaggaatatcacttccatacacatagagaactggcgcagtcttcacacgctcaacgccgtggacatggagctctacaccggacttcaaaagctgaccatcaagaactcaggacttcggagcattcagcccagagcctttgccaagaacccccatttgcgttatataaacctgtcaagtaaccggctcaccacactctcgtggcagctcttccagacgctgagtcttcgggaattgcagttggagcagaactttttcaactgcagctgtgacatccgctggatgcagctctggcaggagcagggggaggccaagctcaacagccagaacctctactgcatcaacgctgatggctcccagcttcctctcttccgcatgaacatcagtcagtgtgaccttcctgagatcagcgtgagccacgtcaacctgaccgtacgagagggtgacaacgctgttatcacttgcaatggctctggatcaccccttcctgatgtggactggatagtcactgggctgcagtccatcaacactcaccagaccaatctgaactggaccaatgttcatgccatcaacttgacgctggtgaatgtgacgagtgaggacaatggcttcaccctgacgtgcattgcagagaacgtggtgggcatgagcaatgccagtgttgccctcactgtctactatcccccacgtgtggtgagcctggaggagcctgagctgcgcctggagcactgcatcgagtttgtggtgcgtggcaaccccccaccaacgctgcactggctgcacaatgggcagcctctgcgggagtccaagatcatccatgtggaatactaccaagagggagagatttccgagggctgcctgctcttcaacaagcccacccactacaacaatggcaactataccctcattgccaaaaacccactgggcacagccaaccagaccatcaatggccacttcctcaaggagccctttccagagagcacggataactttatcttgtttgacgaagtgagtcccacacctcctatcactgtgacccacaaaccagaagaagacacttttggggtatccatagcagttggacttgctgcttttgcctgtgtcctgttggtggttctcttcgtcatgatcaacaaatatggtcgacggtccaaatttggaatgaagggtcccgtggctgtcatcagtggtgaggaggactcagccagcccactgcaccacatcaaccacggcatcaccacgccctcgtcactggatgccgggcccgacactgtggtcattggcatgactcgcatccctgtcattgagaacccccagtacttccgtcagggacacaactgccacaagccggacacgtatgtgcagcacattaagaggagagacatcgtgctgaagcgagaactgggtgagggagcctttggaaaggtcttcctggccgagtgctacaacctcagcccgaccaaggacaagatgcttgtggctgtgaaggccctgaaggatcccaccctggctgcccggaaggatttccagagggaggccgagctgctcaccaacctgcagcatgagcacattgtcaagttctatggagtgtgcggcgatggggaccccctcatcatggtctttgaatacatgaagcatggagacctgaataagttcctcagggcccatgggccagatgcaatgatccttgtggatggacagccacgccaggccaagggtgagctggggctctcccaaatgctccacattgccagtcagatcgcctcgggtatggtgtacctggcctcccagcactttgtgcaccgagacctggccaccaggaactgcctggttggagcgaatctgctagtgaagattggggacttcggcatgtccagagatgtctacagcacggattattacaggctctttaatccatctggaaatgatttttgtatatggtgtgaggtgggaggacacaccatgctccccattcgctggatgcctcctgaaagcatcatgtaccggaagttcactacagagagtgatgtatggagcttcggggtgatcctctgggagatcttcacctatggaaagcagccatggttccaactctcaaacacggaggtcattgagtgcattacccaaggtcgtgttttggagcggccccgagtctgccccaaagaggtgtacgatgtcatgctggggtgctggcagagggaaccacagcagcggttgaacatcaaggagatctacaaaatcctccatgctttggggaaggccaccccaatctacctggacattcttggctagtggtggctggtggtcatgaattcatactctgttgcctcctctctccctgcctcacatctcccttccacctcacaactccttccatccttgactgaagcgaacatcttcatataaactcaagtgcctgctacacatacaacactg

SEQ ID NO: 20144 - DNA, 19984 bp, Homo sapiens
  source 1..19984: mol_type = unassigned DNA
ggctcggagcacttgtacatttctgcagccgcgcggcgagccattcgcggcggctgctgcagctcctactgcatcttccttctcttcctttcctcgggctccggtctcggagtcggagagcgcgcctcgcttccagagcccccggacccggcgagtcagcgatcgccgagccggccaccatgcccggcagaccgcgccactaggcgctcctcgcggctcccacccggcggcggcggcggcggcggcggcgtccgcgatggtttcagacgctgaaggattttgcatctgatcgctcggcgtttcaaagaagcagcgatcggagatggatgtctctctttgcccagccaagtgtagtttctggcggattttcttgctgggaagcgtctggctggactatgtgggctccgtgctggcttgccctgcaaattgtgtctgcagcaagactgagatcaattgccggcggccggacgatgggaacctcttccccctcctggaagggcaggattcagggaacagcaatgggaacgccagtatcaacatcacggacatctcaaggaatatcacttccatacacatagagaactggcgcagtcttcacacgctcaacgccgtggacatggagctctacaccggacttcaaaagctgaccatcaagaactcaggacttcggagcattcagcccagagcctttgccaagaacccccatttgcgttatataaacctgtcaagtaaccggctcaccacactctcgtggcagctcttccagacgctgagtcttcgggaattgcagttggagcagaactttttcaactgcagctgtgacatccgctggatgcagctctggcaggagcagggggaggccaagctcaacagccagaacctctactgcatcaacgctgatggctcccagcttcctctcttccgcatgaacatcagtcagtgtgaccttcctgagatcagcgtgagccacgtcaacctgaccgtacgagagggtgacaacgctgttatcacttgcaatggctctggatcaccccttcctgatgtggactggatagtcactgggctgcagtccatcaacactcaccagaccaatctgaactggaccaatgttcatgccatcaacttgacgctggtgaatgtgacgagtgaggacaatggcttcaccctgacgtgcattgcagagaacgtggtgggcatgagcaatgccagtgttgccctcactgtctactatcccccacgtgtggtgagcctggaggagcctgagctgcgcctggagcactgcatcgagtttgtggtgcgtggcaaccccccaccaacgctgcactggctgcacaatgggcagcctctgcgggagtccaagatcatccatgtggaatactaccaagagggagagatttccgagggctgcctgctcttcaacaagcccacccactacaacaatggcaactataccctcattgccaaaaacccactgggcacagccaaccagaccatcaatggccacttcctcaaggagccctttccagagagcacggataactttatcttgtttgacgaagtgagtcccacacctcctatcactgtgacccacaaaccagaagaagacacttttggggtatccatagcagttggacttgctgcttttgcctgtgtcctgttggtggttctcttcgtcatgatcaacaaatatggtcgacggtccaaatttggaatgaagggtcccgtggctgtcatcagtggtgaggaggactcagccagcccactgcaccacatcaaccacggcatcaccacgccctcgtcactggatgccgggcccgacactgtggtcattggcatgactcgcatccctgtcattgagaacccccagtacttccgtcagggacacaactgccacaagccggacacgtatgtgcagcacattaagaggagagacatcgtgctgaagcgagaactgggtgagggagcctttggaaaggtcttcctggccgagtgctacaacctcagcccgaccaaggacaagatgcttgtggctgtgaaggccctgaaggatcccaccctggctgcccggaaggatttccagagggaggccgagctgctcaccaacctgcagcatgagcacattgtcaagttctatggagtgtgcggcgatggggaccccctcatcatggtctttgaatacatgaagcatggagacctgaataagttcctcagggcccatgggccagatgcaatgatccttgtggatggacagccacgccaggccaagggtgagctggggctctcccaaatgctccacattgccagtcagatcgcctcgggtatggtgtacctggcctcccagcactttgtgcaccgagacctggccaccaggaactgcctggttggagcgaatctgctagtgaagattggggacttcggcatgtccagagatgtctacagcacggattattacagggtgggaggacacaccatgctccccattcgctggatgcctcctgaaagcatcatgtaccggaagttcactacagagagtgatgtatggagcttcggggtgatcctctgggagatcttcacctatggaaagcagccatggttccaactctcaaacacggaggtcattgagtgcattacccaaggtcgtgttttggagcggccccgagtctgccccaaagaggtgtacgatgtcatgctggggtgctggcagagggaaccacagcagcggttgaacatcaaggagatctacaaaatcctccatgctttggggaaggccaccccaatctacctggacattcttggctagtggtggctggtggtcatgaattcatactctgttgcctcctctctccctgcctcacatctcccttccacctcacaactccttccatccttgactgaagcgaacatcttcatataaactcaagtgcctgctacacatacaacactgaaaaaaggaaaaaaaaagaaagaaaaaaaaaccctgtaaggcagtttggcaaatatatatatatatatatatatttatatatctaactatctatcaatctatatctacagagagttaccttctctagtacacagagaagctgctgatacagaaaaccacaagactttaacaactcagaaactctaaaatattaataatacaaaggaaaattccctttgacttaagctgtggcccatgcttctaatgctacggctctttggagcagaagacctggaccatgcagagagacaatctttgggatgagagctctgggacgggaggagttaaggtggtgctcagtcgctgctgtgtgtgtctgttaccccggaagctcaccacaggcacatgtggggactgcatggctgtgctcagcaaagaaatgatgcctgagcagggtccttgcctccacttcttccccatttcctccacttcaggacaatgttctaatttgtccattctaaaaagtgtaatcttgatgcttttgggaatcaatgatggcacctacgggtaaacacagaacagacaaccccacaacacaaaaccatgacaagagctgacagcatccatcctgggtgtaagcttcttgctggagttgcaaaggatgtgtctttctattctcagaacttaaagaactggactttctggagtaaaagaaccacagaagaaaaaatagctgaaacctgaaccctgccaagacactgccacctgtcttttccatcattgcaaagattccttggcctcacctcccactttcaggcccctgggaagcttagggggttaggaaacaggtccccatgttatctttgaatgtagacacagcacgctttagggttgcaatagcaagagacttggttgcttgtaggtcattataacgaatgccccctggtcctctcagtttctcatcctgcttccctagatcctagaccccacttcctgggtctctactgagtcccaggtaaaccccactgccaaggaagggagccaggtctagtgagaggctgcagcagtgagtgtttcaggaaagcaagcagtggagtgggtgagagccagcaggggagaatctacttggcacctgtgccaggccccttggcattctcctcacgtttccagcccctgggaggattgatgcatctgcctttgagctgttgtgaaaacgcaggggctgagaaatcacttttgtgggctggggtagggggaagggctgaggcttctctgggagatgtccaatgagcggccagtgctgcaggcttggaatcttaatgaggcctgagccctgaccggagagagggaaggaaacatctgtgctggggcctgctccctctgccccagcactggggaatcactgccttcctggctgctgccacataccacagtggggccgacctctgggcctccctgtcacatgaaacatggaagccaacagcctggccccacagatctcctctgctggagaggagaggatgtgttcctcccaggccacggggcccctctgccttgccccaagcacagagctacctaagggactgacctttgccacactggagctcacctcccgggggcctctggcctacccttttccctgccagctgaagagactgccggcagcctggacgtcctggttagctgaaggcagctgaaatgtgggcctccctatgtggggtttagtactgaattatgtgtttgtggttttgcttctttttgtagacccacaaatatttttatttgaatagtaaagagctgtgctcagattgtagccatggttgggatttgggatcaacgaggctggttagctggactgggaggggaggcaggtgagatgggaatttggtgttggttttctcactgtgctgtgctcctagcccctgaggactttgcaggaaagctgtttggattgaccacctcaaggaactcctttgctgtcctatgacaattactcctcttgtctttccacctagaggaccgttatgccggggctgtgagttctggctgaagctgcacaatctggctttgatctgggtagctaagaacaggtgttcagggagggcatggtctggaggcgcctgagggaaaagtatcttctggttagaagtgaagcaccaatgctcctgttgcttcccttctcccatatcctctcctgaacaaacactgtgtggcttctgtcttcttggctgtgtgtttcaaaactgatagtcactgatgggctgggaagaagcaggagaagaactgggttggagatgggtggaaaactgggaataaggaccatgctatggttttatcttcagggcactgattcatcatggcctaatgaaagaaggtgattccttgggggaacaagaagcactgaaggagaccgcagttgtcagattgctgccaccttaggcccacgggctttcacgctgatcttggggtcatgttcttactgtgtccattgtaagcagctggctgtggaagagtgccagagagagaggggcagagcagggaagggtagcgagggaagatatattactttgatatattagccttggcagattaaaaaaaaaagatttattttggagagtaaaggaggcagaaaatagggccatggaaattgcagggtacactatggctctggggagtgtggcatgtactgggacacacctgtccctcctatattgggacaggactgataaggcttagtacactgtatcttaatttccccatctgcagaataaggggtacacctgctaatctctggccccttctagctctgagttcttagattctgacaacgttgtgtcactgtgccatttttctcaataccattctggaatggcaggacagccttgcataggtggggggcagttgccgctgaaggctcactgggcctgggcaaggctgagttccaataagacactcctctccttctttgccccttgtctcaacatttcggagtctgaagtgtctgagacgactgtaagccaggaggggagcatttggtcggcttcccatcctggcattcctacataccagaaaagcactgtcgacggtccatttatttatttatttatgaagagcctaatgtgatgaaatgtgttgtgaaatgacatcctattagccaatatggccactccagttcatttcaccctcattttcccataccaaagtccaccttttagaagaccatgtcacatcgcctctgagagcttagctttgaagtgagctcttttgtgtcttttgatgaacgctccagggcacccaggctggtctctctgccatgccaacctcaccggatcctctcctggactgagtgagagtgacctgctgttgggtgtccaccttggagtagggtgttgtggccatgggacctcccaattcttctttctttggatgtgaacctaactctgccctctaatgatatccctgaactctgaggggaccttgggcatcactgaacctcctctagtcaagagacaagaaaaaggaggtgctgcttcctccattcagcagatcatgcacaaattactcctagacagaggcttcccacttgaggcaaaggatctttggtccttctgggttcaggttgaacattaatgttcttctctagtgatgcctactttgcggaatacactagtgcaagtcattttggtgctaaatactgcagaaaccaacaccaacgggagagctgtcagccagcttctggggctgcacgagactcaactcagaagtagaagtgagtcagccatgccgggagagtacagggtgcattggaagttaagtagaaaagtggcagggtgaaaagaccagcaaaatttctgattttgctattagttatccacgtggccttggccaaatcagcttatttctcatttgagacgtttaagaggtttgtatagatatttttagagtccttttcatttttttaaagctaggttctggtcccacctgatatatatgtacttgcttgttaaaaataagagatgaagtgaaagataaggaaggagacgaagaaaagttaccaatggcaaaggattgattatagaagacaatgaaagaaggcctggtgactggtagatttgaggaatattgtacagggagccaggcagacaagccagagacttcatttttatgctcttcacaggaggtcactggcctagccacttgcctgcgtttcaccaggctgttcccctcagctagtcaaccttccctgttcaaaaccaacatgctaacacttggcagaaactattccaagatatggagagaggcctgcccatctctcatgcaggccactggaaatcaactctgggtcaaaaccgacaagatttttatcttttaatgcttattgtaagaggccgggatgtttgaaagagggcagcgtcttaagttgcagactattcaccaaagtccttttctattcaggaatgactaatgactttctttgttccccttttccaaaccaaacagcagcagtattaccttgactccaaagtacagtgattgcaatggacagtcttgagattaagggtctttttagtgctttgctcggaatctggagcaaggaaatgtctagggatgtttgttgaatgaacccacctgccagcagtccagagagctgtcccaaaggcccctgagatgtctattgtctgctttggtagggagccaacctgctagaagactcaagggcatttgccttagagagaaaaaaaaatggcacatttagttccgggcttgggtgctgaagtcactgtgtttttggctcctgaagctccactttcttttttcataccaaataaattgttttggccaatatttaaggatttaaatatttaaggttttgaaggaaaattccaagtttatgcatcattattaagacatcaatatgggcttgggaaaatgttttggtgttgcttaataatactgggagtgtcttctaaagaaagtatacatatatgtacgttgtgtgtttatttctatatattggattggaatggcttcaaagaaggcctgtttgaagtcagcaaattgatttcaatttgggattctcttttagccttaccgttcttggggataagaaatctggagatgaactggcctcagaaacattcaggaagattacgatgggaaatctgtcatcttgtaaagttggatcatttggtgctctctgaactaaattatgctgactaacattctgagcatctgaaaatcattcttcctggttgcctgatagatgaccacacaggagtcatttctatcacatcttatttgggggttggtatagacgccaccagcactgcagggaaaaccaccccctaggaggggtgagacagagagaatgtgagattttgatcattgattgctctttctgaaaggcactgctgaccatagtaggtgtggtgaatgtttgtgtcactgcattgggtattagaacttttgctctgagcatgggctgccctaccctgaagagctgaatcttggcttctgacagaagctctgcatgactcattctcctcaagcatattttccttattttcctatgaaagtatctatagtttgcaacaagaactgtctttggttcaagtgtcagtgtactagaatagatgcttttctgtgagacctgtggaggttggattggggtggggggtgttccttcaaagtacttggaattctttatcaaagaaataaaactcagattctcttctttctagtttacttctaagttccaaatttaaaacaagacccagtttgacatttgcagtaggagataatgtcttgaaccagtgagcttggctatctttctttcatcatagggaggcagggcagtaagttgtattaatttttcctaatcacccaggcaaatattgctttttgttcagtgtcgtgacccacattcatagcttgcaggggatacttctagctgacaaagctggaagtttctaatagaagatgtatcaagataacagaggtgaggaaaggcctgttgaacatctacttctgagaatcattgaggcactcaggtcttgcttttcagtttagtatcttacaaaaggagttggtttcttctcattttagcaatgataaatttagacatcttttttgaaaggccaaaggtagattgagagctcaaatacttacggtgtactctgacagtcttttattctatttttcaagacttattttatatatacatattttttatttccataggttattggggaacaggtagtgtttggttacatgagtaagttctttggtggtgatttgtgagattttggcacacccatcacccaggcagtatgcaccatatttgtagtcttttatccctcactcccttcccacactttccccctgagtccgcagagtccattgtgtcattcttataccttgacatcctcacagcttagctcccacatatcagtgagaacgtacgatgtttggttttctattcctgaattgcttcacttagaatagtggtctccaatctcacccaggccgcttcgaatgccattaattcattcctttttatggatgagtagtattccatcatacatatatatgtttgtgtgtgtgtgtgtgtgtgtgtgtgtgtgtgtgtgtaccacagtttctttatctgctcattgattgatgggcatttgggttgattccactttttgcaattgcaaattgtgctgctataaacatatgtgtgcaagtatctctatctcttatgtataatgacttcttttcctctgggcagatacccagtaatagggctgcgggattactgacattcttttacatgcaacatccctaaaacccaacaagacgtgtaaacactgaagtccaagtctgataattattctttcatttaagaagaacacatgggagtttcacatattatttttaaaaactaattttgtaatatgttaaatggtaggacacattcaattttttttcctcattggagatctgtccatgttctgtctcaatttaatagctacctggcatgtaactgatgcctctgagcctacctctggagtgaataaataaacgtggtccaggtgatttgatttctgccatttgtagtggagaagtaaatctcagtgaagaagattttttttcatatttcttcttttttctttttcttttggcttctatcctcctgcttccatgggactgacaatccagcttctcaaactccacgaaagtcttaatacaaggtgaatcccagagccacaaacagtttggacttcaaacagtgagaaaattggaccgaatgattcggcacacaaagcagaaaactttcatttcctgtaggcaggatggaattgactgttatattaagacttctgaagaagccctgccctggagtaatttcagtgctgtcagacgatgttgacatctagattaacctctgtgcagtgaattttactgcaaagctcattgagatgcatgtgatgtgtctccacaaatcccatctggaacccgtggtggcccaccctcagcaaccctcctctccccactgactctgctttctctgtccataaacttttagcctccaggagcagaggagccgtggctgagatctgaccctaggagagggagtttgggccttctctgaccatgatgctgagccaggctttctgcttagagtgacagagattgtcattgtattgggtttcccctgagggaactgcaaattaaggcatgaaaaacactctgctgatgacagtttcacagcatatcttaatgctgcacaaagtgaaatggtttaaaaggaattagtgtgtcctaagtcattgagccctgctctgggctctgcaatcctctagggattcaagatcccattgcaacaaggtcatgactgcgtctaggccggacagacggattctgaaggacaaggtgtttgtcttttgtgcaggtctttcctatggtccttacaagagaggcagccacagctcctgtttctcccaactgggacaaaagatgtagctgttttctaagcactggtttgtcatctctttaaggagtggttggctccagaatgagccagactcactctataattccacattgtggcacaacagccacatagaacctcaaagctgaaattgcaacttttctgcaaaatagggccattgattacatccaaagttttgagaaaaggccttcaggttagattcagtcaccttcagactccacagagttgctcagcatggttgcaggcgtctttggaaacttacctcagggttttagaatacgttaccctgaagtctggataacaattttctctgagattttactgattctaattccctttgaaattgtttttcctacttgcctcttgtctttcatttaaataataagaatctccttgcatattcttaggtatttctttaggagaattggaagtttccagccaaggacactgtgtttatgaattggaaagatatctttctgggctgaaaaaggtaaaaatcatacggaggcaatcttgatgactttatttaaaagcaattatcagcattgtgttttattctaggtgctcgtgctcatagtgcaaactacattcacgtttttaattatttatgttatgatacttattcgtgtgtacatatatgcgcacacacacacacaaaagcctccacaatcctactggtatacaaatccatatgccccatttgtgtcgcttccgttgatctttgtgtgcatgcatttgcaatgaagtgtgcatcacatgtgtgatttcttaaagtcatctatagctcatctttcctcttattatcgacacataccctttgactttctgcactttggagctcatgaaattaaggctttttcaagggagactacatcttgagtttctttaaaccttcatatttaaagataggactggttttcttcgagaaacaaaaacttgattcagattttatttaattaattaattttctgggggaaatggtactgaatttgttcctgagtaacaaatagtagtaagtgcaaatataaatgtgaagtagtttaagcaggttattgaacctatcttgtggctgaaacaagtagtcagatatgaagctcagacactcaaattgaattagaacgtgaaccaaaacggttagcatggggcaggagaagagcactgggctaggagcaagcctgctagattgtcacttgagtgtccttagcttaatgtgggcatctgacaactagttgcagtcctgtgcccctctaattccagagatggggcaagccaatctgtttctcatccattgctcaagttggttatcactgaaatattatataccatctcaagatcctgccctgaacaagtttgcaaacatcccccccacactgaggagtcagtcccatttttgttttatggcagtttatctcttgtgaccctcctttggaagctgtccaaactctgaacacttgctgtccattccctgctccccaccccaccctttaaggccagggaaaagccagggaaagccctattggctcatctccctctttcctagcctgcacatcaaccaagcttgggatttagcctaggttttcagagaggaaaacaagtgcgttctcccagccatcagtatctttccagccccctggaccaagtgattagtgcctcattagcgcctcatcagttgcttttgcacaagagactctgggacaacaagcctattataatgcctcagtctgtctttttgaagtcaaaccatccttctggcttggttaggaaaggggagcctttctccaaacacgttttcttttaatttcctctgttgttttctggctgttaactatatggataaatggtaaaacataattttcattttttctaggcccctatgagagtggatatgctatatttctatagatgaggagttccacatgtcagcaaagcatttatttatttagtgaagtgactataatattgacacacagatttgcagcagcatccaaatcttgagggggaaaaaaaagcctttttcaatcaaatgaaaccttttctgtgatggcaccagagaggtttatatcttaagcacagaactgaacctgataatatgcttcctttctagaaacaaagagatagaagaaattgctgaaggagctggaagaccaaaccatctattccccaaatcattatgtatcaatagatacttcaactctgttccttaaatggctctgaaaaacacaaataaccatatttactattaaaaacaaattcataatgtctaacccaatcccttattttaatatatatacatattaaaataatcccatgtatatatgattattattatatgggatatatatagtttacatatatataggggtgtgtgtgtatatatatatatatatttacatatatatgtaaatgtatactttttaatgctggggatagttccatattgtttcttttcttgattccttctaatatattcaatgagatttataatttttttcacttttatttctttaggaaagagttggggtctattatgaatgctttctaggataaaatggcaaaacagatggaaagtgtggtagagggaggataatgggaataggaggcagagaacttgcacatttctatttcctgctgagagatcttggaaaaacattgtctgccctttacctcagtttcttaacatacaaaatagaactactatcaaccccctgcatgccacagagggttatttgagccctaaatgagatcataactgttaacatactctgtgaactgtacagggccagacaaatagagcccactctctgggcagttgcatacagtcttgctgggtgctgagctgagtgactgagagccgcttttgagacacattttgaggcatatcttccctaaatttttgctggtgtctgttttttagaagttttgccattagcattttttgctttgagtatctagtgatggagaatgctctaaaaaatacaaggagacagggggattctttatctatttggcttagtcactggaaagggacaattagagtttgttttcaggcttggaactctgacattttgtagcaaaatggcatcttctgctgcatttaattccttgccatcaactcttgctttcataaggttctgtcaatttcaacataatgctttgtaaaaataggactctgtgaaactttctctataaatttggtggtataactaatttttcagggagcatctgaagggataatgatttttaagtggtaccctgttcatgccaggaccagcatttgtacatgggaaaataatcttaagatgagtgaagagcaaatgctagaccacacctttaataggcccaagtgccaacaaaaatacgtgtgagtgggattcccacggagaaatgtttctgaatgaaaatgaaacccttgataatgaatcctgaggccagaatgccaaagtcacagtattctgtcatttacagcccctaaaaaatcccaggtgtttgtgatgacaagccactattataagtactctgtattagtgactacttggcaagtaaaattttctcaaatgttatttttcatagatctccaagcaacaatcacttgcagtgtatctgacaaaatgctatacatgattttctaaaagtattttgatcactccagaaagaaatcagaataaagctgcataccccaaatcctagaaaattcacaaatattttgctcaagttcaggctctctcagcttctcttttctctttaacttttgcctcatacagaggcaatcttgatgacaaaagattgggctcaatttttgtttttcttgtgtagaaaagcaacacctctgtttcggactactgttcagtagacaaaaagcatcccagctttcgaaatgagagtccaaattgggttaccactgagattttaaattatgatgtgaaattggagaaggtgaactgtacagggccagacaaataatagagcccactctctgggcagttgcatgcagtcttgctgggtgctgagctgagagactgagagccgcttttgagacgtgttttgaggcatatcttccttaaatttttgctggtgtctgttttttagaagttttgccattagcatttttcactttgagtatctagccatggagaatgctctaaaaaatacaaggagacagggggatgctttatctatttggcttagtcactggttcagggtgaagtttcataatttattctgataatctggaggggatgacctccttcacagtactgttaaagccttccttgaacaagctcatttcactatataacttcctaaagacaaggctgattatttaaggatttcagagatatcatttggggaataactcaccaggtagagaaagtttgacctgatatgttaacaggcacaacaagaacttatttcaatgctttctcaccatctgccccttctctgagagtttagcctttcttaggatacttccttttccaggctagaaaagattgattgtattcatatcccaaagtaaaggctcctccaattctatcagatgtggaggcaacagaaaatgactcatgttatttttctctcacttcacagcatcaagaactcttcttgtttatgtgggggccatggtggattagcttgaggaactgtcaaattaaaatgaaaggaaagcaagttggggcaagaaaattctcactctgaatgtgaaagaaaatagcagtgttcttctctctggcaaagatttgtgtactgttgggggaagattcatgttatttctcaggtagactttactttttgagattctgtgtgtgtgtgtgtgtgtgtgtgtgtatgtgtgtgtgtgtgtgtgtattttgcctggtggggggttaaaggcagatagaatgtagttgtttatgagtttatactttctctttagcataatagatgccctgtttattttctcagaatgtgacaataaaattaggaaaggagaggaattcagaggcccatgttgcagttcatggcaaagttttacccaaatatttccttcagaaacatttagtcatagcaagccatataaattattgtctgcaactggtatcagaaaaagaaatcagtaggtggggactgtagaccccaatggtgcatctgtttacaatctttcttttccaaggttttaaggttcatgaataacatgagggaattttgggagagctaccacatcagtactttggcacgcattaactgttccacaggaaaactagggttgcttcagggctatttttgtttgaaatgacacacatacaaaaaaaaaaaaagacttttggaacatgttttgaggcctgtcacctgaaatcagcctttgctgaaagagtatttagtttgataagcgggatttcttgcttctcgcatcccagagtgtaaattctgcagcgaagcctgggtgtatgttttcagcaccagggacagcaaacaaccccctgaattgaaggggcccgctatcctgattgacctcccagactaggaagggcagttgttttgttttcctttatttcctatctaccggagcctcaacttggaagactttattcttaaggttcttacatctttcatttattaccaagcctagcttagctgtctctgtcacattcttgacctcctaacaaatgggtttggagtaacactcccagctctcctggctcagagaagtagaaagaaacacactagacttcatttgaagggcatgctttagagtaggctccccctacacaagtctttataacataccactgacttgtaaacccctaaatgaaggactgcttatacacaatcattttccttttaacatttctgcacatttctcacaatgtacaagtctatgtttgactcagtgtgcatctggaggcaatgtttcacagcagttgagcagaagctatgaagtttggggacagaaaaggtcccagtgatgctgctgttattcattttggagactcattgggggcacttctctgattctcagcatccacccttcaaccctgagtgctctttaacagctgtttttgccttaaacaatcacaataagaatgcaaatgactccttgtggcattcttcaggccagactgaagggtgtactgagaaaacaagggtagcagaagcacatgttgtcacattgctttgtgattggccagtttttatatagcacaatgacacacagatatcatcttagagtcatcattgtctactcttaactaattgtcagcatcttctccactcatgtcaggatgaatcctgtgttgggaaggcaagtcagtcactgcaggtttcatcataaatattgccttctatctgacagatgttagaaaacctccattttgaatgcctctgtaccatccaaggctctgaatttcccctatatcttatccctttctttccattccctttccatgttgcttatcataacatccataacatttagtggtgtaagaaaataaggggtttcttttaggaataaatgaggtggaaaaagtaggacagagccagatctcagaggagcaagttcagtggaacgatgatttctaacttgggagtgggtctaagatgtagccatccattccttccattccttgtcctcttgagtgaatctcattccagtgctcacacttgccctgcaaaaaaggccatggcacaagattctctagattatttgtatgaagactggaggtgagcagcatccaacacctctgttagagttctttagaatagaggagttttgtcttatattttaatccaggaaccttcccatatttaaaaagtttagaaataatatgtacagaaaggacctatggggataggaaagcttaataatacaagttattttcccttagaacagaggggaaggagctgcaaagtgactgctaatggaggaacgatctgctggctgggggaaatgtggcctgagactagagatgcagagcaggcatctctagaaggagagatgatgccaatagaagccccaggagggaactggccagcgaatacaattttataaagattctcagtactttttctgaaaaaattcctaaaattttcaagggcgcgtctagccctctgcctctttagaggtgagctcagtgctacttctgggttcttaaggcaaatgccctacaaacaccaaagtcttgtattttccactctcagccggcactggctaagtgggattttttttttcccttccctaagtgaaagggacttgttttcaggagaagtgtcctttaaacatccagctaaaactggaagtaattttttgcatgaatggctttttacagctaggtctacagcagaacaaaacttgtattaaactaagtgctactttacatatcttatttcaagggaaatgaaggatttattgtcgtgtaaatgatatacactgatttgtttcctactggacattacatgtccctttatctctaggctgatgttgtgcagcaaactttcaatatctggaaaatcagctggtacctacttcagtgcattattaggatattacgttccctgagaggaattttgccaatgaagtttaggtactgttgtaactgatttccatcccccctccctaagcttctgtactaagtatatgtaaagctattatatcttgtctgatcccatgtgttcatgtgtgtttcccaatgtttgcataaatatattggcaatctgaagggttagctggcttatggcaactgctgaacaatggtatgtttggcatgtgggacacctgatacctgggcacacctgttctgaggccaagctaattttacagattttggaaaagaaaaaacagcagcaacaacaacagtgtggcttgaattaaggaaagtttaacaatgaatacagtattgccaagtcatcatttatgggtggagacgttgaccacagcagttgaggtgctttcaactggatcttatgccctttattttaatcccaattgatagttcctcatttgtattttatgacttagaaatactcctacgtgatgctcgtttgtttttctcccaggcttctggaaagtgctgatcatgattgcttcctatcatttggatcccaaagttgataacttaacataagtgactgaggttttagtagaactgggttttactaatcgtatctcctccttgaggtgctgttcccttcattcctttcctttatgacaggtgaatgcattggctatgctgattttatttgcatcctggcgagtcttggagaatcaatctcgttaaaatgatgactgcatttgcctttggagaagaggtttattgtctaagtaaaactcttatgtgaaggtgtcatttatgtaaaaaaaaaaaaaaattctaacttgataagatggccacaggttagaggggtgtgttctcagttgatattaagggatatgttgaaaaggcaagtgcccaccctctattcttcatctcacccttcctttctccccaacctcaaaagaaaacaaaaaattatttttttaaattgtattagtaatttatgtttaatacaaaaggatgatttaatggtatcaccaaaggttgtttctcccattgtgcatgtccttcagtctcggccccatacccatcaccccattcttcaccctcatgcttccatcccaaggcaaacatgtgtcttcatcggaatctatgggtgttgaagttaaatgtgggggcagagatttaacaccatgacactaatacaaatcaaccattcttcactttcaaatggttaatcactacaggaaggcgaactcttttcttggtttttgtttaaaaacattttatacatatatatgtatatatgtgtgtgtatgtatggacataggtatgtatatgcacatgtacatgtatatatgtatatatccatcttcaatataaatatatcataagtgagagttgtaaatactccttggtcatatgtctgtctttctcatagtatcatatcttcaatgttatgttaacaactccatttattgattgatgaaatcgtgtgtagacctgtatcctcctgacatagtttatgtagggtctcttctcaaataaagtataaaacaacaa

SEQ ID NO: 20145 - DNA, 2123 bp, Homo sapiens
  source 1..2123: mol_type = unassigned DNA
tcggagatggatgtctctctttgcccagccaagtgtagtttctggcggattttcttgctgggaagcgtctggctggactatgtgggctccgtgctggcttgccctgcaaattgtgtctgcagcaagactgagatcaattgccggcggccggacgatgggaacctcttccccctcctggaagggcaggattcagggaacagcaatgggaacgccagtatcaacatcacggacatctcaaggaatatcacttccatacacatagagaactggcgcagtcttcacacgctcaacgccgtggacatggagctctacaccggacttcaaaagctgaccatcaagaactcaggacttcggagcattcagcccagagcctttgccaagaacccccatttgcgttatataaacctgtcaagtaaccggctcaccacactctcgtggcagctcttccagacgctgagtcttcgggaattgcagttggagcagaactttttcaactgcagctgtgacatccgctggatgcagctctggcaggagcagggggaggccaagctcaacagccagaacctctactgcatcaacgctgatggctcccagcttcctctcttccgcatgaacatcagtcagtgtgaccttcctgagatcagcgtgagccacgtcaacctgaccgtacgagagggtgacaacgctgttatcacttgcaatggctctggatcaccccttcctgatgtggactggatagtcactgggctgcagtccatcaacactcaccagaccaatctgaactggaccaatgttcatgccatcaacttgacgctggtgaatgtgacgagtgaggacaatggcttcaccctgacgtgcattgcagagaacgtggtgggcatgagcaatgccagtgttgccctcactgtctactatcccccacgtgtggtgagcctggaggagcctgagctgcgcctggagcactgcatcgagtttgtggtgcgtggcaaccccccaccaacgctgcactggctgcacaatgggcagcctctgcgggagtccaagatcatccatgtggaatactaccaagagggagagatttccgagggctgcctgctcttcaacaagcccacccactacaacaatggcaactataccctcattgccaaaaacccactgggcacagccaaccagaccatcaatggccacttcctcaaggagccctttccagagagcacggataactttatcttgtttgacgaagtgagtcccacacctcctatcactgtgacccacaaaccagaagaagacacttttggggtatccatagcagttggacttgctgcttttgcctgtgtcctgttggtggttctcttcgtcatgatcaacaaatatggtcgacggtccaaatttggaatgaagggtcccgtggctgtcatcagtggtgaggaggactcagccagcccactgcaccacatcaaccacggcatcaccacgccctcgtcactggatgccgggcccgacactgtggtcattggcatgactcgcatccctgtcattgagaacccccagtacttccgtcagggacacaactgccacaagccggacacgtgggtcttttcaaacatagacaatcatgggatattaaacttgaaggacaatagagatcatctagtcccatcaactcactatatatatgaggaacctgaggtccagagtggggaagtgtcttacccaaggtcacatggtttcagagaaattatgttgaatccaataagccttcccggacattccaagcctcttaaccatggcatctatgttgaggatgtcaatgtttatttcagcaaaggacgtcatggcttttaaaaactccttttaagcctccttgttttgatgtcaccttggtaggctgggccctctgagaggttggaagctctaggcattgttctctttggatccagggatgctaagtagaaactgcatgagccaccagtgccccggcaccctttaacaccaccagatgggtgttttcccccatccaccactggcagggttgccccttccctccaatcatcactgtgctccttttttcccggcctacgaggcagctcctgccactatctttagagccaataaagagaatt

SEQ ID NO: 20146 - DNA, 2287 bp, Homo sapiens
  source 1..2287: mol_type = unassigned DNA
attaagctgtccacattcataaggcacactccaggtctgcaggagggagcatgagggattcaggggacgcccttgtcccctgtacacacctaggggccggttcgactacagtagacacatagagaactggcgcagtcttcacacgctcaacgccgtggacatggagctctacaccggacttcaaaagctgaccatcaagaactcaggacttcggagcattcagcccagagcctttgccaagaacccccatttgcgttatataaacctgtcaagtaaccggctcaccacactctcgtggcagctcttccagacgctgagtcttcgggaattgcagttggagcagaactttttcaactgcagctgtgacatccgctggatgcagctctggcaggagcagggggaggccaagctcaacagccagaacctctactgcatcaacgctgatggctcccagcttcctctcttccgcatgaacatcagtcagtgtgaccttcctgagatcagcgtgagccacgtcaacctgaccgtacgagagggtgacaacgctgttatcacttgcaatggctctggatcaccccttcctgatgtggactggatagtcactgggctgcagtccatcaacactcaccagaccaatctgaactggaccaatgttcatgccatcaacttgacgctggtgaatgtgacgagtgaggacaatggcttcaccctgacgtgcattgcagagaacgtggtgggcatgagcaatgccagtgttgccctcactgtctactatcccccacgtgtggtgagcctggaggagcctgagctgcgcctggagcactgcatcgagtttgtggtgcgtggcaaccccccaccaacgctgcactggctgcacaatgggcagcctctgcgggagtccaagatcatccatgtggaatactaccaagagggagagatttccgagggctgcctgctcttcaacaagcccacccactacaacaatggcaactataccctcattgccaaaaacccactgggcacagccaaccagaccatcaatggccacttcctcaaggagccctttccagagagcacggataactttatcttgtttgacgaagtgagtcccacacctcctatcactgtgacccacaaaccagaagaagacacttttggggtatccatagcagttggacttgctgcttttgcctgtgtcctgttggtggttctcttcgtcatgatcaacaaatatggtcgacggtccaaatttggaatgaagggtcccgtggctgtcatcagtggtgaggaggactcagccagcccactgcaccacatcaaccacggcatcaccacgccctcgtcactggatgccgggcccgacactgtggtcattggcatgactcgcatccctgtcattgagaacccccagtacttccgtcagggacacaactgccacaagccggacacgtatgtgcagcacattaagaggagagacatcgtgctgaagcgagaactgggtgagggagcctttggaaaggtcttcctggccgagtgctacaacctcagcccgaccaaggacaagatgcttgtggctgtgaaggccctgaaggatcccaccctggctgcccggaaggatttccagagggaggccgagctgctcaccaacctgcagcatgagcacattgtcaagttctatggagtgtgcggcgatggggaccccctcatcatggtctttgaatacatgaagcatggagacctgaataagttcctcagggcccatgggccagatgcaatgatccttgtggatggacagccacgccaggccaagggtgagctggggctctcccaaatgctccacattgccagtcagatcgcctcgggtatggtgtacctggcctcccagcactttgtgcaccgagacctggccaccaggaactgcctggttggagcgaatctgctagtgaagattggggacttcggcatgtccagagatgtctacagcacggattattacagggttgtgcaggcatgaggactgatactggggaaaaaagacggggaagatgccccataagaaaattctgagacgttgaagcatgcttatattggattctgtcctcgggaaaggagaggaaaaggctgaaggagaccattgaatctggtgttgagtcattcacgtctctctactcctgtggagggcccttacggatgtgtcataacaggatctccttttccttcctcaagtgcaaaaggccttttttttttttttcctgagacaaactgaatatataacataaaaagatac

SEQ ID NO: 20147 - DNA, 1167 bp, Homo sapiens
  source 1..1167: mol_type = unassigned DNA
tgccagaataacacagactcagctgccagagcctgctcttaacacctgtgtttccttttcagatcttacaggtgaacaaggtgatgtccatcttgttttatgtgatatttctcgcttatctccgtggcatccaaggtaacaacatggatcaaaggagtttgccagaagactcgctcaattccctcattattaagctgatccaggcagatattttgaaaaacaagctctccaagcagatggtggacgttaaggaaaattaccagagcaccctgcccaaagctgaggctccccgagagccggagcggggagggcccgccaagtcagcattccagccggtgattgcaatggacaccgaactgctgcgacaacagagacgctacaactcaccgcgggtcctgctgagcgacagcacccccttggagcccccgcccttgtatctcatggaggattacgtgggcagccccgtggtggcgaacagaacatcacggcggaaacggtacgcggagcataagagtcaccgaggggagtactcggtatgtgacagtgagagtctgtgggtgaccgacaagtcatcggccatcgacattcggggacaccaggtcacggtgctgggggagatcaaaacgggcaactctcccgtcaaacaatatttttatgaaacgcgatgtaaggaagccaggccggtcaaaaacggttgcaggggtattgatgataaacactggaactctcagtgcaaaacatcccaaacctacgtccgagcactgacttcagagaacaataaactcgtgggctggcggtggatacggatagacacgtcctgtgtgtgtgccttgtcgagaaaaatcggaagaacatgaattggcatctctccccatatataaattattactttaaattatatgatatgcatgtagcatataaatgtttatattgtttttatatattataagttgacctttatttattaaacttcagcaaccctacagtatataagcttttttctcaataaaatcagtgtgcttgccttccctcaggcctctcccatctgttaaaacttgttttgtgatccggctctcaggagtcactctgtaaaatctgtgtacaccagtattttgcattcagtattgtcaaggccatgactgttgttttagtaaacttgttaaaatc

SEQ ID NO: 20148 - DNA, 1141 bp, Homo sapiens
  source 1..1141: mol_type = unassigned DNA
gagttgaagctcctctcccttccgaacagctccgcgcaccgccccgcgacgcagcccggcgcaactactttcttctctctcctttctttcttcctctcctttttcccctgctgggtagtggctgcggcggggtgggggagactttgaatgaccgagctcgcgtccacctttctcttcatgtcgacgtccctggaaacggccacacggatgccatggttacttttgccacgatcttacaggtgaacaaggtgatgtccatcttgttttatgtgatatttctcgcttatctccgtggcatccaaggtaacaacatggatcaaaggagtttgccagaagactcgctcaattccctcattattaagctgatccaggcagatattttgaaaaacaagctctccaagcagatggtggacgttaaggaaaattaccagagcaccctgcccaaagctgaggctccccgagagccggagcggggagggcccgccaagtcagcattccagccggtgattgcaatggacaccgaactgctgcgacaacagagacgctacaactcaccgcgggtcctgctgagcgacagcacccccttggagcccccgcccttgtatctcatggaggattacgtgggcagccccgtggtggcgaacagaacatcacggcggaaacggtacgcggagcataagagtcaccgaggggagtactcggtatgtgacagtgagagtctgtgggtgaccgacaagtcatcggccatcgacattcggggacaccaggtcacggtgctgggggagatcaaaacgggcaactctcccgtcaaacaatatttttatgaaacgcgatgtaaggaagccaggccggtcaaaaacggttgcaggggtattgatgataaacactggaactctcagtgcaaaacatcccaaacctacgtccgagcactgacttcagagaacaataaactcgtgggctggcggtggatacggatagacacgtcctgtgtgtgtgccttgtcgagaaaaatcggaagaacatgaattggcatctctccccatatataaattattactttaaattatatgatatgcatgtagcatataaatgtttatattgtttttatatattataagttgacctttatttattaaacttc

SEQ ID NO: 20149 - DNA, 999 bp, Homo sapiens
  source 1..999: mol_type = unassigned DNA
cctaggtggttgccccctccctctcctgagatgtcaggaaggagggggccacctgtgtcctccacaggggccccccgaagcctggggactcccagccccagagctccgaggcggaggaggtgctgacaggtgctccgagagatgctccctctcccctcatgctccctccccatcctcctccttttcctcctccccagtgtgccaattgagtcccaacccccaccctcaacattgcccccttttctggcccctgagtgggaccttctctccccccgagtagtcctgtctaggggtgcccctgctgggccccctctgctcttcctgctggaggctggggcctttcgggagtcagcaggtgccccggccaaccgcagccggcgtggggtgagcgaaactgcaccagcgagtcgtcggggtgagctggctgtgtgcgatgcagtcagtggctgggtgacagaccgccggaccgctgtggacttgcgtgggcgcgaggtggaggtgttgggcgaggtgcctgcagctggcggcagtcccctccgccagtacttctttgaaacccgctgcaaggctgataacgctgaggaaggtggcccgggggcaggtggagggggctgccggggagtggacaggaggcactgggtatctgagtgcaaggccaagcagtcctatgtgcgggcattgaccgctgatgcccagggccgtgtgggctggcgatggattcgaattgacactgcctgcgtctgcacactcctcagccggactggccgggcctgagacccatgcccaggaaaataacagagctggatgctgagagacctcagggatggcccagctgatctaaggaccccagtttgggaactcatcaaataatcacaaaatcacaattctctgattttgagctcaatctctgcaggatgggtgaaaccacatggggttttggaggttgaataggagttctcctggagcaacttgagggtaataatgatgatgatataataa

SEQ ID NO: 20150 - DNA, 1103 bp, Homo sapiens
  source 1..1103: mol_type = unassigned DNA
ccacactcagtctggcctcggggcctttgcactggctgtgtcccctgcctgtgatgccattctcctctgcctggccaactcctacgtttattcaagtctggaccttgtcatcggctcctcaggaaggcactccgggacccccagatgggggcggttccctgtgactcctggcacggaggccaaccccttccttgttcaatggttccttgagggaccattcccatgtgattatcgaccattcggcaggcgttcaaagtcaaaggccccacactgagtcctggcccagcgccctgtgcccgttggctgctggagggacagacggggcgtgcggctgaccatcccgtgcccgcaggctgaggatgcagcgctggaaggcggcggccttggcctcagtgctctgcagctccgtgctgtccatctggatgtgtcgagagggcctgcttctcagccaccgcctcggacctgcgctggtccccctgcaccgcctgcctcgaaccctggacgcccggattgcccgcctggcccagtaccgtgcactcctgcagggggccccggatgcgatggagctgcgcgagctgacgccctgggctgggcggcccccaggtccgcgccgtcgggcggggccccggcggcggcgcgcgcgtgcgcggttgggggcgcggccttgcgggctgcgcgagctggaggtgcgcgtgagcgagctgggcctgggctacgcgtccgacgagacggtgctgttccgctactgcgcaggcgcctgcgaggctgccgcgcgcgtctacgacctcgggctgcgacgactgcgccagcggcggcgcctgcggcgggagcgggtgcgcgcgcagccctgctgccgcccgacggcctacgaggacgaggtgtccttcctggacgcgcacagccgctaccacacggtgcacgagctgtcggcgcgcgagtgcgcctgcgtgtgaccctacctcactcggccggcgcggcggccactccccccgcctcgacggcaccactggccggccccgcgaaagactgcgcgtgcgtagagcacgccggcgcggccccgggactctcgcgataactgtactgagataaagtgtggcaactcg

SEQ ID NO: 20151 - DNA, 4291 bp, Homo sapiens
  source 1..4291: mol_type = unassigned DNA
agagcagcgacagagccttcctcaaacctgtagtgactgccacactttgcaaggacaccgtagagggggcatgtccgcgctccaacttcctcccgacgcagcctctgattggctcctgggcttataagaaacgcgtgaatgagcagctgccgcgggcagaaagttgccggaggtctccgggtggtatcgccctttcctctttgccagcccgctggcgagccgagccagggcaagatgaggtcgtcctgtgtcctgctcaccgccctggtggcgctggccgcctattacgtctacatcccgctgcctggctccgtgtccgacccctggaagctgatgctgctggacgccactttccggggtgcacagcaagtgagtaacctgatccactacctgggactgagccatcacctgctggcactgaattttatcattgtttcttttggcaaaaaaagcgcgtggtcttctgcccaagtgaaggtgaccgacacagactttgatggtgtggaagtcagagtgtttgaaggccctccgaagcccgaagagccactgaaacgcagcgtcgtttatatccacggaggaggctgggccttggcaagtgcaaaaatcaggtattatgatgagctgtgtacagcaatggctgaggaattgaatgctgtcattgtttccattgaatacaggctagttccaaaggtttattttcctgagcaaattcatgatgttgtacgggccacaaagtatttcctgaagccagaagtcttacagaagtatatggttgatccaggcagaatttgcatttctggtgacagtgctggtggaaatctggctgctgcccttggacaacagtttactcaagatgccagcctaaaaaataagctcaaactacaagctttaatttatccagttcttcaagctttagattttaacacaccatcttatcagcaaaatgtgaacaccccaatcctgccccgctatgtcatggtgaagtattgggtggactacttcaaaggcaactatgactttgtgcaggcaatgatcgttaacaatcacacttcacttgatgtggaagaggctgctgctgtcagggcccgtctaaactggacatccctcttgcctgcatccttcacaaagaactacaagcctgttgtacagaccacaggcaatgccaggattgtccaggagcttcctcagttgctggatgcccgctccgccccactcattgcagaccaggcagtgctgcagctcctcccaaagacctacattctgacgtgtgagcatgatgtcctcagagacgatggcatcatgtatgccaagcgtttggagagtgccggtgtggaggtgaccctggatcactttgaggatggctttcacggatgtatgattttcactagctggcccaccaacttctcagtgggaatccggactaggaatagttacatcaagtggctagatcaaaacctgtaaaggagcaaaacttccagaagcctcgagcccctcttgacctcctacacctgctttggaaagacatgcactttttagttgactaattcttcctcccattcccctctacttgcgagttatggaatttctattccataactgaagtctttatgataacctaatttttaaaaatgaatttgactaacttaagtgcaaaacatgtaaatttggttcccagagtgggccaatctctctgttcttgttatcttagccaactatactgatacctacagctacagaaagcaggactaggaactggaaataactttgggtcctgccttcattaggacgttctttttagaagcagttcttccagctctggatcatagagtgacctttaataagttaaaaaaacgaggactccttaattctgctagagttaaccttgagttcagagcagtattaaatgcgtgcactttcaggtcagtactggggaccaagtaccctctggtcttttgtgaatggatggttttgtttcctatgggaattttggcaaaggttttctggaaagaacaagtttctcaaaggactttcttcctctagaatgttcattttatgagatcgctatctgtaagtccagttggattacaggaatacttgaaagttactttctaccactattagaaaatatgaagtcgcatgcactggatatctatatatcattaggtttttgttgtgtttttggttatgctgtcccccttctccttggggagatatttgggagcaaacttatttagatttagagtaaacttttcattatagagcaagtaaaaacagacaaatgaaacaacctagtgtttcacataaaaatacttctgacataaagtaccaagagcagtgtgaatatacttggcatagtcaaaaaagaaaatacatttaatattagttcaaaattgttaaaaatacctttagaaggtctagtctattattgaaaactcaattttttcacttatatggctttaaaatggagctattttgctacaatataatgtattgtttatttttttaagttatttaatgttaatatacatagctagacttaaggtttttcagaaagatgtccataataaatattaaaaacaatggtattttttaaaaaactgccttagggttttaaaaccttccctacagttataaccacgtgtaattttgtggaaatgatataacagctattaatactactataacataggcataaatattttcgtgtttatatgcatatacaagttaaaataattagaaactatgactgcgcctagtaaagtcatctaggtttatagttcagtagcttaggcaaggcacacactgctcatctccgctttttagggtcagaggaacacaagctcatgttctgagtgaagggcgtacactggcacctggtgttgcctagatcccccatctcctccttccagccaggtctggaagtttcaacagcccaagcttaacttcatgtaaagtcttcactgccagtgggaacatctttgacacaacaagacactccaattgtgatttgagttgaggatctctgcctgccttcctgccgtccttccttcttccccgatccatgctacttttaggggctgcggagagcagcagcagagctgagtaatgatacagggcaccacggagagaaagtagaaccatttcactcctgggaagatggggtatttcccacttccagcaacgaaataacaaatgaaaagttgcatacttattgatgtattgtatgagccagtagcattttatgtacaaaacagaagtcaatgcaacagtatgtatgtgtgcctgtgtgtgtataaaaataaccattgaagctaacttgctaatgtacttaggcaagccacttcccatctctgggcctcgtctttcctccctctaaaatcaaagagctgaattatgtgatccttgaggtctcttccacttataataccaactgtcttgtcagactggcaaattatattggcctctccttatgtggtggtttttttggtaggtcatagttccttatacacagacacctgcatcatcgaaggtctttttttcctaaaaaaaaaaaatgggattttagttcttattctgtgataactatcctcctcatataatactattctttttgacaccatttgaaggaaccaatatttggaccttattttgaggttgtctgtctcgaagaaaaagaaaataaaatgtataggcagggttccttcaattggcattttccccagaattgtgagccaaagcctatagtaattgcagacagcaaatgattccggatctctaaaaggctctctcagatgaaaagggagtaaaggaaaaaagaggtcaaccactgtttctgataatgtacttgagtttcattgttcttttagtttgtattcttataaaaaatgtttacactctgcagattgattttttttttttagtactgtggctttcttttcctattttatgaaaaaaatgataatctttttgtaaaattgtctgtgaaatataaacattaatatataaagaaaaaccttgaagtgctgtatagtgaagtataaattaatgttttattgatttgtgaagaatttaagactattatataattatcttggtggatctattttatgcatgaccttttaacctttgactttgcttatttcccactacgaaggggaaggtagattttatgaatgattttaatagcaaatatattttataaagtgaaaatccagtgtggaggtagcaaagcatctatctattctgaatcatgtttggaaataaaattgctccatctgggaatgtgctttca

SEQ ID NO: 20152 - DNA, 4687 bp, Homo sapiens
  source 1..4687: mol_type = unassigned DNA
agagcagcgacagagccttcctcaaacctgtagtgactgccacactttgcaaggacaccgtagagggggcatgtccgcgctccaacttcctcccgacgcagcctctgattggctcctgggcttataagaaacgcgtgaatgagcagctgccgcgggcagaaagttgccggaggtctccgggtggtatcgccctttcctctttgccagcccgctggcgagccgagccagggcaagatgaggtcgtcctgtgtcctgctcaccgccctggtggcgctggccgcctattacgtctacatcccgctgcctggctccgtgtccgacccctggaagctgatgctgctggacgccactttccggggtgcacagcaagtgagtaacctgatccactacctgggactgagccatcacctgctggcactgaattttatcattgtttcttttggcaaaaaaagcgcgtggtcttctgcccaagtgaaggtgaccgacacagactttgatggtgtggaagtcagagtgtttgaaggccctccgaagcccgaagagccactgaaacgcagcgtcgtttatatccacggaggaggctgggccttggcaagtgcaaaaatcaggtattatgatgagctgtgtacagcaatggctgaggaattgaatgctgtcattgtttccattgaatacaggctagttccaaaggtttattttcctgagcaaattcatgatgttgtacgggccacaaagtatttcctgaagccagaagtcttacagaagtatatggttgatccaggcagaatttgcatttctggtgacagtgctggtggaaatctggctgctgcccttggacaacagtttactcaagatgccagcctaaaaaataagctcaaactacaagctttaatttatccagttcttcaagctttagattttaacacaccatcttatcagcaaaatgtgaacaccccaatcctgccccgctatgtcatggtgaagtattgggtggactacttcaaaggcaactatgactttgtgcaggcaatgatcgttaacaatcacacttcacttgatgtggaagaggctgctgctgtcagggcccgtctaaactggacatccctcttgcctgcatccttcacaaagaactacaagcctgttgtacagaccacaggcaatgccaggattgtccaggagcttcctcagttgctggatgcccgctccgccccactcattgcagaccaggcagtgctgcagctcctcccaaagacctacattctgacgtgtgagcatgatgtcctcagagacgatggcatcatgtatgccaagcgtttggagagtgccggtgtggaggtgaccctggatcactttgaggatggctttcacggatgtatgattttcactagctggcccaccaacttctcagtgggaatccggactaggaatagttacatcaagtggctagatcaaaacctgtaaaggagcaaaacttccagaagcctcgagcccctcttgacctcctacacctgctttggaaagacatgcactttttagttgactaattcttcctcccattcccctctacttgcgagttatggaatttctattccataactgaagtctttatgataacctaatttttaaaaatgaatttgactaacttaagtgcaaaacatgtaaatttggttcccagagtgggccaatctctctgttcttgttatcttagccaactatactgatacctacagctacagaaagcaggactaggaactggaaataactttgggtcctgccttcattaggacgttctttttagaagcagttcttccagctctggatcatagagtgacctttaataagttaaaaaaacgaggactccttaattctgctagagttaaccttgagttcagagcagtattaaatgcgtgcactttcaggtcagtactggggaccaagtaccctctggtcttttgtgaatggatggttttgtttcctatgggaattttggcaaaggttttctggaaagaacaagtttctcaaaggactttcttcctctagaatgttcattttatgagatcgctatctgtaagtccagttggattacaggaatacttgaaagttactttctaccactattagaaaatatgaagtcgcatgcactggatatctatatatcattaggtttttgttgtgtttttggttatgctgtcccccttctccttggggagatatttgggagcaaacttatttagatttagagtaaacttttcattatagagcaagtaaaaacagacaaatgaaacaacctagtgtttcacataaaaatacttctgacataaagtaccaagagcagtgtgaatatacttggcatagtcaaaaaagaaaatacatttaatattagttcaaaattgttaaaaatacctttagaaggtctagtctattattgaaaactcaattttttcacttatatggctttaaaatggagctattttgctacaatataatgtattgtttatttttttaagttatttaatgttaatatacatagctagacttaaggtttttcagaaagatgtccataataaatattaaaaacaatggtattttttaaaaaactgccttagggttttaaaaccttccctacagttataaccacgtgtaattttgtggaaatgatataacagctattaatactactataacataggcataaatattttcgtgtttatatgcatatacaagttaaaataattagaaactatgactgcgcctagtaaagtcatctaggtttatagttcagtagcttaggcaaggcacacactgctcatctccgctttttagggtcagaggaacacaagctcatgttctgagtgaagggcgtacactggcacctggtgttgcctagatcccccatctcctccttccagccaggtctggaagtttcaacagcccaagcttaacttcatgtaaagtcttcactgccagtgggaacatctttgacacaacaagacactccaattgtgatttgagttgaggatctctgcctgccttcctgccgtccttccttcttccccgatccatgctacttttaggggctgcggagagcagcagcagagctgagtaatgatacagggcaccacggagagaaagtagaaccatttcactcctgggaagatggggtatttcccacttccagcaacgaaataacaaatgaaaagttgcatacttattgatgtattgtatgagccagtagcattttatgtacaaaacagaagtcaatgcaacagtatgtatgtgtgcctgtgtgtgtataaaaataaccattgaagctaacttgctaatgtacttaggcaagccacttcccatctctgggcctcgtctttcctccctctaaaatcaaagagctgaattatgtgatccttgaggtctcttccacttataataccaactgtcttgtcagactggcaaattatattggcctctccttatgtggtggtttttttggtaggtcatagttccttatacacagacacctgcatcatcgaaggtctttttttcctaaaaaaaaaaaatgggattttagttcttattctgtgataactatcctcctcatataatactattctttttgacaccatttgaaggaaccaatatttggaccttattttgaggttgtctgtctcgaagaaaaagaaaataaaatgtataggcagggttccttcaattggcattttccccagaattgtgagccaaagcctatagtaattgcagacagcaaatgattccggatctctaaaaggctctctcagatgaaaagggagtaaaggaaaaaagaggtcaaccactgtttctgataatgtacttgagtttcattgttcttttagtttgtattcttataaaaaatgtttacactctgcagattgattttttttttttagtactgtggctttcttttcctattttatgaaaaaaatgataatctttttgtaaaattgtctgtgaaatataaacattaatatataaagaaaaaccttgaagtgctgtatagtgaagtataaattaatgttttattgatttgtgaagaatttaagactattatataattatcttggtggatctattttatgcatgaccttttaacctttgactttgcttatttcccactacgaaggggaaggtagattttatgaatgattttaatagcaaatatattttataaagtgaaaatccagtgtggaggtagcaaagcatctatctattctgaatcatgtttggaaataaaattgctccatctgggaatgtgctttcattttcccgtctcattttctgtttcccatttgaaaacagtgttctcttctcttctttctgtatgccaaattgccagccacaattctttcccaatcttctgcccagtggagtactccagctgtctttcctttagagaggtggttcagtggcctccttgatgacatttgtttcatgtctggatacagtatgtgttgccctcctttggactggctagaatattcataaaagccaggcaggccctgggactattttgggaccttcaatacacatgttaggaaaaggatgatcataatgccaagagtttgagctgaattgtttcagccaaagcatcactatcactgaaggcaggttctcaaactgaccttgtcattacaaataaatctaatttcacacttga

SEQ ID NO: 20153 - DNA, 4315 bp, Homo sapiens
  source 1..4315: mol_type = unassigned DNA
agagcagcgacagagccttcctcaaacctgtagtgactgccacactttgcaaggacaccgtagagggggcatgtccgcgctccaacttcctcccgacgcagcctctgattggctcctgggcttataagaaacgcgtgaatgagcagctgccgcgggcagaaagttgccggaggtctccgggtggtatcgccctttcctctttgccagcccgctggcgagccgagccagggcaagatgaggtcgtcctgtgtcctgctcaccgccctggtggcgctggccgcctattacgtctacatcccgctgcctggctccgtgtccgacccctggaagctgatgctgctggacgccactttccggggtgcacagcaagtgagtaacctgatccactacctgggactgagccatcacctgctggcactgaattttatcattgtttcttttggcaaaaaaagcgcgtggtcttctgcccaagtgaaggtgaccgacacagactttgatggtgtggaagtcagagtgtttgaaggccctccgaagcccgaagagccactgaaacgcagcgtcgtttatatccacggaggaggctgggccttggcaagtgcaagtgcgtcctggtcaccttcagatgaaatcaggtattatgatgagctgtgtacagcaatggctgaggaattgaatgctgtcattgtttccattgaatacaggctagttccaaaggtttattttcctgagcaaattcatgatgttgtacgggccacaaagtatttcctgaagccagaagtcttacagaagtatatggttgatccaggcagaatttgcatttctggtgacagtgctggtggaaatctggctgctgcccttggacaacagtttactcaagatgccagcctaaaaaataagctcaaactacaagctttaatttatccagttcttcaagctttagattttaacacaccatcttatcagcaaaatgtgaacaccccaatcctgccccgctatgtcatggtgaagtattgggtggactacttcaaaggcaactatgactttgtgcaggcaatgatcgttaacaatcacacttcacttgatgtggaagaggctgctgctgtcagggcccgtctaaactggacatccctcttgcctgcatccttcacaaagaactacaagcctgttgtacagaccacaggcaatgccaggattgtccaggagcttcctcagttgctggatgcccgctccgccccactcattgcagaccaggcagtgctgcagctcctcccaaagacctacattctgacgtgtgagcatgatgtcctcagagacgatggcatcatgtatgccaagcgtttggagagtgccggtgtggaggtgaccctggatcactttgaggatggctttcacggatgtatgattttcactagctggcccaccaacttctcagtgggaatccggactaggaatagttacatcaagtggctagatcaaaacctgtaaaggagcaaaacttccagaagcctcgagcccctcttgacctcctacacctgctttggaaagacatgcactttttagttgactaattcttcctcccattcccctctacttgcgagttatggaatttctattccataactgaagtctttatgataacctaatttttaaaaatgaatttgactaacttaagtgcaaaacatgtaaatttggttcccagagtgggccaatctctctgttcttgttatcttagccaactatactgatacctacagctacagaaagcaggactaggaactggaaataactttgggtcctgccttcattaggacgttctttttagaagcagttcttccagctctggatcatagagtgacctttaataagttaaaaaaacgaggactccttaattctgctagagttaaccttgagttcagagcagtattaaatgcgtgcactttcaggtcagtactggggaccaagtaccctctggtcttttgtgaatggatggttttgtttcctatgggaattttggcaaaggttttctggaaagaacaagtttctcaaaggactttcttcctctagaatgttcattttatgagatcgctatctgtaagtccagttggattacaggaatacttgaaagttactttctaccactattagaaaatatgaagtcgcatgcactggatatctatatatcattaggtttttgttgtgtttttggttatgctgtcccccttctccttggggagatatttgggagcaaacttatttagatttagagtaaacttttcattatagagcaagtaaaaacagacaaatgaaacaacctagtgtttcacataaaaatacttctgacataaagtaccaagagcagtgtgaatatacttggcatagtcaaaaaagaaaatacatttaatattagttcaaaattgttaaaaatacctttagaaggtctagtctattattgaaaactcaattttttcacttatatggctttaaaatggagctattttgctacaatataatgtattgtttatttttttaagttatttaatgttaatatacatagctagacttaaggtttttcagaaagatgtccataataaatattaaaaacaatggtattttttaaaaaactgccttagggttttaaaaccttccctacagttataaccacgtgtaattttgtggaaatgatataacagctattaatactactataacataggcataaatattttcgtgtttatatgcatatacaagttaaaataattagaaactatgactgcgcctagtaaagtcatctaggtttatagttcagtagcttaggcaaggcacacactgctcatctccgctttttagggtcagaggaacacaagctcatgttctgagtgaagggcgtacactggcacctggtgttgcctagatcccccatctcctccttccagccaggtctggaagtttcaacagcccaagcttaacttcatgtaaagtcttcactgccagtgggaacatctttgacacaacaagacactccaattgtgatttgagttgaggatctctgcctgccttcctgccgtccttccttcttccccgatccatgctacttttaggggctgcggagagcagcagcagagctgagtaatgatacagggcaccacggagagaaagtagaaccatttcactcctgggaagatggggtatttcccacttccagcaacgaaataacaaatgaaaagttgcatacttattgatgtattgtatgagccagtagcattttatgtacaaaacagaagtcaatgcaacagtatgtatgtgtgcctgtgtgtgtataaaaataaccattgaagctaacttgctaatgtacttaggcaagccacttcccatctctgggcctcgtctttcctccctctaaaatcaaagagctgaattatgtgatccttgaggtctcttccacttataataccaactgtcttgtcagactggcaaattatattggcctctccttatgtggtggtttttttggtaggtcatagttccttatacacagacacctgcatcatcgaaggtctttttttcctaaaaaaaaaaaatgggattttagttcttattctgtgataactatcctcctcatataatactattctttttgacaccatttgaaggaaccaatatttggaccttattttgaggttgtctgtctcgaagaaaaagaaaataaaatgtataggcagggttccttcaattggcattttccccagaattgtgagccaaagcctatagtaattgcagacagcaaatgattccggatctctaaaaggctctctcagatgaaaagggagtaaaggaaaaaagaggtcaaccactgtttctgataatgtacttgagtttcattgttcttttagtttgtattcttataaaaaatgtttacactctgcagattgattttttttttttagtactgtggctttcttttcctattttatgaaaaaaatgataatctttttgtaaaattgtctgtgaaatataaacattaatatataaagaaaaaccttgaagtgctgtatagtgaagtataaattaatgttttattgatttgtgaagaatttaagactattatataattatcttggtggatctattttatgcatgaccttttaacctttgactttgcttatttcccactacgaaggggaaggtagattttatgaatgattttaatagcaaatatattttataaagtgaaaatccagtgtggaggtagcaaagcatctatctattctgaatcatgtttggaaataaaattgctccatctgggaatgtgctttca

SEQ ID NO: 20154 - DNA, 4062 bp, Homo sapiens
  source 1..4062: mol_type = unassigned DNA
agagcagcgacagagccttcctcaaacctgtagtgactgccacactttgcaaggacaccgtagagggggcatgtccgcgctccaacttcctcccgacgcagcctctgattggctcctgggcttataagaaacgcgtgaatgagcagctgccgcgggcagaaagttgccggaggtctccgggtggtatcgccctttcctctttgccagcccgctggcgagccgagccagggcaagatgaggtcgtcctgtgtcctgctcaccgccctggtggcgctggccgcctattacgtctacatcccgctgcctggctccgtgtccgacccctggaagctgatgctgctggacgccactttccggggtgcacagcaagtgaaatcaggtattatgatgagctgtgtacagcaatggctgaggaattgaatgctgtcattgtttccattgaatacaggctagttccaaaggtttattttcctgagcaaattcatgatgttgtacgggccacaaagtatttcctgaagccagaagtcttacagaagtatatggttgatccaggcagaatttgcatttctggtgacagtgctggtggaaatctggctgctgcccttggacaacagtttactcaagatgccagcctaaaaaataagctcaaactacaagctttaatttatccagttcttcaagctttagattttaacacaccatcttatcagcaaaatgtgaacaccccaatcctgccccgctatgtcatggtgaagtattgggtggactacttcaaaggcaactatgactttgtgcaggcaatgatcgttaacaatcacacttcacttgatgtggaagaggctgctgctgtcagggcccgtctaaactggacatccctcttgcctgcatccttcacaaagaactacaagcctgttgtacagaccacaggcaatgccaggattgtccaggagcttcctcagttgctggatgcccgctccgccccactcattgcagaccaggcagtgctgcagctcctcccaaagacctacattctgacgtgtgagcatgatgtcctcagagacgatggcatcatgtatgccaagcgtttggagagtgccggtgtggaggtgaccctggatcactttgaggatggctttcacggatgtatgattttcactagctggcccaccaacttctcagtgggaatccggactaggaatagttacatcaagtggctagatcaaaacctgtaaaggagcaaaacttccagaagcctcgagcccctcttgacctcctacacctgctttggaaagacatgcactttttagttgactaattcttcctcccattcccctctacttgcgagttatggaatttctattccataactgaagtctttatgataacctaatttttaaaaatgaatttgactaacttaagtgcaaaacatgtaaatttggttcccagagtgggccaatctctctgttcttgttatcttagccaactatactgatacctacagctacagaaagcaggactaggaactggaaataactttgggtcctgccttcattaggacgttctttttagaagcagttcttccagctctggatcatagagtgacctttaataagttaaaaaaacgaggactccttaattctgctagagttaaccttgagttcagagcagtattaaatgcgtgcactttcaggtcagtactggggaccaagtaccctctggtcttttgtgaatggatggttttgtttcctatgggaattttggcaaaggttttctggaaagaacaagtttctcaaaggactttcttcctctagaatgttcattttatgagatcgctatctgtaagtccagttggattacaggaatacttgaaagttactttctaccactattagaaaatatgaagtcgcatgcactggatatctatatatcattaggtttttgttgtgtttttggttatgctgtcccccttctccttggggagatatttgggagcaaacttatttagatttagagtaaacttttcattatagagcaagtaaaaacagacaaatgaaacaacctagtgtttcacataaaaatacttctgacataaagtaccaagagcagtgtgaatatacttggcatagtcaaaaaagaaaatacatttaatattagttcaaaattgttaaaaatacctttagaaggtctagtctattattgaaaactcaattttttcacttatatggctttaaaatggagctattttgctacaatataatgtattgtttatttttttaagttatttaatgttaatatacatagctagacttaaggtttttcagaaagatgtccataataaatattaaaaacaatggtattttttaaaaaactgccttagggttttaaaaccttccctacagttataaccacgtgtaattttgtggaaatgatataacagctattaatactactataacataggcataaatattttcgtgtttatatgcatatacaagttaaaataattagaaactatgactgcgcctagtaaagtcatctaggtttatagttcagtagcttaggcaaggcacacactgctcatctccgctttttagggtcagaggaacacaagctcatgttctgagtgaagggcgtacactggcacctggtgttgcctagatcccccatctcctccttccagccaggtctggaagtttcaacagcccaagcttaacttcatgtaaagtcttcactgccagtgggaacatctttgacacaacaagacactccaattgtgatttgagttgaggatctctgcctgccttcctgccgtccttccttcttccccgatccatgctacttttaggggctgcggagagcagcagcagagctgagtaatgatacagggcaccacggagagaaagtagaaccatttcactcctgggaagatggggtatttcccacttccagcaacgaaataacaaatgaaaagttgcatacttattgatgtattgtatgagccagtagcattttatgtacaaaacagaagtcaatgcaacagtatgtatgtgtgcctgtgtgtgtataaaaataaccattgaagctaacttgctaatgtacttaggcaagccacttcccatctctgggcctcgtctttcctccctctaaaatcaaagagctgaattatgtgatccttgaggtctcttccacttataataccaactgtcttgtcagactggcaaattatattggcctctccttatgtggtggtttttttggtaggtcatagttccttatacacagacacctgcatcatcgaaggtctttttttcctaaaaaaaaaaaatgggattttagttcttattctgtgataactatcctcctcatataatactattctttttgacaccatttgaaggaaccaatatttggaccttattttgaggttgtctgtctcgaagaaaaagaaaataaaatgtataggcagggttccttcaattggcattttccccagaattgtgagccaaagcctatagtaattgcagacagcaaatgattccggatctctaaaaggctctctcagatgaaaagggagtaaaggaaaaaagaggtcaaccactgtttctgataatgtacttgagtttcattgttcttttagtttgtattcttataaaaaatgtttacactctgcagattgattttttttttttagtactgtggctttcttttcctattttatgaaaaaaatgataatctttttgtaaaattgtctgtgaaatataaacattaatatataaagaaaaaccttgaagtgctgtatagtgaagtataaattaatgttttattgatttgtgaagaatttaagactattatataattatcttggtggatctattttatgcatgaccttttaacctttgactttgcttatttcccactacgaaggggaaggtagattttatgaatgattttaatagcaaatatattttataaagtgaaaatccagtgtggaggtagcaaagcatctatctattctgaatcatgtttggaaataaaattgctccatctgggaatgtgctttca

SEQ ID NO: 20155 - DNA, 3569 bp, Homo sapiens
  source 1..3569: mol_type = unassigned DNA
ccggagtccccacgcgaggatgctgcggtgagcgcggccgggacgccgcgtcgggctctcggccgcccagcggcgccgcaggggaagccaggccggcagccgcgcgctccccagccggccaccaatcccgccctccccggctcctccggacctcctcggcaggcggcggcggggcctgcctgtgcgctctgcgcccgcccgcgcctaccctccatggcgtttatccggaagaagcagcaggagcagcagctgcagctctactccaaggagagattttccttgctgctgcttaacttggaggagtactactttgaacagcatagagccaatcacattttgcacaagggcagtcaccatgaaaggaaaatcagaggctccttaaaaatatgttcaaaatcggtgatttttgaaccagattcaatatcccagcccatcatcaagattcctttgagagactgtataaaaataggaaagcatggagaaaatggagccaatagacacttcacaaaggcaaaatctgggggtatttcactcattttcagtcaggtatatttcattaaagaacataatgttgttgcaccatataaaatagaaaggggcaaaatggaatatgtttttgaattggatgttcccgggaaagtggaagatgttgtggagacgttgcttcagcttcacagagcatcctgccttgacaaattgggtgaccaaaccgccatgataacagctattttgcagtctcgtttagctagaacatcatttgacaaaaacaggttccaaaacatttctgaaaagctgcacatggaatgcaaagcagaaatggtgacgcctctggtgactaatcctggacacgtgtgcatcacggacacaaacctgtattttcagcccctcaacggctacccgaaacctgtggtccagataacactccaagatgtccgccgcatctacaaaaggaggcacggcctcatgcctctgggcttggaagtattttgcacagaagatgatctgtgttccgacatctacctaaagttctatgaacctcaagatagagatgatctctatttttacattgccacatacctagagcaccatgtggcggagcacactgctgagagctacatgctgcagtggcagcgtggacacctttccaactatcagtacctccttcacctcaacaacctggccgaccgcagctgcaacgacctctcccagtaccctgtgtttccatggataatacatgattattccagctcagaactagatttgtcaaatccaggaaccttccgggatctcagtaagccagtaggggccctaaataaggaacggctggagagactactgacacgctaccaggaaatgcctgaaccaaagttcatgtatgggagtcactactcttccccgggttatgtacttttttatcttgttaggattgcaccagagtatatgctgtgcctgcagaatggaagatttgataatgcagatagaatgttcaacagtattgcagaaacttggaaaaactgtctggatggtgcaacggattttaaagagttaattccagaattctatggtgatgatgtgagctttctagtcaatagcctgaagttggatttgggaaagagacaaggaggacagatggttgacgacgtggagcttcccccttgggcttccagtcccgaggactttctccagaagagcaaagatgcattggaaagcaattatgtgtctgaacaccttcacgagtggattgatctaatatttggctacaaacaaaaagggagtgatgcagttggggcccataatgtatttcatcccctgacctatgaaggaggtgtagacttgaacagcatccaggatcctgatgagaaggtagccatgcttacgcaaatcttggaatttgggcagacaccaaaacaactatttgtgacaccacatcctcgaaggatcaccccaaagtttaaaagtttgtcccagacctccagttataatgcttctatggcagattccccaggtgaagagtcttttgaagacctgaccgaagaaagcaaaacactggcctggaataacatcaccaaactgcagttacacgagcactataaaatccacaaagaagcagttactggaatcacggtctctcgcaatggatcttcagtattcacaacatcccaagattccaccttgaagatgttttctaaagaatcaaaaatgctacaaagaagtatatcattttcaaatatggctttatcgtcttgtttacttttaccaggagatgccactgtcataacttcttcatgggataataatgtctatttttattccatagcatttggaagacgccaggacacgttaatgggacatgatgatgctgttagtaagatctgttggcatgacaacaggctatattctgcatcgtgggactctacagtgaaggtgtggtctggtgttcctgcagagatgccaggcaccaaaagacaccactttgacttgctggccgagctggaacatgatgtcagtgtagatacaatcagtttaaatgctgcaagcacactgttagtttccggcaccaaagaaggcacagtgaatatttgggacctcacaacggccaccttaatgcaccagattccatgccattcagggattgtatgtgacactgcttttagcccagatagtcgccatgtcctcagcacaggaacagatggctgtcttaatgtcattgatgtgcagacaggaatgctcatctcctccatgacatcagatgagccccagaggtgctttgtctgggatggaaattccgttttatctggcagtcagtctggtgaactgctcgtttgggacctccttggagcaaaaatcagtgagagaatacagggccacacaggtgctgtgacatgtatatggatgaatgaacagtgtagcagtatcatcacaggaggggaagacagacaaattatattctggaaattgcagtattaagtgccttttcctctcctgaatattaaattgaactctatttaatgcatttttaaaccaaacttttaaacggactggtgaatgtgcaatgttagtaattagaagttttaccacatggaaaatttgtggttttaaactttctaaatcatggtgacttcattgaaagccattagttgctattctcttagggcagataaaatgcggctgtgttaggaaaaacatgttacactgtaaggcagatgatcgtccccgtatgatgattgtcagaagacaggactaagtagcagagaatagctaagagataaattgggctggggaaacttgtcagaaagcactgaacaattaagaaattttccaagaaaatgtgcagtattctctgctacttctgaatctgttttgtcttcctaatctatcacaattgccacccatcgggttttgggtgtgtgttttcatagcgtggttactttctataatgctgtacccagattctaagaacctggagaaggattagcagttcttagtaagtttactgtgtataggaacggtttgtatttcattacagctattcatcttttctacattaaaaatatttttctctaaagaaa

SEQ ID NO: 20156 - DNA, 3371 bp, Homo sapiens
  source 1..3371: mol_type = unassigned DNA
agtcggggccggtcgtggggacgccggccggagatctgagggacgggaggcggcgtgggggccgggcacggaggcaggggccggacgcgtgtccagggcctgggctgggggctgtggcggaaacctgaggtcggggtgagaggccgggggcctggtctgggccggagcctgccggggacaggaactggatgacgggccaggccagattccaccgcggagccgaggcatgccgagctatccggcagtgcaggtcccggcggccgcgggcagctcacccggaaggccgcgcggggtccgggcgtggatcccggcacgcgagcccgggcgttcgcaggggaggattttccttgctgctgcttaacttggaggagtactactttgaacagcatagagccaatcacattttgcacaagggcagtcaccatgaaaggaaaatcagaggctccttaaaaatatgttcaaaatcggtgatttttgaaccagattcaatatcccagcccatcatcaagattcctttgagagactgtataaaaataggaaagcatggagaaaatggagccaatagacacttcacaaaggcaaaatctgggggtatttcactcattttcagtcaggtatatttcattaaagaacataatgttgttgcaccatataaaatagaaaggggcaaaatggaatatgtttttgaattggatgttcccgggaaagtggaagatgttgtggagacgttgcttcagcttcacagagcatcctgccttgacaaattgggtgaccaaaccgccatgataacagctattttgcagtctcgtttagctagaacatcatttgacaaaaacaggttccaaaacatttctgaaaagctgcacatggaatgcaaagcagaaatggtgacgcctctggtgactaatcctggacacgtgtgcatcacggacacaaacctgtattttcagcccctcaacggctacccgaaacctgtggtccagataacactccaagatgtccgccgcatctacaaaaggaggcacggcctcatgcctctgggcttggaagtattttgcacagaagatgatctgtgttccgacatctacctaaagttctatgaacctcaagatagagatgatctctatttttacattgccacatacctagagcaccatgtggcggagcacactgctgagagctacatgctgcagtggcagcgtggacacctttccaactatcagtacctccttcacctcaacaacctggccgaccgcagctgcaacgacctctcccagtaccctgtgtttccatggataatacatgattattccagctcagaactagatttgtcaaatccaggaaccttccgggatctcagtaagccagtaggggccctaaataaggaacggctggagagactactgacacgctaccaggaaatgcctgaaccaaagttcatgtatgggagtcactactcttccccgggttatgtacttttttatcttgttaggattgcaccagagtatatgctgtgcctgcagaatggaagatttgataatgcagatagaatgttcaacagtattgcagaaacttggaaaaactgtctggatggtgcaacggattttaaagagttaattccagaattctatggtgatgatgtgagctttctagtcaatagcctgaagttggatttgggaaagagacaaggaggacagatggttgacgacgtggagcttcccccttgggcttccagtcccgaggactttctccagaagagcaaagatgcattggaaagcaattatgtgtctgaacaccttcacgagtggattgatctaatatttggctacaaacaaaaagggagtgatgcagttggggcccataatgtatttcatcccctgacctatgaaggaggtgtagacttgaacagcatccaggatcctgatgagaaggtagccatgcttacgcaaatcttggaatttgggcagacaccaaaacaactatttgtgacaccacatcctcgaaggatcaccccaaagtttaaaagtttgtcccagacctccagttataatgcttctatggcagattccccaggtgaagagtcttttgaagacctgaccgaagaaagcaaaacactggcctggaataacatcaccaaactgcagttacacgagcactataaaatccacaaagaagcagttactggaatcacggtctctcgcaatggatcttcagtattcacaacatcccaagattccaccttgaagatgttttctaaagaatcaaaaatgctacaaagaagtatatcattttcaaatatggctttatcgtcttgtttacttttaccaggagatgccactgtcataacttcttcatgggataataatgtctatttttattccatagcatttggaagacgccaggacacgttaatgggacatgatgatgctgttagtaagatctgttggcatgacaacaggctatattctgcatcgtgggactctacagtgaaggtgtggtctggtgttcctgcagagatgccaggcaccaaaagacaccactttgacttgctggccgagctggaacatgatgtcagtgtagatacaatcagtttaaatgctgcaagcacactgttagtttccggcaccaaagaaggcacagtgaatatttgggacctcacaacggccaccttaatgcaccagattccatgccattcagggattgtatgtgacactgcttttagcccagatagtcgccatgtcctcagcacaggaacagatggctgtcttaatgtcattgatgtgcagacaggaatgctcatctcctccatgacatcagatgagccccagaggtgctttgtctgggatggaaattccgttttatctggcagtcagtctggtgaactgctcgtttgggacctccttggagcaaaaatcagtgagagaatacagggccacacaggtgctgtgacatgtatatggatgaatgaacagtgtagcagtatcatcacaggaggggaagacagacaaattatattctggaaattgcagtattaagtgccttttcctctcctgaatattaaattgaactctatttaatgcatttttaaaccaaacttttaaacggactggtgaatgtgcaatgttagtaattagaagttttaccacatggaaaatttgtggttttaaactttctaaatcatggtgacttcattgaaagccattagttgctattctcttagggcagataaaatgcggctgtgttaggaaaaacatgttacactgtaaggcagatgatcgtccccgtatgatgattgtcagaagacaggactaagtagcagagaatagctaagagataaattgggctggggaaacttgtcagaaagcactgaa

SEQ ID NO: 20157 - DNA, 1396 bp, Homo sapiens
  source 1..1396: mol_type = unassigned DNA
cgacttcctctttccagtgcatttaaggcgcagcctggaagtgccagggagcactggaggccacccagtcatgggggacaccttcatccgtcacatcgccctgctgggctttgagaagcgcttcgtacccagccagcactatgtgtacatgttcctggtgaaatggcaggacctgtcggagaaggtggtctaccggcgcttcaccgagatctacgagttccataaaaccttaaaagaaatgttccctattgaggcaggggcgatcaatccagagaacaggatcatcccccacctcccagctcccaagtggtttgacgggcagcgggccgccgagaaccgccagggcacacttaccgagtactgcggcacgctcatgagcctgcccaccaagatctcccgctgtccccacctcctcgacttcttcaaggtgcgccctgatgacctcaagctccccacggacaaccagacaaaaaagccagagacatacttgatgcccaaagatggcaagagtaccgcgacagacatcaccggccccatcatcctgcagacgtaccgcgccattgccaactacgagaagacctcgggctccgagatggctctgtccacgggggacgtggtggaggtcgtagagaagagcgagagcggttggtggttctgtcagatgaaagcaaagcgaggctggatcccagcgtccttcctcgagcccctggacagtcctgacgagacggaagaccctgagcccaactatgcaggtgagccatacgtcgccatcaaggcctacactgctgtggagggggacgaggtgtccctgctcgagggtgaagctgttgaggtcattcacaagctcctggacggctggtgggtcatcaggaaagacgacgtcacaggctacttcccgtccatgtacctgcaaaagtcagggcaagacgtgtcccaggcccaacgccagatcaagcggggggcgccgccccgcaggtcgtccatccgcaacgcgcacagcatccaccagcggtcgcggaagcgcctcagccaggacgcctatcgccgcaacagcgtccgttttctgcagcagcgacgccgccaggcgcggccgggaccgcagagccccgggagcccgctcgaggaggagcggcagacgcagcgctctaaaccgcagccggcggtgcccccgcggccgagcgccgacctcatcctgaaccgctgcagcgagagcaccaagcggaagctggcgtctgccgtctgaggctggagcgcagtccccagctagcgtctcggcccttgccgccccgtgcctgtacatacgtgttctatagagcctggcgtctggacgccgagggcagccccgacccctgtccagcgcggctcccgccaccctcaataaatgttgcttggagtg

SEQ ID NO: 20158 - DNA, 959 bp, Homo sapiens
  source 1..959: mol_type = unassigned DNA
gagcactggaggccacccagtcatgggggacaccttcatccgtcacatcgccctgctgggctttgagaagcgcttcgtacccagccagcactatgtacatgttcctggtgaaatggcaggacctgtcggagaaggtggtctaccggcgcttcaccgagatctacgagttccatgacaaaaaagccagagacatacttgatgcccaaagatggcaagagtaccgcgacagacatcaccggccccatcatcctgcagacgtaccgcgccattgccaactacgagaagacctcgggctccgagatggctctgtccacgggggacgtggtggaggtcgtagagaagagcgagagcggtcagacctcccaccttacggggctccttcccctggtgctcaggaacccacagccacaagccccctgccaaggctcaggcagccttgcccctgggaggactccggctctgttaggggccctaaatgtcctccccacactgtgggtcgccttctgtcttagtgtgcaccctgtggtggctgtgggcatctgtgcttggcaggccggggcggggcatgtctgcgtgttctgtctggatgggtatgggaccgtctgttcattatgaagtgggctcagagctgtgattctgtgagcatgtgtgcatgcatgcatgtgacctcattgtccggtgtggtgaaggtgacatttccaaatctgagcattggacatcagtgtgtctgtgtccctgtgtcctcaccatccctgatggctgcagggagccgctgggccctgcccctcagtcacattcccgcacctctggcacaggttggtggttctgtcagatgaaagcaaagcgaggctggatcccagcgtccttcctcgagcccctggacagtcctgacgagacggaagaccctgagcccaactatgcaggtgagccatacgtcgccatcaaggcctacactgctg

SEQ ID NO: 20159 - DNA, 1039 bp, Homo sapiens
  source 1..1039: mol_type = unassigned DNA
agcactggaggccacccagtcatgggggacaccttcatccgtcacatcgccctgctgggctttgagaagcgcttcgtacccagccagcactatgtacatgttcctggtgaaatggcaggacctgtcggagaaggtggtctaccggcgcttcaccgagatctacgagttccatctcccaagtggtttgacgggcagcgggccgccgagaaccgccagggcacacttaccgagtactgcggcacgctcatgagcctgcccaccaagatctcccgctgtccccacctcctcgacttcttcaaggtgcgccctgatgacctcaagctccccacggacaaccagacaaaaaagccagagacatacttgatgcccaaagatggcaagagtaccgcgacagacatcaccggccccatcatcctgcagacgtaccgcgccattgccaactacgagaagacctcgggctccgagatggctctgtccacgggggacgtggtggaggtcgtagagaagagcgagagcggtcagacctcccaccttacggggctccttcccctggtgctcaggaacccacagccacaagccccctgccaaggctcaggcagccttgcccctgggaggactccggctctgttaggggccctaaatgtcctccccacactgtgggtcgccttctgtcttagtgtgcaccctgtggtggctgtgggcatctgtgcttggcaggccggggcggggcatgtctgcgtgttctgtctggatgggtatgggaccgtctgttcattatgaagtgggctcagagctgtgattctgtgagcatgtgtgcatgcatgcatgtgacctcattgtccggtgtggtgaaggtgacatttccaaatctgagcattggacatcagtgtgtctgtgtccctgtgtcctcaccatccctgatggctgcagggagccgctgggccctgcccctcagtcacattcccgcacctctggcacaggttggtggttctgtcagatgaaagcaaagcgaggctggatcccagcgtccttcctcgag

SEQ ID NO: 20160 - DNA, 2226 bp, Homo sapiens
  source 1..2226: mol_type = unassigned DNA
tctctctctgcttctttccttttctctctcatggtagggttatgagtcagttgccaaaaggtggggacatttcctgatgcatttgcaacactgagaagttatcttaagggaggctgggccccattctactcatctggcccagaaagtgaacaccttgggggccactaaggcagccctgctaggggagacgctccaacctgtcttctctctgtctcctggcagctctcttggcctcctagtttctacctaatcatgtccctggtggaggccatcagcctctggaatgaaggggtgctggcagcggacaagaaggactggaagggagccctggatgccttcagtgccgtccaggacccccactcccggatttgcttcaacattggctgcatgtacactatcctgaagaacatgactgaagcagagaaggcctttaccagaagcattaaccgagacaagcacttggcagtggcttacttccaacgagggatgctctactaccagacagagaaatatgatttggctatcaaagaccttaaagaagccttgattcagcttcgagggaaccagctgatagactataagatcctggggctccagttcaagctgtttgcctgtgaggtgttatataacattgctttcatgtatgccaagaaggaggaatggaaaaaagctgaagaacagttagcattggccacgagcatgaagtctgagcccagacattccaaaatcgacaaggcgatggagtgtgtctggaagcagaagctatatgagccagtggtgatccctgtgggcaagctgtttcgaccaaatgagagacaagtggctcagctggccaagaaggattacctaggcaaggcgacggtcgtggcatctgtggtggatcaagacagtttctctgggtttgcccctctgcaaccacaggcagctgagcctccacccagaccgaaaaccccagagatcttcagggctctggaaggggaggctcaccgtgtgctatttgggtttgtgcctgagacaaaagaagagctccaggtcatgccagggaacattgtctttgtcttgaagaagggcaatgataactgggccacggtcatgttcaacgggcagaaggggcttgttccctgcaactaccttgaaccagttgagctgcggatccaccctcagcagcagccccaggaggaaagctctccgcagtccgacatcccagctcctcctagttccaaagcccctggaagaccccagctgtcaccaggccagaaacaaaaagaagagcctaaggaagtgaagctcagtgttcccatgccctacacactcaaggtgcactacaagtacacggtagtcatgaagactcagcccgggctcccctacagccaggtccgggacatggtgtctaagaaactggagctccggctggaacacactaagctgagctatcggcctcgggacagcaatgagctggtgcccctttcagaagacagcatgaaggatgcctggggccaggtgaaaaactactgcctgactctgtggtgtgagaacacagtgggtgaccaaggctttccagatgaacccaaggaaagtgaaaaagctgatgctaataaccagacaacagaacctcagcttaagaaaggcagccaagtggaggcactcttcagttatgaggctacccaaccagaggacctggagtttcaggaaggggatataatcctggtgttatcaaaggtgaatgaagaatggctggaaggggagtgcaaagggaaggtgggcattttccccaaagtttttgttgaagactgcgcaactacagatttggaaagcactcggagagaagtctaggatgtttcacaaactacaaagctgaagaaaatgaagccctattacttgtttgtaagatttagcacccttctgctgtatactgtactgagacattacagtttggaagtgttaactatttattccctgttaaaatttaacctactagacaatgatgtgagtacccaggatgatttcctggggcacagtgggtgaggagatggggacaggtgaatggaggagttaggggagaggaaaagtggatggaagtgtctggaaagggcacgagagagtcttccaggtactgatcctgtttcttgctctgagtgctagctagccagctgtgttcacactgtaaacattcatcaagctgtacatttggtgcacttttctgtgtcataccacaataaaaaaaaa

SEQ ID NO: 20161 - DNA, 2203 bp, Homo sapiens
  source 1..2203: mol_type = unassigned DNA
ctagtctttcagccttcaggctgtttttggcttgaagctctcttggcctcctagtttctacctaatcatgtccctggtggaggccatcagcctctggaatgaaggggtgctggcagcggacaagaaggactggaagggagccctggatgccttcagtgccgtccaggacccccactcccggatttgcttcaacattggctgcatgtacactatcctgaagaacatgactgaagcagagaaggcctttaccagaagcattaaccgagacaagcacttggcagtggcttacttccaacgagggatgctctactaccagacagagaaatatgatttggctatcaaagaccttaaagaagccttgattcagcttcgagggaaccagctgatagactataagatcctggggctccagttcaagctgtttgcctgtgaggtgttatataacattgctttcatgtatgccaagaaggaggaatggaaaaaagctgaagaacagttagcattggccacgagcatgaagtctgagcccagacattccaaaatcgacaaggcgatggagtgtgtctggaagcagaagctatatgagccagtggtgatccctgtgggcaagctgtttcgaccaaatgagagacaagtggctcagctggccaagaaggattacctaggcaaggcgacggtcgtggcatctgtggtggatcaagacagtttctctgggtttgcccctctgcaaccacaggcagctgagcctccacccagaccgaaaaccccagagatcttcagggctctggaaggggaggctcaccgtgtgctatttgggtttgtgcctgagacaaaagaagagctccaggtcatgccagggaacattgtctttgtcttgaagaagggcaatgataactgggccacggtcatgttcaacgggcagaaggggcttgttccctgcaactaccttgaaccagttgagctgcggatccaccctcagcagcagccccaggaggaaagctctccgcagtccgacatcccagctcctcctagttccaaagcccctggaagaccccagctgtcaccaggccagaaacaaaaagaagagcctaaggaagtgaagctcagtgttcccatgccctacacactcaaggtgcactacaagtacacggtagtcatgaagactcagcccgggctcccctacagccaggtccgggacatggtgtctaagaaactggagctccggctggaacacactaagctgagctatcggcctcgggacagcaatgagctggtgcccctttcagaagacagcatgaaggatgcctggggccaggtgaaaaactactgcctgactctgtggtgtgagaacacagtgggtgaccaaggctttccagatgaacccaaggaaagtgaaaaagctgatgctaataaccagacaacagaacctcagcttaagaaaggcagccaagtggaggcactcttcagttatgaggctacccaaccagaggacctggagtttcaggaaggggatataatcctggtgttatcaaaggtgaatgaagaatggctggaaggggagtgcaaagggaaggtgggcattttccccaaagtttttgttgaagactgcgcaactacagatttggaaagcactcggagagaagtctaggatgtttcacaaactacaaagctgaagaaaatgaagccctattacttgtttgtaagatttagcacccttctgctgtatactgtactgagacattacagtttggaagtgttaactatttattccctgttaaaatttaacctactagacaatgatgtgagtacccaggatgatttcctggggcacagtgggtgaggagatggggacaggtgaatggaggagttaggggagaggaaaagtggatggaagtgtctggaaagggcacgagagagtcttccaggtactgatcctgtttcttgctctgagtgctagctagccagctgtgttcacactgtaaacattcatcaagctgtacatttggtgcacttttctgtgtcataccacaataaaaaaaaacctagcatcttacaaaaacaagacacccaagtccaggcccaaggagtaagtacaaatattcctgtttctgaaccattactgtaattggctcttaaggcttgaagtaaccttataggttactcataaggcatatacaaataaacttgtttgttttcttttttc

SEQ ID NO: 20162 - DNA, 2543 bp, Homo sapiens
  source 1..2543: mol_type = unassigned DNA
acactccacccctactcgccctctctctctctgcttctttccttttctctctcatggtagggttatgagtcagttgccaaaaggtggggacatttcctgatgcatttgcaacactgagaagttatcttaagggaggctgggccccattctactcatctggcccagaaagtgaacaccttgggggccactaaggcagccctgctaggggagacgctccaacctgtcttctctctgtctcctggcagctctcttggcctcctagtttctacctaatcatgtccctggtggaggccatcagcctctggaatgaaggggtgctggcagcggacaagaaggactggaagggagccctggatgccttcagtgccgtccaggacccccactcccggatttgcttcaacattggctgcatgtacactatcctgaagaacatgactgaagcagagaaggcctttaccagaagcattaaccgagacaagcacttggcagtggcttacttccaacgagggatgctctactaccagacagagaaatatgatttggctatcaaagaccttaaagaagccttgattcagcttcgagggaaccagctgatagactataagatcctggggctccagttcaagctgtttgcctgtgaggtgttatataacattgctttcatgtatgccaagaaggaggaatggaaaaaagctgaagaacagttagcattggccacgagcatgaagtctgagcccagacattccaaaatcgacaaggcgatggagtgtgtctggaagcagaagctatatgagccagtggtgatccctgtgggcaagctgtttcgaccaaatgagagacaagtggctcagctggccaagaaggattacctaggcaaggcgacggtcgtggcatctgtggtggatcaagacagtttctctgggtttgcccctctgcaaccacaggtaaggcagtcagacctcttgggagcccaggcaggctcagtgtcatctcggcagttgcagttagatgtggagttagagccaggctggagccaagtccctggctccaagttcagtgtatttgcgccatggcatcatgtgaggggatgggggctggatcttgtgtctatcctctgcagggctctggaaggggaggctcaccgtgtgctatttgggtttgtgcctgagacaaaagaagagctccaggtcatgccagggaacattgtctttgtcttgaagaagggcaatgataactgggccacggtcatgttcaacgggcagaaggggcttgttccctgcaactaccttgaaccagttgagctgcggatccaccctcagcagcagccccaggaggaaagctctccgcagtccgacatcccagctcctcctagttccaaagcccctggaagaccccagctgtcaccaggccagaaacaaaaagaagagcctaaggaagtgaagctcagtgttcccatgccctacacactcaaggtgcactacaagtacacggtagtcatgaagactcagcccgggctcccctacagccaggtccgggacatggtgtctaagaaactggagctccggctggaacacactaagctgagctatcggcctcgggacagcaatgagctggtgcccctttcagaagacagcatgaaggatgcctggggccaggtgaaaaactactgcctgactctgtggtgtgagaacacagtgggtgaccaaggctttccagatgaacccaaggaaagtgaaaaagctgatgctaataaccagacaacagaacctcagcttaagaaaggcagccaagtggaggcactcttcagttatgaggctacccaaccagaggacctggagtttcaggaaggggatataatcctggtgttatcaaaggtgaatgaagaatggctggaaggggagtgcaaagggaaggtgggcattttccccaaagtttttgttgaagactgcgcaactacagatttggaaagcactcggagagaagtctaggatgtttcacaaactacaaagctgaagaaaatgaagccctattacttgtttgtaagatttagcacccttctgctgtatactgtactgagacattacagtttggaagtgttaactatttattccctgttaaaatttaacctactagacaatgatgtgagtacccaggatgatttcctggggcacagtgggtgaggagatggggacaggtgaatggaggagttaggggagaggaaaagtggatggaagtgtctggaaagggcacgagagagtcttccaggtactgatcctgtttcttgctctgagtgctagctagccagctgtgttcacactgtaaacattcatcaagctgtacatttggtgcacttttctgtgtcataccacaataaaaaaaaacctagcatcttacaaaaacaagacacccaagtccaggcccaaggagtaagtacaaatattcctgtttctgaaccattactgtaattggctcttaaggcttgaagtaaccttataggttactcataaggcatatacaaataaacttgtttgttttcttttttc

SEQ ID NO: 20163 - DNA, 2276 bp, Homo sapiens
  source 1..2276: mol_type = unassigned DNA
acactccacccctactcgccctctctctctctgcttctttccttttctctctcatggtagggttatgagtcagttgccaaaaggtggggacatttcctgatgcatttgcaacactgagaagttatcttaagggaggctgggccccattctactcatctggcccagaaagtgaacaccttgggggccactaaggcagccctgctaggggagacgctccaacctgtcttctctctgtctcctggcagctctcttggcctcctagtttctacctaatcatgtccctggtggaggccatcagcctctggaatgaaggggtgctggcagcggacaagaaggactggaagggagccctggatgccttcagtgccgtccaggacccccactcccggatttgcttcaacattggctgcatgtacactatcctgaagaacatgactgaagcagagaaggcctttaccagaagcattaaccgagacaagcacttggcagtggcttacttccaacgagggatgctctactaccagacagagaaatatgatttggctatcaaagaccttaaagaagccttgattcagcttcgagggaaccagctgatagactataagatcctggggctccagttcaagctgtttgcctgtgagaagcagaagctatatgagccagtggtgatccctgtgggcaagctgtttcgaccaaatgagagacaagtggctcagctggccaagaaggattacctaggcaaggcgacggtcgtggcatctgtggtggatcaagacagtttctctgggtttgcccctctgcaaccacaggcagctgagcctccacccagaccgaaaaccccagagatcttcagggctctggaaggggaggctcaccgtgtgctatttgggtttgtgcctgagacaaaagaagagctccaggtcatgccagggaacattgtctttgtcttgaagaagggcaatgataactgggccacggtcatgttcaacgggcagaaggggcttgttccctgcaactaccttgaaccagttgagctgcggatccaccctcagcagcagccccaggaggaaagctctccgcagtccgacatcccagctcctcctagttccaaagcccctggaagaccccagctgtcaccaggccagaaacaaaaagaagagcctaaggaagtgaagctcagtgttcccatgccctacacactcaaggtgcactacaagtacacggtagtcatgaagactcagcccgggctcccctacagccaggtccgggacatggtgtctaagaaactggagctccggctggaacacactaagctgagctatcggcctcgggacagcaatgagctggtgcccctttcagaagacagcatgaaggatgcctggggccaggtgaaaaactactgcctgactctgtggtgtgagaacacagtgggtgaccaaggctttccagatgaacccaaggaaagtgaaaaagctgatgctaataaccagacaacagaacctcagcttaagaaaggcagccaagtggaggcactcttcagttatgaggctacccaaccagaggacctggagtttcaggaaggggatataatcctggtgttatcaaaggtgaatgaagaatggctggaaggggagtgcaaagggaaggtgggcattttccccaaagtttttgttgaagactgcgcaactacagatttggaaagcactcggagagaagtctaggatgtttcacaaactacaaagctgaagaaaatgaagccctattacttgtttgtaagatttagcacccttctgctgtatactgtactgagacattacagtttggaagtgttaactatttattccctgttaaaatttaacctactagacaatgatgtgagtacccaggatgatttcctggggcacagtgggtgaggagatggggacaggtgaatggaggagttaggggagaggaaaagtggatggaagtgtctggaaagggcacgagagagtcttccaggtactgatcctgtttcttgctctgagtgctagctagccagctgtgttcacactgtaaacattcatcaagctgtacatttggtgcacttttctgtgtcataccacaataaaaaaaaacctagcatcttacaaaaacaagacacccaagtccaggcccaaggagtaagtacaaatattcctgtttctgaaccattactgtaattggctcttaaggcttgaagtaaccttataggttactcataaggcatatacaaataaacttgtttgttttcttttttc

SEQ ID NO: 20164 - DNA, 2168 bp, Homo sapiens
  source 1..2168: mol_type = unassigned DNA
acactccacccctactcgccctctctctctctgcttctttccttttctctctcatggtagggttatgagtcagttgccaaaaggtggggacatttcctgatgcatttgcaacactgagaagttatcttaagggaggctgggccccattctactcatctggcccagaaagtgaacaccttgggggccactaaggcagccctgctaggggagacgctccaacctgtcttctctctgtctcctggcagctctcttggcctcctagtttctacctaatcatgtccctggtggaggccatcagcctctggaatgaaggggtgctggcagcggacaagaaggactggaagggagccctggatgccttcagtgccgtccaggacccccactcccggatttgcttcaacattggctgcatgtacactatcctgaagaacatgactgaagcagagaaggcctttaccagaagcattaaccgagacaagcacttggcagtggcttacttccaacgagggatgctctactaccagacagagaaatatgatttggctatcaaagaccttaaagaagccttgattcagcttcgagggaaccagctgatagactataagatcctggggctccagttcaagctgtttgcctgtgaggtcgtggcatctgtggtggatcaagacagtttctctgggtttgcccctctgcaaccacaggcagctgagcctccacccagaccgaaaaccccagagatcttcagggctctggaaggggaggctcaccgtgtgctatttgggtttgtgcctgagacaaaagaagagctccaggtcatgccagggaacattgtctttgtcttgaagaagggcaatgataactgggccacggtcatgttcaacgggcagaaggggcttgttccctgcaactaccttgaaccagttgagctgcggatccaccctcagcagcagccccaggaggaaagctctccgcagtccgacatcccagctcctcctagttccaaagcccctggaagaccccagctgtcaccaggccagaaacaaaaagaagagcctaaggaagtgaagctcagtgttcccatgccctacacactcaaggtgcactacaagtacacggtagtcatgaagactcagcccgggctcccctacagccaggtccgggacatggtgtctaagaaactggagctccggctggaacacactaagctgagctatcggcctcgggacagcaatgagctggtgcccctttcagaagacagcatgaaggatgcctggggccaggtgaaaaactactgcctgactctgtggtgtgagaacacagtgggtgaccaaggctttccagatgaacccaaggaaagtgaaaaagctgatgctaataaccagacaacagaacctcagcttaagaaaggcagccaagtggaggcactcttcagttatgaggctacccaaccagaggacctggagtttcaggaaggggatataatcctggtgttatcaaaggtgaatgaagaatggctggaaggggagtgcaaagggaaggtgggcattttccccaaagtttttgttgaagactgcgcaactacagatttggaaagcactcggagagaagtctaggatgtttcacaaactacaaagctgaagaaaatgaagccctattacttgtttgtaagatttagcacccttctgctgtatactgtactgagacattacagtttggaagtgttaactatttattccctgttaaaatttaacctactagacaatgatgtgagtacccaggatgatttcctggggcacagtgggtgaggagatggggacaggtgaatggaggagttaggggagaggaaaagtggatggaagtgtctggaaagggcacgagagagtcttccaggtactgatcctgtttcttgctctgagtgctagctagccagctgtgttcacactgtaaacattcatcaagctgtacatttggtgcacttttctgtgtcataccacaataaaaaaaaacctagcatcttacaaaaacaagacacccaagtccaggcccaaggagtaagtacaaatattcctgtttctgaaccattactgtaattggctcttaaggcttgaagtaaccttataggttactcataaggcatatacaaataaacttgtttgttttcttttttc

SEQ ID NO: 20165 - DNA, 584 bp, Homo sapiens
  source 1..584: mol_type = unassigned DNA
attgccttttccgttttcacttctcctgaatgttcaataggcagctgagcctccacccagaccgaaaaccccagagatcttcagggctctggaaggggaggctcaccgtgtgctatttgggtttgtgcctgagacaaaagaagagctccaggtcatgccagggaacattgtctttgtcttgaagaagggcaatgataactgggccacggtcatgttcaacgggcagaaggggcttgttccctgcaactaccttgaaccagttgagctgcggatccaccctcagcagcagccccaggaggaaagctctccgcagtccgacatcccagctcctcctagttccaaagcccctggaagaccccagctgtcaccaggccagaaacaaaaagaagagcctaaggaagtgaagctcagtgttcccatgccctacacactcaaggtgcactacaagtacacggtagtcatgaagactcagcccgggctcccctacagccaggtccgggacatggtgtctaagaaactggagctccggctggaacacactaagctgagctatcggcctcgggacagcaatgagctggtgcccc

SEQ ID NO: 20166 - DNA, 376 bp, Homo sapiens
  source 1..376: mol_type = unassigned DNA
attgccttttccgttttcacttctcctgaatgttcaataggcagctgagcctccacccagaccgaaaaccccagagatcttcaggaggaaagctctccgcagtccgacatcccagctcctcctagttccaaagcccctggaagaccccagctgtcaccaggccagaaacaaaaagaagagcctaaggaagtgaagctcagtgttcccatgccctacacactcaaggtgcactacaagtacacggtagtcatgaagactcagcccgggctcccctacagccaggtccgggacatggtgtctaagaaactggagctccggctggaacacactaagctgagctatcggcctcgggacagcaatgagctggtgccccttt

SEQ ID NO: 20167 - DNA, 1396 bp, Homo sapiens
  source 1..1396: mol_type = unassigned DNA
ggaggaggagcctctgccagactggagagaagcaggcctgagcctccccaaaggcagctcctggggactcccaggaccacaggctgagacgagacgcagggtggctggaggaagtgagaggtgaactcagcctgggactggctgggcgagactctccacctgctccctgggaccatcgcccaccatggctgtggcccagcagctgcgggccgagagtgactttgaacagcttccggatgatgttgccatctcggccaacattgctgacatcgaggagaagagaggcttcaccagccactttgttttcgtcatcgaggtgaagacaaaaggaggatccaagtacctcatctaccgccgctaccgccagttccatgctttgcagagcaagctggaggagcgcttcgggccagacagcaagagcagtgccctggcctgtaccctgcccacactcccagccaaagtctacgtgggtgtgaaacaggagatcgccgagatgcggatacctgccctcaacgcctacatgaagagcctgctcagcctgccggtctgggtgctgatggatgaggacgtccggatcttcttttaccagtcgccctatgactcagagcaggtgccccaggcactccgccggctccgcccgcgcacccggaaagtcaagagcgtgtccccacagggcaacagcgttgaccgcatggcagctccgagagcagaggctctatttgacttcactggaaacagcaaactggagctgaatttcaaagctggagatgtgatcttcctcctcagtcggatcaacaaagactggctggagggcactgtccggggagccacgggcatcttccctctctccttcgtgaagatcctcaaagacttccctgaggaggacgaccccaccaactggctgcgttgctactactacgaagacaccatcagcaccatcaaggacatcgcggtggaggaagatctcagcagcactcccctattgaaagacctgctggagctcacaaggcgggagttccagagagaggacatagctctgaattaccgggacgctgagggggatctggttcggctgctgtcggatgaggacgtagcgctcatggtgcggcaggctcgtggcctcccctcccagaagcgcctcttcccctggaagctgcacatcacgcagaaggacaactacagggtctacaacacgatgccatgagctgacggtgtccctggagcagtgaggggacaccagcaaaaaccttcagctctcagaggagattgggaccaggaaaacctgggaggatgggcagacttcctgtctttgaggctaatggacccgtggggcttgtaatctgtctctttctactatttacatctgatttaaataaaccattccatctgaaagggg

SEQ ID NO: 20168 - DNA, 1641 bp, Homo sapiens
  source 1..1641: mol_type = unassigned DNA
ggaggaggagcctctgccagactggagagaagcaggcctgagcctccccaaaggcagctcctggggactcccaggaccacaggctgagacgagacgcagggtggctggaggaagtgagaggtgaactcagcctgggactggctgggcgagactctccacctgctccctgggaccatcgcccaccatggctgtggcccagcagctgcgggccgagagtgactttgaacagcttccggatgatgttgccatctcggccaacattgctgacatcgaggagaagagaggcttcaccagccactttgttttcgtcatcgaggtgaagacaaaaggaggatccaagtacctcatctaccgccgctaccgccagttccatgctttgcagagcaagctggaggagcgcttcgggccagacagcaagagcagtgccctggcctgtaccctgcccacactcccagccaaagtctacgtgggtgtgaaacaggagatcgccgagatgcggatacctgccctcaacgcctacatgaagagcctgctcagcctgccggtctgggtgctgatggatgaggacgtccggatcttcttttaccagtcgccctatgactcagagcaggtgccccaggcactccgccggctccgcccgcgcacccggaaagtcaagagcgtgtccccacagggcaacagcgttgaccgcatggcagctccgagagcagaggctctatttgacttcactggaaacagcaaactggagctgaatttcaaagctggagatgtgatcttcctcctcagtcggatcaacaaagactggctggagggcactgtccggggagccacgggcatcttccctctctccttcgtgaagatcctcaaagacttccctgaggaggacgaccccaccaactggctgcgttgctactactacgaagacaccatcagcaccatcaagtctgtggcctgggagggaggggcctgtccagccttcctgccatccctacgaccactgcccctcacatcaccttctcatgggtccctctcccactccaaagcccccagtggctcccagatgagccacaatgctgtaacaagccatcaacgtccagggtggcctggccagcctcattcccctttcccccaccccacaccccacttccagcctgatgcctccttactccagcctgtcacccccttagggacatcgcggtggaggaagatctcagcagcactcccctattgaaagacctgctggagctcacaaggcgggagttccagagagaggacatagctctgaattaccgggacgctgagggggatctggttcggctgctgtcggatgaggacgtagcgctcatggtgcggcaggctcgtggcctcccctcccagaagcgcctcttcccctggaagctgcacatcacgcagaaggacaactacagggtctacaacacgatgccatgagctgacggtgtccctggagcagtgaggggacaccagcaaaaaccttcagctctcagaggagattgggaccaggaaaacctgggaggatgggcagacttcctgtctttgaggctaatggacccgtggggcttgtaatctgtctctttctactatttacatctgatttaaataaaccattccatctgaaagggg

SEQ ID NO: 20169 - DNA, 906 bp, Homo sapiens
  source 1..906: mol_type = unassigned DNA
ggaggaggagcctctgccagactggagagaagcaggcctgagcctccccaaaggcagctcctggggactcccaggaccacaggctgagacgagacgcagggtggctggaggaagtgagaggtgaactcagcctgggactggctgggcgagactctccacctgctccctgggaccatcgcccaccatggctgtggcccagcagctgcgggccgagaggttttcgtcatcgaggtgaagacaaaaggaggatccaagtacctcatctaccgccgctaccgccagttccatgctttgcagagcaagctggaggagcgcttcgggccagacagcaagagcagtgccctggcctgtaccctgcccacactcccagccaaagtctacgtgggtgtgaaacaggagatcgccgagatgcggatacctgccctcaacgcctacatgaagagcctgctcagcctgccggtctgggtgctgatggatgaggacgtccggatcttcttttaccagtcgccctatgactcagagcaggtgccccaggcactccgccggctccgcccgcgcacccggaaagtcaagagcgtgtccccacagggcaacagcgttgaccgcatggcagctccgagagcagaggctctatttgacttcactggaaacagcaaactggagctgaatttcaaagctggagatgtgatcttcctcctcagtcggatcaacaaagactggctggagggcactgtccggggagccacgggcatcttccctctctccttcgtgaagatcctcaaagacttccctgaggaggacgaccccaccaactggctgcgttgctactactacgaagacaccatcagcaccatcaagtctgtggcctgggagggaggggcctgtccagccttcctgccatcccta

SEQ ID NO: 20170 - DNA, 842 bp, Homo sapiens
  source 1..842: mol_type = unassigned DNA
cggcggcggcggcagcggcagccagaggactcccagcggctggagcagaagtgttagcggccagagctcccagacccctacccacagccaggcgggacgcgcacagtccctccacgcggaaagaagtaccttcgccggtcaccggctcctgcagggtgcaaatatatacagagcttcataatcagcccaagaccacatagagcaaacatgaatgatatttcccaaaaggctgagattctgctttcttcatctaaacctgtcccaaaaacctatgtaccaaaacttggcaagggtgatgtaaaggataagtttgaagccatgcagagagccagggaagaaagaaatcaaaggagatctagagacgaaaaacaaagaagaaaagaacaatatattagagagagagaatggaacaggagaaagcaggagattaaagaaatgcttgcttctgatgatgaggaagatgtatcttctaaagtagaaaaggcttatgttccaaaattaacaggaactgtgaagggtagatttgctgaaatggagaaacaaagacaagaggaacaaaggaagagaacggaggaggaacgaaaacgcagaattgagcaggatatgttagaaaagaggaaaatacagcgtgaattagcaaaaagggctgaacagaaattagccaggcgtgatggtgcacacctgtagtaccagctactcaggaggctgaggcaggagaattgcttgaacccagcatgcagaagttgcagtgacctgagactacgacactacactccagcctgggtgacagcacgagactccatctcaaaaaaaaaaataaactagcctacatctttcactgc

SEQ ID NO: 20171 - DNA, 3195 bp, Homo sapiens
  source 1..3195: mol_type = unassigned DNA
aacagctgcagccggcgctgggcccgcctggaatgcgggaacaggctgcacaccaggacttttatggaaacttgctgctggagacggcggcggcggcggcggcagcggcagccagaggactcccagcggctggagcagaagtgttagcggccagagctcccagacccctacccacagccaggcgggacgcgcacagtccctccacgcggaaagaagtaccttcgccggtcaccggctcctgcagggtgcaaatatatacagagcttcataatcagcccaagaccacatagagcaaacatgaatgatatttcccaaaaggctgagattaaagaaatgcttgcttctgatgatgaggaagatgtatcttctaaagtagaaaaggcttatgttccaaaattaacaggaactgtgaagggtagatttgctgaaatggagaaacaaagacaagaggaacaaaggaagagaacggaggaggaacgaaaacgcagaattgagcaggatatgttagaaaagaggaaaatacagcgtgaattagcaaaaagggctgaacagattgaggacataaacaatacgggaactgaatcagcatcagaggaaggagatgattcactacttataactgtggtacctgtcaaatcatataaaacatctggaaaaatgaaaaagaattttgaggatctagaaaaagaacgtgaagagaaagaaaggatcaagtacgaggaagataaaagaataagatatgaagaacaacgaccatctctcaaggaagcaaagtgtctttcattagttatggatgatgaaatagaaagtgaagcaaaaaaagaatcactttctcccggaaaattgaaactaacttttgaagaactggagcgacaaagacaagaaaaccgaaagaagcaagctgaagaggaagcaagaaaacgtttagaagaagagaagcgtgcttttgaagaagcaaggcggcaaatggtaaatgaagatgaggaaaaccaagacacagcaaaaatttttaaagggtaccgccctggtaaactcaaactcagttttgaagaaatggaaaggcaaagaagagaagatgaaaaaaggaaagcagaagaagaagccagaaggagaatagaggaagaaaagaaggcgtttgctgaagcaaggagaaatatggtagtagatgatgactccccagagatgtataagacaatctctcaagaatttcttacaccgggaaaactggaaattaattttgaagaattattaaaacaaaaaatggaagaagaaaaacgacgaacagaggaggaacggaagcataagctagaaatggagaaacaagaatttgaacaactgagacaggaaatgggagaggaagaggaagaaaatgaaacctttggattgagcagagaatatgaagaactgatcaaattaaaaaggagtggctctattcaagctaaaaacctaaaaagcaagtttgaaaaaattggacagttgtctgaaaaagaaatacagaaaaaaatagaagaagagcgagcaagaaggagagcaattgaccttgaaattaaagagcgagaagctgaaaattttcatgaggaagatgatgttgatgttaggcctgcaagaaaaagcgaggctccatttactcacaaagtgaatatgaaagctagatttgaacaaatggctaaggcaagagaagaagaagaacaaagaagaattgaagaacaaaagttactacgcatgcagtttgaacaaagggaaattgatgcagcactacaaaagaaaagagaagaggaggaggaggaagaaggtagcatcatgaatggctccactgctgaagatgaagagcaaaccagatcaggagctccatggttcaagaagcctcttaaaaacacatcagttgtagacagtgagccagtcagatttacggttaaagtaacaggagaacccaaaccagaaattacatggtggtttgaaggagaaatactgcaggatggagaagactatcaatatattgaaaggggagaaacttactgcctttacttaccagaaactttcccagaagatggaggagagtatatgtgtaaagcagtcaacaataaaggatctgcagctagtacctgtattcttaccattgaaagtaagaattaatcactctttttatcttttattctattaatttttttttccttaaaatcacttttcttcttctcttttttagctgatgactactagctcccctcccctctccctggaactttctctttcactccaactttcttactacatccatcttttctgtggcggggccaaaaaaggaaaccaggagtgccactatgctgacttcttattccttttcataacagtcttcaaagcacagctcatctaaagaatgcctacttcttttccaaataagcatcagatttatcgcctattatgcagtaacagtcaataaaatgtacttatgggggggaattactcaattattctatcagaacctattataaagactgtatttcccatagacgtttacagcaactatgtttaaaaaacaaaaacaaaaaaaaaacacacaaacctaagtagaatacattattttgcatgaaggaatgtcatttctgagctttttacacctaaaattaggctgaaatagctgagataattaatttggaacctatcaatttgagtggactttttctttagtagtacaccattttggttgttgtagtttcaaagtctttctgaagcagatatattgggattggagcggggtggggaaaactgtcactcctttcagaggaaaaggggaggagcatggagaaaaacaaaaattaaaggacttaaagaatggctatacagtgttgagtgttgaggatattaaacatgttatttttcaaacgtatgtaatatatattaaatttataaagcaaatttatgttgtgatcttgcctgaacaaattatattttaatgaaaaaactttctattaatagttcacgcaagagaaaacactttcaacatagtcgaaggcttcaagatctaagtgtatcagacttagggaaaaagtggcacaaccttcgatttaaaattctagtctttaaaatgagtttgtaaataattagctattacgttctattaagttgttttatattttaattttctggaagacaattttattttacaacgtgaacccaaataaagtaacttctgtattt

SEQ ID NO: 20172 - DNA, 2607 bp, Homo sapiens
  source 1..2607: mol_type = unassigned DNA
agaggactcccagcggctggagcagaagtgttagcggccagagctcccagacccctacccacagccaggcgggacgcgcacagtccctccacgcggaaagaagtaccttcgccggtcaccggctcctgcagggtgcaaatatatacagagcttcataatcagcccaagaccacatagagcaaacatgaatgatatttcccaaaaggctgagattctgctttcttcatctaaacctgtcccaaaaacctatgtaccaaaacttggcaagggtgatgtaaaggataagtttgaagccatgcagagagccagggaagaaagaaatcaaaggagatctagagacgaaaaacaaagaagaaaagaacaatatattagagagagagaatggaacaggagaaagcaggagattaaagaaatgcttgcttctgatgatgaggaagatgtatcttctaaagtagaaaaggcttatgttccaaaattaacaggaactgtgaagggtagatttgctgaaatggagaaacaaagacaagaggaacaaaggaagagaacggaggaggaacgaaaacgcagaattgagcaggatatgttagaaaagaggaaaatacagcgtgaattagcaaaaagggctgaacagattgaggacataaacaatacgggaactgaatcagcatcagaggaaggagatgattcactacttataactgtggtacctgtcaaatcatataaaacatctggaaaaatgaaaaagaattttgaggatctagaaaaagaacgtgaagagaaagaaaggatcaagtacgaggaagataaaagaataagatatgaagaacaacgaccatctctcaaggaagcaaagtgtctttcattagttatggatgatgaaatagaaagtgaagcaaaaaaagaatcactttctcccggaaaattgaaactaacttttgaagaactggagcgacaaagacaagaaaaccgaaagaagcaagctgaagaggaagcaagaaaacgtttagaagaagagaagcgtgcttttgaagaagcaaggcggcaaatggtaaatgaagatgaggaaaaccaagacacagcaaaaatttttaaagggtaccgccctggtaaactcaaactcagttttgaagaaatggaaaggcaaagaagagaagatgaaaaaaggaaagcagaagaagaagccagaaggagaatagaggaagaaaagaaggcgtttgctgaagcaaggagaaatatggtagtagatgatgactccccagagatgtataagacaatctctcaagaatttcttacaccgggaaaactggaaattaattttgaagaattattaaaacaaaaaatggaagaagaaaaacgacgaacagaggaggaacggaagcataagctagaaatggagaaacaagaatttgaacaactgagacaggaaatgggagaggaagaggaagaaaatgaaacctttggattgagcagagaatatgaagaactgatcaaattaaaaaggagtggctctattcaagctaaaaacctaaaaagcaagtttgaaaaaattggacagttgtctgaaaaagaaatacagaaaaaaatagaagaagagcgagcaagaaggagagcaattgaccttgaaattaaagagcgagaagctgaaaattttcatgaggaagatgatgttgatgttaggcctgcaagaaaaagcgaggctccatttactcacaaagtgaatatgaaagctagatttgaacaaatggctaaggcaagagaagaagaagaacaaagaagaattgaagaacaaaagttactacgcatgcagtttgaacaaagggaaattgatgcagcactacaaaagaaaagagaagaggaggaggaggaagaaggtagcatcatgaatggctccactgctgaagatgaagagcaaaccagatcaggagctccatggttcaagaagcctcttaaaaacacatcagttgtagacagtgagccagtcagatttacggttaaagtaacaggagaacccaaaccagaaattacatggtggtttgaaggagaaatactgcaggatggagaagactatcaatatattgaaaggggagaaacttactgcctttacttaccagaaactttcccagaagatggaggagagtatatgtgtaaagcagtcaacaataaaggatctgcagctagtacctgtattcttaccattgaaagtaagaattaatcactctttttatcttttattctattaatttttttttccttaaaatcacttttcttcttctcttttttagctgatgactactagctcccctcccctctccctggaactttctctttcactccaactttcttactacatccatcttttctgtggcggggccaaaaaaggaaaccaggagtgccactatgctgacttcttattccttttcataacagtcttcaaagcacagctcatctaaagaatgcctacttcttttccaaataagcatcagatttatcgcctattatgcagtaacagtcaataaaatgtacttatgggggggaattactcaattattctatcagaacctattataaagactgtatttcccatagacgtttacagcaactatgttt

SEQ ID NO: 20173 - DNA, 2712 bp, Homo sapiens
  source 1..2712: mol_type = unassigned DNA
ctgtgaagggtagatttgctgaaatggagaaacaaagacaagaggaacaaaggaagagaacggaggaggaacgaaaacgcagaattgagcaggatatgttagaaaagaggaaaatacagcgtgaattagcaaaaagggctgaacagattgaggacataaacaatacgggaactgaatcagcatcagaggaaggagatgattcactacttataactgtggtacctgtcaaatcatataaaacatctggaaaaatgaaaaagaattttgaggatctagaaaaagaacgtgaagagaaagaaaggatcaagtacgaggaagataaaagaataagatatgaagaacaacgaccatctctcaaggaagcaaagtgtctttcattagttatggatgatgaaatagaaagtgaagcaaaaaaagaatcactttctcccggaaaattgaaactaacttttgaagaactggagcgacaaagacaagaaaaccgaaagaagcaagctgaagaggaagcaagaaaacgtttagaagaagagaagcgtgcttttgaagaagcaaggcggcaaatggtaaatgaagatgaggaaaaccaagacacagcaaaaatttttaaagggtaccgccctggtaaactcaaactcagttttgaagaaatggaaaggcaaagaagagaagatgaaaaaaggaaagcagaagaagaagccagaaggagaatagaggaagaaaagaaggcgtttgctgaagcaaggagaaatatggtagtagatgatgactccccagagatgtataagacaatctctcaagaatttcttacaccgggaaaactggaaattaattttgaagaattattaaaacaaaaaatggaagaagaaaaacgacgaacagaggaggaacggaagcataagctagaaatggagaaacaagaatttgaacaactgagacaggaaatgggagaggaagaggaagaaaatgaaacctttggattgagcagagaatatgaagaactgatcaaattaaaaaggagtggctctattcaagctaaaaacctaaaaagcaagtttgaaaaaattggacagttgtctgaaaaagaaatacagaaaaaaatagaagaagagcgagcaagaaggagagcaattgaccttgaaattaaagagcgagaagctgaaaattttcatgaggaagatgatgttgatgttaggcctgcaagaaaaagcgaggctccatttactcacaaagtgaatatgaaagctagatttgaacaaatggctaaggcaagagaagaagaagaacaaagaagaattgaagaacaaaagttactacgcatgcagtttgaacaaagggaaattgatgcagcactacaaaagaaaagagaagaggaggaggaggaagaaggtagcatcatgaatggctccactgctgaagatgaagagcaaaccagatcaggagctccatggttcaagaagcctcttaaaaacacatcagttgtagacagtgagccagtcagatttacggttaaagtaacaggagaacccaaaccagaaattacatggtggtttgaaggagaaatactgcaggatggagaagactatcaatatattgaaaggggagaaacttactgcctttacttaccagaaactttcccagaagatggaggagagtatatgtgtaaagcagtcaacaataaaggatctgcagctagtacctgtattcttaccattgaaactgatgactactagctcccctcccctctccctggaactttctctttcactccaactttcttactacatccatcttttctgtggcggggccaaaaaaggaaaccaggagtgccactatgctgacttcttattccttttcataacagtcttcaaagcacagctcatctaaagaatgcctacttcttttccaaataagcatcagatttatcgcctattatgcagtaacagtcaataaaatgtacttatgggggggaattactcaattattctatcagaacctattataaagactgtatttcccatagacgtttacagcaactatgtttaaaaaacaaaaacaaaaaaaaaacacacaaacctaagtagaatacattattttgcatgaaggaatgtcatttctgagctttttacacctaaaattaggctgaaatagctgagataattaatttggaacctatcaatttgagtggactttttctttagtagtacaccattttggttgttgtagtttcaaagtctttctgaagcagatatattgggattggagcggggtggggaaaactgtcactcctttcagaggaaaaggggaggagcatggagaaaaacaaaaattaaaggacttaaagaatggctatacagtgttgagtgttgaggatattaaacatgttatttttcaaacgtatgtaatatatattaaatttataaagcaaatttatgttgtgatcttgcctgaacaaattatattttaatgaaaaaactttctattaatagttcacgcaagagaaaacactttcaacatagtcgaaggcttcaagatctaagtgtatcagacttagggaaaaagtggcacaaccttcgatttaaaattctagtctttaaaatgagtttgtaaataattagctattacgttctattaagttgttttatattttaattttctggaagacaattttattttacaacgtgaacccaaataaagtaacttctgtatttaaaa

SEQ ID NO: 20174 - DNA, 1263 bp, Homo sapiens
  source 1..1263: mol_type = unassigned DNA
ggaacagctgcagccggcgctgggcccgcctggaatgcgggaacaggctgcacaccaggacttttatggaaacttgctgctggagacggcggcggcggcggcggcagcggcagccagaggactcccagcggctggagcagaagtgttagcggccagagctcccagacccctacccacagccaggcgggacgcgcacagtccctccacgcggaaagaagtaccttcgccggtcaccggctcctgcagggtgcaaatatatacagagcttcataatcagcccaagaccacatagagcaaacatgaatgatatttcccaaaaggctgagattaaagaaatgcttgcttctgatgatgaggaagatgtatcttctaaagtagaaaaggcttatgttccaaaattaacaggaactgtgaagggtagatttgctgaaatggagaaacaaagacaagaggaacaaaggaagagaacggaggaggaacgaaaacgcagaattgagcaggatatgttagaaaagaggaaaatacagcgtgaattagcaaaaagggctgaacagattgaggacataaacaatacgggaactgaatcagcatcagaggaaggagatgattcactacttataactgtggtacctgtcaaatcatataaaacatctggaaaaatgaaaaagaattttgaggatctagaaaaagaacgtgaagagaaagaaaggatcaagtacgaggaagataaaagaataagatatgaagaacaacgaccatctctcaaggaagcaaagtgtctttcattagttatggatgatgaaatagaaagtgaagcaaaaaaagaatcactttctcccggaaaattgaaactaacttttgaagaactggagcgacaaagacaagaaaaccgaaagaagcaagctgaagaggaagcaagaaaacgtttagaagaagagaagcgtgcttttgaagaagcaaggcggcaaatggtaaatgaagatgaggaaaaccaagacacagcaaaaatttttaaagggtaccgccctggtaaactcaaactcagttttgaagaaatggaaaggcaaagaagagaagatgaaaaaaggaaagcagaagaagaagccagaaggagaatagaggaagaaaagaaggcgtttgctgaagcaaggagaaatatggtagtagatgatgactccccagagatgtataagacaatctctcaagaatttcttacaccgggaaaactggaaattaattttgaagaattattaaaacaaaaaa

SEQ ID NO: 20175 - DNA, 1456 bp, Homo sapiens
  source 1..1456: mol_type = unassigned DNA
cggccagagctcccagacccctacccacagccaggcgggacgcgcacagtccctccacgcggaaagaagtaccttcgccggtcaccggctcctgcagggtgcaaatatatacagagcttcataatcagcccaagaccacatagagcaaacatgaatgatatttcccaaaaggctgagattctgctttcttcatctaaacctgtcccaaaaacctatgtaccaaaacttggcaagggtgatgtaaaggataagtttgaagccatgcagagagccagggaagaaagaaatcaaaggagatctagagacgaaaaacaaagaagaaaagaacaatatattagagagagagaatggaacaggagaaagcaggagattaaagaaatgcttgcttctgatgatgaggaagatgtatcttctaaagtagaaaaggcttatgttccaaaattaacaggaactgtgaagggtagatttgctgaaatggagaaacaaagacaagaggaacaaaggaagagaacggaggaggaacgaaaacgcagaattgagcaggatatgttagaaaagaggaaaatacagcgtgaattagcaaaaagggctgaacaggaaggagatgattcactacttataactgtggtacctgtcaaatcatataaaacatctggaaaaatgaaaaagaattttgaggatctagaaaaagaacgtgaagagaaagaaaggatcaagtacgaggaagataaaagaataagatatgaagaacaacgaccatctctcaaggaagcaaagtgtctttcattagttatggatgatgaaatagaaagtgaagcaaaaaaagaatcactttctcccggaaaattgaaactaacttttgaagaactggagcgacaaagacaagaaaaccgaaagaagcaagctgaagaggaagcaagaaaacgtttagaagaagagaagcgtgcttttgaagaagcaaggcggcaaatggtaaatgaagatgaggaaaaccaagacacagcaaaaatttttaaagggtaccgccctggtaaactcaaactcagttttgaagaaatggaaaggcaaagaagagaagatgaaaaaaggaaagcagaagaagaagccagaaggagaatagaggaagaaaagaaggcgtttgctgaagcaaggagaaatatggtagtagatgatgactccccagagatgtataagacaatctctcaagaatttcttacaccgggaaaactggaaattaattttgaagaattattaaaacaaaaaatggaagaagaaaaacgacgaacagaggaggaacggaagcataagctagaaatggagaaacaagaatttgaacaactgagacaggaaatgggagaggaagaggaagaaaatgaaacctttggattgagcagagaatatgaagaactgatcaaattaaaaaggagtggctctattcaagctaaaaacctaaaaa

SEQ ID NO: 20176 - DNA, 2286 bp, Homo sapiens
  source 1..2286: mol_type = unassigned DNA
aacagctgcagccggcgctgggcccgcctggaatgcgggaacaggctgcacaccaggacttttatggaaacttgctgctggagacggcggcggcggcggcggcagcggcagccagaggactcccagcggctggagcagaagtgttagcggccagagctcccagacccctacccacagccaggcgggacgcgcacagtccctccacgcggaaagaagtaccttcgccggtcaccggctcctgcagggtgcaaatatatacagagcttcataatcagcccaagaccacatagagcaaacatgaatgatatttcccaaaaggctgagattctgctttcttcatctaaacctgtcccaaaaacctatgtaccaaaacttggcaagggtgatgtaaaggataagtttgaagccatgcagagagccagggaagaaagaaatcaaaggagatctagagacgaaaaacaaagaagaaaagaacaatatattagagagagagaatggaacaggagaaagcaggagattaaagaaatgcttgcttctgatgatgaggaagatgtatcttctaaagtagaaaaggcttatgttccaaaattaacaggaactgtgaagggtagatttgctgaaatggagaaacaaagacaagaggaacaaaggaagagaacggaggaggaacgaaaacgcagaattgagcaggatatgttagaaaagaggaaaatacagcgtgaattagcaaaaagggctgaacaggaaggagatgattcactacttataactgtggtacctgtcaaatcatataaaacatctggaaaaatgaaaaagaattttgaggatctagaaaaagaacgtgaagagaaagaaaggatcaagtacgaggaagataaaagaataagatatgaagaacaacgaccatctctcaaggaagcaaagtgtctttcattagttatggatgatgaaatagaaagtgaagcaaaaaaagaatcactttctcccggaaaattgaaactaacttttgaagaactggagcgacaaagacaagaaaaccgaaagaagcaagctgaagaggaagcaagaaaacgtttagaagaagagaagcgtgcttttgaagaagcaaggcggcaaatggtaaatgaagatgaggaaaaccaagacacagcaaaaatttttaaagggtaccgccctggtaaactcaaactcagttttgaagaaatggaaaggcaaagaagagaagatgaaaaaaggaaagcagaagaagaagccagaaggagaatagaggaagaaaagaaggcgtttgctgaagcaaggagaaatatggtagtagatgatgactccccagagatgtataagacaatctctcaagaatttcttacaccgggaaaactggaaattaattttgaagaattattaaaacaaaaaatggaagaagaaaaacgacgaacagaggaggaacggaagcataagctagaaatggagaaacaagaatttgaacaactgagacaggaaatgggagaggaagaggaagaaaatgaaacctttggattgagcagagaatatgaagaactgatcaaattaaaaaggagtggctctattcaagctaaaaacctaaaaagcaagtttgaaaaaattggacagttgtctgaaaaagaaatacagaaaaaaatagaagaagagcgagcaagaaggagagcaattgaccttgaaattaaagagcgagaagctgaaaattttcatgaggaagatgatgttgatgttaggcctgcaagaaaaagcgaggctccatttactcacaaagtgaatatgaaagctagatttgaacaaatggctaaggcaagagaagaagaagaacaaagaagaattgaagaacaaaagttactacgcatgcagtttgaacaaagggaaattgatgcagcactacaaaagaaaagagaagaggaggaggaggaagaaggtagcatcatgaatggctccactgctgaagatgaagagcaaaccagatcaggagctccatggttcaagaagcctcttaaaaacacatcagttgtagacagtgagccagtcagatttacggttaaagtaacaggagaacccaaaccagaaattacatggtggtttgaaggagaaatactgcaggatggagaagactatcaatatattgaaaggggagaaacttactgcctttacttaccagaaactttcccagaagatggaggagagtatatgtgtaaagcagtcaacaataaaggatctgcagctagtacctgtattcttaccattgaaactgatgactactag

SEQ ID NO: 20177 - DNA, 5602 bp, Homo sapiens
  source 1..5602: mol_type = unassigned DNA
gtgaactaaagagtcgccgcagacaagcaggcccccagatggagaaccagcctgtgaggtggcgggccctgccaggcctcccacgccctcctgggctccccgcagccccctggctcctccttggcgtgctgctgctgcccgggaccctgcgactggcaggaggacagtcagtgacccacaccggcctgcccatcatggcctccctggccaacacagctatctccttcagctgcaggatcacctatccatacactccccaattcaaggttttcacagtcagctactttcatgaagatctccagggacagaggagccctaagaagccaacaaactgccaccctggactgggcacagagaaccagagccacaccctggactgccaggtcacccttgtgctgccgggagcatcggccactggcacctactactgctctgtccactggccacactccacggtgagaggcagcggcaccttcatcctggtcagagacgcagggtaccgagagcccccgcagagtccacagaagctcctgctctttggcttcaccggcctcctgagtgtcctgagtgtagtgggcacggccctgctgctctggaacaagaagcggatgcggggtccagggaaggaccccaccaggaagtgcccagatccaagatctgccagcagccccaagcagcatccttcagaatctgtctacacagctctgcagcgccgcgagaccgaggtctatgcctgcatcgagaatgaggatggcagctcacccaccgccaagcagagccccctctcccaggagagaccgcatagattcgaagatgatggcgaacttaacctggtctatgaaaatctctaggatgggctccaccgctcatagagcttgccctgggtcagaggaccggggcagcccctgccaccaaaggacttgatctgagttgggagtaaggcccccagggacaccccatcatttcaccctcacattcaaggcccttcctgtcttggccggccccactgcccccccattctatgccccaaccaccaaggctttcccatcttggggcctttgcccaggctgttccttctgccaggcaggcccttcctcccttggcccaaccagcaaagcgcccctcagtcttcaagggctttcctggatgccacccttgcccagagccctgctcactgcctcatgctgacagagcagcatgctctcttggcaccagcctgcacctcagccagtagggcagcctctgagctgagggaggaccctgcaggggcgcctagcagtgctgtgtggggagccgaggtatggaggagctggggagcagctatgcaaatccctacctacccagctgggccagaggcacgaggcagccaggcagggtgggagcaggggctggcgtgggaggtctgggggacagacaaggatgatggacccctcagaggcaagactaggatcagggacagatctggaggcccaggacatggctgagaggtggtcagcaggctgggggcatggagcagagagggcttgggtacaagctggagaggaaggagattctggcatgttggggtgagggcagagggacagatgaggggaggagggtgctggctaaacaggaactgaatgaatggcctgaagctccctctcccaagggttcccactcccattggcctggccctgtacgtgcactctgtcatctccttggtcaccctctgctccaggccttctccaccacaggacctcagctgtccctccttctacccaaggtggagtcccccaaagtcccttctgtctggcctatcctgtgcccaccacctgtggcttcatccagccctcctcctctatctttatctgccataggccgcagccctggccccctgtggattgaggtcccaagtggtccagctgtggggtttggtgctgggaccctcaatggcagccggaaggtccctctgaggcagaagctcaagccccatggggacagtggctccccagtgcctggccctgagccatttctgctgtttcaggtgcccacatcaccctcatttcctcctcgcagtagccctgcaccgtggccagaaacccatccacaggcaggcagtggctggggtccgggtgccccgggctgttgggctctgcttcctccctctgctcccccatgtctccctgagttctcccacctttgctcatttgtaaaatgggcaggtcaatcttcccaccccaccgtgtgggctgccccaaccccaaatgtgcccagggaggggggggaacccaaggcacaggccccgcccctgcccccaagcagcactgggctactggctcacagaagcacctttggttctgcaggtcatgcccctccctgcagggaagggaaagctggtggtagaggctgggcacagactgacgtccagaagaagtcccttggccctgctagggtggcaccagacttctctggtcccacaggacagccagtggcctcccaacttggttctgggcccccgcctgcaagcacacatggcaaggagggctttagcaggctcacataaccgagtggcaaggcccctgctcccagaggctggatttgaatgaactccgggcctgtttggggaggtgaagctgccaggtgtgcacaggggcctcccaggctcctggctccaccagccaaggaggtgggggcaagggtcagggcaatgggggacaatgccgctcagggtgcagtgagctcccctgggaaaaccgaagccagcaagaccaggagagggccacctcactgggcctgcctcccccacctcctgggcctctctgacctcagctcctagaccctggacccttggctgggactcagcattttccagtctttttcaggggtagacaggggagcctgggttaaactttaccactgtgccctggcccaggcatcaccaacacggcctccctgcagctgccctgccaccgacagaccccgattaaacccacacctggccttggcctcccctgctctataccttgcatggtttttgcctcacttggaataaaattccaactcctccctgtggcgtaggaggttcttgggggctgacccatcacccctctggtggacagagacattgccagcgtggtggtcgtctgtgcttggttcagggcaaggctgggaggcagtgggtgctgaggtcttcagtgagcaaggagagaggcagggaggaggaggaggaggaggagagcacagcatgaaaggacgggaccctaaagggctttggcccaagggagggtggggcaagaatgttctgagacttctgtgggcagcaaagaggactgagcacctgttctccagcccccaggactgagagcctgcagagacaagctggcacagggcgaggggtggcagggaacttcagggtgggaggtgcatggggcaggcgggaggaggaagaacagagaggggacagagagggtatgaatgggagctcctggggtgcaggcttgctttccactatgaatgggtggaggagggaagagaagaaaattgcttttgagacccacccaggctgggtggcctcagggcctcccttgaatccctgctccacctcccacagccttgtggacttgggcaagtcactggccacctgagcctcagtttgcagtgacagtcaagacagctcaggccaggcgtagtggcttatgcctgtaatcccagcatgttgggaggccgaggcgggtggatcacttgaggccaggagtttgagaccagcctggccaacgtggtgaaaccccgtctctactaaaaatacaaaaattagcctggtgtggtggcacgcacctgtagtcccagctactcgagaggctaaggcaggagaatctcttgaacctgggagacagaggttgcagtgagccgaagtggcaccactgcacaccagcctgggctacagagcacgctctgtccaaataaacaaacaaacaaacactactcagtgtctcagaaaggacagaaggggactccctggctcaggcagaagctcagtgggtgtgcatttccttcaagactcgtccttcagaaggaataggcttctggggcagtacagaggagtctaagtgagaggcaggcctccctgggagctgggcccaggctctctgcagccatgcctttaaggagtgcctacggggtagcacgatcagatggacaggccagggctgcccagagctgggggtgggagcaaggtaagcagagaggtgagggaaggagggtgctggcttagcaggagctgaatgaatgggcctggaggggaaaagctaagggggatggggtggcttgagtggagtaggtgaggcctaggtgaaggggagctgtggaccttccaggacggacggatgtgagcagtcctgagtggggactggagttagggtggggaagggaagccccaggcagcccctgcaggcccctgcccctgggccctaccgcagcagggcagccctgtctctgggtctcagctgatgcttccctctgcccactggcccctgacctggtgggatttcccaccatctctcccggcccagcctgccctgccctcctaggtcttcccaacctcccctctgcagaaacatctcagccacgtctggcacccccaggcatccctgcctgcctctaggaagttgaccccttcaatgggtttcagcctccaaccccacccccgcttgactcctgctctgtcagcacttgcttgagaaaatcatcctgggaaaccagcttctgggagcaggggccttgccactcggttctgcgagcctgctgaagccctccttgccacgtgtgcttgcaggcgggggcccagaactaagctaggaggccactggctgtcctgtgggaccagggaagtctggtgccaccctagcagagggcccatggacttcttctggaggtcagtctgtgcccagcctctaccaccagtccagaacttgcagtgggtgcggtaaacggtggcccctcctcagcaaacatttccaggggattctggcagcagagtttccatgggaacatgtgctggttctgcgctgaacccggtgtggctggggttcccttcacagccaatattgcaggaactgagcctggtggcctcggccagggtaggcagtgctctttggccacccagtgtcacaaacctgaactcaagttacaggcaaaacctgcttttcctttttctttctctctctctctctttttttttttgttaaagcacattctaatgtaaagtccatgctccattctaaagatgcctctgggatttcagggatggatttttatgtagttcaatagttttcttggcagacagcttatgcaggagaggtgggccgttggctcagtccagccaggctgagtggcgtcactccattccttgcaatgccaggggatgtcatttgtccacctgagggggcttccccagtctcccttccctgacctgtggtcagaatgatggcctcagccttgactgagcgcgggtcaggccagactctctgaacttggtgttggcgtgtgttttgtgtgtgtctggaggtgacatatgtgggtgacagaagcatatgttacagtgaaacattaaaactacagcaaagtg

SEQ ID NO: 20178 - DNA, 1580 bp, Homo sapiens
  source 1..1580: mol_type = unassigned DNA
ctagatccggggaagggttttgcagaagtacccagaactgtgtccaaggtttcctcagatttgggctgttccgcagcggcaggtcccgggaaccaaggcaacagacatcttcctaggctcgcgagagcgcccccttgtcccacggctgctggggccccccagtagccatggctccggtgtccggctcacgcagcccggatagggaggcctcgggctcggggggaagacgtcgcagttcgtcgaagagtccgaagcccagcaaatctgcccgctccccgcggggccgccgctctcgctcgcactcttgctctcggtccggggaccggaatggactcacccatcagctgggtggcctcagccaaggctcccgaaaccagtcctaccgctcacgctcgcggtcgcgttctagagagcggccctctgcgccccggggcatccccttcgcttctgcctcctcgtcagtctattacggcagctactcgcgcccctacgggagcgacaagccttggcctagcctcctcgacaaggagagggaggagagcctgcggcagaagagattaagtgagagagagagaattggagaattgggagctcctgaagtatggggactttctccaaagaatcctgaaccagattctgatgaacatacaccagtggaggatgaagagccaaagaaaagcactacttcagcttctacttcagaagaagaaaaaaagaagaagtctagccgttcaaaagaaaggtccaagaaaaggagaaagaaaaaatcatcgaaaagaaaacataagaagtattctgaagatagcgacagtgactctgattctgaaacagactccagtgatgaagataacaaaaggagagcaaagaaagccaagaaaaaggaaaagaagaagaaacacagatcgaagaaatataagaaaaagaggtctaagaagagcagaaaagagtccagtgattcaagctctaaagaatcccaagaagagtttctggaaaatccctggaaggatcgaacaaaggctgaagaaccatcagatttaattggcccagaggctccaaaaacacttacctctcaagatgataaacctttgaactatggccatgctctgttacctggtgaaggtgcagctatggctgaatatgtaaaagctggaaaacgtatcccacgaagaggtgaaattggcttgacaagtgaagaaattgcatcatttgaatgctcaggttatgtaatgagtggtagcaggcatcgccgaatggaggctgtgcgactgcgaaaagagaaccagatctacagtgctgatgagaagagagcccttgcatcctttaaccaagaagagagacgaaagagagagaacaagattctggccagttttcgagaaatggtttacagaaagaccaaagggaaggatgacaaataaagattttctgattgtccagaagacatttttaacaacaaaaaagaaagtctgggttccacacatacatagaaaaagattattatgttctgagaaagctttacagtgctactgtgccttctatttaattctttcagtccttcaataaaaagctgcttattgatataa

SEQ ID NO: 20179 - DNA, 3269 bp, Homo sapiens
  source 1..3269: mol_type = unassigned DNA
cgagccagtgctggagcagtggcgctatagccacgaaagtgactggcagtgggctctgcggcgcagcttcatctgtcggcacctgcacagctatcccggggctgccctcgaccagctcctcgcgctctccgccgcctggaccaaccacgtcttcctgggctgcaggtacagcccacgcttgatggaaaaaattctccaaatggctgaaggtattgatattggggagatgccttcatatgatctggtgctgtccaaaccttccaaaggtcaaaaacgccacctctcaacatgtgatggtcaaaatcctcctaaaaagcaagccggttccaaattccatgcgagacctcgttttgagcctgtacattttgtagctagtagttcaaaagatgaaagacaggaagatccttatggccctcaaacaaaagaggtaaatgaacaaacacattttgccagcatgccaagagacatctaccaagattatactcaagactctttcagtatacaagatgggaattctcagtattgtgattcatcaggattcattctcacaaaagaccagcctgtaacagccaacatgtattttgacagtgggaaccctgccccaagcaccacatcacagcaggcaaactctcagtcaactcctgagccttcaccatcacagacatttcccgagtctgtggtagccgagaagcagtattttattgaaaaattaacggcgacaatctggaagaacctttctaatccagaaatgacttctggatctgataaaattaattatacatatatgttaactcgttgtattcaggcgtgtaagacaaatcctgagtatatatatgctcctttaaaggaaattcctcctgccgacatccccaaaaataaaaaacttctaactgatggctatgcttgtgaagttagatgccaaaatatctacttaactacaggttatgctggcagcaagaatgggtccagggatcgagctacagagctagctgtaaaactcttgcagaaacgtattgaagttagagttgtccggcggaaattcaagcatacatttggagaggacctcgtggtgtgtcagattggcatgtcctcctatgaatttcctccagctctgaagccaccagaagacctggtggtgctgggtaaagatgcttccgggcagccaatttttaatgcttctgccaaacactggaccaattttgtcattacagaaaatgcaaatgatgcaattggtatccttaacaattctgcctcattcaacaagatgtcaattgaatacaaatatgagatgatgccaaatcgcacatggcgttgtcgagtgtttttacaagatcactgcttagctgaaggttatggaaccaagaaaacaagtaaacatgcagctgccgacgaggctttgaaaattcttcaaaaaacacagcccacttatccatctgtcaaaagttcacaatgccatacaggctcttcacccagaggatctggaaagaagaaagatataaaggatcttgtagtttatgagaattcttcaaatcccgtgtgcacgctgaacgacacagctcagtttaaccgaatgacagttgagtatgtctatgaaaggatgacaggcctccgctggaaatgcaaagtgattctagagagtgaagtaattgcagaagcagttggggtgaagaaaactgtcaaatatgaagctgctggggaagctgtgaaaaccctcaaaaagacccagccaactgtcattaacaacttgaagaaaggagctgttgaagatgtgatttcaagaaatgaaattcagggccgctcagcagaggaggcttacaaacagcaaatcaaagaagataatattggaaatcagctgctgagaaagatgggttggactggtggtggtttaggtaaatctggtgagggcatacgggagcctatctcagtgaaagagcagcataagcgggaagggcttggtctggatgtagagagggtgaataaaattgccaagagagatattgaacagatcatcagaaactacgcccgctccgagagccacacagatttgactttctctagagagctgactaatgatgaacggaagcaaatacatcagattgcccagaagtatggtcttaagagtaagtctcatggggtgggccatgataggtacctagtggtaggtagaaaaagacggaaggaagacctactagatcagctcaaacaggaaggccaagtgggccattacgagcttgttatgcctcaagcaaattgagatcttactaatttattttgtaaatgcctaatgaggcagatttttgaattaaagaaatgctacatgttccggttgcagagtatattcataagatgtctcaccttgttcatttcacatagtggtttattagatattggaacctaaagaattctgtccacttgtattagcttaatccagcagatgatattgtgcagttactgtttgtgtctttgatattgctgtgtccctcagattttagtagtttgacaagcaagaacacatatccaaatggaattttaccctgagaaattatcattttaaagggcatagcacagcaatctgcaacaatatgtaaagttgatattgactacaataaaaatccagtcttaattccagatttactgaaaatgtcagatcattttgtattaatctattttcatctttgtgtgaagccagttatagaatgtttgacaataaattgtgctgtacacgtaaatgtccttaccaactaaatgatgtaaaactttcttaaagtaattttagtgttcatttatttataacttctaccatgtgatttccagactattggaagtgatttactgtatcttgtgatatatgggttttaacaaattctagtcttcacgctgagagagcactacttgagagagcagttgaaagtttcaaaaactttggttcaatctgaagaaaggaagcttgaactgtttgttcttggtgccttgcagagagactcacagcaactctccattatagctttcacacggtttggatgtgcagcacatccaaggcaaccacagctgtggtagagcttggtaaaagactgaagatacattggtgctttgatgaaaaggtcagttggctggtccctctctcaaaaagcttattaagcctgaaaagccaactttgtaacatatttaaaactgctattttcgcttatttctggaatgtaaaaaaaaaaaatgtataaaaagaattagtgtatgcttcctgaataaaaaggagccaaagttgatcagaa

SEQ ID NO: 20180 - DNA, 3741 bp, Homo sapiens
  source 1..3741: mol_type = unassigned DNA
cagaataatgacatggttccttccatcctccaaaggtgaccaataatagtttgtaagtatcattatgaactaatgaattttcaacatatttgatatatttcaatccattgccatcattgttcttatcgatatttgagttggctcactttgccagtaagagtctattcaaattggcttctgagtccatttgacacaacacctttgatctttgacagtttccttggttttaggtgctagatgatttctcaggctcaccttagacatttcctgccacagacttagaatcagccatttctctaaggaccctgattccatttcatgagaaatgatagagaccacaatcaaaacaagtcatgaatttatactgatattttcaattcaaattaaagatgaggtttttgctaaatttttttgagtttatatttgtatgtcttatgctgaaaaatcttgtttcctaattagtaacataattattcatttgatgggtaaatattttagggccgattctttggttttatagccaagataccctgttgataaagtcttgtgggagcaattataagactggcttattttgaagctttttaaaaaagacatccttacctgttttaactgtagattatattaacttaaataggtacagcccacgcttgatggaaaaaattctccaaatggctgaaggtattgatattggggagatgccttcatatgatctggtgctgtccaaaccttccaaaggtcaaaaacgccacctctcaacatgtgatggtcaaaatcctcctaaaaagcaagccggttccaaattccatgcgagacctcgttttgagcctgtacattttgtagctagtagttcaaaagatgaaagacaggaagatccttatggccctcaaacaaaagaggtaaatgaacaaacacattttgccagcatgccaagagacatctaccaagattatactcaagactctttcagtatacaagatgggaattctcagtattgtgattcatcaggattcattctcacaaaagaccagcctgtaacagccaacatgtattttgacagtgggaaccctgccccaagcaccacatcacagcaggcaaactctcagtcaactcctgagccttcaccatcacagacatttcccgagtctgtggtagccgagaagcagtattttattgaaaaattaacggcgacaatctggaagaacctttctaatccagaaatgacttctggatctgataaaattaattatacatatatgttaactcgttgtattcaggcgtgtaagacaaatcctgagtatatatatgctcctttaaaggaaattcctcctgccgacatccccaaaaataaaaaacttctaactgatggctatgcttgtgaagttagatgccaaaatatctacttaactacaggttatgctggcagcaagaatgggtccagggatcgagctacagagctagctgtaaaactcttgcagaaacgtattgaagttagagttgtccggcggaaattcaagcatacatttggagaggacctcgtggtgtgtcagattggcatgtcctcctatgaatttcctccagctctgaagccaccagaagacctggtggtgctgggtaaagatgcttccgggcagccaatttttaatgcttctgccaaacactggaccaattttgtcattacagaaaatgcaaatgatgcaattggtatccttaacaattctgcctcattcaacaagatgtcaattgaatacaaatatgagatgatgccaaatcgcacatggcgttgtcgagtgtttttacaagatcactgcttagctgaaggttatggaaccaagaaaacaagtaaacatgcagctgccgacgaggctttgaaaattcttcaaaaaacacagcccacttatccatctgtcaaaagttcacaatgccatacaggctcttcacccagaggatctggaaagaagaaagatataaaggatcttgtagtttatgagaattcttcaaatcccgtgtgcacgctgaacgacacagctcagtttaaccgaatgacagttgagtatgtctatgaaaggatgacaggcctccgctggaaatgcaaagtgattctagagagtgaagtaattgcagaagcagttggggtgaagaaaactgtcaaatatgaagctgctggggaagctgtgaaaaccctcaaaaagacccagccaactgtcattaacaacttgaagaaaggagctgttgaagatgtgatttcaagaaatgaaattcagggccgctcagcagaggaggcttacaaacagcaaatcaaagaagataatattggaaatcagctgctgagaaagatgggttggactggtggtggtttaggtaaatctggtgagggcatacgggagcctatctcagtgaaagagcagcataagcgggaagggcttggtctggatgtagagagggtgaataaaattgccaagagagatattgaacagatcatcagaaactacgcccgctccgagagccacacagatttgactttctctagagagctgactaatgatgaacggaagcaaatacatcagattgcccagaagtatggtcttaagagtaagtctcatggggtgggccatgataggtacctagtggtaggtagaaaaagacggaaggaagacctactagatcagctcaaacaggaaggccaagtgggccattacgagcttgttatgcctcaagcaaattgagatcttactaatttattttgtaaatgcctaatgaggcagatttttgaattaaagaaatgctacatgttccggttgcagagtatattcataagatgtctcaccttgttcatttcacatagtggtttattagatattggaacctaaagaattctgtccacttgtattagcttaatccagcagatgatattgtgcagttactgtttgtgtctttgatattgctgtgtccctcagattttagtagtttgacaagcaagaacacatatccaaatggaattttaccctgagaaattatcattttaaagggcatagcacagcaatctgcaacaatatgtaaagttgatattgactacaataaaaatccagtcttaattccagatttactgaaaatgtcagatcattttgtattaatctattttcatctttgtgtgaagccagttatagaatgtttgacaataaattgtgctgtacacgtaaatgtccttaccaactaaatgatgtaaaactttcttaaagtaattttagtgttcatttatttataacttctaccatgtgatttccagactattggaagtgatttactgtatcttgtgatatatgggttttaacaaattctagtcttcacgctgagagagcactacttgagagagcagttgaaagtttcaaaaactttggttcaatctgaagaaaggaagcttgaactgtttgttcttggtgccttgcagagagactcacagcaactctccattatagctttcacacggtttggatgtgcagcacatccaaggcaaccacagctgtggtagagcttggtaaaagactgaagatacattggtgctttgatgaaaaggtcagttggctggtccctctctcaaaaagcttattaagcctgaaaagccaactttgtaacatatttaaaactgctattttcgcttatttctggaatgtaaaaaaaaaaaatgtataaaaagaattagtgtatgcttcctgaataaaaaggagccaaagttgatcagaa

SEQ ID NO: 20181 - DNA, 3351 bp, Homo sapiens
  source 1..3351: mol_type = unassigned DNA
ggagcagtggcgctatagccacgaaagtgactggcagtgggctctgcggcgcagcttcatctgtcggcacctgcacagctatcccggggctgccctcgaccagctcctcgcgctctccgccgcctggaccaaccacgtcttcctgggctgcagcttccatatagaagaaagggaagggccaatgaagactcttggaagctagggaccaagtgcagtctttagatgggctttatgttacctctcatcttcaggtacagcccacgcttgatggaaaaaattctccaaatggctgaaggtattgatattggggagatgccttcatatgatctggtgctgtccaaaccttccaaaggtcaaaaacgccacctctcaacatgtgatggtcaaaatcctcctaaaaagcaagccggttccaaattccatgcgagacctcgttttgagcctgtacattttgtagctagtagttcaaaagatgaaagacaggaagatccttatggccctcaaacaaaagaggtaaatgaacaaacacattttgccagcatgccaagagacatctaccaagattatactcaagactctttcagtatacaagatgggaattctcagtattgtgattcatcaggattcattctcacaaaagaccagcctgtaacagccaacatgtattttgacagtgggaaccctgccccaagcaccacatcacagcaggcaaactctcagtcaactcctgagccttcaccatcacagacatttcccgagtctgtggtagccgagaagcagtattttattgaaaaattaacggcgacaatctggaagaacctttctaatccagaaatgacttctggatctgataaaattaattatacatatatgttaactcgttgtattcaggcgtgtaagacaaatcctgagtatatatatgctcctttaaaggaaattcctcctgccgacatccccaaaaataaaaaacttctaactgatggctatgcttgtgaagttagatgccaaaatatctacttaactacaggttatgctggcagcaagaatgggtccagggatcgagctacagagctagctgtaaaactcttgcagaaacgtattgaagttagagttgtccggcggaaattcaagcatacatttggagaggacctcgtggtgtgtcagattggcatgtcctcctatgaatttcctccagctctgaagccaccagaagacctggtggtgctgggtaaagatgcttccgggcagccaatttttaatgcttctgccaaacactggaccaattttgtcattacagaaaatgcaaatgatgcaattggtatccttaacaattctgcctcattcaacaagatgtcaattgaatacaaatatgagatgatgccaaatcgcacatggcgttgtcgagtgtttttacaagatcactgcttagctgaaggttatggaaccaagaaaacaagtaaacatgcagctgccgacgaggctttgaaaattcttcaaaaaacacagcccacttatccatctgtcaaaagttcacaatgccatacaggctcttcacccagaggatctggaaagaagaaagatataaaggatcttgtagtttatgagaattcttcaaatcccgtgtgcacgctgaacgacacagctcagtttaaccgaatgacagttgagtatgtctatgaaaggatgacaggcctccgctggaaatgcaaagtgattctagagagtgaagtaattgcagaagcagttggggtgaagaaaactgtcaaatatgaagctgctggggaagctgtgaaaaccctcaaaaagacccagccaactgtcattaacaacttgaagaaaggagctgttgaagatgtgatttcaagaaatgaaattcagggccgctcagcagaggaggcttacaaacagcaaatcaaagaagataatattggaaatcagctgctgagaaagatgggttggactggtggtggtttaggtaaatctggtgagggcatacgggagcctatctcagtgaaagagcagcataagcgggaagggcttggtctggatgtagagagggtgaataaaattgccaagagagatattgaacagatcatcagaaactacgcccgctccgagagccacacagatttgactttctctagagagctgactaatgatgaacggaagcaaatacatcagattgcccagaagtatggtcttaagagtaagtctcatggggtgggccatgataggtacctagtggtaggtagaaaaagacggaaggaagacctactagatcagctcaaacaggaaggccaagtgggccattacgagcttgttatgcctcaagcaaattgagatcttactaatttattttgtaaatgcctaatgaggcagatttttgaattaaagaaatgctacatgttccggttgcagagtatattcataagatgtctcaccttgttcatttcacatagtggtttattagatattggaacctaaagaattctgtccacttgtattagcttaatccagcagatgatattgtgcagttactgtttgtgtctttgatattgctgtgtccctcagattttagtagtttgacaagcaagaacacatatccaaatggaattttaccctgagaaattatcattttaaagggcatagcacagcaatctgcaacaatatgtaaagttgatattgactacaataaaaatccagtcttaattccagatttactgaaaatgtcagatcattttgtattaatctattttcatctttgtgtgaagccagttatagaatgtttgacaataaattgtgctgtacacgtaaatgtccttaccaactaaatgatgtaaaactttcttaaagtaattttagtgttcatttatttataacttctaccatgtgatttccagactattggaagtgatttactgtatcttgtgatatatgggttttaacaaattctagtcttcacgctgagagagcactacttgagagagcagttgaaagtttcaaaaactttggttcaatctgaagaaaggaagcttgaactgtttgttcttggtgccttgcagagagactcacagcaactctccattatagctttcacacggtttggatgtgcagcacatccaaggcaaccacagctgtggtagagcttggtaaaagactgaagatacattggtgctttgatgaaaaggtcagttggctggtccctctctcaaaaagcttattaagcctgaaaagccaactttgtaacatatttaaaactgctattttcgcttatttctggaatgtaaaaaaaaaaaatgtataaaaagaattagtgtatgcttcctgaataaaaaggagccaaagttgatc

SEQ ID NO: 20182 - DNA, 738 bp, Homo sapiens
  source 1..738: mol_type = unassigned DNA
ctctgccagcgggaccatgctgctccgagccgcttggaggcgggcggcagtggcggtgacagcggctccagggccgaagcccgcggcgcccactcgggggctgcgcctgcgcgttggagaccgtgctcctcagtctgcggttcccgcagatacagccgctgccccggaggtggggccagtgctgcgacctctctatatggatgtgcaagctacaactcctctggacccccgggtgcttgatgccatgctcccttacctaatcaactactatgggaacccacactcccggacacatgcttatggctgggagagtgaggcagccatggaacgtgctcgtcagcaagtagcatctctgattggagctgatcctcgtgagatcatttttactagtggtgctactgaatccaacaacatagcaattaagactgagtctcactctgtcatccaggctggagtgcagtggcacgatcttgactcactgcaagctccgcctcctgggttcacgccattctcctgcctcagcctcctgagtagctgggactacaggcgccctccaccacacccggctaattttttgtatttttagtagagacagggtttcactgtgttagccagaatggtctcgatctcctgacctcgtgatccgccctcctcggcctcccaaagtgccccacaaccatttttacttactgatgtaaatactttttaggataaaatagagtataaatcaattataaa

SEQ ID NO: 20183 - DNA, 2379 bp, Homo sapiens
  source 1..2379: mol_type = unassigned DNA
gggcagcacttccgggagcctggggcccaggactgcagcggcttcggaaggtgggctctgccagcgggaccatgctgctccgagccgcttggaggcgggcggcagtggcggtgacagcggctccagggccgaagcccgcggcgcccactcgggggctgcgcctgcgcgttggagaccgtgctcctcagtctgcggttcccgcagatacagccgctgccccggaggtggggccagtgctgcgacctctctatatggatgtgcaagctacaactcctctggacccccgggtgcttgatgccatgctcccttacctaatcaactactatgggaacccacactcccggacacatgcttatggctgggagagtgaggcagccatggaacgtgctcgtcagcaagtagcatctctgattggagctgatcctcgtgagatcatttttactagtggtgctactgaatccaacaacatagcaattaagggggtggcccgattctacaggtcacggaaaaagcacttgatcaccacccagacagaacacaaatgtgtcttggactcctgccgttcactggaagctgagggctttcaggtcacctacctcccagtgcagaagagtgggatcattgacctaaaggaactagaggctgctatccagccagatactagcctggtgtcagtcatgactgtgaacaatgagattggagtgaagcagcctattgcagaaatagggcggatttgcagttccagaaaggtatatttccatactgatgcagcccaggctgttggaaaaatcccacttgatgtcaatgacatgaaaattgatctcatgagcattagtggtcacaaaatctacggtcccaaaggggttggtgccatctacatccgtcgccggccccgtgtgcgtgtggaggccctgcagagtggaggggggcaggagcggggtatgcggtctgggacagtgcccacacccttagtggtggggctgggggctgcgtgtgaggtggcacagcaagagatggagtatgaccacaagcgaatctcaaagttgtcagagcggctgatacagaatataatgaagagccttccagatgtggtgatgaatggggaccctaagcaccattatcccggctgtatcaacctctcctttgcatatgtggaaggggaaagtctgctgatggcactgaaggacgttgccttatcctcagggagtgcctgcacctctgcatccctggagccctcttatgtgcttagagcaattggcactgatgaggatttagcgcactcttctatcaggtttggaattggccgcttcactacagaggaggaagtggactacacagtggagaaatgcattcagcatgtgaagcgtcttcgagaaatgagccctctctgggagatggttcaggatggcattgacctcaagagcatcaagtggacccaacactagaagaatagggccctgactttgtgctggtctggcccctcctgcctcaccaacccgtgcacaaccagacaccttgttacacctagtggatgctctagattggtatagaccagttgacttcagcatcagtccacctctatgacagaaacacaagaaaactgtctttccctagcttcagttccttgggtgtggagcactccccatttcttctcgggtcttaaagtgtgtggacattttcatcccgaagccatagagacatttgctgtcatattgctgctgggcacatctgtgctcttggtgaggagagcaagaggaaccagaagaagtctctttggtcagggaccatgatgctctacatggacatttgagtcttcgtcttctgctgctgctcggctggaccagcttctttaacagcaagcataatccacttcaatgtaatattttctgtagctccaaaggctatctcttcatattgactgcagacagactgaatggacagtttcttagagggcttgtctcctttctacccttgtcctctttcctttcctttgacctaatggagctagaaatatgtctgtgactccaccagttattctaataatttgttttcttgaaaattgttaatttcaagactggagaaataaactcaccttctatttactctgtgactttatgagaggttgagggaaaagtggaagctgtacttgggaattgtggagaagaccgccactccatctgatttgcataaatgactcagtgggcttttgtatctcttcatttaagaattatttgaatgcctgccaggagccagatttgttctgggtattaggaatacactggttaacaggaccaaaaaagaccctgccctcactgagttttaaattttagtggagagatggaaaataattaaacaaataaacaatgttatagattgtga

SEQ ID NO: 20184 - DNA, 550 bp, Homo sapiens
  source 1..550: mol_type = unassigned DNA
acttccgggagcctggggcccaggactgcagcggcttcggaaggtgggctctgccagcgggaccatgctgctccgagccgcttggaggcgggcggcagtggcggtgacagcggctccagggccgaagcccgcggcgcccactcgggggctgcgcctgcgcgttggagaccgtgctcctcagtctgcggttcccgcagatacagccgctgccccggaggtggggccagtgctgcgacctctctatatggatgtgcaagctacaactcctctggacccccgggtgcttgatgccatgctcccttacctaatcaactactatgggaacccacactcccggacacatgcttatggctgggagagtgaggcagccatggaacgtgctcgtcagcaagtagcatctctgattggagctgatcctcgtgagatcatttttactagtggtgctactgaatccaacaacatagcaattaagggggtggcccgattctacaggtcacggaaaaagcacttgatcaccacccttagtggtggggctgggggctgcgtgtga

SEQ ID NO: 20185 - DNA, 2011 bp, Homo sapiens
  source 1..2011: mol_type = unassigned DNA
acttccgggagcctggggcccaggactgcagcggcttcggaaggtgggctctgccagcgggaccatgctgctccgagccgcttggaggcgggcggcagtggcggtgacagcggctccagggccgaagcccgcggcgcccactcgggggctgcgcctgcgcgttggagaccgtgctcctcagtctgcggttcccgcagatacagccgctgccccggaggtggggccagtgctgcgacctctctatatggatgtgcaagctacaactcctctggacccccgggtgcttgatgccatgctcccttacctaatcaactactatgggaacccacactcccggacacatgcttatggctgggagagtgaggcagccatggaacgtgctcgtcagcaagtagcatctctgattggagctgatcctcgtgagatcatttttactagtggtgctactgaatccaacaacatagcaattaagatggagtctcaccctgtcgcccaggctagagtgtaggggcatgatctcggctcactgcaacctctgcctcccaggttcaagcgattctcctgcctcatcctcctgagtagccgggattacagggggtggcccgattctacaggtcacggaaaaagcacttgatcaccacccagacagaacacaaatgtgtcttggactcctgccgttcactggaagctgagggctttcaggtcacctacctcccagtgcagaagagtgggatcattgacctaaaggaactagaggctgctatccagccagatactagcctggtgtcagtcatgactgtgaacaatgagattggagtgaagcagcctattgcagaaatagggcggatttgcagttccagaaaggtatatttccatactgatgcagcccaggctgttggaaaaatcccacttgatgtcaatgacatgaaaattgatctcatgagcattagtggtcacaaaatctacggtcccaaaggggttggtgccatctacatccgtcgccggccccgtgtgcgtgtggaggccctgcagagtggaggggggcaggagcggggtatgcggtctgggacagtgcccacacccttagtggtggggctgggggctgcgtgtgaggtggcacagcaagagatggagtatgaccacaagcgaatctcaaagttgtcagagcggctgatacagaatataatgaagagccttccagatgtggtgatgaatggggaccctaagcaccattatcccggctgtatcaacctctcctttgcatatgtggaaggggaaagtctgctgatggcactgaaggacgttgccttatcctcagggagtgcctgcacctctgcatccctggagccctcttatgtgcttagagcaattggcactgatgaggatttagcgcactcttctatcaggtttggaattggccgcttcactacagaggaggaagtggactacacagtggagaaatgcattcagcatgtgaagcgtcttcgagaaatgagccctctctgggagatggttcaggatggcattgacctcaagagcatcaagtggacccaacactagaagaatagggccctgactttgtgctggtctggcccctcctgcctcaccaacccgtgcacaaccagacaccttgttacacctagtggatgctctagattggtatagaccagttgacttcagcatcagtccacctctatgacagaaacacaagaaaactgtctttccctagcttcagttccttgggtgtggagcactccccatttcttctcgggtcttaaagtgtgtggacattttcatcccgaagccatagagacatttgctgtcatattgctgctgggcacatctgtgctcttggtgaggagagcaagaggaaccagaagaagtctctttggtcagggaccatgatgctctacatggacatttgagtcttcgtcttctgctgctgctcggctggaccagcttctttaacagcaagcataatccacttcaatgtaatattttctgtagctcc

SEQ ID NO: 20186 - DNA, 1436 bp, Homo sapiens
  source 1..1436: mol_type = unassigned DNA
acttccgggagcctggggcccaggactgcagcggcttcggaaggtgggctctgccagcgggaccatgctgctccgagccgcttggaggcgggcggcagtggcggtgacagcggctccagggccgaagcccgcggcgcccactcgggggctgcgcctgcgcgttggagaccgtgctcctcagtctgcggttcccgcagatacagccgctgccccggaggtggggccagtgctgcgacctctctatatggatgtgcaagctacaactcctctggacccccgggtgcttgatgccatgctcccttacctaatcaactactatgggaacccacactcccggacacatgcttatggctgggagagtgaggcagccatggaacgtgctcgtcagcaagtagcatctctgattggagctgatcctcgtgagatcatttttactagtggtgctactgaatccaacaacatagcaattaaggaactagaggctgctatccagccagatactagcctggtgtcagtcatgactgtgaacaatgagattggagtgaagcagcctattgcagaaatagggcggatttgcagttccagaaaggtatatttccatactgatgcagcccaggctgttggaaaaatcccacttgatgtcaatgacatgaaaattgatctcatgagcattagtggtcacaaaatctacggtcccaaaggggttggtgccatctacatccgtcgccggccccgtgtgcgtgtggaggccctgcagagtggaggggggcaggagcggggtatgcggtctgggacagtgcccacacccttagtggtggggctgggggctgcgtgtgaggtggcacagcaagagatggagtatgaccacaagcgaatctcaaagttgtcagagcggctgatacagaatataatgaagagccttccagatgtggtgatgaatggggaccctaagcaccattatcccggctgtatcaacctctcctttgcatatgtggaaggggaaagtctgctgatggcactgaaggacgttgccttatcctcagggagtgcctgcacctctgcatccctggagccctcttatgtgcttagagcaattggcactgatgaggatttagcgcactcttctatcaggtttggaattggccgcttcactacagaggaggaagtggactacacagtggagaaatgcattcagcatgtgaagcgtcttcgagaaatgagccctctctgggagatggttcaggatggcattgacctcaagagcatcaagtggacccaacactagaagaatagggccctgactttgtgctggtctggcccctcctgcctcaccaacccgtgcacaaccagacaccttgttacacctagtggatgctctagattggtatagaccagttgacttcagcatcagtccacctctatgacagaaacacaag

SEQ ID NO: 20187 - DNA, 1034 bp, Homo sapiens
  source 1..1034: mol_type = unassigned DNA
gcgcagatctttcgtggttctgtcagggagacccttaggcactccggactaagatggcggcgacggccaggcggggctggggagctgcggctgttgccgccgggctgcgcaggcggtaggtgacgagcctggagctccgaataggtgtgccgctgggcttagccagcggagcggtcgccgccttgcagaccctctctcgaggcgggttctgtcatatgttgaagaatccatacaccattaagaaacagcctctgcatcagtttgtacaaagaccacttttcccactacctgcagccttttatcacccagtgagatacatgtttattcaaacacaagataccccaaatccaaacagcttaaagtttataccaggaaaaccagttcttgagacaaggaccatggattttcccaccccagctgcagcatttcgctcccctctggctaggcagttatttaggattgaaggagtaaaaagtgtcttctttggaccagatttcatcactgtcacaaaggaaaatgaagaattagactggaatttactgaaaccagatatttatgcaacaatcatggacttctttgcatctggcttacccctggttactgaggaaacaccttcaggagaagcaggatctgaagaagatgatgaagttgtggcaatgattaaggaattgttagatactagaatacggccaactgtgcaggaagatggaggggatgtaatctacaaaggctttgaagatggcattgtacagctgaaactccagggttcttgtaccagctgccctagttcaatcattactctgaaaaatggaattcagaacatgctgcagttttatattccggaggtagaaggcgtagaacaggttatggatgatgaatcagatgaaaaagaagcaaactcaccttaaaataatctggattttctttgggcataacagtcagacttgttgataatatatatcaagtttttattattaatatgctgaggaacttgaagattaataaaatatgctcttcagagaatgatatataaa

SEQ ID NO: 20188 - DNA, 1044 bp, Homo sapiens
  source 1..1044: mol_type = unassigned DNA
gttccccggcctctcttggtcagggtgacgcagtagcctgcaaacctcggcgcgtaggccaccgcacttatccgcagcaggaccgcccgcagccggtagggtgggctcttcccagtgcccgcccagctaccggccagcctgcggctgcgcagatctttcgtggttctgtcagggagacccttaggcactccggactaagatggcggcgacggccaggcggggctggggagctgcggctgttgccgccgggctgcgcaggcggtaggtgacgagcctggagctccgaataggtgtgccgctgggcttagccagcggagcggtcgccgccttgcagaccctctctcgaggcgggttctgtcatatgttgaagaatccatacaccattaagaaacagcctctgcatcagtttgtacaaagaccacttttcccactacctgcagccttttatcacccaggcagttatttaggattgaaggagtaaaaagtgtcttctttggaccagatttcatcactgtcacaaaggaaaatgaagaattagactggaatttactgaaaccagatatttatgcaacaatcatggacttctttgcatctggcttacccctggttactgaggaaacaccttcaggagaagcaggatctgaagaagatgatgaagttgtggcaatgattaaggaattgttagatactagaatacggccaactgtgcaggaagatggaggggatgtaatctacaaaggctttgaagatggcattgtacagctgaaactccagggttcttgtaccagctgccctagttcaatcattactctgaaaaatggaattcagaacatgctgcagttttatattccggaggtagaaggcgtagaacaggttatggatgatgaatcagatgaaaaagaagcaaactcaccttaaaataatctggattttctttgggcataacagtcagacttgttgataatatatatcaagtttttattattaatatgctgaggaacttgaagattaataaaatatgctcttcagagaatgatatataaa

SEQ ID NO: 20189 - DNA, 1467 bp, Homo sapiens
  source 1..1467: mol_type = unassigned DNA
gggaaaggttccccggcctctcttggtcagggtgacgcagtagcctgcaaacctcggcgcgtaggccaccgcacttatccgcagcaggaccgcccgcagccggtagggtgggctcttcccagtgcccgcccagctaccggccagcctgcggctgcgcagatctttcgtggttctgtcagggagacccttaggcactccggactaagatggcggcgacggccaggcggggctggggagctgcggctgttgccgccgggctgcgcaggcggttctgtcatatgttgaagaatccatacaccattaagaaacagcctctgcatcagtttgtacaaagaccacttttcccactacctgcagccttttatcacccagtgagatacatgtttattcaaacacaagataccccaaatccaaacagcttaaagtttataccaggaaaaccagttcttgagacaaggaccatggattttcccaccccagctgcagcatttcgctcccctctggctaggcagttatttaggattgaaggagtaaaaagtgtcttctttggaccagatttcatcactgtcacaaaggaaaatgaagaattagactggaatttactgaaaccagatatttatgcaacaatcatggacttctttgcatctggcttacccctggttactgaggaaacaccttcaggagaagcaggatctgaagaagatgatgaagttgtggcaatgattaaggaattgttagatactagaatacggccaactgtgcaggaagatggaggggatgtaatctacaaaggctttgaagatggcattgtacagctgaaactccagggttcttgtaccagctgccctagttcaatcattactctgaaaaatggaattcagaacatgctgcagttttatattccggaggtagaaggcgtagaacaggttatggatgatgaatcagatgaaaaagaagcaaactcaccttaaaataatctggattttctttgggcataacagtcagacttgttgataatatatatcaagtttttattattaatatgctgaggaacttgaagattaataaaatatgctcttcagagaatgatatataaatattgcatgtttgctttacctcatatgagttatttataacctcttgaatcatcttctgtacacgtggattttatccaaggatatttttatttttgtccctcatttcccatggctctttctttgcatatgtgtgaaggagtttaaaatacatttccccccatctaatttatttacttttttccatacaggaagaaacagaatgctttttagaatattctaaaatagctttttgtgaaatatctaaaactatttttactgaagtttttagcttaagaaacagctaaacaagtctgttttaaaaatggtatctggctactagcccccaattaagtagcaaagaactgcttaagaccaaaaaaaagaaatcaaa

SEQ ID NO: 20190 - DNA, 580 bp, Homo sapiens
  source 1..580: mol_type = unassigned DNA
ggcgacggccaggcggggctggggagctgcggctgttgccgccgggctgcgcaggcggttctgtcatatgttgaagaatccatacaccattaagaaacagcctctgcatcagtttgtacaaagaccacttttcccactacctgcagccttttatcacccaggcagttatttaggattgaaggagtaaaaagtgtcttctttggaccagatttcatcactgtcacaaaggaaaatgaagaattagactggaatttactgaaaccagatatttatgcaacaatcatggacttctttgcatctggcttacccctggttactgaggaaacaccttcaggagaagcaggatctgaagaagatgatgaagttgtggcaatgattaaggaattgttagatactagaatacggccaactgtgcaggaagatggaggggatgtaatctacaaaggctttgaagatggcattgtacagctgaaactccagggttcttgtaccagctgccctagttcaatcattactctgaaaaatggaattcagaacatgctgcagttttatattccggaggtagaaggcgtagaacagg

SEQ ID NO: 20191 - DNA, 558 bp, Homo sapiens
  source 1..558: mol_type = unassigned DNA
gctaatatatattctccagaagtggttgccattgcataggaaaatgaagaattagactggaatttactgaaaccagatatttatgcaacaatcatggacttctttgcatctggcttacccctggttactgaggaaacaccttcaggagaagcaggatctgaagaagatgatgaagttgtggcaatgattaaggaattgttagatactagaatacggccaactgtgcaggaagatggaggggatgtaatctacaaaggctttgaagatggcattgtacagctgaaactccagggttcttgtaccagctgccctagttcaatcattactctgaaaaatggaattcagaacatgctgcagttttatattccggaggtagaaggcgtagaacaggttatggatgatgaatcagatgaaaaagaagcaaactcaccttaaaataatctggattttctttgggcataacagtcagacttgttgataatatatatcaagtttttattattaatatgctgaggaacttgaagattaataaaatatgctcttcagagaatgatatat

SEQ ID NO: 20192 - DNA, 668 bp, Homo sapiens
  source 1..668: mol_type = unassigned DNA
aagatggcggcgacggccaggcggggctggggagctgcggctgttgccgccgggctgcgcaggcggtaggtgacgagcctggagctccgaataggtgtgccgctgggcttagccagcggagcggtcgccgccttgcagaccctctctcgaggcgggttctgtcatatgttgaagaatccatacaccattaagaaacagcctctgcatcagtttgtacaaagaccacttttcccactacctgcagccttttatcacccaggcagttatttaggattgaaggagtaaaaagtgtcttctttggaccagatttcatcactgtcacaaaggaaaatgaagaattagactggaatttactgaaaccagatatttatgcaacaatcatggacttctttgcatctggcttacccctggttactgaggaaacaccttcaggagaagcaggatctgaagaagatgatgaagttgtggcaatgattaaggaattgttagatactagaatacggccaactgtgcaggaagatggaggggatgtaatctacaaaggctttgaagatggcattgtacagctgaaactccagggttcttgtaccagctgccctagttcaatcattactctgaaaaatggaattcagaacatgctgcagttttatattccggaggtagaaggc

SEQ ID NO: 20193 - DNA, 4358 bp, Homo sapiens
  source 1..4358: mol_type = unassigned DNA
cgatgggagcgggggcgtcccggctcctgcagccgccagaggagggagagccgggggccgtcgcttcggagttggggctgagcagtcctcggggagagcgcgccaagaccgctgcagccgctggctgacggaaggagagttttacatggaagtggcttacagaaacttggcgctgaggtgcagggaagccagaaactctttgtgtctctaaggccgatgaggaatttggaaacacatgtgggacatacaagcgttggatatagaggactgagcagggggaggaacatttaagctgatggaagtggaagtggaagttgctgtacattggcagcaaggcctccgagttagcttttgaatgcagttaactggtttctcttaactgtggaattcattgaaaagtcagactccgagtggtcgttccaggatatcttgaaaagcccaggttaaacccatccagagtaatggctgcggccttacccaggaccctgggggagttgcagctgtatagaatattacaaaaagccaatctactttcttattttgatgcctttatccaacaaggtggtgatgatgtccagcaactctgtgaagcaggagaagaggagtttttggaaatcatggcactcgtgggcatggctagcaagccccttcatgttagaaggctgcagaaggctttgagagactgggtcacaaaccctgggcttttcaatcagccactgacttcccttcctgtcagtagcatacccatctataaattaccagagggatcaccaacatggctgggaatatcctgcagtagttatgaaaggagtagcaatgcccgggaacctcatttaaaaatccccaaatgtgctgccaccacctgtgtgcagagcttgggacaggggaagtcagatgtggttgggagcctagcactgcagagtgttggtgagtccagactctggcaaggccaccatgccactgagagcgagcacagcctctccccagcagacctgggctcccccgcgtccccaaaggagagcagtgaggcgctggatgctgctgctgcgctctctgtggctgagtgtgtggagcggatggcccccacactgccaaaaagtgacttgaatgaagtgaaagagctgctaaaaaccaacaagaagttggccaaaatgattggtcacatctttgagatgaacgatgatgatccacacaaagaggaggaaattcggaaatacagtgcaatatatggcagatttgactcaaagaggaaggatgggaaacatctcacacttcatgagctcactgttaatgaagcggctgctcaactctgtgtgaaggataatgccctgctgacaagaagagatgagctttttgccttggctcgacagatttctcgagaagtcacctataaatatacttacagaaccaccaagtcaaaatgtggagaaagagatgaattatccccaaagagaattaaagtggaggatgggtttccagatttccaggattctgtgcaaacactcttccagcaggctagagctaagagtgaagaacttgcagctcttagttcacagcagcctgaaaaggtgatggcaaagcagatggagttcctttgcaaccaagctggctatgagagactgcagcatgccgagaggaggttgtctgcagggctttacaggcagagctcagaagagcacagtcctaacggcttgacttccgataactcagatggacaaggagaaagacctttgaatctccgaatgcctaatttacagaacagacaaccccatcattttgtggtggatggggagctgagcagactttaccccagtgaggcaaagtcccactcatcagagagccttgggattttaaaagactaccctcattcagcttttaccttagaaaagaaagtcatcaaaacagagcctgaagattcaagatagctgtgatttctctcaccgttctctggaaatggcatcagatttaaggataatactccatcatagaaataagccttaataaccagtgttgcctcattcagctcaaacagatttcatagccaaagcaaaaggactggtacggtagtctgtggaaaccaggaagataaaacaacagccacaaaagagaaaatcaagagtgttgcaatctataacagtaatattgattcattcacattcctgtgttaagtcattttatatggaaaggcttacaaatcaatattgtaagcattcattatttaagaatgtacaatgtatttgtgtaatttatagaagtaaaatctagatgttgagacctgtttggtctaatagatgtggatacagtttattttacttgaaattttgttgtctactttgtgtgtttaacgtaaatatatgtcagagtttagaatctgcctgcagttgtgaaaaagaaagcttaagtgatgcagttattggcaagattgcaatgattatggaaaaatagaaagcgaatactcagtttaagccaaggaaaatattgtggatttaatatttgataaaactgattttgtttaacaggaaatttttagcattcagtcatataacatctggttatcaatgcacgtttacacaataaatacttgagtggaggaaagttaaaaagatgagcaatagagtagaaaatatatcttaaactagttgacctagattgtattaatagctacttaagatgtttcaaagataggaagctattgcttggacagagaacttgaaataagtggacccatgtataaaagctttgacttaaacattgatatttcagaatgtgttaaatagattaagacacagtaagttaaccctacatgttataaagatggcgactgttaacaaaggctgtaacagattaagtactattttatatccagaaagtcttctctatgtagagaagtcagagagactagatgctttcactagggaatgtcttcccacccagccatcacaaatgtggacaatcactgcatccacatctgtaggcatatttctatggaagtttaattgacagctatattcattatttattttacaatttcatttttctacacctttgagatttatgaatgcagttttttcttaaaatttattttaacttgacagtatgtttttagttcccccaatttaattaatggaccatgtgcatatatatgggagtgtgcttacatgttaataatttacttgcatacttatgagaatttcacattggaattcataatggtaaaacaacatacatctgccaatatacgttttttctgttggtttaagagaagataactgacagctttacctacttcctacagatgcatctaaacccagatattactgagaagagtgtattgactctgagtgtaagagagtatgtgtttttttgtttttagttctgctctagatcataattgtaaaaaatattaagtcataatctgttacactaaaatttgtcagccaaatgttagatgaaatgtctgcactgtagtctcagatcactgtcacgtatataaattgcttcttcattttaatttgtagaagtactttacagtaggaaacgccagtaaacaacttttatactgttaaaaggcttttttccccttcctaaatgttttaattgtaccatagtgttttgctcactgaagaagcttcttatggaccttgcaactttgttgctagcttgaggttgattattgtggttgtattgttcactgtgtgtagaaatagtatgagtacgatttcaatagactgttcagtttttaatattagccatagcactggttagtatatctcagtagtttcatgaaacgtttcctgtattctaatctattttgaaacattttgtttttttttaattgtgtcttacagtcaagtttgtagattttcataagccacaattttaaaagatgcagtaatcttccaacttccaatatttatccattcgttgtggacccacagattgcatctttaaattcataataagtttccttaactatcttatgtttctagtctttcaagcttagtgataaggtggaagcacaagaaaaatttcagtagaatacagtttttattttgtaaacactaatgtattaaacttgctatacattaaagcaaataatatatatttttatttgaattgtatatgtgaattggaagttataattagttgattttttcattttgttagaggtattttcactgaacaaggtcaattggttacctcagtattacagccaatatagtccaagggaccatttctccccgagtctcttacactttattgtgcgatgtccacgtttttgtgactcttcaagctgttggtgaggtgggacgaatgcacttgcttcctgtggcaataaagattttctgtgcctcaca

SEQ ID NO: 20194 - DNA, 2073 bp, Homo sapiens
  source 1..2073: mol_type = unassigned DNA
agaggagggagagccgggggccgtcgcttcggagttggggctgagcagtcctcggggagagcgcgccaagaccgctgcagccgctggctgagttaaacccatccagagtaatggctgcggccttacccaggaccctgggggagttgcagctgtatagaatattacaaaaagccaatctactttcttattttgatgcctttatccaacaaggtggtgatgatgtccagcaactctgtgaagcaggagaagaggagtttttggaaatcatggcactcgtgggcatggctagcaagccccttcatgttagaaggctgcagaaggctttgagagactgggtcacaaaccctgggcttttcaatcagccactgacttcccttcctgtcagtagcatacccatctataaattaccagagggatcaccaacatggctgggaatatcctgcagtagttatgaaaggagtagcaatgcccgggaacctcatttaaaaatccccaaatgtgctgccaccacctgtgtgcagagcttgggacaggggaagtcagatgtggttgggagcctagcactgcagagtgttggtgagtccagactctggcaaggccaccatgccactgagagcgagcacagcctctccccagcagacctgggctcccccgcgtccccaaaggagagcagtgaggcgctggatgctgctgctgcgctctctgtggctgagtgtgtggagcggatggcccccacactgccaaaaagtgacttgaatgaagtgaaagagctgctaaaaaccaacaagaagttggccaaaatgattggtcacatctttgagatgaacgatgatgatccacacaaagaggaggaaattcggaaatacagtgcaatatatggcagatttgactcaaagaggaaggatgggaaacatctcacacttcatgagctcactgttaatgaagcggctgctcaactctgtgtgaaggataatgccctgctgacaagaagagatgagctttttgccttggctcgacagatttctcgagaagtcacctataaatatacttacagaaccaccaagtcaaaatgtggagaaagagatgaattatccccaaagagaattaaagtggaggatcaacctgaaaaggtgatggcaaagcagatggagttcctttgcaaccaagctggctatgagagactgcagcatgccgagaggaggttgtctgcagggctttacaggcagagctcagaagagcacagtcctaacggcttgacttccgataactcagatggacaaggagaaagacctttgaatctccgaatgcctaatttacagaacagacaaccccatcattttgtggtggatggggagctgagcagactttaccccagtgaggcaaagtcccactcatcagagagccttgggattttaaaagactaccctcattcagcttttaccttagaaaagaaagtcatcaaaacagagcctgaagattcaagatagctgtgatttctctcaccgttctctggaaatggcatcagatttaaggataatactccatcatagaaataagccttaataaccagtgttgcctcattcagctcaaacagatttcatagccaaagcaaaaggactggtacggtagtctgtggaaaccaggaagataaaacaacagccacaaaagagaaaatcaagagtgttgcaatctataacagtaatattgattcattcacattcctgtgttaagtcattttatatggaaaggcttacaaatcaatattgtaagcattcattatttaagaatgtacaatgtatttgtgtaatttatagaagtaaaatctagatgttgagacctgtttggtctaatagatgtggatacagtttattttacttgaaattttgttgtctactttgtgtgtttaacgtaaatatatgtcagagtttagaatctgcctgcagttgtgaaaaagaaagcttaagtgatgcagttattggcaagattgcaatgattatggaaaaatagaaagcgaatactcagtttaagccaaggaaaatattgtggatttaatatttgataaaactgattttg

SEQ ID NO: 20195 - DNA, 2360 bp, Homo sapiens
  source 1..2360: mol_type = unassigned DNA
aggcgctgccgccgccgccgccgcccgcgcgccgcagcctggaggagccgccgccgccgccgcggccaagcgagcgccgtcggggcgggtgggcgggaagaagcggcgggcccgaggtgggggggagcagagagagcgcgcccaccaccttcccttcccccctcgatgggagcgggggcgtcccggctcctgcagccgccagaggagggagagccgggggccgtcgcttcggagttggggctgagcagtcctcggggagagcgcgccaagaccgctgcagccgctggctgagttaaacccatccagagtaatggctgcggccttacccaggaccctgggggagttgcagctgtatagaatattacaaaaagccaatctactttcttattttgatgcctttatccaacaaggtggtgatgatgtccagcaactctgtgaagcaggagaagaggagtttttggaaatcatggcactcgtgggcatggctagcaagccccttcatgttagaaggctgcagaaggctttgagagactgggtcacaaaccctgggcttttcaatcagccactgacttcccttcctgtcagtagcatacccatctataaattaccagagggatcaccaacatggctgggaatatcctgcagtagttatgaaaggagtagcaatgcccgggaacctcatttaaaaatccccaaatgtgctgccaccacctgtgtgcagagcttgggacaggggaagtcagatgtggttgggagcctagcactgcagagtgttggtgagtccagactctggcaaggccaccatgccactgagagcgagcacagcctctccccagcagacctgggctcccccgcgtccccaaaggagagcagtgaggcgctggatgctgctgctgcgctctctgtggctgagtgtgtggagcggatggcccccacactgccaaaaagtgacttgaatgaagtgaaagagctgctaaaaaccaacaagaagttggccaaaatgattggtcacatctttgagatgaacgatgatgatccacacaaagaggaggaaattcggaaatacagtgcaatatatggcagatttgactcaaagaggaaggatgggaaacatctcacacttcatgagctcactgttaatgaagcggctgctcaactctgtgtgaaggataatgccctgctgacaagaagagatgagctttttgccttggctcgacagatttctcgagaagtcacctataaatatacttacagaaccaccaagtcaaaatgtggagaaagagatgaattatccccaaagagaattaaagtggaggatgggtttccagatttccaggattctgtgcaaacactcttccagcaggctagagctaagagtgaagaacttgcagctcttagttcacagcagcctgaaaaggtgatggcaaagcagatggagttcctttgcaaccaagctggctatgagagactgcagcatgccgagaggaggttgtctgcagggctttacaggcagagctcagaagagcacagtcctaacggcttgacttccgataactcagatggacaaggagaaagacctttgaatctccgaatgcctaatttacagaacagacaaccccatcattttgtggtggatggggagctgagcagactttaccccagtgaggcaaagtcccactcatcagagagccttgggattttaaaagactaccctcattcagcttttaccttagaaaagaaagtcatcaaaacagagcctgaagattcaagatagctgtgatttctctcaccgttctctggaaatggcatcagatttaaggataatactccatcatagaaataagccttaataaccagtgttgcctcattcagctcaaacagatttcatagccaaagcaaaaggactggtacggtagtctgtggaaaccaggaagataaaacaacagccacaaaagagaaaatcaagagtgttgcaatctataacagtaatattgattcattcacattcctgtgttaagtcattttatatggaaaggcttacaaatcaatattgtaagcattcattatttaagaatgtacaatgtatttgtgtaatttatagaagtaaaatctagatgttgagacctgtttggtctaatagatgtggatacagtttattttacttgaaattttgttgtctactttgtgtgtttaacgtaaatatatgtcagagtttagaatctgcctgcagttgtgaaaaagaaagcttaagtgatgcagttattggcaagattgcaatgattatggaaaaatagaaagcgaatactcagtttaagccaaggaaaatattgtggatttaatatttgataaaactgattttg

SEQ ID NO: 20196 - DNA, 2472 bp, Homo sapiens
  source 1..2472: mol_type = unassigned DNA
ttctcgtttttgttcttaaaacctgtagtgtaacctatttggtgtaaggagtttgaagcaagtatgatgagtttttacttttttttttttttttggcaggttaaacccatccagagtaatggctgcggccttacccaggaccctgggggagttgcagctgtatagaatattacaaaaagccaatctactttcttattttgatgcctttatccaacaaggtggtgatgatgtccagcaactctgtgaagcaggagaagaggagtttttggaaatcatggcactcgtgggcatggctagcaagccccttcatgttagaaggctgcagaaggctttgagagactgggtcacaaaccctgggcttttcaatcagccactgacttcccttcctgtcagtagcatacccatctataaattaccagagggatcaccaacatggctgggaatatcctgcagtagttatgaaaggagtagcaatgcccgggaacctcatttaaaaatccccaaatgtgctgccaccacctgtgtgcagagcttgggacaggggaagtcagatgtggttgggagcctagcactgcagagtgttggtgagtccagactctggcaaggccaccatgccactgagagcgagcacagcctctccccagcagacctgggctcccccgcgtccccaaaggagagcagtgaggcgctggatgctgctgctgcgctctctgtggctgagtgtgtggagcggatggcccccacactgccaaaaagtgacttgaatgaagtgaaagagctgctaaaaaccaacaagaagttggccaaaatgattggtcacatctttgagatgaacgatgatgatccacacaaagaggaggaaattcggaaatacagtgcaatatatggcagatttgactcaaagaggaaggatgggaaacatctcacacttcatgagctcactgttaatgaagcggctgctcaactctgtgtgaaggataatgccctgctgacaagaagagatgagctttttgccttggctcgacagatttctcgagaagtcacctataaatatacttacagaaccaccaagtcaaaatgtggagaaagagatgaattatccccaaagagaattaaagtggaggatgggtttccagatttccaggattctgtgcaaacactcttccagcaggctagagctaagagtgaagaacttgcagctcttagttcacagcctgaaaaggtgatggcaaagcagatggagttcctttgcaaccaagctggctatgagagactgcagcatgccgagaggaggttgtctgcagggctttacaggcagagctcagaagagcacagtcctaacggcttgacttccgataactcagatggacaaggagaaagacctttgaatctccgaatgcctaatttacagaacagacaaccccatcattttgtggtggatggggagctgagcagactttaccccagtgaggcaaagtcccactcatcagagagccttgggattttaaaagactaccctcattcagcttttaccttagaaaagaaagtcatcaaaacagagcctgaagattcaagatagctgtgatttctctcaccgttctctggaaatggcatcagatttaaggataatactccatcatagaaataagccttaataaccagtgttgcctcattcagctcaaacagatttcatagccaaagcaaaaggactggtacggtagtctgtggaaaccaggaagataaaacaacagccacaaaagagaaaatcaagagtgttgcaatctataacagtaatattgattcattcacattcctgtgttaagtcattttatatggaaaggcttacaaatcaatattgtaagcattcattatttaagaatgtacaatgtatttgtgtaatttatagaagtaaaatctagatgttgagacctgtttggtctaatagatgtggatacagtttattttacttgaaattttgttgtctactttgtgtgtttaacgtaaatatatgtcagagtttagaatctgcctgcagttgtgaaaaagaaagcttaagtgatgcagttattggcaagattgcaatgattatggaaaaatagaaagcgaatactcagtttaagccaaggaaaatattgtggatttaatatttgataaaactgattttgtttaacaggaaatttttagcattcagtcatataacatctggttatcaatgcacgtttacacaataaatacttgagtggaggaaagttaaaaagatgagcaatagagtagaaaatatatcttaaactagttgacctagattgtattaatagctacttaagatgtttcaaagataggaagctattgcttggacagagaacttgaaataagtggacccatgtataaaagctttgacttaaacattgatatttcagaatgtgttaaatagattaagacacagtaagttaaccctacatgttataaagatgg

SEQ ID NO: 20197 - DNA, 568 bp, Homo sapiens
  source 1..568: mol_type = unassigned DNA
gtcactcggccgcgcgtgggcgggagccggagcggcgaatgtagcaagagcggaatctcccaatgtgacagcgcggggttaaacccatccagagtaatggctgcggccttacccaggaccctgggggagttgcagctgtatagaatattacaaaaagccaatctactttcttattttgatgcctttatccaacaaggtggtgatgatgtccagcaactctgtgaagcaggagaagaggagtttttggaaatcatggcactcgtgggcatggctagcaagccccttcatgttagaaggctgcagaaggctttgagagactgggtcacaaaccctgggcttttcaatcagccactgacttcccttcctgtcagtagcatacccatctataaattaccagagggatcaccaacatggctgggaatatcctgcagtagttatgaaaggagtagcaatgcccgggaacctcatttaaaaatccccaaatgtgctgccaccacctgtgtgcagagcttgggacaggggaagtcagatgtggttgggagcctagcactgcagagtgttggtgagt

SEQ ID NO: 20198 - DNA, 438 bp, Homo sapiens
  source 1..438: mol_type = unassigned DNA
aggaacagagaagaaaaagacctaggatctcatgactgaacttgaattcttaaaaggactgagcagggggaggaacatttaagctgatggaagtggaagtggaagttgctgtacattggcagcaaggcctccgagttagcttttgaatgcagttaactggtttctcttaactgtggaattcattgaaaagtcagactccgagtggtcgttccaggatatcttgaaaagcccaggttaaacccatccagagtaatggctgcggccttacccaggaccctgggggagttgcagctgtatagaatattacaaaaagccaatctactttcttattttgatgcctttatccaacaaggtggtgatgatgtccagcaactctgtgaagcaggagaagaggagtttttggaaatcatggcactcgtgggcatggctagcaagccc

SEQ ID NO: 20199 - DNA, 545 bp, Homo sapiens
  source 1..545: mol_type = unassigned DNA
actcggccgcgcgtgggcgggagccggagcggcgaatgtagcaagagcggaatctcccaatgtgacagcgcgggttttctttttaaaagcggaaggagagttttacatggaagtggcttacagaaacttggcgctgaggtgcagggaagccagaaactctttgtgtctctaaggccgatgaggaatttggaaacacatgtgggacatacaagcgttggatatagaggttaaacccatccagagtaatggctgcggccttacccaggaccctgggggagttgcagctgtatagaatattacaaaaagccaatctactttcttattttgatgcctttatccaacaaggtggtgatgatgtccagcaactctgtgaagcaggagaagaggagtttttggaaatcatggcactcgtgggcatggctagcaagccccttcatgttagaaggctgcagaaggctttgagagactgggtcacaaaccctgggcttttcaatcagccactgacttcccttcctgtcagtagcatacccatctataaattacca

SEQ ID NO: 20200 - DNA, 1661 bp, Homo sapiens
  source 1..1661: mol_type = unassigned DNA
gaaagagctgctaaaaaccaacaagaagttggccaaaatgattggtcacatctttgagatgaacgatgatgatccacacaaagaggaggaaattcggaaatacagtgcaatatatggcagatttgactcaaagaggaaggatgggaaacatctcacacttcatgagctcactgttaatgaagcggctgctcaactctgtgtgaaggataatgccctgctgacaagaagagatgagctttttgccttggctcgacagatttctcgagaagtcacctataaatatacttacagaaccaccaagtcaaaatgtggagaaagagatgaattatccccaaagagaattaaagtggagcagcctgaaaaggtgatggcaaagcagatggagttcctttgcaaccaagctggctatgagagactgcagcatgccgagaggaggttgtctgcagggctttacaggcagagctcagaagagcacagtcctaacggcttgacttccgataactcagatggacaaggagaaagacctttgaatctccgaatgcctaatttacagaacagacaaccccatcattttgtggtggatggggagctgagcagactttaccccagtgaggcaaagtcccactcatcagagagccttgggattttaaaagactaccctcattcagcttttaccttagaaaagaaagtcatcaaaacagagcctgaagattcaagatagctgtgatttctctcaccgttctctggaaatggcatcagatttaaggataatactccatcatagaaataagccttaataaccagtgttgcctcattcagctcaaacagatttcatagccaaagcaaaaggactggtacggtagtctgtggaaaccaggaagataaaacaacagccacaaaagagaaaatcaagagtgttgcaatctataacagtaatattgattcattcacattcctgtgttaagtcattttatatggaaaggcttacaaatcaatattgtaagcattcattatttaagaatgtacaatgtatttgtgtaatttatagaagtaaaatctagatgttgagacctgtttggtctaatagatgtggatacagtttattttacttgaaattttgttgtctactttgtgtgtttaacgtaaatatatgtcagagtttagaatctgcctgcagttgtgaaaaagaaagcttaagtgatgcagttattggcaagattgcaatgattatggaaaaatagaaagcgaatactcagtttaagccaaggaaaatattgtggatttaatatttgataaaactgattttgtttaacaggaaatttttagcattcagtcatataacatctggttatcaatgcacgtttacacaataaatacttgagtggaggaaagttaaaaagatgagcaatagagtagaaaatatatcttaaactagttgacctagattgtattaatagctacttaagatgtttcaaagataggaagctattgcttggacagagaacttgaaataagtggacccatgtataaaagctttgacttaaacattgatatttcagaatgtgttaaatagattaagacacagtaagttaaccctacatgttataaagatggcgactgttaacaaaggctgtaacagattaagtactattttatatcca

SEQ ID NO: 20201 - DNA, 590 bp, Homo sapiens
  source 1..590: mol_type = unassigned DNA
acatttccttttcagcatcatgttcagccagacacagacaagcttgggaagaggatttaatgttgtttcttccaactctggaaacaattccactagaaggctcaatagttcaggttaaacccatccagagtaatggctgcggccttacccaggaccctgggggagttgcagctgtatagaatattacaaaaagccaatctactttcttattttgatgcctttatccaacaaggtggtgatgatgtccagcaactctgtgaagcaggagaagaggagtttttggaaatcatggcactcgtgggcatggctagcaagccccttcatgttagaaggctgcagaaggctttgagagactgggtcacaaaccctgggcttttcaatcagccactgacttcccttcctgtcagtagcatacccatctataaattaccagagggatcaccaacatggctgggaatatcctgcagtagttatgaaaggagtagcaatgcccgggaacctcatttaaaaatccccaaatgtgctgccaccacctgtgtgcagagcttgggacaggggaagtcagatgtggttgggagcctagcactgca

SEQ ID NO: 20202 - DNA, 1661 bp, Homo sapiens; identical to SEQ ID NO: 20200
  source 1..1661: mol_type = unassigned DNA

SEQ ID NO: 20203 - DNA, 2711 bp, Homo sapiens
  source 1..2711: mol_type = unassigned DNA
ctctcccagtctctaagccgcggcgtctccgcggccgagaggccccagcgcccgcctccccggcccccgcccccacccccgcccccggctctgcccacgccctccgcccgccagcccggcagccagcgcagctccgggcctcgctccctgtgcgtcctgcgggggcggaggcgcggagaggcggcaagcgcagccggggagggtgggggggcagaggcacagacagaggcgcggaggctcggagagagaagacgtggagggagggacagagcctggacagcggtggacacggcatcgtgcgcggggaagagggcagcacgcagcaggcgccgagcgccgggcaccgagaagggcagcccgggtgatctccggccgtccatgcacagagcgccttcccccacagccgagcagccgccgggcggaggggacagcgcccgccggaccctgcagcccagactcaagcccagtgcccgagccatggcactgcctcggacgctgggggagctgcagctgtaccgggtcctgcagcgcgccaacctcctttcctactatgagaccttcatccagcagggaggggacgacgtgcagcagctgtgtgaggcgggtgaggaggagtttctggagatcatggcacttgtgggcatggccaccaagcccctccatgtccggcgcctgcagaaggcactgagagagtgggccaccaatccagggctcttcagtcaaccagtgcctgctgttcccgtctccagcatcccgctcttcaagatctctgagactgcgggtacccggaaagggagcatgagcaatgggcatggcagcccaggggaaaaggcaggcagtgcccgcagttttagccccaagagcccccttgaacttggagagaagctatcaccactgcctgggggacctggggcaggggacccccggatctggccaggccggagcactccagagtcggacgttggggcaggaggagaagaggaggctggctcgccccccttctccccccctgcagggggaggagtccctgaggggactggggctggggggctggcagcaggtgggactgggggtggtccagaccgactggagccagagatggtacgcatggtggtggaaagtgtggagaggatcttccggagcttcccaaggggggatgctggggaggtcacatccctgctaaagctgaataagaagctggcacggagcgttgggcacatctttgagatggatgataatgacagccagaaggaagaggagatccgcaaatacagcatcatctatggccgtttcgactctaagcggcgggagggcaagcagctcagcctgcacgagctcaccatcaacgaggctgctgcccagttctgcatgagggacaacacgctcttattacggagagtggagctcttctctttgtcccgccaagtagcccgagagagcacctacttgtcctccttgaagggctccaggcttcaccctgaagaactgggaggccctccactgaagaagctgaaacaagaggttggagaacagagtcaccctgaaatccagcagcctcccccaggccctgagtcctatgtacccccataccgccccagcctggaggaggacagcgccagcctgtctggggagagtctggatggacatttgcaggctgtggggtcatgtccaaggctgacgccgccccctgctgacctgcctctggcattgccagcccatgggctatggagccgacacatcctgcagcagacactgatggacgaggggctgcggctcgcccgcctcgtctcccacgaccgcgtgggccgcctcagcccctgtgtgcctgcgaagccacctctcgcagagttcgaggaagggctgctggacagatgtcctgccccaggaccccatcccgcgctggtggagggtcgcaggagcagcgtgaaagtggaggctgaggccagccggcagtgagggttggactggtgtcttcagacccaggacctcagacttctggctcacacagacccccacgctctccatccccggaatctagtcacaaccctggatccttcctctgcccttctcctgcctccccacctgctccatgggcataagactgtggggcttcaagcaataacaagcagaggcctggagagaggacacaaggagggtgcgtggtgccctcacccctgcccagagcgagggggcaaggactctgcctccagggcatctggggttttcccctccctcacacaacacactcccattctctttaggtttgcaccagtggtgtgagcagttggactcagtttggacaagggggaaagggggacttccctgggaaggtccagctaaaagtggcaacatttgcccccagaattgggggcctgggaacactggacctgctccttctcccctctccttccccgtttttgtgcttctggtttgtttctttaattaatttaacaagtgctgcagtttgccctcccattcccatctatcccccaagtcctttgcaatttcttccctgccctacataggggcggtgggtgtgggatcccttcactggccccctcgggaggcctgggttggactcagggtctcctccagctgggggctggaccgcagcacctatctgagcagttagagcgtctttcttttcagattgtgtacagtagattatttattttgttattttggaataaaatttattttatggcttagga

SEQ ID NO: 20204 - DNA, 2318 bp, Homo sapiens
  source 1..2318: mol_type = unassigned DNA
gggtgggggggcagaggcacagacagaggcgcggaggctcggagagagaagacgtggagggagggacagagcctggacagcggtggacacggcatcgtgcgcggggaagagggcagcacgcagcaggcgccgagcgccgggcaccgagaagggcagcccgggtgatctccggccgtccatgcacagagcgccttcccccacagccgagcagccgccgggcggaggggacagcgcccgccggaccctgcagcccagactcaagcccagtgcccgagccatggcactgcctcggacgctgggggagctgcagctgtaccgggtcctgcagcgcgccaacctcctttcctactatgagaccttcatccagcagggaggggacgacgtgcagcagctgtgtgaggcgggtgaggaggagtttctggagatcatggcacttgtgggcatggccaccaagcccctccatgtccggcgcctgcagaaggcactgagagagtgggccaccaatccagggctcttcagtcaaccagtgcctgctgttcccgtctccagcatcccgctcttcaagatctctgagactgcgggtacccggaaagggagcatgagcaatgggcatggcagcccaggggaaaaggcaggcagtgcccgcagttttagccccaagagcccccttgaacttggagagaagctatcaccactgcctgggggacctggggcaggggacccccggatctggccaggccggagcactccagagtcggacgttggggcaggaggagaagaggaggctggctcgccccccttctccccccctgcagggggaggagtccctgaggggactggggctggggggctggcagcaggtgggactgggggtggtccagaccgactggagccagagatggtacgcatggtggtggaaagtgtggagaggatcttccggagcttcccaaggggggatgctggggaggtcacatccctgctaaagctgaataagaagctggcacggagcgttgggcacatctttgagatggatgataatgacagccagaaggaagaggagatccgcaaatacagcatcatctatggccgtttcgactctaagcggcgggagggcaagcagctcagcctgcacgagctcaccatcaacgaggctgctgcccagttctgcatgagggacaacacgctcttattacggagagtggagctcttctctttgtcccgccaagtagcccgagagagcacctacttgtcctccttgaagggctccaggcttcaccctgaagaactgggaggccctccactgaagaagctgaaacaagaggttggagaacagagtcaccctgaaatccagcagcctcccccaggccctgagtcctatgtacccccataccgccccagcctggaggaggacagcgccagcctgtctggggagagtctggatggacatttgcaggagttcgaggaagggctgctggacagatgtcctgccccaggaccccatcccgcgctggtggagggtcgcaggagcagcgtgaaagtggaggctgaggccagccggcagtgagggttggactggtgtcttcagacccaggacctcagacttctggctcacacagacccccacgctctccatccccggaatctagtcacaaccctggatccttcctctgcccttctcctgcctccccacctgctccatgggcataagactgtggggcttcaagcaataacaagcagaggcctggagagaggacacaaggagggtgcgtggtgccctcacccctgcccagagcgagggggcaaggactctgcctccagggcatctggggttttcccctccctcacacaacacactcccattctctttaggtttgcaccagtggtgtgagcagttggactcagtttggacaagggggaaagggggacttccctgggaaggtccagctaaaagtggcaacatttgcccccagaattgggggcctgggaacactggacctgctccttctcccctctccttccccgtttttgtgcttctggtttgtttctttaattaatttaacaagtgctgcagtttgccctcccattcccatctatcccccaagtcctttgcaatttcttccctgccctacataggggcggtgggtgtgggatcccttcactggccccctcgggaggcctgggttggactcagggtctcctccagctgggggctggaccgcagcacctatctgagcagttagagcgtctttcttttcagattgtgtacagtagattatttattttgttattttggaataaaatttattttatggcttagg

SEQ ID NO: 20205 - DNA, 2363 bp, Homo sapiens
  source 1..2363: mol_type = unassigned DNA
gaggcacagacagaggcgcggaggctcggagagagaagacgtggagggagggacagagcctggacagcggtggacacggcatcgtgcgcggggaagagggcagcacgcagcaggcgccgagcgccgggcaccgagaagggcagcccgggtgatctccggccgtccatgcacagagcgccttcccccacagccgagcagccgccgggcggaggggacagcgcccgccggaccctgcagcccagactcaagcccagtgcccgagccatggcactgcctcggacgctgggggagctgcagctgtaccgggtcctgcagcgcgccaacctcctttcctactatgagaccttcatccagcagggaggggacgacgtgcagcagctgtgtgaggcgggtgaggaggagtttctggagatcatggcacttgtgggcatggccaccaagcccctccatgtccggcgcctgcagaaggcactgagagagtgggccaccaatccagggctcttcagtcaaccagtgcctgctgttcccgtctccagcatcccgctcttcaagatctctgagactgcgggtacccggaaagggagcatgagcaatgggcatggcagcccaggggaaaaggcaggcagtgcccgcagttttagccccaagagcccccttgaacttggagagaagctatcaccactgcctgggggacctggggcaggggacccccggatctggccaggccggagcactccagagtcggacgttggggcaggaggagaagaggaggctggctcgccccccttctccccccctgcagggggaggagtccctgaggggactggggctggggggctggcagcaggtgggactgggggtggtccagaccgactggagccagagatggtacgcatggtggtggaaagtgtggagaggatcttccggagcttcccaaggggggatgctggggaggtcacatccctgctaaagctgaataagaagctggcacggagcgttgggcacatctttgagatggatgataatgacagccagaaggaagaggagatccgcaaatacagcatcatctatggccgtttcgactctaagcggcgggagggcaagcagctcagcctgcacgaggcttcaccctgaagaactgggaggccctccactgaagaagctgaaacaagaggttggagaacagagtcaccctgaaatccagcagcctcccccaggccctgagtcctatgtacccccataccgccccagcctggaggaggacagcgccagcctgtctggggagagtctggatggacatttgcaggctgtggggtcatgtccaaggctgacgccgccccctgctgacctgcctctggcattgccagcccatgggctatggagccgacacatcctgcagcagacactgatggacgaggggctgcggctcgcccgcctcgtctcccacgaccgcgtgggccgcctcagcccctgtgtgcctgcgaagccacctctcgcagagttcgaggaagggctgctggacagatgtcctgccccaggaccccatcccgcgctggtggagggtcgcaggagcagcgtgaaagtggaggctgaggccagccggcagtgagggttggactggtgtcttcagacccaggacctcagacttctggctcacacagacccccacgctctccatccccggaatctagtcacaaccctggatccttcctctgcccttctcctgcctccccacctgctccatgggcataagactgtggggcttcaagcaataacaagcagaggcctggagagaggacacaaggagggtgcgtggtgccctcacccctgcccagagcgagggggcaaggactctgcctccagggcatctggggttttcccctccctcacacaacacactcccattctctttaggtttgcaccagtggtgtgagcagttggactcagtttggacaagggggaaagggggacttccctgggaaggtccagctaaaagtggcaacatttgcccccagaattgggggcctgggaacactggacctgctccttctcccctctccttccccgtttttgtgcttctggtttgtttctttaattaatttaacaagtgctgcagtttgccctcccattcccatctatcccccaagtcctttgcaatttcttccctgccctacataggggcggtgggtgtgggatcccttcactggccccctcgggaggcctgggttggactcagggtctcctccagctgggggctggaccgcagcacctatctgagcagttagagcgtctttcttttcagattgtgtacagtagattatttattttgttattttggaataaaatttattttatggcttagg

SEQ ID NO: 20206 - DNA, 1897 bp, Homo sapiens
  source 1..1897: mol_type = unassigned DNA
ctcaggctcggcgtccccggccgtggctgagctctgccagaacaccccggagacctttttggaggcctccaagctgctgctcacctatgctgacaacatcctcagaaaccctaatgatgaaaaatatagatccatccggattggaaacacagccttttctactagactcttgcctgtcagaggagctgttgaatgtttatttgaaatgggctttgaagagggagaaacacatctcatctttcctaaaaaagcttcagtggagcagctgcaaaaaattcgtgacctgattgccatagagagaagtagcagactggatggctcaaataagagccacaaagtaaagtcatctcagcaacctgcagccagtacccagcttcctacaacaccatcttcaaatcccagtgggttaaaccagcacacaaggaaccgtcaagggcagtcatcagatccaccatctgcttcaacggttgctgctgactcagccattctagaagttcttcagtccaacattcagcatgtgctggtctatgaaaatcctgctcttcaggagaaagcgttggcttgtattccggtccaagaactaaaaaggaaatcacaagaaaagttatcgagagctagaaaattggataaagatataataaccctgagaaacttttggaaacaagatgtggacggtgtggcgagtgggccaattgttttacactgtgctgccgagctgtagggtttgaagctcgctatgtttgggattacacagaccatgtctggacagaagtctattctccttctcagcagcggtggctgcactgtgatgcatgtgaagatgtctgtgacaagccactcctttatgaaataggatggggcaagaagctttcctatgtcatagcattttcaaaagatgaggtagttgatgtcacttggcgatattcctgcaaacatgaagaggtgattgccagaagaactaaggttaaagaagcattacttcgagacactattaatgggcttaataagcagaggcaactgtttttgtcagaaaacagaaggaaagaacttctccagaggataattgtggagcttgttgaatttatatctcccaaaacccctaaacctggagaacttgggggaagaatatctgggtcagtggcttggagagtagcccgaggtgaaatgggtctacagagaaaagaaaccttgtttattccctgtgaaaatgagaagatttctaaacagctccacctttgttacaatattgtgaaagatcgttatgttcgagtttcaaataacaatcaaaccatttctggatgggagaatggcgtgtggaaaatggaatctatattcagaaaagttgaaacagactggcacatggtatatttggcccgaaaggaaggatcatcttttgcttatatttcctggaagtttgagtgtgggtcagttggcctaaaagtagatagcatttctattagaacaagtagtcaaacttttcagactggaacagtagaatggaaattgcgatctgatacagcacaagtagaactgacaggcgataacagtcttcactcctatgctgatttttctggtgccactgaagttattttggaagcagaattaagcagaggagatggtgatgtcgcttggcaacacacccagctgtttagacaaagcttaaatgaccatgaagaaaattgtttggagataattataaaattcagtgacctttgagaacctgaacattatagaaaagctggcaataatcaaggacttactgaagtagtctgttggttcagtgcatgcttagttggcagttaccaccctgtgctagcatatttcttttgctagctatccatcatgtaaccctcatgaaaattatctttatacgtggactataataaaatattgaatt

SEQ ID NO: 20207 - DNA, 2473 bp, Homo sapiens
  source 1..2473: mol_type = unassigned DNA
gccggccgaggaccccgcccctgccggccgaggaccccgcccctgccggccgaggaccccgcccctgccggtggctgcggtagctgctgcgcgctgaggcgcctgctcagtgtgggacgcggagagcgaggggcggcggcggcgcccgctggcgctcaagcatggcggcggcggcattgggcagctcctcaggctcggcgtccccggccgtggctgagctctgccagaacaccccggagacctttttggaggcctccaagctgctgctcacctatgctgacaacatcctcagaaaccctaatgatgaaaaatatagatccatccggattggaaacacagccttttctactagactcttgcctgtcagaggagctgttgaatgtttatttgaaatgggctttgaagagggagaaacacatctcatctttcctaaaaaagcttcagtggagcagctgcaaaaaattcgtgacctgattgccatagagagaagtagcagactggatggctcaaataagagccacaaagtaaagtcatctcagcaacctgcagccagtacccagcttcctacaacaccatcttcaaatcccagtgggttaaaccagcacacaaggaaccgtcaagggcagtcatcagatccaccatctgcttcaacggttgctgctgactcagccattctagaagttcttcagtccaacattcagcatgtgctggtctatgaaaatcctgctcttcaggagaaagcgttggcttgtattccggtccaagaactaaaaaggaaatcacaagaaaagttatcgagagctagaaaattggataaaggtatcaatataagtgatgaggattttcttttgctggagcttttgcactggtttaaggaagaattttttcactgggtgaataacgttttgtgcagcaaatgtggtggacagactaggtctagagatagatcattactgcccagtgatgatgagctgaagtggggtgcaaaggaagtggaagatcattactgtgatgcctgccagttcagcaatcgattcccaagatataataaccctgagaaacttttggaaacaagatgtggacggtgtggcgagtgggccaattgttttacactgtgctgccgagctgtagggtttgaagctcgctatgtttgggattacacagaccatgtctggacagaagtctattctccttctcagcagcggtggctgcactgtgatgcatgtgaagatgtctgtgacaagccactcctttatgaaataggatggggcaagaagctttcctatgtcatagcattttcaaaagatgaggtagttgatgtcacttggcgatattcctgcaaacatgaagaggtgattgccagaagaactaaggttaaagaagcattacttcgagacactattaatgggcttaataagcagaggcaactgtttttgtcagaaaacagaaggaaagaacttctccagaggataattgtggagcttgttgaatttatatctcccaaaacccctaaacctggagaacttgggggaagaatatctgggtcagtggcttggagagtagcccgaggtgaaatgggtctacagagaaaagaaaccttgtttattccctgtgaaaatgagaagatttctaaacagctccacctttgttacaatattgtgaaagatcgttatgttcgagtttcaaataacaatcaaaccatttctggatgggagaatggcgtgtggaaaatggaatctatattcagaaaagttgaaacagactggcacatggtatatttggcccgaaaggaaggatcatcttttgcttatatttcctggaagtttgagtgtgggtcagttggcctaaaagtagatagcatttctattagaacaagtagtcaaacttttcagactggaacagtagaatggaaattgcgatctgatacagcacaagtagaactgacaggcgataacagtcttcactcctatgctgatttttctggtgccactgaagttattttggaagcagaattaagcagaggagatggtgatgtcgcttggcaacacacccagctgtttagacaaagcttaaatgaccatgaagaaaattgtttggagataattataaaattcagtgacctttgagaacctgaacattatagaaaagctggcaataatcaaggacttactgaagtagtctgttggttcagtgcatgcttagttggcagttaccaccctgtgctagcatatttcttttgctagctatccatcatgtaaccctcatgaaaattatctttatacgtggactataataaaatattgaattaaaacctttcttccatatgtgactataatttggagtaaagtcttgttgactcaatatgggattttaatctaaaactgtaagtatggttttaaaagttaaataatgatattcatgattaaatgctattcatgattatgataaaatcttgggcttatgatagtaattt

SEQ ID NO: 20208 - DNA, 2086 bp, Homo sapiens
  source 1..2086: mol_type = unassigned DNA
gcggcattgggcagctcctcaggctcggcgtccccggccgtggctgagctctgccagaacaccccggagacctttttggaggcctccaagctgctgctcacctatgctgacaacatcctcagaaaccctaatgatgaaaaatatagatccatccggattggaaacacagccttttctactagactcttgcctgtcagaggagctgttgaatgtttatttgaaatgggctttgaagagggagaaacacatctcatctttcctaaaaaagcttcagtggagcagctgcaaaaaattcgtgacctgattgccatagagagaagtagcagactggatggctcaaataagagccacaaagtaaagtcatctcagcaacctgcagccagtacccagcttcctacaacaccatcttcaaatcccagtgggttaaaccagcacacaaggaaccgtcaagggcagtcatcagatccaccatctgcttcaacggttgctgctgactcagccattctagaagttcttcagtccaacattcagcatgtgctggtctatgaaaatcctgctcttcaggagaaagcgttggcttgtattccggtccaagaactaaaaaggaaatcacaagaaaagttatcgagagctagaaaattggataaaggtatcaatataagtgatgaggattttcttttgctggagcttttgcactggtttaaggaagaattttttcactgggtgaataacgttttgtgcagcaaatgtggtggacagactaggtctagagatagatcattactgcccagtgatgatgagctgaagtggggtgcaaaggaagtggaagatcattactgtgatgcctgccagttcagcaatcgattcccaagatataataaccctgagaaacttttggaaacaagatgtggacggtgtggcgagtgggccaattgttttacactgtgctgccgagctgtagggtttgaagctcgctatgtttgggattacacagagttacagcgcacattaagcctaaaactgaccacgttaaaggagattggaaaaacatttttaaggatttcaaagagacagaaattaatacaggtagttgatgtcacttggcgatattcctgcaaacatgaagaggtgattgccagaagaactaaggttaaagaagcattacttcgagacactattaatgggcttaataagcagaggcaactgtttttgtcagaaaacagaaggaaagaacttctccagaggataattgtggagcttgttgaatttatatctcccaaaacccctaaacctggagaacttgggggaagaatatctgggtcagtggcttggagagtagcccgaggtgaaatgggtctacagagaaaagaaaccttgtttattccctgtgaaaatgagaagatttctaaacagctccacctttgttacaatattgtgaaagatcgttatgttcgagtttcaaataacaatcaaaccatttctggatgggagaatggcgtgtggaaaatggaatctatattcagaaaagttgaaacagactggcacatggtatatttggcccgaaaggaaggatcatcttttgcttatatttcctggaagtttgagtgtgggtcagttggcctaaaagtagatagcatttctattagaacaagtagtcaaacttttcagactggaacagtagaatggaaattgcgatctgatacagcacaagtagaactgacaggcgataacagtcttcactcctatgctgatttttctggtgccactgaagttattttggaagcagaattaagcagaggagatggtgatgtcgcttggcaacacacccagctgtttagacaaagcttaaatgaccatgaagaaaattgtttggagataattataaaattcagtgacctttgagaacctgaacattatagaaaagctggcaataatcaaggacttactgaagtagtctgttggttcagtgcatgcttagttggcagttaccaccctgtgctagcatatttcttttgctagctatccatcatgtaaccctcatgaaaattatctttatacgtggactataataaaatattgaattaaa

SEQ ID NO: 20209 - DNA, 2024 bp, Homo sapiens
  source 1..2024: mol_type = unassigned DNA
gggacgcggagagcgaggggcggcggcggcgcccgctggcgctcaagcatggcggcggcggcattgggcagctcctcaggctcggcgtccccggccgtggctgagctctgccagaacaccccggagacctttttggaggcctccaagctgctgctcacctatgctgacaacatcctcagaaaccctaatgatgaaaaatatagatccatccggattggaaacacagccttttctactagactcttgcctgtcagaggagctgttgaatgtttatttgaaatgggctttgaagagggagaaacacatctcatctttcctaaaaaagcttcagtggagcagctgcaaaaaattcgtgacctgattgccatagagagaagtagcagactggatggctcaaataagagccacaaagtaaagtcatctcagcaacctgcagccagtacccagcttcctacaacaccatcttcaaatcccagtgggttaaaccagcacacaaggaaccgtcaagggcagtcatcagatccaccatctgcttcaacggttgctgctgactcagccattctagaagttcttcagtccaacattcagcatgtgctggtctatgaaaatcctgctcttcaggagaaagcgttggcttgtattccggtccaagaactaaaaaggaaatcacaagaaaagttatcgagagctagaaaattggataaaggtatcaatataagtgatgaggattttcttttgctggagcttttgcactggtttaaggaagaattttttcactgggtgaataacgttttgtgcagcaaatgtggtggacagactaggtctagagatagatcattactgcccagtgatgatgagctgaagtggggtgcaaaggaagtggaagatcattactgtgatgcctgccagttcagcaatcgattcccaagatataataaccctgagaaacttttggaaacaagatgtggacggtgtggcgagtgggccaattgttttacactgtgctgccgagctgtagggtttgaagctcgctatgtttgggattacacagaccatgtctggacagaagtctattctccttctcagcagcggtggctgcactgtgatgcatgtgaagatgtctgtgacaagccactcctttatgaaataggatggggcaagaagctttcctatgtcatagcattttcaaaagatgaggtagttgatgtcacttggcgatattcctgcaaacatgaagaggtgattgccagaagaactaaggttaaagaagcattacttcgagacactattaatgggcttaataagcagaggcaactgtttttgtcagaaaacagaaggaaagaacttctccagaggataattgtggagcttgttgaatttatatctcccaaaacccctaaacctggagaacttgggggaagaatatctgggtcagtggcttggagagtagcccgaggtgaaatgggtctacagagaaaagaaaccttgtttattccctgtgaaaatgagaagatttctaaacagctccacctttgttacaatattgtgaaagatcgttatgttcgagtttcaaataacaatcaaaccatttctggatgggagaatggcgtgtggaaaatggaatctatattcagaaaagttgaaacagactggcacatgataacagtcttcactcctatgctgatttttctggtgccactgaagttattttggaagcagaattaagcagaggagatggtgatgtcgcttggcaacacacccagctgtttagacaaagcttaaatgaccatgaagaaaattgtttggagataattataaaattcagtgacctttgagaacctgaacattatagaaaagctggcaataatcaaggacttactgaagtagtctgttggttcagtgcatgcttagttggcagttaccaccctgtgctagcatatttcttttgctagctatccatcatgtaaccctcatgaaaattatctttatacgtggactataataaaatattgaattaaaacctt

SEQ ID NO: 20210 - DNA, 2062 bp, Homo sapiens
  source 1..2062: mol_type = unassigned DNA
gctttcccacgcacgcgtcccgttcgactctctttccgccggttgactttaagccgcgtcaccttggctgaggtcagaccgtgggaggcggctgggtagctgtttgcgtgagcagagacgcccctctcggaacctcagtgactcgccgataatcgaggacctgccaataacgcgatgagaaaccctaatgatgaaaaatatagatccatccggattggaaacacagccttttctactagactcttgcctgtcagaggagctgttgaatgtttatttgaaatgggctttgaagagggagaaacacatctcatctttcctaaaaaagcttcagtggagcagctgcaaaaaattcgtgacctgattgccatagagagaagtagcagactggatggctcaaataagagccacaaagtaaagtcatctcagcaacctgcagccagtacccagcttcctacaacaccatcttcaaatcccagtgggttaaaccagcacacaaggaaccgtcaagggcagtcatcagatccaccatctgcttcaacggttgctgctgactcagccattctagaagttcttcagtccaacattcagcatgtgctggtctatgaaaatcctgctcttcaggagaaagcgttggcttgtattccggtccaagaactaaaaaggaaatcacaagaaaagttatcgagagctagaaaattggataaaggtatcaatataagtgatgaggattttcttttgctggagcttttgcactggtttaaggaagaattttttcactgggtgaataacgttttgtgcagcaaatgtggtggacagactaggtctagagatagatcattactgcccagtgatgatgagctgaagtggggtgcaaaggaagtggaagatcattactgtgatgcctgccagttcagcaatcgattcccaagatataataaccctgagaaacttttggaaacaagatgtggacggtgtggcgagtgggccaattgttttacactgtgctgccgagctgtagggtttgaagctcgctatgtttgggattacacagaccatgtctggacagaagtctattctccttctcagcagcggtggctgcactgtgatgcatgtgaagatgtctgtgacaagccactcctttatgaaataggatggggcaagaagctttcctatgtcatagcattttcaaaagatgaggtagttgatgtcacttggcgatattcctgcaaacatgaagaggtgattgccagaagaactaaggttaaagaagcattacttcgagacactattaatgggcttaataagcagaggcaactgtttttgtcagaaaacagaaggaaagaacttctccagaggataattgtggagcttgttgaatttatatctcccaaaacccctaaacctggagaacttgggggaagaatatctgggtcagtggcttggagagtagcccgaggtgaaatgggtctacagagaaaagaaaccttgtttattccctgtgaaaatgagaagatttctaaacagctccacctttgttacaatattgtgaaagatcgttatgttcgagtttcaaataacaatcaaaccatttctggatgggagaatggcgtgtggaaaatggaatctatattcagaaaagttgaaacagactggcacatggtatatttggcccgaaaggaaggatcatcttttgcttatatttcctggaagtttgagtgtgggtcagttggcctaaaagtagatagcatttctattagaacaagtagtcaaacttttcagactggaacagtagaatggaaattgcgatctgatacagcacaagtagaactgacaggcgataacagtcttcactcctatgctgatttttctggtgccactgaagttattttggaagcagaattaagcagaggagatggtgatgtcgcttggcaacacacccagctgtttagacaaagcttaaatgaccatgaagaaaattgtttggagataattataaaattcagtgacctttgagaacctgaacattatagaaaagctggcaataatcaaggacttactgaag

SEQ ID NO: 20211 - DNA, 1777 bp, Homo sapiens
  source 1..1777: mol_type = unassigned DNA
aaaatatagatccatccggattggaaacacagccttttctactagactcttgcctgtcagaggagctgttgaatgtttatttgaaatgggctttgaagagggagaaacacatctcatctttcctaaaaaagcttcagtggagcagctgcaaaaaattcgtgacctgattgccatagagagaagtagcagactggatggctcaaataagagccacaaagtaaagtcatctcagcaacctgcagccagtacccagcttcctacaacaccatcttcaaatcccagtgggttaaaccagcacacaaggaaccgtcaagggcagtcatcagatccaccatctgcttcaacggttgctgctgactcagccattctagaagttcttcagtccaacattcagcatgtgctggtctatgaaaatcctgctcttcaggagaaagcgttggcttgtattccggtccaagaactaaaaaggaaatcacaagaaaagttatcgagagctagaaaattggataaagatataataaccctgagaaacttttggaaacaagatgtggacggtgtggcgagtgggccaattgttttacactgtgctgccgagctgtagggtttgaagctcgctatgtttgggattacacagaccatgtctggacagaagtctattctccttctcagcagcggtggctgcactgtgatgcatgtgaagatgtctgtgacaagccactcctttatgaaataggatggggcaagaagctttcctatgtcatagcattttcaaaagatgaggtagttgatgtcacttggcgatattcctgcaaacatgaagaggtgattgccagaagaactaaggttaaagaagcattacttcgagacactattaatgggcttaataagcagaggcaactgtttttgtcagaaaacagaaggaaagaacttctccagaggataattgtggagcttgttgaatttatatctcccaaaacccctaaacctggagaacttgggggaagaatatctgggtcagtggcttggagagtagcccgaggtgaaatgggtctacagagaaaagaaaccttgtttattccctgtgaaaatgagaagatttctaaacagctccacctttgttacaatattgtgaaagatcgttatgttcgagtttcaaataacaatcaaaccatttctggatgggagaatggcgtgtggaaaatggaatctatattcagaaaagttgaaacagactggcacatggtatatttggcccgaaaggaaggatcatcttttgcttatatttcctggaagtttgagtgtgggtcagttggcctaaaagtagatagcatttctattagaacaagtagtcaaacttttcagactggaacagtagaatggaaattgcgatctgatacagcacaagtagaactgacaggcgataacagtcttcactcctatgctgatttttctggtgccactgaagttattttggaagcagaattaagcagaggagatggtgatgtcgcttggcaacacacccagctgtttagacaaagcttaaatgaccatgaagaaaattgtttggagataattataaaattcagtgacctttgagaacctgaacattatagaaaagctggcaataatcaaggacttactgaagtagtctgttggttcagtgcatgcttagttggcagttaccaccctgtgctagcatatttcttttgctagctatccatcatgtaaccctcatgaaaattatctttatacgtggactataataaaatattgaatt

SEQ ID NO: 20212 - DNA, 2534 bp, Homo sapiens
  source 1..2534: mol_type = unassigned DNA
ggaccccgcccctgccggtggctgcggtagctgctgcgcgctgaggcgcctgctcagtgtgggacgcggagagcgaggggcggcggcggcgcccgctggcgctcaagcatggcggcggcggcattgggcagctcctcaggctcggcgtccccggccgtggctgagctctgccagaacaccccggagacctttttggaggcctccaagctgctgctcacctatgctgacaacatcctcagaaaccctaatgatgaaaaatatagatccatccggattggaaacacagccttttctactagactcttgcctgtcagaggagctgttgaatgtttatttgaaatgggctttgaagagggagaaacacatctcatctttcctaaaaaagcttcagtggagcagctgcaaaaaattcgtgacctgattgccatagagagaagtagcagactggatggctcaaataagagccacaaagtaaagtcatctcagcaacctgcagccagtacccagcttcctacaacaccatcttcaaatcccagtgggttaaaccagcacacaaggaaccgtcaagggcagtcatcagatccaccatctgcttcaacggttgctgctgactcagccattctagaagttcttcagtccaacattcagcatgtgctggtctatgaaaatcctgctcttcaggagaaagcgttggcttgtattccggtccaagaactaaaaaggaaatcacaagaaaagttatcgagagctagaaaattggataaaggtatcaatataagtgatgaggattttcttttgctggagcttttgcactggtttaaggaagaattttttcactgggtgaataacgttttgtgcagcaaatgtggtggacagactaggtctagagatagatcattactgcccagtgatgatgagctgaagtggggtgcaaaggaagtggaagatcattactgtgatgcctgccagttcagcaatcgattcccaagatataataaccctgagaaacttttggaaacaagatgtggacggtgtggcgagtgggccaattgttttacactgtgctgccgagctgtagggtttgaagctcgctatgtttgggattacacagagttacagcgcacattaagcctaaaactgaccacgttaaaggagattggaaaaacatttttaaggatttcaaagagacagaaattaatacaggtagttgatgtcacttggcgatattcctgcaaacatgaagaggtgattgccagaagaactaaggttaaagaagcattacttcgagacactattaatgggcttaataagcagaggcaactgtttttgtcagaaaacagaaggaaagaacttctccagaggataattgtggagcttgttgaatttatatctcccaaaacccctaaacctggagaacttgggggaagaatatctgggtcagtggcttggagagtagcccgaggtgaaatgggtctacagagaaaagaaaccttgtttattccctgtgaaaatgagaagatttctaaacagctccacctttgttacaatattgtgaaagatcgttatgttcgagtttcaaataacaatcaaaccatttctggatgggagaatggcgtgtggaaaatggaatctatattcagaaaagttgaaacagactggcacatggtatatttggcccgaaaggaaggatcatcttttgcttatatttcctggaagtttgagtgtgggtcagttggcctaaaagtagatagcatttctattagaacaagtagtcaaacttttcagactggaacagtagaatggaaattgcgatctgatacagcacaagtagaactgacaggcgataacagtcttcactcctatgctgatttttctggtgccactgaagttattttggaagcagaattaagcagaggagatggtgatgtcgcttggcaacacacccagctgtttagacaaagcttaaatgaccatgaagaaaattgtttggagataattataaaattcagtgacctttgagaacctgaacattatagaaaagctggcaataatcaaggacttactgaagtagtctgttggttcagtgcatgcttagttggcagttaccaccctgtgctagcatatttcttttgctagctatccatcatgtaaccctcatgaaaattatctttatacgtggactataataaaatattgaattaaaacctttcttccatatgtgactataatttggagtaaagtcttgttgactcaatatgggattttaatctaaaactgtaagtatggttttaaaagttaaataatgatattcatgattaaatgctattcatgattatgataaaatcttgggcttatgatagtaatttgacattttctgatcagccattcatttcttcagaagtggttaaattagagtctcctaatatttttaattaatgtgaaagtacagtagctcataaattatataatgcatgaaaatttatatgattataaatattcaggcatttaagaaataaaatgaagtattttgcctt

SEQ ID NO: 20213 - DNA, 2134 bp, Homo sapiens
  source 1..2134: mol_type = unassigned DNA
gcacaggacgcgccatggcggccgaagcctcggagagcgggccagcgctgcatgagctcatgcgcgaggcggagatcagcctgctcgagtgcaaggtgtgctttgagaagtttggccaccggcagcagcggcgcccgcgcaacctgtcctgcggccacgtggtctgcctggcctgcgtggccgccctggcgcacccgcgcactctggccctcgagtgcccattctgcaggcgagcttgccggggctgcgacaccagcgactgcctgccggtgctgcacctcatagagctcctgggctcagcgcttcgccagtccccggccgcccatcgcgccgcccccagcgcccccggagccctcacctgccaccacaccttcggcggctgggggaccctggtcaaccccaccggactggcgctttgtcccaagacggggcgtgtcgtggtggtgcacgacggcaggaggcgtgtcaagatttttgactcagggggaggatgcgcgcatcagtttggagagaagggggacgctgcccaagacattaggtaccctgtggatgtcaccatcaccaacgactgccatgtggttgtcactgacgccggcgatcgctccatcaaagtgtttgatttttttggccagatcaagcttgtcattggaggccaattctccttaccttggggtgtggagaccacccctcagaatgggattgtggtaactgatgcggaggcagggtccctgcacctcctggacgtcgacttcgcggaaggggtccttcggagaactgaaaggttgcaagctcatctgtgcaatccccgaggggtggcagtgtcttggctcaccggggccattgcggtcctggagcaccccctggccctggggactggggtttgcagcaccagggtgaaagtgtttagctcaagtatgcagcttgtcggccaagtggatacctttgggctgagcctctactttccctccaaaataactgcctccgctgtgacctttgatcaccagggaaatgtgattgttgcagatacatctggtccagctatcctttgcttaggaaaacctgaggagtttccagtaccgaagcccatggtcactcatggtctttcgcatcctgtggctcttaccttcaccaaggagaattctcttcttgtgctggacacagcatctcattctataaaagtctataaagttgactgggggtgatgggctggggtgggtccctggaatcagaagcactagtgctgccattaatgaattgtttaaccctggataagtcacttaaactcatctatccaggcagggataattaaaaccatctggcagacttacaaagcttgggacagttattggagattaatctaccatttattgaatgcatactctgtgcaaggaaatttgcaaatattagcttatttaatctgtactatccagtgaggtaatttcttcccccccaagatagagtcaagctctgtcacccaggctggagtgcagaagcatgatcacagctcactacagtttcaacgtcccccgctcaggtggtccttccacctcagcctcccaagtagctgggaccacaagtgtgcattaccacactcagctaatttttgtattttggcagagatggggtttcaccatgttgcccaggctggtctcaaactcctgagttcaagcaatccaccttcctcggcctcccaaagtactaggagtacaggcatagccacttgctcagccataatttttattattaatctcattgtacaagtgagaaaactgagacccagagagcttaagtgacttcctcgaggtcatagttacttactgccttagtcccaatttgaattcaattctgattccaaataagttgcgcttaaataagacaacagatgtgggaaaaatatgtgaatgtgtagtgttgctatgtgtactgtctttacaagtagctaattattttagcacaaagatgtgcaaagaaaggagactttatggagagttcaggagaaaaaggattttgtggtggccatcactttcattcaatttgcgactgctctgatggcacattagatgaagttactgttgatcctgagttacgtgaataagaaaaacaattgaactgcttattaaaaaagtaaacatgt

SEQ ID NO: 20214 - DNA, 1630 bp, Homo sapiens
  source 1..1630: mol_type = unassigned DNA
gagaactcctccatccttcacctaattcttcctagttgtcctgggaccaagacaaattcgcctaagataaggagttacgtagaagacagggcgtcctggtgtacgggctggccctggacgtcacttccgctggcggcagtggcgtcacttcctgctcttgggggcggggcatccgtgtccttgcggtgctgggcagcagaccgtccaaaccgacacgcgtggtatcctcgcggtgtccggcaagagactaccaagacagacgctatgactgaggctgatgtgaatccaaaggcctatccccttgccgatgcccacctcaccaagaagctactggacctcgttcagcagtcatgtaactataagcagcttcggaaaggagccaatgaggccaccaaaaccctcaacaggggcatctctgagttcatcgtgatggctgcagacgccgagccactggagatcattctgcacctgccgctgctgtgtgaagacaagaatgtgccctacgtgtttgtgcgctccaagcaggccctggggagagcctgtggggtctccaggcctgtcatcgcctgttctgtcaccatcaaagaaggctcgcagctgaaacagcagatccaatccattcagcagtccattgaaaggctcttagtctaaacctgtggcctctgccacgtgctccctgccagcttcccccctgaggttgtgtatcatattatctgtgttagcatgtagtattttcagctactctctattgttataaaatgtagtactaaatctggtttctggatttttgtgttgtttttgttctgttttacagggttgctatcccccttcctttcctccctccctctgccatccttcatccttttatcctccctttttggaacaagtgttcagagcagacagaagcagggtggtggcaccgttgaaaggcagaaagagccaggagaaagctgatggagccaggacagagatctggttccagctttcagccactagcttcctgttgtgtgcggggtgtggtggaattaaacagcattcattgtgtgtccctgtgcctggcacacagaatcattcatacgtgttcaagtgatcaaggggtttcatttgctcttgggggattaggtatcatttggggaggaagcatgtgttctgtgaggttgttcggctatgtccaagtgtcgtttactaatgtacccctgctgtttgcttttggtaatgtgatgttgatgttctccccctacccacaaccatgcccttgagggtagcagggcagcagcataccaaagagatgtgctgcaggactccggaggcagcctgggtgggtgagccatggggcagttgacctgggtcttgaaagagtcgggagtgacaagctcagagagcatgaactgatgctggcatgaaggattccaggaagatcatggagacctggctggtagctgtaacagagatggtggagtccaaggaaacagcctgtctctggtgaatgggactttctttggtggacacttggcaccagctctgagagcccttcccctgtgtcctgccaccatgtgggtcagatgtactctctgtcacatgaggagagtgctagttcatgtgttctccattcttgtgagcatcctaataa

SEQ ID NO: 20215 - DNA, 1503 bp, Homo sapiens
  source 1..1503: mol_type = unassigned DNA
gccgcgcggggccatttccgctgctgcttctgtgagtttttccggtgcacgcgagtgcttctgaaacgtcagctgcgctcccctaggagtgctgagcccgcggaaccgcagccatgactgaggctgatgtgaatccaaaggcctatccccttgccgatgcccacctcaccaagaagctactggacctcgttcagcagtcatgtaactataagcagcttcggaaaggagccaatgaggccaccaaaaccctcaacaggggcatctctgagttcatcgtgatggctgcagacgccgagccactggagatcattctgcacctgccgctgctgtgtgaagacaagaatgtgccctacgtgtttgtgcgctccaagcaggccctggggagagcctgtggggtctccaggcctgtcatcgcctgttctgtcaccatcaaagaaggctcgcagctgaaacagcagatccaatccattcagcagtccattgaaaggctcttagtctaaacctgtggcctctgccacgtgctccctgccagcttcccccctgaggttgtgtatcatattatctgtgttagcatgtagtattttcagctactctctattgttataaaatgtagtactaaatctggtttctggatttttgtgttgtttttgttctgttttacagggttgctatcccccttcctttcctccctccctctgccatccttcatccttttatcctccctttttggaacaagtgttcagagcagacagaagcagggtggtggcaccgttgaaaggcagaaagagccaggagaaagctgatggagccaggacagagatctggttccagctttcagccactagcttcctgttgtgtgcggggtgtggtggaattaaacagcattcattgtgtgtccctgtgcctggcacacagaatcattcatacgtgttcaagtgatcaaggggtttcatttgctcttgggggattaggtatcatttggggaggaagcatgtgttctgtgaggttgttcggctatgtccaagtgtcgtttactaatgtacccctgctgtttgcttttggtaatgtgatgttgatgttctccccctacccacaaccatgcccttgagggtagcagggcagcagcataccaaagagatgtgctgcaggactccggaggcagcctgggtgggtgagccatggggcagttgacctgggtcttgaaagagtcgggagtgacaagctcagagagcatgaactgatgctggcatgaaggattccaggaagatcatggagacctggctggtagctgtaacagagatggtggagtccaaggaaacagcctgtctctggtgaatgggactttctttggtggacacttggcaccagctctgagagcccttcccctgtgtcctgccaccatgtgggtcagatgtactctctgtcacatgaggagagtgctagttcatgtgttctccattcttgtgagcatcctaataaatctgttccattttgatgacagaa

SEQ ID NO: 20216 - DNA, 1670 bp, Homo sapiens
  source 1..1670: mol_type = unassigned DNA
tctgtgagtttttccggtgcacgcgagtgcttctgaaacgtcagctgcgctcccctaggagtgctgagcccgcggaaccgcagccatgttgtcctgggaccaagacaaattcgcctaagataaggagttacgtagaagacagggcgtcctggtgtacgggctggccctggacgtcacttccgctggcggcagtggcgtcacttcctgctcttgggggcggggcatccgtgtccttgcggtgctgggcagcagaccgtccaaaccgacacgcgtggtatcctcgcggtgtccggcaagagactaccaagacagacgctatgactgaggctgatgtgaatccaaaggcctatccccttgccgatgcccacctcaccaagaagctactggacctcgttcagcagtcatgtaactataagcagcttcggaaaggagccaatgaggccaccaaaaccctcaacaggggcatctctgagttcatcgtgatggctgcagacgccgagccactggagatcattctgcacctgccgctgctgtgtgaagacaagaatgtgccctacgtgtttgtgcgctccaagcaggccctggggagagcctgtggggtctccaggcctgtcatcgcctgttctgtcaccatcaaagaaggctcgcagctgaaacagcagatccaatccattcagcagtccattgaaaggctcttagtctaaacctgtggcctctgccacgtgctccctgccagcttcccccctgaggttgtgtatcatattatctgtgttagcatgtagtattttcagctactctctattgttataaaatgtagtactaaatctggtttctggatttttgtgttgtttttgttctgttttacagggttgctatcccccttcctttcctccctccctctgccatccttcatccttttatcctccctttttggaacaagtgttcagagcagacagaagcagggtggtggcaccgttgaaaggcagaaagagccaggagaaagctgatggagccaggacagagatctggttccagctttcagccactagcttcctgttgtgtgcggggtgtggtggaattaaacagcattcattgtgtgtccctgtgcctggcacacagaatcattcatacgtgttcaagtgatcaaggggtttcatttgctcttgggggattaggtatcatttggggaggaagcatgtgttctgtgaggttgttcggctatgtccaagtgtcgtttactaatgtacccctgctgtttgcttttggtaatgtgatgttgatgttctccccctacccacaaccatgcccttgagggtagcagggcagcagcataccaaagagatgtgctgcaggactccggaggcagcctgggtgggtgagccatggggcagttgacctgggtcttgaaagagtcgggagtgacaagctcagagagcatgaactgatgctggcatgaaggattccaggaagatcatggagacctggctggtagctgtaacagagatggtggagtccaaggaaacagcctgtctctggtgaatgggactttctttggtggacacttggcaccagctctgagagcccttcccctgtgtcctgccaccatgtgggtcagatgtactctctgtcacatgaggagagtgctagttcatgtgttctccattcttgtg

SEQ ID NO: 20217 - DNA, 462 bp, Homo sapiens
  source 1..462: mol_type = unassigned DNA
aaagggggctgatgccccagcctcaactctgaccctggtgccaggcctggttagcatgctcttggtgcagactgaggctgatgtgaatccaaaggcctatccccttgccgatgcccacctcaccaagaagctactggacctcgttcagcagtcatgtaactataagcagcttcggaaaggagccaatgaggccaccaaaaccctcaacaggggcatctctgagttcatcgtgatggctgcagacgccgagccactggagatcattctgcacctgccgctgctgtgtgaagacaagaatgtgccctacgtgtttgtgcgctccaagcaggccctggggagagcctgtggggtctccaggcctgtcatcgcctgttctgtcaccatcaaagaaggctcgcagctgaaacagcagatccaatccattcagcagtccattgaaaggctcttagtctaaacctgtgg

SEQ ID NO: 20218 - DNA, 2936 bp, Homo sapiens
  source 1..2936: mol_type = unassigned DNA
gcgcctggaaacacgaacttccggtctcttaggctccgggccacagagacggtgtcagtggtagcctagagaggccgctaacagacaggagccgaacgggggcttccgctcagcagagaggcaagatggctacggcagggggtggctctggggctgacccgggaagtcggggtctccttcgccttctgtctttctgcgtcctactagcaggtttgtgcaggggaaactcagtggagaggaagatatatatccccttaaataaaacagctccctgtgttcgcctgctcaacgccactcatcagattggctgccagtcttcaattagtggagacacaggggttatccacgtagtagagaaagaggaggacctacagtgggtattgactgatggccccaaccccccttacatggttctgctggagagcaagcattttaccagggatttaatggagaagctgaaagggagaaccagccgaattgctggtcttgcagtgtccttgaccaagcccagtcctgcctcaggcttctctcctagtgtacagtgcccaaatgatgggtttggtgtttactccaattcctatgggccagagtttgctcactgcagagaaatacagtggaattcgctgggcaatggtttggcttatgaagactttagtttccccatctttcttcttgaagatgaaaatgaaaccaaagtcatcaagcagtgctatcaagatcacaacctgagtcagaatggctcagcaccaaccttcccactatgtgccatgcagctcttttcacacatgcatgctgtcatcagcactgccacctgcatgcggcgcagctccatccaaagcaccttcagcatcaacccagaaatcgtctgtgaccccctgtctgattacaatgtgtggagcatgctaaagcctataaatacaactgggacattaaagcctgacgacagggttgtggttgctgccacccggctggatagtcgttcctttttctggaatgtggccccaggggctgaaagcgcagtggcttcctttgtcacccagctggctgctgctgaagctttgcaaaaggcacctgatgtgaccaccctgccccgcaatgtcatgtttgtcttctttcaaggggaaacttttgactacattggcagctcgaggatggtctacgatatggagaagggcaagtttcccgtgcagttagagaatgttgactcatttgtggagctgggacaggtggccttaagaacttcattagagctttggatgcacacagatcctgtttctcagaaaaatgagtctgtacggaaccaggtggaggatctcctggccacattggagaagagtggtgctggtgtccctgctgtcatcctcaggaggccaaatcagtcccagcctctcccaccatcttccctgcagcgatttcttcgagctcgaaacatctctggcgttgttctggctgaccactctggtgccttccataacaaatattaccagagtatttacgacactgctgagaacattaatgtgagctatcccgaatggctgagccctgaagaggacctgaactttgtaacagacactgccaaggccctggcagatgtggccacggtgctgggacgtgctctgtatgagcttgcaggaggaaccaacttcagcgacacagttcaggctgatccccaaacggttacccgcctgctctatgggttcctgattaaagccaacaactcatggttccagtctatcctcaggcaggacctaaggtcctacttgggtgacgggcctcttcaacattacatcgctgtctccagccccaccaacaccacttatgttgtacagtatgccttggcaaatttgactggcacagtggtcaacctcacccgagagcagtgccaggatccaagtaaagtcccaagtgaaaacaaggatctgtatgagtactcatgggtccagggccctttgcattctaatgagacggaccgactcccccggtgtgtgcgttctactgcacgattagccagggccttgtctcctgcctttgaactgagtcagtggagctctactgaatactctacatggactgagagccgctggaaagatatccgtgcccggatatttctcatcgccagcaaagagcttgagttgatcaccctgacagtgggcttcggcatcctcatcttctccctcatcgtcacctactgcatcaatgccaaagctgatgtccttttcattgctccccgggagccaggagctgtgtcatactgaggaggaccccagcttttcttgccagctcagcagttcacttcctagagcatctgtcccactgggacacaaccactaatttgtcactggaacctccctgggcctgtctcagattgggattaacataaaagagtggaactatccaaaagagacagggagaaataaataaattgcctcccttcctccgctcccctttcccatcaccccttccccatttcctcttccttctctactcatgccagattttgggattacaaatagaagcttcttgctcctgtttaactccctagttacccaccctaatttgcccttcaggacccttctactttttccttcctgccctgtacctctctctgctcctcacccccacccctgtacccagccaccttcctgactgggaaggacataaaaggtttaatgtcagggtcaaactacattgagcccctgaggacaggggcatctctgggctgagcctactgtctccttcccactgtcctttctccaggccctcagatggcacattagggtgggcgtgctgcgggtgggtatcccacctccagcccacagtgctcagttgtactttttattaagctgtaatatctatttttgtttttgtctttttcctttattctttttgtaaatatatatataatgagtttcattaaaatagattatcccacacga

SEQ ID NO: 20219 - DNA, 3031 bp, Homo sapiens
  source 1..3031: mol_type = unassigned DNA
agagacggtgtcagtggtagcctagagaggccgctaacagacaggagccgaacgggggcttccgctcagcagagaggcaagatggctacggcagggggtggctctggggctgacccgggaagtcggggtctccttcgccttctgtctttctgcgtcctactagcagtgtcactgtcaatggcgctacatggactttgtaataaccctttgaggcacatagctgggtgccatgtagaacatgtatctgttacgataagtgtgtgcccaagaaatcagaagaatggactttaatctcattttagaaagtttgtgcaggggaaactcagtggagaggaagatatatatccccttaaataaaacagctccctgtgttcgcctgctcaacgccactcatcagattggctgccagtcttcaattagtggagacacaggggttatccacgtagtagagaaagaggaggacctacagtgggtattgactgatggccccaaccccccttacatggttctgctggagagcaagcattttaccagggatttaatggagaagctgaaagggagaaccagccgaattgctggtcttgcagtgtccttgaccaagcccagtcctgcctcaggcttctctcctagtgtacagtgcccaaatgatgggtttggtgtttactccaattcctatgggccagagtttgctcactgcagagaaatacagtggaattcgctgggcaatggtttggcttatgaagactttagtttccccatctttcttcttgaagatgaaaatgaaaccaaagtcatcaagcagtgctatcaagatcacaacctgagtcagaatggctcagcaccaaccttcccactatgtgccatgcagctcttttcacacatgcatgctgtcatcagcactgccacctgcatgcggcgcagctccatccaaagcaccttcagcatcaacccagaaatcgtctgtgaccccctgtctgattacaatgtgtggagcatgctaaagcctataaatacaactgggacattaaagcctgacgacagggttgtggttgctgccacccggctggatagtcgttcctttttctggaatgtggccccaggggctgaaagcgcagtggcttcctttgtcacccagctggctgctgctgaagctttgcaaaaggcacctgatgtgaccaccctgccccgcaatgtcatgtttgtcttctttcaaggggaaacttttgactacattggcagctcgaggatggtctacgatatggagaagggcaagtttcccgtgcagttagagaatgttgactcatttgtggagctgggacaggtggccttaagaacttcattagagctttggatgcacacagatcctgtttctcagaaaaatgagtctgtacggaaccaggtggaggatctcctggccacattggagaagagtggtgctggtgtccctgctgtcatcctcaggaggccaaatcagtcccagcctctcccaccatcttccctgcagcgatttcttcgagctcgaaacatctctggcgttgttctggctgaccactctggtgccttccataacaaatattaccagagtatttacgacactgctgagaacattaatgtgagctatcccgaatggctgagccctgaagaggacctgaactttgtaacagacactgccaaggccctggcagatgtggccacggtgctgggacgtgctctgtatgagcttgcaggaggaaccaacttcagcgacacagttcaggctgatccccaaacggttacccgcctgctctatgggttcctgattaaagccaacaactcatggttccagtctatcctcaggcaggacctaaggtcctacttgggtgacgggcctcttcaacattacatcgctgtctccagccccaccaacaccacttatgttgtacagtatgccttggcaaatttgactggcacagtggtcaacctcacccgagagcagtgccaggatccaagtaaagtcccaagtgaaaacaaggatctgtatgagtactcatgggtccagggccctttgcattctaatgagacggaccgactcccccggtgtgtgcgttctactgcacgattagccagggccttgtctcctgcctttgaactgagtcagtggagctctactgaatactctacatggactgagagccgctggaaagatatccgtgcccggatatttctcatcgccagcaaagagcttgagttgatcaccctgacagtgggcttcggcatcctcatcttctccctcatcgtcacctactgcatcaatgccaaagctgatgtccttttcattgctccccgggagccaggagctgtgtcatactgaggaggaccccagcttttcttgccagctcagcagttcacttcctagagcatctgtcccactgggacacaaccactaatttgtcactggaacctccctgggcctgtctcagattgggattaacataaaagagtggaactatccaaaagagacagggagaaataaataaattgcctcccttcctccgctcccctttcccatcaccccttccccatttcctcttccttctctactcatgccagattttgggattacaaatagaagcttcttgctcctgtttaactccctagttacccaccctaatttgcccttcaggacccttctactttttccttcctgccctgtacctctctctgctcctcacccccacccctgtacccagccaccttcctgactgggaaggacataaaaggtttaatgtcagggtcaaactacattgagcccctgaggacaggggcatctctgggctgagcctactgtctccttcccactgtcctttctccaggccctcagatggcacattagggtgggcgtgctgcgggtgggtatcccacctccagcccacagtgctcagttgtactttttattaagctgtaatatctatttttgtttttgtctttttcctttattctttttgtaaatatatatataatgagtttcattaaaatagattatcccacacga

SEQ ID NO: 20220 - DNA, 1912 bp, Homo sapiens
  source 1..1912: mol_type = unassigned DNA
ttactccaattcctatgggccagagtttgctcactgcagagaaatacagtggaattcgctgggcaatggtttggcttatgaagactttagtttccccatctttcttcttgaagatgaaaatgaaaccaaagtcatcaagcagaaatcgtctgtgaccccctgtctgattacaatgtgtggagcatgctaaagcctataaatacaactgggacattaaagcctgacgacagggttgtggttgctgccacccggctggatagtcgttcctttttctggaatgtggccccaggggctgaaagcgcagtggcttcctttgtcacccagctggctgctgctgaagctttgcaaaaggcacctgatgtgaccaccctgccccgcaatgtcatgtttgtcttctttcaaggggaaacttttgactacattggcagctcgaggatggtctacgatatggagaagggcaagtttcccgtgcagttagagaatgttgactcatttgtggagctgggacaggtggccttaagaacttcattagagctttggatgcacacagatcctgtttctcagaaaaatgagtctgtacggaaccaggtggaggatctcctggccacattggagaagagtggtgctggtgtccctgctgtcatcctcaggaggccaaatcagtcccagcctctcccaccatcttccctgcagcgatttcttcgagctcgaaacatctctggcgttgttctggctgaccactctggtgccttccataacaaatattaccagagtatttacgacactgctgagaacattaatgtgagctatcccgaatggctgagccctgaagaggacctgaactttgtaacagacactgccaaggccctggcagatgtggccacggtgctgggacgtgctctgtatgagcttgcaggaggaaccaacttcagcgacacagttcaggctgatccccaaacggttacccgcctgctctatgggttcctgattaaagccaacaactcatggttccagtctatcctcaggcaggacctaaggtcctacttgggtgacgggcctcttcaacattacatcgctgtctccagccccaccaacaccacttatgttgtacagtatgccttggcaaatttgactggcacagtggtcaacctcacccgagagcagtgccaggatccaagtaaagtcccaagtgaaaacaaggatctgtatgagtactcatgggtccagggccctttgcattctaatgagacggaccgactcccccggtgtgtgcgttctactgcacgattagccagggccttgtctcctgcctttgaactgagtcagtggagctctactgaatactctacatggactgagagccgctggaaagatatccgtgcccggatatttctcatcgccagcaaagagcttgagttgatcaccctgacagtgggcttcggcatcctcatcttctccctcatcgtcacctactgcatcaatgccaaagctgatgtccttttcattgctccccgggagccaggagctgtgtcatactgaggaggaccccagcttttcttgccagctcagcagttcacttcctagagcatctgtcccactgggacacaaccactaatttgtcactggaacctccctgggcctgtctcagattgggattaacataaaagagtggaactatccaaaagagacagggagaaataaataaattgcctcccttcctccgctcccctttcccatcaccccttccccatttcctcttccttctctactcatgccagattttgggattacaaatagaagcttcttgctcctgtttaactccctagttacccaccctaatttgcccttcaggacccttctactttttccttcctgccctgtacctctctctgctcctcacccccacccctgt

SEQ ID NO: 20221 - DNA, 2701 bp, Homo sapiens
  source 1..2701: mol_type = unassigned DNA
gatggctacggcagggggtggctctggggctgacccgggaagtcggggtctccttcgccttctgtctttctgcgtcctactagcaggtttgtgcaggggaaactcagtggagaggaagatatatatccccttaaataaaacagctccctgtgttcgcctgctcaacgccactcatcagattggctgccagtcttcaattagtggagacacaggggttatccacgtagtagagaaagaggaggacctacagtgggtattgactgatggccccaaccccccttacatggttctgctggagagcaagcattttaccagggatttaatggagaagctgaaagggagaaccagccgaattgctggtcttgcagtgtccttgaccaagcccagtcctgcctcaggcttctctcctagtgtacagtgcccaaatgatgggtttggtgtttactccaattcctatgggccagagtttgctcactgcagagaaatacagtggaattcgctgggcaatggtttggcttatgaagactttagtttccccatctttcttcttgaagatgaaaatgaaaccaaagtcatcaagcagtgctatcaagatcacaacctgagtcagaatggctcagcaccaaccttcccactatgtgccatgcagctcttttcacacatgcatgctgtcatcagcactgccacctgcatgcggcgcagctccatccaaagcaccttcagcatcaacccagaaatcgtctgtgaccccctgtctgattacaatgtgtggagcatgctaaagcctataaatacaactgggacattaaagcctgacgacagggttgtggttgctgccacccggctggatagtcgttcctttttctggaatgtggccccaggggctgaaagcgcagtggcttcctttgtcacccagctggctgctgctgaagctttgcaaaaggcacctgatgtgaccaccctgccccgcaatgtcatgtttgtcttctttcaaggggtggccttaagaacttcattagagctttggatgcacacagatcctgtttctcagaaaaatgagtctgtacggaaccaggtggaggatctcctggccacattggagaagagtggtgctggtgtccctgctgtcatcctcaggaggccaaatcagtcccagcctctcccaccatcttccctgcagcgatttcttcgagctcgaaacatctctggcgttgttctggctgaccactctggtgccttccataacaaatattaccagagtatttacgacactgctgagaacattaatgtgagctatcccgaatggctgagccctgaagaggacctgaactttgtaacagacactgccaaggccctggcagatgtggccacggtgctgggacgtgctctgtatgagcttgcaggaggaaccaacttcagcgacacagttcaggctgatccccaaacggttacccgcctgctctatgggttcctgattaaagccaacaactcatggttccagtctatcctcaggcaggacctaaggtcctacttgggtgacgggcctcttcaacattacatcgctgtctccagccccaccaacaccacttatgttgtacagtatgccttggcaaatttgactggcacagtggtcaacctcacccgagagcagtgccaggatccaagtaaagtcccaagtgaaaacaaggatctgtatgagtactcatgggtccagggccctttgcattctaatgagacggaccgactcccccggtgtgtgcgttctactgcacgattagccagggccttgtctcctgcctttgaactgagtcagtggagctctactgaatactctacatggactgagagccgctggaaagatatccgtgcccggatatttctcatcgccagcaaagagcttgagttgatcaccctgacagtgggcttcggcatcctcatcttctccctcatcgtcacctactgcatcaatgccaaagctgatgtccttttcattgctccccgggagccaggagctgtgtcatactgaggaggaccccagcttttcttgccagctcagcagttcacttcctagagcatctgtcccactgggacacaaccactaatttgtcactggaacctccctgggcctgtctcagattgggattaacataaaagagtggaactatccaaaagagacagggagaaataaataaattgcctcccttcctccgctcccctttcccatcaccccttccccatttcctcttccttctctactcatgccagattttgggattacaaatagaagcttcttgctcctgtttaactccctagttacccaccctaatttgcccttcaggacccttctactttttccttcctgccctgtacctctctctgctcctcacccccacccctgtacccagccaccttcctgactgggaaggacataaaaggtttaatgtcagggtcaaactacattgagcccctgaggacaggggcatctctgggctgagcctactgtctccttcccactgtcctttctccaggccctcagatggcacattagggtgggcgtgctgcgggtgggtatcccacctccagcccacagtgctcagttgtactttttattaagctgtaatatctatttttgtttttgtctttttcctttattctttttgtaaatatatatataatgagtttcattaaaatagattatccc

SEQ ID NO: 20222 - DNA, 2745 bp, Homo sapiens
  source 1..2745: mol_type = unassigned DNA
atggactttaatctcattttagaaagtttgtgcaggggaaactcagtggagaggaagatatatatccccttaaataaaacagctccctgtgttcgcctgctcaacgccactcatcagattggctgccagtcttcaattagtggagacacaggggttatccacgtagtagagaaagaggaggacctacagtgggtattgactgatggccccaaccccccttacatggttctgctggagagcaagcattttaccagggatttaatggagaagctgaaagggagaaccagccgaattgctggtcttgcagtgtccttgaccaagcccagtcctgcctcaggcttctctcctagtgtacagtgcccaaatgatgggtttggtgtttactccaattcctatgggccagagtttgctcactgcagagaaatacagtggaattcgctgggcaatggtttggcttatgaagactttagtttccccatctttcttcttgaagatgaaaatgaaaccaaagtcatcaagcagtgctatcaagatcacaacctgagtcagaatggctcagcaccaaccttcccactatgtgccatgcagctcttttcacacatgcatgctgtcatcagcactgccacctgcatgcggcgcagctccatccaaagcaccttcagcatcaacccagaaatcgtctgtgaccccctgtctgattacaatgtgtggagcatgctaaagcctataaatacaactgggacattaaagcctgacgacagggttgtggttgctgccacccggctggatagtcgttcctttttctggaatgtggccccaggggctgaaagcgcagtggcttcctttgtcacccagctggctgctgctgaagctttgcaaaaggcacctgatgtgaccaccctgccccgcaatgtcatgtttgtcttctttcaaggggaaacttttgactacattggcagctcgaggatggtctacgatatggagaagggcaagtttcccgtgcagttagagaatgttgactcatttgtggagctgggacaggtggccttaagaacttcattagagctttggatgcacacagatcctgtttctcagaaaaatgagtctgtacggaaccaggtggaggatctcctggccacattggagaagagtggtgctggtgtccctgctgtcatcctcaggaggccaaatcagtcccagcctctcccaccatcttccctgcagcgatttcttcgagctcgaaacatctctggcgttgttctggctgaccactctggtgccttccataacaaatattaccagagtatttacgacactgctgagaacattaatgtgagctatcccgaatggctgagccctgaagaggacctgaactttgtaacagacactgccaaggccctggcagatgtggccacggtgctgggacgtgctctgtatgagcttgcaggaggaaccaacttcagcgacacagttcaggctgatccccaaacggttacccgcctgctctatgggttcctgattaaagccaacaactcatggttccagtctatcctcaggcaggacctaaggtcctacttgggtgacgggcctcttcaacattacatcgctgtctccagccccaccaacaccacttatgttgtacagtatgccttggcaaatttgactggcacagtggtcaacctcacccgagagcagtgccaggatccaagtaaagtcccaagtgaaaacaaggatctgtatgagtactcatgggtccagggccctttgcattctaatgagacggaccgactcccccggtgtgtgcgttctactgcacgattagccagggccttgtctcctgcctttgaactgagtcagtggagctctactgaatactctacatggactgagagccgctggaaagatatccgtgcccggatatttctcatcgccagcaaagagcttgagttgatcaccctgacagtgggcttcggcatcctcatcttctccctcatcgtcacctactgcatcaatgccaaagctgatgtccttttcattgctccccgggagccaggagctgtgtcatactgaggaggaccccagcttttcttgccagctcagcagttcacttcctagagcatctgtcccactgggacacaaccactaatttgtcactggaacctccctgggcctgtctcagattgggattaacataaaagagtggaactatccaaaagagacagggagaaataaataaattgcctcccttcctccgctcccctttcccatcaccccttccccatttcctcttccttctctactcatgccagattttgggattacaaatagaagcttcttgctcctgtttaactccctagttacccaccctaatttgcccttcaggacccttctactttttccttcctgccctgtacctctctctgctcctcacccccacccctgtacccagccaccttcctgactgggaaggacataaaaggtttaatgtcagggtcaaactacattgagcccctgaggacaggggcatctctgggctgagcctactgtctccttcccactgtcctttctccaggccctcagatggcacattagggtgggcgtgctgcgggtgggtatcccacctccagcccacagtgctcagttgtactttttattaagctgtaatatctatttttgtttttgtctttttcctttattctttttgtaaatatatatataatgagtttcattaaaatagattatccc

SEQ ID NO: 20223 - DNA, 776 bp, Homo sapiens
  source 1..776: mol_type = unassigned DNA
agagaggcaagatggctacggcagggggtggctctggggctgacccgggaagtcggggtctccttcgccttctgtctttctgcgtcctactagcaggtttgtgcaggggaaactcagtggagaggaagatatatatccccttaaataaaacagctccctgtgttcgcctgctcaacgccactcatcagattggctgccagtcttcaattagtggagacacaggggttatccacgtagtagagaaagaggaggacctacagtgggtattgactgatggccccaaccccccttacatggttctgctggagagcaagcattttaccagggatttaatggagaagctgaaagggagaaccagccgaattgctggtcttgcagtgtccttgaccaagcccagtcctgcctcaggcttctctcctagtgtacagtgcccaaatgatgggtttggtgtttactccaattcctatgggccagagtttgctcactgcagagaaatacagtggaattcgctgggcaatggtttggcttatgaagactttagtttccccatctttcttcttgaagatgaaaatgaaaccaaagtcatcaagcaggaaacttttgactacattggcagctcgaggatggtctacgatatggagaagggcaagtttcccgtgcagttagagaatgttgactcatttgtggagctgggacaggtggccttaagaacttcattagagctttggatgcacacagatcctgtttctcagaaaaatgagtctgtacggaaccag

SEQ ID NO: 20224 - DNA, 958 bp, Homo sapiens
  source 1..958: mol_type = unassigned DNA
atgggtttggtgtttactccaattcctatgggccagagtttgctcactgcagagaaatacagtggaattcgctgggcaatggtttggcttatgaagactttagtttccccatctttcttcttgaagatgaaaatgaaaccaaagtcatcaagcagctcttttcacacatgcatgctgtcatcagcactgccacctgcatgcggcgcagctccatccaaagcaccttcagcatcaacccagaaatcgtctgtgaccccctgtctgattacaatgtgtggagcatgctaaagcctataaatacaactgggacattaaagcctgacgacagggttgtggttgctgccacccggctggatagtcgttcctttttctggaatgtggccccaggggctgaaagcgcagtggcttcctttgtcacccagctggctgctgctgaagctttgcaaaaggcacctgatgtgaccaccctgccccgcaatgtcatgtttgtcttctttcaaggggaaacttttgactacattggcagctcgaggatggtctacgatatggagaagggcaagtttcccgtgcagttagagaatgttgactcatttgtggagctgggacaggtggccttaagaacttcattagagctttggatgcacacagatcctgtttctcagaaaaatgagtctgtacggaaccaggtggaggatctcctggccacattggagaagagtggtgctggtgtccctgctgtcatcctcaggaggccaaatcagtcccagcctctcccaccatcttccctgcagcgatttcttcgagctcgaaacatctctggcgttgttctggctgaccactctggtgccttccataacaaatattaccagagtatttacgacactgctgagaacattaatgtgagctatcccgaatggctgagccctgaagaggacctgaactttgtaacagacactgc

SEQ ID NO: 20225 - DNA, 659 bp, Homo sapiens
  source 1..659: mol_type = unassigned DNA
cgcagctccatccaaagcaccttcagcatcaacccagaaatcgtctgtgaccccctgtctgattacaatgtgtggagcatgctaaagcctataaatacaactgggacattaaagcctgacgacagggttgtggttgctgccacccggctggctgctgctgaagctttgcaaaaggcacctgatgtgaccaccctgccccgcaatgtcatgtttgtcttctttcaaggggaaacttttgactacattggcagctcgaggatggtctacgatatggagaagggcaagtttcccgtgcagttagagaatgttgactcatttgtggagctgggacaggtggccttaagaacttcattagagctttggatgcacacagatcctgtttctcagaaaaatgagtctgtacggaaccaggtggaggatctcctggccacattggagaagagtggtgctggtgtccctgctgtcatcctcaggaggccaaatcagtcccagcctctcccaccatcttccctgcagcgatttcttcgagctcgaaacatctctggcgttgttctggctgaccactctggtgccttccataacaaatattaccagagtatttacgacactgctgagaacattaatgtgagctatcccgaatggctgagccctgaagagga

SEQ ID NO: 20226 - DNA, 824 bp, Homo sapiens
  source 1..824: mol_type = unassigned DNA
ggaatgtggccccaggggctgaaagcgcagtggcttcctttgtcacccagctggctgctgctgaagctttgcaaaaggcacctgatgtgaccaccctgccccgcaatgtcatgtttgtcttctttcaaggggtggccttaagaacttcattagagctttggatgcacacagatcctgtttctcagaaaaatgagtctgtacggaaccaggtggaggatctcctggccacattggagaagagtggtgctggtgtccctgctgtcatcctcaggaggccaaatcagtcccagcctctcccaccatcttccctgcagcgatttcttcgagctcgaaacatctctggcgttgttctggctgaccactctggtgccttccataacaaatattaccagagtatttacgacactgctgagaacattaatgtgagctatcccgaatggctgagccctgaagaggacctgaactttgtaacagacactgccaaggccctggcagatgtggccacggtgctgggacgtgctctgtatgagcttgcaggaggaaccaacttcagcgacacagttcaggctgatccccaaacggttacccgcctgctctatgggttcctgattaaagccaacaactcatggttccagtctatcctcaggcaggacctaaggtcctacttgggtgacgggcctcttcaacattacatcgctgtctccagccccaccaacaccacttatgttgtacagtatgccttggcaaatttgactggcacagtggtcaacctcacccgagagcagtgccaggatccaagtaaagtcccaagtgaaaacaaggat

SEQ ID NO: 20227 - DNA, 448 bp, Homo sapiens
  source 1..448: mol_type = unassigned DNA
cagacaggagccgaacgggggcttccgctcagcagagaggcaagatggctacggcagggggtggctctggggctgacccgggaagtcggggtctccttcgccttctgtctttctgcgtcctactagcaggtttgtgcaggggaaactcagtggagaggaagatatatatccccttaaataaaacagctccctgtgttcgcctgctcaacgccactcatcagattggctgccagtcttcaattagtggagacacaggggttatccacgtagtagagaaagaggaggacctacagtgggtattgactgatggccccaaccccccttacatggttctgctggagagcaagcattttaccaggcagaatgtcaggctgtctgataccttcctgtgttccttcatggaattcctttcctattccagggatttaatggagaagctgaaagggag

SEQ ID NO: 20228 - DNA, 702 bp, Homo sapiens
  source 1..702: mol_type = unassigned DNA
ggcaagatggctacggcagggggtggctctggggctgacccgggaagtcggggtctccttcgccttctgtctttctgcgtcctactagcaggcctcttcctggacttcgagcctgaccctctcccactttgtccagatgtctcgtttttcccacaaccccagccacccaccccacagtcgaaaggaacaggtttgtgcaggggaaactcagtggagaggaagatatatatccccttaaataaaacagctccctgtgttcgcctgctcaacgccactcatcagattggctgccagtcttcaattagtggagacacaggggttatccacgtagtagagaaagaggaggacctacagtgggtattgactgatggccccaaccccccttacatggttctgctggagagcaagcattttaccagggatttaatggagaagctgaaagggagaaccagccgaattgctggtcttgcagtgtccttgaccaagcccagtcctgcctcaggcttctctcctagtgtacagtgcccaaatgatgggtttggtgtttactccaattcctatgggccagagtttgctcactgcagagaaatacagtggaattcgctgggcaatggtttggcttatgaagactttagtttccccatctttcttcttgaagatgaaaatgaaaccaaagtcatcaagcagtgctatcaagatcac

SEQ ID NO: 20229 - DNA, 1979 bp, Homo sapiens
  source 1..1979: mol_type = unassigned DNA
agagaggcaagatggctacggcagggggtggctctggggctgacccgggaagtcggggtctccttcgccttctgtctttctgcgtcctactagcaggtttgtgcaggggaaactcagtggagaggaagatatatatccccttaaataaaacagctccctgtgttcgcctgctcaacgccactcatcagattggctgccagtcttcaattagtggagacacaggggttatccacgtagtagagaaagaggaggacctacagtgggtattgactgatggccccaaccccccttacatggttctgctggagagcaagcattttaccagggatttaatggagaagctgaaagggagaaccagccgaattgctggtcttgcagtgtccttgaccaagcccagtcctgcctcaggcttctctcctagtgtacagtgcccaaatgatgggtttggtgtttactccaattcctatgggccagagtttgctcactgcagagaaatacagtggaattcgctgggcaatggtttggcttatgaagactttagtttccccatctttcttcttgaagatgaaaatgaaaccaaagtcatcaagcaggaaacttttgactacattggcagctcgaggatggtctacgatatggagaagggcaagtttcccgtgcagttagagaatgttgactcatttgtggagctgggacaggtggccttaagaacttcattagagctttggatgcacacagatcctgtttctcagaaaaatgagtctgtacggaaccaggtggaggatctcctggccacattggagaagagtggtgctggtgtccctgctgtcatcctcaggaggccaaatcagtcccagcctctcccaccatcttccctgcagcgatttcttcgagctcgaaacatctctggcgttgttctggctgaccactctggtgccttccataacaaatattaccagagtatttacgacactgctgagaacattaatgtgagctatcccgaatggctgagccctgaagaggacctgaactttgtaacagacactgccaaggccctggcagatgtggccacggtgctgggacgtgctctgtatgagcttgcaggaggaaccaacttcagcgacacagttcaggctgatccccaaacggttacccgcctgctctatgggttcctgattaaagccaacaactcatggttccagtctatcctcaggcaggacctaaggtcctacttgggtgacgggcctcttcaacattacatcgctgtctccagccccaccaacaccacttatgttgtacagtatgccttggcaaatttgactggcacagtggtcaacctcacccgagagcagtgccaggatccaagtaaagtcccaagtgaaaacaaggatctgtatgagtactcatgggtccagggccctttgcattctaatgagacggaccgactcccccggtgtgtgcgttctactgcacgattagccagggccttgtctcctgcctttgaactgagtcagtggagctctactgaatactctacatggactgagagccgctggaaagatatccgtgcccggatatttctcatcgccagcaaagagcttgagttgatcaccctgacagtgggcttcggcatcctcatcttctccctcatcgtcacctactgcatcaatgccaaagctgatgtccttttcattgctccccgggagccaggagctgtgtcatactgaggaggaccccagcttttcttgccagctcagcagttcacttcctagagcatctgtcccactgggacacaaccactaatttgtcactggaacctccctgggcctgtctcagattgggattaacataaaagagtggaactatccaaaagagacagggagaaataaataaattgcctcccttcctccgctcccctttcccatcaccccttccccatttcctcttccttctctactcatgccagattttgggattac

SEQ ID NO: 20230 - DNA, 2616 bp, Homo sapiens
  source 1..2616: mol_type = unassigned DNA
ttcttgaggctcggctgaggatgccgggaagggctggtggtcgggggcctagagcggcggttgcacttagttgcggctgctgtcaccatgtcccgcgttttggtgccttgccatgtgaaaggctccgtagccctccaggtgggcgacgtgcggacctcccaaggccggcctggcgtgctggtcatcgatgtcaccttccccagcgtcgctcccttcgagttgcaggaaatcacgtttaagaattactacacagcttttttgagcatccgtgtccgtcagtacacctcagcacacacacctgccaagtgggtgacctgcctgcgggactactgcctaatgcctgacccacacagtgaggagggagcccaggagtatgtatcgctgttcaagcatcagatgctgtgtgacatggctagaatatcggagctacgcctgattctgcggcagccatcaccactgtggctgtctttcacagtggaggagctgcagatctatcagcagggaccaaagagcccctccgtgacctttcccaagtggctctcccacccagtgccctgtgagcaacctgcactcctccgtgagggtctcccagaccccagcagggtatcctccgaggtgcagcagatgtgggcactgacagagatgatccgggccagtcacacctccgcaaggatcggccgctttgatgtggatggctgttatgacctgaacttgctctcctacacttgaatggttgctcctagccaagatgttggcctttctgtgcccacccagacttggtttgggccaccagaggctgaagtgtatttcctgtgcattccaagtgttgcctgcatgcctgttctgtctgggccacattcacagattcaggattctcaggggcttaccgtgttacttcagcatgagctcctggcatgggggtgctctgtcttcgcctggctgcaactcaattcttccttctacccaaaaacactccagtcagttgtacttactgagaatccctgagtgccctctgccccttctggcaacatgcacattcctgtcttctgcctgctccctcatgtcagtgcagttgggctgggctgacctactaaaacctgctccatgtatggacctggaaggccattgctgccatggcacttgggacacttgaggaagaaacagaaaccttatttcttcctgtgtgtcccctagtggttttctttccatttgtgttatgccacagagagaaatttcctgtctgaactcttctgctgcctgcctaggaaggaaacctgaagatttgggcagcctgagtctcttggtttctgagctggctcctgaatatatgttcaagtgggtgtgcccatagggcctgggcacgtgtctctagcaaaaccagggcctgagcataagaactgggacccttctaggcagggtgcagtggctcacgcctgtaatcccagcactttgggaggcccaggcaggcggatcacctgaggtcaggagttcaagaccagcctgaccaacctggagaaaccccgtctctactaaaaatacaaaaaattagctgggcgtggtggtaggcacctgtaatcccagctacttgggaggctgaggcaggagaatctcttgaacccgggaagtggaggttgcggacctgagatcatgccattgcactccagcctgggcaagaagagcgaaactccatcttaaacaaacaaacaaaaaaaaaagaactgggacccttctgccatctgacatagcccaaagcacatctctatcctttctcccagttgcccctctccttttttgttgttttttttgaggttgagttttgctcttgttgcccaggctggagtgcaatagtgcaatcttggctaactgcaacctccgcctcccaggttcaagcaattctcctgcctcagtctcccgagtagctgggattacagtcatgcatcaccatgcctggctaattttgtatttgtagtagagatggggtttctccatgttggtcaggctggtctcaaacacctgacctcaggtgatctgcctgccttggccttccaaagtgctgggattacaggcatgagccaccgcgcccgccctgcccctttccaagagatatgctcagcataatgagagatcaaccgtggtggggagtgggtccaagtaagggttctcattgttgccttttaagaggcctaagtcctgcattaactcagtccaaccattaagtgatgcaggctgctcttccctcatgtgagaaaaacctgtttccctctggttcttcctggctttgcacctggtggctattacaaagcagtactgcagtatgtcttggacctggaaagttggacatgtgtgtggctcaacagttttctcgggggagttcagtgaccttttggtggccaccctctgttctcacctgtgagttcttgcaggtggcgacttcatctgcaaggtcacttacatagccccactcagctgcttcggaaagcgtgacgaagcagtagtcctcagtgtgtgtgtaagtgaagaggaccttgtggtagcagggaccatgcttcattcgtggctgtgtccccatctgagggcctggtatgcagtaagatcaataaatacttgtggaatgca

SEQ ID NO: 20231 - DNA, 2040 bp, Homo sapiens
  source 1..2040: mol_type = unassigned DNA
ggatgccgggaagggctggtggtcgggggcctagagcggcggttgcacttagttgcggctgctgtcaccatgtcccgcgttttggtgccttgccatgtgaaaggctccgtagccctccaggtgggcgacgtgcggacctcccaaggccggcctggcgtgctggtcatcgatgtcaccttccccagcgtcgctcccttcgagttgcaggaaatcacgtttaagaattactacacagcttttttgagcatccgtgtccgtcagtacacctcagcacacacacctgccaagtgggtgacctgcctgcgggactactgcctaatgcctgacccacacagtgaggagggagcccaggagtatgtatcgctgttcaagcatcagatgctgtgtgacatggctagaatatcggagctacgcctgattctgcggcagccatcaccactgtggctgtctttcacagtggaggagctgcagatctatcagcagggaccaaagagcccctccgtgacctttcccaagtggctctcccacccagtgccctgtgagcaacctgcactcctccgtgagggtctcccagaccccagcagggtatcctccgaggtgcagcagatgtgggcactgacagagatgatccgggccagtcacacctccgcaaggatcggccgctttgatgtggatggctgttatgacctgaacttgctctcctacacttgaatggttgctcctagccaagatgttggcctttctgtgcccacccagacttggtttgggccaccagaggctgaagtgtatttcctgtgcattccaagtgttgcctgcatgcctgttctgtctgggccacattcacagattcaggattctcaggggcttaccgtgttacttcagcatgagctcctggcatgggggtgctctgtcttcgcctggctgcaactcaattcttccttctacccaaaaacactccagtcagttgtacttactgagaatccctgagtgccctctgccccttctggcaacatgcacattcctgtcttctgcctgctccctcatgtcagtgcagttgggctgggctgacctactaaaacctgctccatgtatggacctggaaggccattgctgccatggcacttgggacacttgaggaagaaacagaaaccttatttcttcctgtgtgtcccctagtggttttctttccatttgtgttatgccacagagagaaatttcctgtctgaactcttctgctgcctgcctaggaaggaaacctgaagatttgggcagcctgagtctcttggtttctgagctggctcctgaatatatgttcaagtgggtgtgcccatagggcctgggcacgtgtctctagcaaaaccagggcctgagcataagaactgggacccttctaggcagggtgcagtggctcacgcctgtaatcccagcactttgggaggcccaggcaggcggatcacctgaggtcaggagctggtctcaaacacctgacctcaggtgatctgcctgccttggccttccaaagtgctgggattacaggcatgagccaccgcgcccgccctgcccctttccaagagatatgctcagcataatgagagatcaaccgtggtggggagtgggtccaagtaagggttctcattgttgccttttaagaggcctaagtcctgcattaactcagtccaaccattaagtgatgcaggctgctcttccctcatgtgagaaaaacctgtttccctctggttcttcctggctttgcacctggtggctattacaaagcagtactgcagtatgtcttggacctggaaagttggacatgtgtgtggctcaacagttttctcgggggagttcagtgaccttttggtggccaccctctgttctcacctgtgagttcttgcaggtggcgacttcatctgcaaggtcacttacatagccccactcagctgcttcggaaagcgtgacgaagcagtagtcctcagtgtgtgtgtaagtgaagaggaccttgtggtagcagggaccatgcttcattcgtggctgtgtccccat

SEQ ID NO: 20232 - DNA, 1625 bp, Homo sapiens
  source 1..1625: mol_type = unassigned DNA
ttcttgaggctcggctgaggatgccgggaagggctggtggtcgggggcctagagcggcggttgcacttagttgcggctgctgtcaccatgtcccgcgttttggtgccttgccatgtgaaaggctccgtagccctccaggtgggcgacgtgcggacctcccaaggccggcctggcgtgctggtcatcgatgtcaccttccccagcgtcgctcccttcgagttgcaggaaatcacgtttaagaattactacacagcttttttgagcatccgtgtccgtcagtacacctcagcacacacacctgccaagtgggtgacctgcctgcgggactactgcctaatgcctgacccacacagtgaggagggagcccaggagtatgtatcgctgttcaagcatcagagcccctccgtgacctttcccaagtggctctcccacccagtgccctgtgagcaacctgcactcctccgtgagggtctcccagaccccagcagggtatcctccgaggtgcagcagatgtgggcactgacagagatgatccgggccagtcacacctccgcaaggatcggccgctttgatgtggatggctgttatgacctgaacttgctctcctacacttgaatggttgctcctagccaagatgttggcctttctgtgcccacccagacttggtttgggccaccagaggctgaagtgtatttcctgtgcattccaagtgttgcctgcatgcctgttctgtctgggccacattcacagattcaggattctcaggggcttaccgtgttacttcagcatgagctcctggcatgggggtgctctgtcttcgcctggctgcaactcaattcttccttctacccaaaaacactccagtcagttgtacttactgagaatccctgagtgccctctgccccttctggcaacatgcacattcctgtcttctgcctgctccctcatgtcagtgcagttgggctgggctgacctactaaaacctgctccatgtatggacctggaaggccattgctgccatggcacttgggacacttgaggaagaaacagaaaccttatttcttcctgtgtgtcccctagtggttttctttccatttgtgttatgccacagagagaaatttcctgtctgaactcttctgctgcctgcctaggaaggaaacctgaagatttgggcagcctgagtctcttggtttctgagctggctcctgaatatatgttcaagtgggtgtgcccatagggcctgggcacgtgtctctagcaaaaccagggcctgagccaccgcgcccgccctgcccctttccaagagatatgctcagcataatgagagatcaaccgtggtggggagtgggtccaagtaagggttctcattgttgccttttaagaggcctaagtcctgcattaactcagtccaaccattaagtgatgcaggctgctcttccctcatgtgagaaaaacctgtttccctctggttcttcctggctttgcacctggtggctattacaaagcagtactgcagtatgtcttggacctggaaagttggacatgtgtgtggctcaacagttttctcgggggagttcagtgaccttttggtggccaccctctgttctcacctgtgagttcttgca

SEQ ID NO: 20233 - DNA, 1610 bp, Homo sapiens
  source 1..1610: mol_type = unassigned DNA
gccagacactgggtcatggcagtggtcggtgaagctgcagttgcctagggcagggatggagagagagtctgggcatgaggagagggtctcgggatgtttggctggactagattttacagaaagccttatccaggcttttaaaattactctttccagacttcatctgagactccttcttcagccaacattccttagccctgaatacatttcctatcctcatctttcccttcttttttttcctttcttttacatgtttaaatttaaaccattcttcgtgaccccttttcttgggagattcatggcaagaacgagaagaatgatggtgcttgttaggggatgtcctgtctctctgaactttggggtcctatgcattaaataattttcctgacgagctcaagtgctccctctggtctacaatccctggcggctggccttcatcccttgggcaagcattgcatacagctcatggccctccctctaccataccctccacccccgttcgcctaagctcccttctccgggaatttcatcatttcctagaacagccagaacatttgtggtctatttctctgttagtgtttaaccaaccatctgttctaaaagaagggctgaactgatggaaggaatgctgttagcctgagactcaggaagacaacttctgcagggtcactccctggcttctggaggaaagagaaggagggcagtgctccagtggtacagaagtgagacataatggaatcaggcttcacctccaaggacacctatctaagccattttaaccctcgggattacctagaaaaatattacaagtttggttctaggcactctgcagaaagccagattcttaagcaccttctgaaaaatcttttcaagatattctgcctagacggtgtgaagggagacctgctgattgacatcggctctggccccactatctatcagctcctctctgcttgtgaatcctttaaggagatcgtcgtcactgactactcagaccagaacctgcaggagctggagaagtggctgaagaaagagccagaggcctttgactggtccccagtggtgacctatgtgtgtgatcttgaagggaacagagtcaagggtccagagaaggaggagaagttgagacaggcggtcaagcaggtgctgaagtgtgatgtgactcagagccagccactgggggccgtccccttacccccggctgactgcgtgctcagcacactgtgtctggatgccgcctgcccagacctccccacctactgcagggcgctcaggaacctcggcagcctactgaagccagggggcttcctggtgatcatggatgcgctcaagagcagctactacatgattggtgagcagaagttctccagcctccccctgggccgggaggcagtagaggctgctgtgaaagaggctggctacacaatcgaatggtttgaggtgatctcgcaaagttattcttccaccatggccaacaacgaaggacttttctccctggtggcgaggaagctgagcagacccctgtgatgcctgtgacctcaattaaagcaattcctttgacctgtccagttgactttagtccttgtttctaactgccaagtcatgtgctg

SEQ ID NO: 20234 - DNA, 1867 bp, Homo sapiens
  source 1..1867: mol_type = unassigned DNA
taggcgctgtgctggggtcgcggcggcgcgggcgctgggggagaggagtgtggtcttcagcatagagtgagcttctagtgacacgagctggagggaaagaggaagtgcatcaggacggctcgtccaatggacaagaagggctgaactgatggaaggaatgctgttagcctgagactcaggaagacaacttctgcagggtcactccctggcttctggaggaaagagaaggagggcagtgctccagtggtacagaagtgagacataatggaatcaggcttcacctccaaggacacctatctaagccattttaaccctcgggattacctagaaaaatattacaagtttggttctaggcactctgcagaaagccagattcttaagcaccttctgaaaaatcttttcaagatattctgcctagacggtgtgaagggagacctgctgattgacatcggctctggccccactatctatcagctcctctctgcttgtgaatcctttaaggagatcgtcgtcactgactactcagaccagaacctgcaggagctggagaagtggctgaagaaagagccagaggcctttgactggtccccagtggtgacctatgtgtgtgatcttgaagggaacagagtcaagggtccagagaaggaggagaagttgagacaggcggtcaagcaggtgctgaagtgtgatgtgactcagagccagccactgggggccgtccccttacccccggctgactgcgtgctcagcacactgtgtctggatgccgcctgcccagacctccccacctactgcagggcgctcaggaacctcggcagcctactgaagccagggggcttcctggtgatcatggatgcgctcaagagcagctactacatgattggtgagcagaagttctccagcctccccctgggccgggaggcagtagaggctgctgtgaaagaggctggctacacaatcgaatggtttgaggtgatctcgcaaagttattcttccaccatggccaacaacgaaggacttttctccctggtggcgaggaagctgagcagacccctgtgatgcctgtgacctcaattaaagcaattcctttgacctgtccagttgactttagtccttgtttctaactgccaagtcatgtgctgagtagaggctcagtggttggggcccaatggttcatctaggacgggactagagaggtcagtctacaagcaatccattgaccacttacttggtgctgcacacaaatgttggtgctatgggacccaaagatgagcaattagtattccagtcttcattgcctgtgcttacaaaagaagacctcacttccctaaacatctagttatggcggctcaagcccgtacctgcctacagagaagtgtctgcagttactcactattagtttcctaagggggcactgctggctccttctctcccaggaatgggcttctcctattctttaactcttgccttctccctggagaggctaccaaaccctggcctctgccgctgttcaggctgccatgtgggtatagctgtttgctagactccactctggcctcaggggccagagaacagctgtccagcatttctgttcatcccagcaatccaaaaaaaaatttttttaagctacaaagatcactccattttcaaattcagactctgccacttattagctgtttctcattaggcaagttatataaccttgcagtgcctcactttcctcatctataaaatgagattaaaatagtctttttattaagagaattaaagtgaattgtggccaggcactgtggctcatgcctgtaatcccagcgctttgggaggctgaggcagacagattgcttgagctcagaagttcgagactggc

SEQ ID NO: 20235 - DNA, 1569 bp, Homo sapiens
  source 1..1569: mol_type = unassigned DNA
gggagcgcaaggtcaagttcgccttggccccgcctccagctcaggtactaggggatctagacctgaggctgcccgggccggaggcagccttgagtcccgagaccaaacgtcgtttccctctcggacctcgggcgccgggccgcgcgctgaccgacagcccctgctaggcccagcaggtcccctagtcccccgcagtcccccgagactcgccgagcgccgttgctgagccctgcaaatagcagctacctgcttcagcctagatcctgccatgaagcggactgctgctccctggctcccactctgatctgcttttcactcttgccttgtctcccaattaataagcagggtggccactgcaacaggtgtggatgtgcctgacaagatgaagagccgaatacctgtggtgctcctggcctgtggctcctttaaccccatcaccaacatgcacctgcgcatgtttgaggtggccagagatcacctacaccaaacaggaatgtaccaggtcatccagggtatcatctctcctgtcaacgacacctatgggaagaaagacctcgcagcttctcatcaccgagtggccatggcccggctggccctgcagacatccgactggatccgggtggacccttgggagagtgagcaggcacagtggatggagacagtgaaggtgctgaggcatcatcacagcaaactgctcagatctccaccccagatggaaggcccagaccatggcaaggcactcttctcgacccctgcagctgtgcctgagctgaagcttctctgtggggcagacgtcttgaagaccttccagacccccaacctctggaaggatgcgcacatccaggaaatagtggagaagtttggcttggtgtgcgtgggccgagtaggtcacgacccaaaaggttacatcgcagaatctcccatcctacggatgcaccagcacaacattcacctggccaaggagcctgtgcagaatgagatcagtgccacatacatcaggcgagccttgggccaagggcagagcgtaaagtacctgattcccgatgctgtcatcacgtacatcaaggaccatggcctctacaccaagggcagtacctggaaaggcaaaagcacccagagcactgagggcaagacaagctagggaggggggactcagcacccacacctcctccaacaagctcctgctggggagagggctgttaaggtttctgttttactttggtttttgcttctccatttttcatttgctttatttctacagtgattctacttctgaggagtcttctgtcccaggaagagataccttctttacaggagaggaaaggtctaaatcacaaggatagacatttatcaaagaagttaaaatggtgtggcaggtcattaggattaggcagaatctctcagagctgctggacaaggaggtctacttattttgtgtggatggtaattatggcatgcacgctgaatgcagttctgagcatggcagcggcccctgagggtcagatcagaattgcccacaatgtgttttttaactaggaccaggtgcagcatgctagtcttgattggaaa

SEQ ID NO: 20236 - DNA, 1863 bp, Homo sapiens
  source 1..1863: mol_type = unassigned DNA
gggcggggcgcagatctgtttccctcagactccatctgcccggggccgctaagggagcgcaaggtcaagttcgccttggccccgcctccagctcaggtactaggggatctagacctgaggctgcccgggccggaggcagccttgagtcccgagaccaaacgtcgtttccctctcggacctcgggcgccgggccgcgcgctgaccgacagcccctgctaggcccagcaggtcccctagtcccccgcagtcccccgagactcgccgagcgccgttgctgagccctgcaaatagcagctacctgcttcagcctagatcctgccatgaagcggactgctgctccctggctcccactctgatctgcttttcactcttgccttgtctcccaattaataaggaatgtaccaggtcatccagggtatcatctctcctgtcaacgacacctatgggaagaaagacctcgcagcttctcatcaccgagtggccatggcccggctggccctgcagacatccgactggatccgggtggacccttgggagagtgagcaggcacagtggatggagacagtgaaggtgctgaggcatcatcacagcaaactgctcagatctccaccccagatggaaggcccagaccatggcaaggcactcttctcgacccctgcagctgtgcctgagctgaagcttctctgtggggcagacgtcttgaagaccttccagacccccaacctctggaaggatgcgcacatccaggaaatagtggagaagtttggcttggtgtgcgtgggccgagtaggtcacgacccaaaaggttacatcgcagaatctcccatcctacggatgcaccagcacaacattcacctggccaaggagcctgtgcagaatgagatcagtgccacatacatcaggcgagccttgggccaagggcagagcgtaaagtacctgattcccgatgctgtcatcacgtacatcaaggaccatggcctctacaccaagggcagtacctggaaaggcaaaagcacccagagcactgagggcaagacaagctagggaggggggactcagcacccacacctcctccaacaagctcctgctggggagagggctgttaaggtttctgttttactttggtttttgcttctccatttttcatttgctttatttctacagtgattctacttctgaggagtcttctgtcccaggaagagataccttctttacaggagaggaaaggtctaaatcacaaggatagacatttatcaaagaagttaaaatggtgtggcaggtcattaggattaggcagaatctctcagagctgctggacaaggaggtctacttattttgtgtggatggtaattatggcatgcacgctgaatgcagttctgagcatggcagcggcccctgagggtcagatcagaattgcccacaatgtgttttttaactaggaccaggtgcagcatgctagtcttgattggaaagatttgacaggatgctaattactgaacagtgggttttgtcaacgccctggtttcagaatatgaactgaggagtcaaacagttggaaacagcacattgctgatttacactggatcttgccttagaaaccattgtctgcctgcctaaccagcttttcataaaatttaaacaaaactctttctacgtagtgatcctcaagcaatatttttgatacagcaagtgtcaaacttgctatagcataaaagccggggctcctgatttccaggtttctaaaaaggaactgaggtaaaacagatgcctgaccgttttaaaggatcttttttaatgttttatgactgcctgtctgtttgaatactggcaaagggataaataataaattgacatcaaaaagta

SEQ ID NO: 20237 - DNA, 2037 bp, Homo sapiens
  source 1..2037: mol_type = unassigned DNA
agggcccgccccagcgaaggggcggggcgcagatctgtttccctcagactccatctgcccggggccgctaagggagcgcaaggtcaagttcgccttggccccgcctccagctcaggtactaggggatctagacctgaggctgcccgggccggaggcagccttgagtcccgagaccaaacgtcgtttccctctcggacctcgggcgccgggccgcgcgctgaccgacagcccctgctaggcccagcaggtcccctagtcccccgcagtcccccgagactcgccgagcgccgttgctgagccctgcaaatagcagctacctgcttcagcctagatcctgccatgaagcggactgctgctccctggctcccactctgatctgcttttcactcttgccttgtctcccaattaataagcagggtggccactgcaacaggtgtggatgtgcctgacaagatgaagagccgaatacctgtggtgctcctggcctgtggctcctttaaccccatcaccaacatgcacctgcgcatgtttgaggtggccagagatcacctacaccaaacaggaatgtaccaggtcatccagggtatcatctctcctgtcaacgacacctatgggaagaaagacctcgcagcttctcatcaccgagtggccatggcccggctggccctgcagacatccgactggatccgggtggacccttgggagagtgagcaggcacagtggatggagacagtgaaggtgctgaggcatcatcacagcaaactgctcagatctccaccccagatggaaggcccagaccatggcaaggcactcttctcgacccctgcagctgtgcctgagctgaagcttctctgtggggcagacgtcttgaagaccttccagacccccaacctctggaaggatgcgcacatccaggaaatagtggagaagtttggcttggtgtgcgtgggccgagtaggtcacgacccaaaaggttacatcgcagaatctcccatcctacggatgcaccagcacaacattcacctggccaaggagcctgtgcagaatgagatcagtgccacatacatcaggcgagccttgggccaagggcagagcgtaaagtacctgattcccgatgctgtcatcacgtacatcaaggaccatggcctctacaccaagggcagtacctggaaaggcaaaagcacccagagcactgagggcaagacaagctagggaggggggactcagcacccacacctcctccaacaagctcctgctggggagagggctgttaaggtttctgttttactttggtttttgcttctccatttttcatttgctttatttctacagtgattctacttctgaggagtcttctgtcccaggaagagataccttctttacaggagaggaaaggtctaaatcacaaggatagacatttatcaaagaagttaaaatggtgtggcaggtcattaggattaggcagaatctctcagagctgctggacaaggaggtctacttattttgtgtggatggtaattatggcatgcacgctgaatgcagttctgagcatggcagcggcccctgagggtcagatcagaattgcccacaatgtgttttttaactaggaccaggtgcagcatgctagtcttgattggaaagatttgacaggatgctaattactgaacagtgggttttgtcaacgccctggtttcagaatatgaactgaggagtcaaacagttggaaacagcacattgctgatttacactggatcttgccttagaaaccattgtctgcctgcctaaccagcttttcataaaatttaaacaaaactctttctacgtagtgatcctcaagcaatatttttgatacagcaagtgtcaaacttgctatagcataaaagccggggctcctgatttccaggtttctaaaaaggaactgaggtaaaacagatgcctgaccgttttaaaggatcttttttaatgttttatgactgcctgtctgtttgaatactggcaaagggataaataataaattgacatcaaaaagtactaatg

SEQ ID NO: 20238 - DNA, 2449 bp, Homo sapiens
  source 1..2449: mol_type = unassigned DNA
agggcccgccccagcgaaggggcggggcgcagatctgtttccctcagactccatctgcccggggccgctaagggagcgcaaggtcaagttcgccttggccccgcctccagctcaggtactaggggatctagacctgaggctgcccgggccggaggcagccttgagtcccgagaccaaacgtcgtttccctctcggacctcgggcgccgggccgcgcgctgaccgacagcccctgctaggcccagcaggtcccctagtcccccgcagtcccccgagactcgccgagcgccgttgctgagccctgcaaatagcagctacctgcttcagcctagatcctgccatgaagcggactgctgctccctggctcccactctgatctgcttttcactcttgccttgtctcccaattaataagcagggtggccactgcaacaggtgtggatgtgcctgacaagatgaagagccgaatacctgtggtgctcctggcctgtggctcctttaaccccatcaccaacatgcacctgcgcatgtttgaggtggccagagatcacctacaccaaacaggaatgtaccaggtcatccagggtatcatctctcctgtcaacgacacctatgggaagaaagacctcgcagcttctcatcaccgagtggccatggcccggctggccctgcagacatccgactggatccgggtggacccttgggagagtgagcaggcacagtggatggagacagtgaaggtgctgagataaagaaactgaggctcagagaggctacgttaatcacggtcacacacaaataggacgtggagctcccatctgtggagctctgaagccatgcttatggccatcttcaaaacagggatctgcaggctgggaacatgatgtggctggctttacacctcccacagttgccctccaatctttcctgaagaccagtgggactgctgaggacaccaagaacatgcccccagggtcaatccacaggcccaaggtaccactcaggcaggcagcaagaagcagttaatggtcatgccccatagaggcgcagtggaagtccctggcaaatgcatgttgtattggaagtaattatttccacaacaaagttcagagatccagctaatattcaaagtagggtcaacctgaactaggaccttcaaggcatcatcacagcaaactgctcagatctccaccccagatggaaggcccagaccatggcaaggcactcttctcgacccctgcagctgtgcctgagctgaagcttctctgtggggcagacgtcttgaagaccttccagacccccaacctctggaaggatgcgcacatccaggaaatagtggagaagtttggcttggtgtgcgtgggccgagtaggtcacgacccaaaaggttacatcgcagaatctcccatcctacggatgcaccagcacaacattcacctggccaaggagcctgtgcagaatgagatcagtgccacatacatcaggcgagccttgggccaagggcagagcgtaaagtacctgattcccgatgctgtcatcacgtacatcaaggaccatggcctctacaccaagggcagtacctggaaaggcaaaagcacccagagcactgagggcaagacaagctagggaggggggactcagcacccacacctcctccaacaagctcctgctggggagagggctgttaaggtttctgttttactttggtttttgcttctccatttttcatttgctttatttctacagtgattctacttctgaggagtcttctgtcccaggaagagataccttctttacaggagaggaaaggtctaaatcacaaggatagacatttatcaaagaagttaaaatggtgtggcaggtcattaggattaggcagaatctctcagagctgctggacaaggaggtctacttattttgtgtggatggtaattatggcatgcacgctgaatgcagttctgagcatggcagcggcccctgagggtcagatcagaattgcccacaatgtgttttttaactaggaccaggtgcagcatgctagtcttgattggaaagatttgacaggatgctaattactgaacagtgggttttgtcaacgccctggtttcagaatatgaactgaggagtcaaacagttggaaacagcacattgctgatttacactggatcttgccttagaaaccattgtctgcctgcctaaccagcttttcataaaatttaaacaaaactctttctacgtagtgatcctcaagcaatatttttgatacagcaagtgtcaaacttgctatagcataaaagccggggctcctgatttccaggtttctaaaaaggaactgaggtaaaacagatgcctgaccgttttaaaggatcttttttaatgttttatgactgcctgtctgtttgaatactggcaaagggataaataataaattgacatcaaaaagtactaatg

SEQ ID NO: 20239 - DNA, 763 bp, Homo sapiens
  source 1..763: mol_type = unassigned DNA
cgctaagggagcgcaaggtcaagttcgccttggccccgcctccagctcaggtactaggggatctagacctgaggctgcccgggccggaggcagccttgagtcccgagaccaaacgtcgtttccctctcggacctcgggcgccgggccgcgcgctgaccgacagcccctgctaggcccagcaggtcccctagtcccccgcagtcccccgagactcgccgagcgccgttgctgagccctgcaaatagcagctacctgcttcagcctagatcctgccatgaagcggactgctgctccctggctcccactctgatctgcttttcactcttgccttgtctcccaattaataaggggtggctggcagaggatccttacaccgacaaggaagggtggccactgcaacaggtgtggatgtgcctgacaagatgaagagccgaatacctgtggtgctcctggcctgtggctcctttaaccccatcaccaacatgcacctgcgcatgtttgaggtggccagagatcacctacaccaaacaggaatgtaccaggtcatccagggtatcatctctcctgtcaacgacacctatgggaagaaagacctcgcagcttctcatcaccgagtggccatggcccggctggccctgcagacatccgactggatccgggtggacccttgggagagtgagcaggcacagtggatggagacagtgaaggtgctgaggcatcatcacagcaaactgctcagatctccaccccagatggaaggccc

SEQ ID NO: 20240 - DNA, 1711 bp, Homo sapiens
  source 1..1711: mol_type = unassigned DNA
atctgcccggggccgctaagggagcgcaaggtcaagttcgccttggccccgcctccagctcaggtactaggggatctagacctgaggctgcccgggccggaggcagccttgagtcccgagaccaaacgtcgtttccctctcggacctcgggcgccgggccgcgcgctgaccgacagcccctgctaggcccagcaggtcccctagtcccccgcagtcccccgagactcgccgagcgccgttgctgagccctgcaaatagcagctacctgcttcagcctagatcctgccatgaagcggactgctgctccctggctcccactctgatctgcttttcactcttgccttgtctcccaattaataagcagggtggccactgcaacaggtgtggatgtgcctgacaagatgaagagccgaatacctgtggtgctcctggcctgtggctcctttaaccccatcaccaacatgcacctgcgcatgtttgaggtggccagagatcacctacaccaaacagctgtgcctgagctgaagcttctctgtggggcagacgtcttgaagaccttccagacccccaacctctggaaggatgcgcacatccaggaaatagtggagaagtttggcttggtgtgcgtgggccgagtaggtcacgacccaaaaggttacatcgcagaatctcccatcctacggatgcaccagcacaacattcacctggccaaggagcctgtgcagaatgagatcagtgccacatacatcaggcgagccttgggccaagggcagagcgtaaagtacctgattcccgatgctgtcatcacgtacatcaaggaccatggcctctacaccaagggcagtacctggaaaggcaaaagcacccagagcactgagggcaagacaagctagggaggggggactcagcacccacacctcctccaacaagctcctgctggggagagggctgttaaggtttctgttttactttggtttttgcttctccatttttcatttgctttatttctacagtgattctacttctgaggagtcttctgtcccaggaagagataccttctttacaggagaggaaaggtctaaatcacaaggatagacatttatcaaagaagttaaaatggtgtggcaggtcattaggattaggcagaatctctcagagctgctggacaaggaggtctacttattttgtgtggatggtaattatggcatgcacgctgaatgcagttctgagcatggcagcggcccctgagggtcagatcagaattgcccacaatgtgttttttaactaggaccaggtgcagcatgctagtcttgattggaaagatttgacaggatgctaattactgaacagtgggttttgtcaacgccctggtttcagaatatgaactgaggagtcaaacagttggaaacagcacattgctgatttacactggatcttgccttagaaaccattgtctgcctgcctaaccagcttttcataaaatttaaacaaaactctttctacgtagtgatcctcaagcaatatttttgatacagcaagtgtcaaacttgctatagcataaaagccggggctcctgatttccaggtttctaaaaaggaactgaggtaaaacagatgcctgaccgttttaaaggatcttttttaatgttttatgactgcctgtctgtttgaatactggcaaagggataaataataaattgacatcaaaaagt

SEQ ID NO: 20241 - DNA, 6483 bp, Homo sapiens
  source 1..6483: mol_type = unassigned DNA
gatttttcctagcgagctggaggaaaggcaggtacccggagtggagttatattacctgtttctttgttctgatgggaccccagagaggacatcacgctttgtaactggttcttcaaggggagaagcaaatgtgtccctgaaaacttcagctgccgcgtttggcaccagtgatttgccttcaaggaaactggggagtcagaaaattgggaactcatatcaacatggcaaacctattgaaaacagtggtgactggctgctcgtgtcctctacttagcaatttggggtcctgtaagggtctacgtgtgaagaaggattttttacgaacattttatactcaccaagaactgtggtgtaaagcgcctgtaaaaccaggaattccatataagcaactgactgttggagtccccaaagagatattccaaaatgagaagcgagtggcattgtctcctgctggtgttcagaacttggtcaagcagggttttaatgttgtcgtggaatcgggtgcgggcgaagcttccaagttctcagatgatcactatagagtggcaggtgcccaaatccaaggggcaaaggaagtgctggcttctgatttggtggtcaaagtgcgagcccctatggttaatccaacattaggtgttcatgaagctgaccttttaaagacatcaggaacgctgattagttttatttacccagcccaaaatccagagttgctaaataaactttcccaaagaaaaactacagttctggcaatggaccaggttccaagagtcacaattgctcagggatatgatgcgctaagctccatggccaacattgcgggttataaggctgttgtcctagcagcaaatcattttggacgtttttttactggtcagatcacagctgctggaaaagttcctccagctaagattctgatagttggtggtggtgttgctgggcttgcttctgcaggcgcagcaaagtcgatgggtgcaattgttcgaggatttgacacaagagctgcagctttggaacagttcaagtctcttggtgctgagcccttggaggtggacttgaaggaatctggtgagggacaaggaggatatgcaaaagagatgtccaaagagttcattgaagctgaaatgaaactctttgctcaacaatgcaaggaggtagacatccttatcagcacagcacttattccaggtaaaaaagctccagttttatttaataaagaaatgattgagtcaatgaaggaaggttcagttgttgtggatttagctgctgaggctggtggaaactttgaaaccactaagccaggagaactctacattcataagggaattactcacataggctacacagacctgcccagccgaatggccactcaggccagcaccctatattccaacaacatcaccaaactcctgaaggccatcagcccggacaaagataatttttattttgatgtgaaagatgactttgactttggtacgatgggtcatgtcattagaggaactgtagtgatgaaagatggtaaagtgattttcccagctcccacaccgaaaaatattcctcaaggtgccccagtaaaacagaagacagtggctgagctggaagctgaaaaagcagctaccattacacccttcaggaagacaatgtcaacggcttctgcatatacagcaggtctcacagggatactgggtttgggcattgcggctcccaatctagccttttctcagatggtgaccacttttggcttggctggcattgtggggtatcataccgtctggggagtgacccctgctctccactcaccactgatgtctgtgacaaatgcaatctcagggctgactgcagttggtgggttggcactgatgggaggacatttgtatccttccacaacttctcagggccttgctgctcttgctgcattcatatcctctgtcaacattgcaggtggctttctggtgactcagagaatgctggacatgttcaagcgtcccactgaccccccagaatacaactacctgtacctgctccctgccggcacctttgttggtggatatttagctgccctctacagtggttataacattgaacagatcatgtacctaggctcgggtttgtgctgtgtcggtgccttggctggcctctccacccagggaacagcacgtcttggcaatgcactgggcatgattggggttgctggaggactggcagccaccctcggagtcctaaaaccgggcccagaattactagctcagatgtctggagcgatggctttgggtggtaccattggattgacaattgccaaacgcatccagatttctgatttacctcaattagttgctgcttttcacagtttagtgggtttggcagctgtacttacttgcatagctgagtacattatagaatatccacattttgctacggatgcagcagcaaatctcaccaagattgtggcctacctcggcacttacattggtggcgtcacctttagtgggtctctcattgcctatggaaaattgcagggtctcctgaaatctgcccctctcctactgcctggaaggcacttactcaatgcaggcttactggctgctagtgtgggcgggataatcccattcatggtggacccaagctttactactggcatcacctgtctgggttcagtgtctgctctctctgctgtcatgggtgtgactttgacagctgctattgggggtgctgacatgcccgtcgttatcactgtgctgaacagctactcaggctgggccctgtgtgcagagggcttcctgctcaacaacaatctgctgaccatcgtgggtgcactcataggctcgtctggtgctatcctgtcatacatcatgtgtgtggcaatgaatcgctccctggctaatgtgattcttggaggctatggcaccacttcaacagctggtggaaaacccatggaaatttctggcacacatacggaaatcaaccttgacaatgcaattgacatgattcgagaagctaatagcattattattacaccaggctatggtctctgtgcagccaaagctcaataccccattgctgatttggtaaagatgctcactgagcaaggcaaaaaagtcaggtttggaattcacccagttgcaggccgaatgcctggtcagcttaatgtgctgctggctgaggctggtgtgccatatgacattgtgttggaaatggatgagatcaaccatgattttccagatactgatttggtccttgtaattggagctaatgacactgttaattcagcagctcaagaagatcccaactctattattgcaggcatgccagtccttgaggtctggaaatcaaagcaggtgattgttatgaagaggtctttgggtgttggctatgctgcagtggacaatccaatcttctacaaacctaacacggccatgcttctaggtgatgccaagaaaacatgtgacgcgctccaggcgaaagttagagaatcctatcagaagtaaatattaaggatcaagctgttagctaataatgccacctctgcagttttgggaacaggcaaataaagtatcagtatacatggtgatgtacatctgtagcaaagctcttggagaaaatgaagactgaagaaagcaaagcaaaaactgtatagagagatttttcaaaagcagtaatccctcaattttaaaaaaggattgaaaattctaaatgtctttctgtgcatattttttgtgttaggaatcaaaagtattttataaaaggagaaagaacagcctcattttagatgtagtcctgttggattttttatgcctcctcagtaaccagaaatgttttaaaaaactaagtgtttaggatttcaagacaacattatacatggctctgaaatatctgacacaatgtaaacattgcaggcacctgcattttatgttttttttttcaacaaatgtgactaatttgaaacttttatgaacttctgagctgtccccttgcaattcaaccgcagtttgaattaatcatatcaaatcagttttaattttttaaattgtacttcagagtctatatttcaagggcacattttctcactactattttaatacattaaaggactaaataatctttcagagatgctggaaacaaatcatttgctttatatgtttcattagaataccaatgaaacatacaacttgaaaattagtaatagtatttttgaagatcccatttctaattggagatctctttaatttcgatcaacttataatgtgtagtactatattaagtgcacttgagtggaattcaacatttgactaataaaatgagttcatcatgttggcaagtgatgtggcaattatctctggtgacaaaagagtaaaatcaaatatttctgcctgttacaaatatcaaggaagacctgctactatgaaatagatgacattaatctgtcttcactgtttataatacggatggattttttttcaaatcagtgtgtgttttgaggtcttatgtaattgatgacatttgagagaaatggtggctttttttagctacctctttgttcatttaagcaccagtaaagatcatgtctttttatagaagtgtagattttctttgtgactttgctatcgtgcctaaagctctaaatataggtgaatgtgtgatgaatactcagattatttgtctctctatataattagtttggtactaagtttctcaaaaaattattaacacatgaaagacaatctctaaaccagaaaaagaagtagtacaaattttgttactgtaatgctcgcgtttagtgagtttaaaacacacagtatcttttggttttataatcagtttctattttgctgtgcctgagattaagatctgtgtatgtgtgtgtgtgtgtgtgtgcgtttgtgtgttaaagcagaaaagacttttttaaaagttttaagtgataaatgcaatttgttaattgatcttagatcactagtaaactcagggctgaattataccatgtatattctattagaagaaagtaaacaccatctttattcctgccctttttcttctctcaaagtagttgtagttatatctagaaagaagcaattttgatttcttgaaaaggtagttcctgcactcagtttaaactaaaaataatcatacttggattttatttatttttgtcatagtaaaaattttaatttatatatatttttatttagtattatcttattctttgctatttgccaatcctttgtcatcaattgtgttaaatgaattgaaaattcatgccctgttcattttattttactttattggttaggatatttaaaggatttttgtatatataatttcttaaattaatattccaaaaggttagtggacttagattataaattatggcaaaaatctaaaaacaacaaaaatgatttttatacattctatttcattattcctctttttccaataagtcatacaattggtagatatgacttattttatttttgtattattcactatatctttatgatatttaagtataaataattaaaaaaatttattgtaccttatagtctgtcaccaaaaaaaaaaaattatctgtaggtagtgaaatgctaatgttgatttgtctttaagggcttgttaactatcctttattttctcatttgtcttaaattaggagtttgtgtttaaattactcatctaagcaaaaaatgtatataaatcccattactgggtatatacccaaaggattataaatcatgctgctataaagacacatgcacacgtatgtttattgcagcactattcacaatagcaaagacttggaaccaacccaaatgtccatcaatgatagacttgattaagaaaatgtgcacatatacaccatggaatactatgcagccataaaaaaggatgagttcatgtcctttgtagggacatggataaagctggaaaccatcattctgagcaaactattgcaaggacagaaaaccaaacactgcatgttctcactcataggtgggaattgaacaatgagaacacttggacacaaggtggggaacaccacacaccagggcctgtcatggggtggggggagtggggagggatagcattaggagatatacctaatgtaaatgatgagttaatgggtgcagcacaccaacatggcacatgtatacatatgtagcaaacctgcacgttgtgcacatgtaccctagaacttaaagtataattaaaaaaaaaaagaaaacagaagctatttataaagaagttatttgctgaaataaatgtgatctttcccattaaaaaaataaagaaattttggggtaaaaaaacacaatatattgtattcttgaaaaattctaagagagtggatgtgaagtgttctcaccacaaaagtgataactaattgaggtaatgcacatattaattagaaagattttgtcattccacaatgtatatatacttaaaaatatgttatacacaataaatacatacattaaaaaataagtaaatgta

SEQ ID NO: 20242 - DNA, 4310 bp, Homo sapiens
  source 1..4310: mol_type = unassigned DNA
cgaggtgggagcggagctgcagtcacgtggccgcccgccgccgcggagttggggctgttcttccgggttggaggcgcagcgccgcggggcccaagcccgggtctgccagcgcgacgtcctctcgcggccctcagggcacagcccaaggctgtcagcctcccggcccagtgatttgccttcaaggaaactggggagtcagaaaattgggaactcatatcaacatggcaaacctattgaaaacagtggtgactggctgctcgtgtcctctacttagcaatttggggtcctgtaagggtctacgtgtgaagaaggattttttacgaacattttatactcaccaagaactgtggtgtaaagcgcctgtaaaaccaggaattccatataagcaactgactgttggagtccccaaagagatattccaaaatgagaagcgagtggcattgtctcctgctggtgttcagaacttggtcaagcagggttttaatgttgtcgtggaatcgggtgcgggcgaagcttccaagttctcagatgatcactatagagtggcaggtgcccaaatccaaggggcaaaggaagtgctggcttctgatttggtggtcaaagtgcgagcccctatggttaatccaacattaggtgttcatgaagctgaccttttaaagacatcaggaacgctgattagttttatttacccagcccaaaatccagagttgctaaataaactttcccaaagaaaaactacagttctggcaatggaccaggttccaagagtcacaattgctcagggatatgatgcgctaagctccatggccaacattgcgggttataaggctgttgtcctagcagcaaatcattttggacgtttttttactggtcagatcacagctgctggaaaagttcctccagctaagattctgatagttggtggtggtgttgctgggcttgcttctgcaggcgcagcaaagtcgatgggtgcaattgttcgaggatttgacacaagagctgcagctttggaacagttcaagtctcttggtgctgagcccttggaggtggacttgaaggaatctggtgagggacaaggaggatatgcaaaagagatgtccaaagagttcattgaagctgaaatgaaactctttgctcaacaatgcaaggaggtagacatccttatcagcacagcacttattccaggtaaaaaagctccagttttatttaataaagaaatgattgagtcaatgaaggaaggttcagttgttgtggatttagctgctgaggctggtggaaactttgaaaccactaagccaggagaactctacattcataagggaattactcacataggctacacagacctgcccagccgaatggccactcaggccagcaccctatattccaacaacatcaccaaactcctgaaggccatcagcccggacaaagataatttttattttgatgtgaaagatgactttgactttggtacgatgggtcatgtcattagaggaactgtagtgatgaaagatggtaaagtgattttcccagctcccacaccgaaaaatattcctcaaggtgccccagtaaaacagaagacagtggctgagctggaagctgaaaaagcagctaccattacacccttcaggaagacaatgtcaacggcttctgcatatacagcaggtctcacagggatactgggtttgggcattgcggctcccaatctagccttttctcagatggtgaccacttttggcttggctggcattgtggggtatcataccgtctggggagtgacccctgctctccactcaccactgatgtctgtgacaaatgcaatctcagggctgactgcagttggtgggttggcactgatgggaggacatttgtatccttccacaacttctcagggccttgctgctcttgctgcattcatatcctctgtcaacattgcaggtggctttctggtgactcagagaatgctggacatgttcaagcgtcccactgaccccccagaatacaactacctgtacctgctccctgccggcacctttgttggtggatatttagctgccctctacagtggttataacattgaacagatcatgtacctaggctcgggtttgtgctgtgtcggtgccttggctggcctctccacccagggaacagcacgtcttggcaatgcactgggcatgattggggttgctggaggactggcagccaccctcggagtcctaaaaccgggcccagaattactagctcagatgtctggagcgatggctttgggtggtaccattggattgacaattgccaaacgcatccagatttctgatttacctcaattagttgctgcttttcacagtttagtgggtttggcagctgtacttacttgcatagctgagtacattatagaatatccacattttgctacggatgcagcagcaaatctcaccaagattgtggcctacctcggcacttacattggtggcgtcacctttagtgggtctctcattgcctatggaaaattgcagggtctcctgaaatctgcccctctcctactgcctggaaggcacttactcaatgcaggcttactggctgctagtgtgggcgggataatcccattcatggtggacccaagctttactactggcatcacctgtctgggttcagtgtctgctctctctgctgtcatgggtgtgactttgacagctgctattgggggtgctgacatgcccgtcgttatcactgtgctgaacagctactcaggctgggccctgtgtgcagagggcttcctgctcaacaacaatctgctgaccatcgtgggtgcactcataggctcgtctggtgctatcctgtcatacatcatgtgtgtggcaatgaatcgctccctggctaatgtgattcttggaggctatggcaccacttcaacagctggtggaaaacccatggaaatttctggcacacatacggaaatcaaccttgacaatgcaattgacatgattcgagaagctaatagcattattattacaccaggctatggtctctgtgcagccaaagctcaataccccattgctgatttggtaaagatgctcactgagcaaggcaaaaaagtcaggtttggaattcacccagttgcaggccgaatgcctggtcagcttaatgtgctgctggctgaggctggtgtgccatatgacattgtgttggaaatggatgagatcaaccatgattttccagatactgatttggtccttgtaattggagctaatgacactgttaattcagcagctcaagaagatcccaactctattattgcaggcatgccagtccttgaggtctggaaatcaaagcaggtgattgttatgaagaggtctttgggtgttggctatgctgcagtggacaatccaatcttctacaaacctaacacggccatgcttctaggtgatgccaagaaaacatgtgacgcgctccaggcgaaagttagagaatcctatcagaagtaaatattaaggatcaagctgttagctaataatgccacctctgcagttttgggaacaggcaaataaagtatcagtatacatggtgatgtacatctgtagcaaagctcttggagaaaatgaagactgaagaaagcaaagcaaaaactgtatagagagatttttcaaaagcagtaatccctcaattttaaaaaaggattgaaaattctaaatgtctttctgtgcatattttttgtgttaggaatcaaaagtattttataaaaggagaaagaacagcctcattttagatgtagtcctgttggattttttatgcctcctcagtaaccagaaatgttttaaaaaactaagtgtttaggatttcaagacaacattatacatggctctgaaatatctgacacaatgtaaacattgcaggcacctgcattttatgttttttttttcaacaaatgtgactaatttgaaacttttatgaacttctgagctgtccccttgcaattcaaccgcagtttgaattaatcatatcaaatcagttttaattttttaaattgtacttcagagtctatatttcaagggcacattttctcactactattttaatacattaaaggactaaataatctttcagagatgctggaaacaaatcatttgctttatatgtttcattagaataccaatgaaacatacaacttgaaaattagtaatagtatttttgaagatcccatttctaattggagatctctttaatttcgatcaacttataatgtgtagtactatattaagtgcacttgagtggaattcaacatttgactaataaaatgagttcatcatgttggc

SEQ ID NO: 20243 - DNA, 707 bp, Homo sapiens
  source 1..707: mol_type = unassigned DNA
cccttgggtcctctctgttacagaagttctgatttttcctagcgagctggaggaaagtgatttgccttcaaggaaactggggagtcagaaaattgggaactcatatcaacatggcaaacctattgaaaacagtggtgactggctgctcgtgtcctctacttagcaatttggggtcctgtaagggtctacgtgtgaagaaggattttttacgaacattttatactcaccaagaactgtggtgtaaagcgcctgtaaaaccaggaattccatataagcaactgactgttggagtccccaaagagatattccaaaatgagaagcgagtggcattgtctcctgctggtgttcagaacttggtcaagcagggttttaatgttgtcgtggaatcgggtgcgggcgaagcttccaagttctcagatgatcactatagagtggcaggtgcccaaatccaaggggcaaaggaagtgctggcttctgatttggtggtcaaagtgcgagcccctatggttaatccaacattaggtgttcatgaagctgaccttttaaagacatcaggaacgctgattagttttatttacccagcccaaaatccagagttgctaaataaactttcccaaagaaaaactacagttctggcaatggaccaggttccaagagtcacaattgctcagggatatgatgcgctaagctccatggccaacattgcg

SEQ ID NO: 20244 - DNA, 754 bp, Homo sapiens
  source 1..754: mol_type = unassigned DNA
ctctgttacagaagttctgatttttcctagcgagctggaggaaaggcagtgatttgccttcaaggaaactggggagtcagaaaattgggaactcatatcaacatggcaaacctattgaaaacagtggtgactggctgctcgtgtcctctacttagcaatttggggtcctgtaagggtctacgtgtgaagaaggattttttacgaacattttatactcaccaagaactgtggtgtaaagcgcctgtaaaaccaggaattccatataagcaactgactgttggagtccccaaagagatattccaaaatgagaagcgagtggcattgtctcctgctggtgttcagaacttggtcaagcagggttttaatgttgtcgtggaatcgggtgcgggcgaagcttccaagttctcagatgatcactatagagtggcaggtgcccaaatccaaggggcaaaggaagtgctggcttctgatttggtggtcaaagtgcgagcccctatggttaatccaacattaggtgttcatgaagctgaccttttaaagacatcaggaacgctgattagttttatttacccagcccaaaatccagagttgctaaataaactttcccaaagaaaaactacagttctggcaatggaccaggttccaagagtcacaattgctcagggatatgatgcgctaagctccatggccaacattgcgggttataaggctgttgtcctagcagcaaatcattttggacgtttttttactggtc

SEQ ID NO: 20245 - DNA, 2391 bp, Homo sapiens
  source 1..2391: mol_type = unassigned DNA
ctttcccttgggtcctctctgttacagaagttctgatttttcctagcgagctggaggaaaggcaggtacccggagtggagttatattacctgtttctttgttctgatgggaccccagagaggacatcacgctttgtaactggttcttcaaggggagaagcaaatgtgtccctgaaaacttcagctgccgcgtttggcaccagtgatttgccttcaaggaaactggggagtcagaaaattgggaactcatatcaacatggcaaacctattgaaaacagtggtgactggctgctggtgttcagaacttggtcaagcagggttttaatgttgtcgtggaatcgggtgcgggcgaagcttccaagttctcagatggtgaccacttttggcttggctggcattgtggggtatcataccgtctggggagtgacccctgctctccactcaccactgatgtctgtgacaaatgcaatctcagggctgactgcagttggtgggttggcactgatgggaggacatttgtatccttccacaacttctcagggccttgctgctcttgctgcattcatatcctctgtcaacattgcaggtggctttctggtgactcagagaatgctggacatgttcaagcgtcccactgaccccccagaatacaactacctgtacctgctccctgccggcacctttgttggtggatatttagctgccctctacagtggttataacattgaacagatcatgtacctaggctcgggtttgtgctgtgtcggtgccttggctggcctctccacccagggaacagcacgtcttggcaatgcactgggcatgattggggttgctggaggactggcagccaccctcggagtcctaaaaccgggcccagaattactagctcagatgtctggagcgatggctttgggtggtaccattggattgacaattgccaaacgcatccagatttctgatttacctcaattagttgctgcttttcacagtttagtgggtttggcagctgtacttacttgcatagctgagtacattatagaatatccacattttgctacggatgcagcagcaaatctcaccaagattgtggcctacctcggcacttacattggtggcgtcacctttagtgggtctctcattgcctatggaaaattgcagggtctcctgaaatctgcccctctcctactgcctggaaggcacttactcaatgcaggcttactggctgctagtgtgggcgggataatcccattcatggtggacccaagctttactactggcatcacctgtctgggttcagtgtctgctctctctgctgtcatgggtgtgactttgacagctgctattgggggtgctgacatgcccgtcgttatcactgtgctgaacagctactcaggctgggccctgtgtgcagagggcttcctgctcaacaacaatctgctgaccatcgtgggtgcactcataggctcgtctggtgctatcctgtcatacatcatgtgtgtggcaatgaatcgctccctggctaatgtgattcttggaggctatggcaccacttcaacagctggtggaaaacccatggaaatttctggcacacatacggaaatcaaccttgacaatgcaattgacatgattcgagaagctaatagcattattattacaccaggctatggtctctgtgcagccaaagctcaataccccattgctgatttggtaaagatgctcactgagcaaggcaaaaaagtcaggtttggaattcacccagttgcaggccgaatgcctggtcagcttaatgtgctgctggctgaggctggtgtgccatatgacattgtgttggaaatggatgagatcaaccatgattttccagatactgatttggtccttgtaattggagctaatgacactgttaattcagcagctcaagaagatcccaactctattattgcaggcatgccagtccttgaggtctggaaatcaaagcaggtgattgttatgaagaggtctttgggtgttggctatgctgcagtggacaatccaatcttctacaaacctaacacggccatgcttctaggtgatgccaagaaaacatgtgacgcgctccaggcgaaagttagagaatcctatcagaagtaaatattaaggatcaagctgttagctaataatgccacctctgcagttttgggaacaggcaaataaagtatcagtatacatggtgatgtacatctgtagcaaagctcttggagaaaatgaagactgaagaaagcaaagcaaaaactgtatagagagatttttcaaaagcagtaatccctcaattttaaaaaaggattgaaaattctaaatgtctttctgtgcatattttttgtgttaggaatcaaaagtattttataaaaggaga

SEQ ID NO: 20246 - DNA, 4582 bp, Homo sapiens
  source 1..4582: mol_type = unassigned DNA
gctgccgcgccccgccctttctcggcccccggagggtgacggggtgaaggcgggggaaccgaggtggggagtccgccagagctcccagactgcgagcacgcgagccgccgcagccgtcacccgcgccgcgtcacggctcccgggcccgccctcctctgacccctcccctctctccgtttccccctctccccctcctccgccgaccgagcagtgacttaagcaacggagcgcggtgaagctcatttttctccttcctcgcagccgcgccagggagctcgcggcgcgcggcccctgtcctccggcccgagatgaatcctgcggcagaagccgagttcaacatcctcctggccaccgactcctacaaggttactcactataaacaatatccacccaacacaagcaaagtttattcctactttgaatgccgtgaaaagaagacagaaaactccaaattaaggaaggtgaaatatgaggaaacagtattttatgggttgcagtacattcttaataagtacttaaaaggtaaagtagtaaccaaagagaaaatccaggaagccaaagatgtctacaaagaacatttccaagatgatgtctttaatgaaaagggatggaactacattcttgagaagtatgatgggcatcttccaatagaaataaaagctgttcctgagggctttgtcattcccagaggaaatgttctcttcacggtggaaaacacagatccagagtgttactggcttacaaattggattgagactattcttgttcagtcctggtatccaatcacagtggccacaaattctagagagcagaagaaaatattggccaaatatttgttagaaacttctggtaacttagatggtctggaatacaagttacatgattttggctacagaggagtctcttcccaagagactgctggcataggagcatctgctcacttggttaacttcaaaggaacagatacagtagcaggacttgctctaattaaaaaatattatggaacgaaagatcctgttccaggctattctgttccagcagcagaacacagtaccataacagcttgggggaaagaccatgaaaaagatgcttttgaacatattgtaacacagttttcatcagtgcctgtatctgtggtcagcgatagctatgacatttataatgcgtgtgagaaaatatggggtgaagatctaagacatttaatagtatcaagaagtacacaggcaccactaataatcagacctgattctggaaaccctcttgacactgtgttaaaggttttggagattttaggtaagaagtttcctgttactgagaactcaaagggttacaagttgctgccaccttatcttagagttattcaaggggatggagtagatattaataccttacaagagattgtagaaggcatgaaacaaaaaatgtggagtattgaaaatattgccttcggttctggtggaggtttgctacagaagttgacaagagatctcttgaattgttccttcaagtgtagctatgttgtaactaatggccttgggattaacgtcttcaaggacccagttgctgatcccaacaaaaggtccaaaaagggccgattatctttacataggacgccagcagggaattttgttacactggaggaaggaaaaggagaccttgaggaatatggtcaggatcttctccatactgtcttcaagaatggcaaggtgacaaaaagctattcatttgatgaaataagaaaaaatgcacagctgaatattgaactggaagcagcacatcattaggctttatgactgggtgtgtgttgtgtgtatgtaatacataatgtttattgtacagatgtgtggggtttgtgttttatgatacattacagccaaattatttgttggtttatggacatactgccctttcattttttttcttttccagtgtttaggtgatctcaaattaggaaatgcatttaaccatgtaaaagatgagtgctaaagtaagctttttagggccctttgccaataggtagtcattcaatctggtattgatcttttcacaaataacagaactgagaaacttttatatataactgatgatcacataaaacagatttgcataaaattaccatgattgctttatgtttatatttaacttgtatttttgtacaaacaagattgtgtaagatatatttgaagtttcagtgatttaacagtctttccaacttttcatgatttttatgagcacagactttcaagaaaatacttgaaaataaattacattgccttttgtccattaatcagcaaataaaacatggccttaacaaagttgtttgtgttattgtacaatttgaaaattatgtcgggacataccctatagaattactaaccttactgccccttgtagaatatgtattaatcattctacattaaagaaaataatggttcttactggaatgtctaggcactgtacagttattatatatcttggttgttgtattgtaccagtgaaatgccaaatttgaaaggcctgtactgcaattttatatgtcagagattgcctgtggctctaatatgcacctcaagattttaaggagataatgtttttagagagaatttctgcttccactatagaatatatacataaatgtaaaatacttacaaaagtggaagtagtgtattttaaagtaattacacttctgaatttatttttcatattctatagttggtatgacttaaatgaattactggagtgggtagtgagtgtacttaaatgtttcaattctgttatattttttattaagtttttaaaaaattaaattggatattaaattgtatggacatcatttattaattttaaactgaatgccctcaataagtaatactgaagcacattcttaaatgaagataaattatctccaatgaaaagcatgacatgtgtttcaatagaagaatcttaagttggctaaattcaaagtgcttgacatcaaaatgttctagagtgattagctactagattctgaatcatacatcacatctgactagagaccagtttctttcgaatgattcttttatgtatgtagatctgttcttctgaggcagcggttggccaactatagcccaaaggccaaatttggacttctttttataaatgcagattgtctatggctgctttcccactactccagcctaaggtaaacagctgcaatagaagccaaatgagaatcgcaaagcccaaaatgtttattaacctgccctttacacaaaattacacaaaaagtttcctgatctctgttctaagaaaaggagtgtgccttgcatttaaaaggaaatgttggtttctagggaagggaggaggctaaataattgatacggaattttcctcttttgtcttcttttttctcacttaagaatccgatactggaagactgatttagaaaagtttttaacatgacattaaatgtgaaattttaaaaattgaaaagccataaatcatctgttttaaatagttacatgagaaaatgatcactagaataacctaattagaagtgttatcttcattaaatgttttttgtaagtggtattagaaagaatatgtttttcagatggttctttaaacatgtagtgagaacaataagcattattcacttttagtaagtcttctgtaatccatgatataaaataattttaaaatgattttttaatgtatttgagtaaagatgagtagtattaagaaaaacacacatttcttcacaaaatgtgctaaggggcgtgtaaagaatcaaaagaaactattaccaataatagttttgataatcacccataattttgtgtttaaacattgaaattatagtacagacagtattctctgtgttctgtgaatttcagcagcttcagaatagagtttaatttagaaatttgcagtgaaaaaagctatctctttgttcacaaccataaatcaggagatggagattaattctattggctcttagtcacttggaactgattaattctgactttctgtcactaagcacttggtatttggccatctccattctgagcaccaaacggttaacacgaatgtccactagaactctgctgtgtgtcacccttaaatcagtctaaatcttccagacaaaagcaaatggcatttatggatttaagtcattagattttcaactgacattaattaatccctcttgattgattatatcatcaagtatttatatcttaaataggaggtaggatttctgtgttaagactcttatttgtaccctataattaaagtaaaatgttttttatgagtatcccttgttttcccttcttaaattgttatcaaacaatttttataatgaaatctatcttggaaaattagaaagaaaaatggcaaggtatttattgttctgtttgccataatttagaactcacacttaagtattttgtagttttacattcctttttaacccattcagtggagaatgtcagcttttctcccaagttgtatgttaagtctattctaatatgtactcaacatcaagttataaacatgtaataaacatggaaataaagtttagctctattagtgaagtgttaaa

SEQ ID NO: 20247 - DNA, 1213 bp, Homo sapiens
  source 1..1213: mol_type = unassigned DNA
gagctcgcggcgcgcggcccctgtcctccggcccgagatgaatcctgcggcagaagccgagttcaacatcctcctggccaccgactcctacaaggttactcactataaacaatatccacccaacacaagcaaagtttattcctactttgaatgccgtgaaaagaagacagaaaactccaaattaaggaaggtgaaatatgaggaaacagtattttatgggttgcagtacattcttaataagtacttaaaaggtaaagtagtaaccaaagagaaaatccaggaagccaaagatgtctacaaagaacatttccaagatgatgtctttaatgaaaagggatggaactacattcttgagaagtatgatgggcatcttccaatagaaataaaagctgttcctgagggctttgtcattcccagaggaaatgttctcttcacggtggaaaacacagatccagagtgttactggcttacaaattggattgagactattcttgttcagtcctggtatccaatcacagtggccacaaattctagagagcagaagaaaatattggccaaatatttgttagaaacttctggtaacttagatggtctggaatacaagttacatgattttggctacagaggagtctcttcccaagagactgctggcataggagcatctgctcacttggttaacttcaaaggaacagatacagtagcaggacttgctctaattaaaaaatattatggaacgaaagatcctgttccaggctattctgttccagcagcagaacacagtaccataacagcttgggggaaagaccatgaaaaagatgcttttgaacatattgtaacacagttttcatcagtgcctgtatctgtggtcagcgatagctatgacatttataatgcgtgtgagaaaatatggggtgaagatctaagacatttaatagtatcaagaagtacacaggcaccactaataatcagacctgattctggaaaccctcttgacactgtgttaaaggttttggagattttaggtaagaagtttcctgttactgagaactcaaagggttacaagttgctgccaccttatcttagagttattcaaggggatggagtagatattaataccttacaagaggtatgtgttttatattaaaagtttcaataaggcatttcttataattaagtttgtttatgtttgataaagaacacaatataaatacaa

SEQ ID NO: 20248 - DNA, 300 bp, Homo sapiens
  source 1..300: mol_type = unassigned DNA
gtcaggaggatcaggagggacaagagggatggaggcgaaaggctggatccttaatccaggccggagacaaagccgcgccagggagctcgcggcgcgcggcccctgtcctccggcccgagatgaatcctgcggcagaagccgagttcaacatcctcctggccaccgactcctacaaggttactcactataaacaatatccacccaacacaagcaaagtttattcctactttgaatgccgtgaaaagaagacagaaaactccaaattaaggaaggtgaaatatgaggaaacagtattttatg

SEQ ID NO: 20249 - DNA, 1147 bp, Homo sapiens
  source 1..1147: mol_type = unassigned DNA
tagtgttgactgaggttgtctttattagaagtctcagccatgcctccagtttcgagatgaatctcaattcacaagttccactatgaatctcaattcacaagttccactaccaccaccaccatcactgcccccagatagaatgagacttctaataacttgaaagacaagtctataaatatcctgtaatcgttttcactgtatcactttttcctggctacttttatccgataaaaacctcaatttatttttaagctattaaacatgcggacaaagggaatcttagttttatgcaaaaacgcaaccacgcatgagaactgcgcaagtctttcttggaatggtctgtatttgggtgaagtcatcagacgtcattacacttctttattttggggttgccaactcgtttcccaggatttaaagactataacgatgataaaagtcagtgtcgcaccctgtcaaaggcttggcccgttgccttttccttcccggcaatactcggttcaattaggtcttgtcccctcattatctgtgaggactgaattccacccccgcttttcaacgcaggctctttgctcgggaaaagtcaaaccatctctcaaaggatcaaagagctcagccatagacagagccgccggaggaaagcggagtcgctgcatcagatgaaaggggcccctcagcctcactcctcaccgcagctcctgggatcttaaagacagggtcaggaggatcaggagggacaagagggatggaggcgaaaggctggatccttaatccaggccggagacaaagtgacttaagcaacggagcgcggtgaagctcatttttctccttcctcgcagccgcgccagggagctcgcggcgcgcggcccctgtcctccggcccgagatgaatcctgcggcagaagccgagttcaacatcctcctggccaccgactcctacaaggttactcactataaacaatatccacccaacacaagcaaagtttattcctactttgaatgccgtgaaaagaagacagaaaactccaaattaaggaaggtgaaatatgaggaaacagtattttatgggttgcagtacattcttaataagtacttaaaaggtaaagtagtaaccaaagagaaaatccaggaagccaaagatgtctacaaa

SEQ ID NO: 20250 - DNA, 1721 bp, Homo sapiens
  source 1..1721: mol_type = unassigned DNA
gtccggacgtcgggagcaggatggcggcggagcaggaccccgaggcgcgcgcggcggcgcggccgctgctcactgacctctaccaggccaccatggcgttgggctattggcgcgcgggccgggcgcgggacgccgccgagttcgagctcttcttccgccgctgcccgttcggcggcgccttcgccttggccgccggcttgcgcgactgtgtgcgcttcctgcgcgccttccgcctgcgggacgccgacgtgcagttcctggcctcggtgctgcccccagacacggatcctgcgttcttcgagcaccttcgggccctcgactgctccgaggtgacggtgcgagccctgcccgagggctccctcgccttccccggagtgccgctcctgcaggtgtccgggccgctcctggtggtgcagctgctggagacaccgctgctctgcctggtcagctacgccagcctggtggccaccaacgcagcgcggcttcgcttgatcgcagggccagagaagcggctgctagagatgggcctgaggcgggctcagggccccgatgggggcctgacagcctccacctacagctacctgggcggcttcgacagcagcagcaacgtgctagcgggccagctgcgaggtgtgccggtggccgggaccctggcccactccttcgtcacttccttttcaggcagcgaggtgccccctgacccgatgttggcgccagcagctggtgagggccctggggtggacctggcggccaaagcccaggtgtggctggagcaggtgtgtgcccacctggggctgggggtgcaggagccgcatccaggcgagcgggcagcctttgtggcctatgccttggcttttccccgggccttccagggcctcctggacacctacagcgtgtggaggagtggtctccccaacttcctagcagtcgccctggccctgggagagctgggctaccgggcagtgggcgtgaggctggacagtggtgacctgctacagcaggctcaggagatccgcaaggtcttccgagctgctgcagcccagttccaggtgccctggctggagtcagtcctcatcgtagtcagcaacaacattgacgaggaggcgctggcccgactggcccaggagggcagtgaggtgaatgtcattggcattggcaccagtgtggtcacctgcccccaacagccttccctgggtggcgtctataagctggtggccgtggggggccagccacgaatgaagctgaccgaggaccccgagaagcagacgttgcctgggagcaaggctgctttccggctcctgggctctgacgggtctccactcatggacatgctgcagttagcagaagagccagtgccacaggctgggcaggagctgagggtgtggcctccaggggcccaggagccctgcaccgtgaggccagcccaggtggagccactactgcggctctgcctccagcagggacagctgtgtgagccgctcccatccctggcagagtctagagccttggcccagctgtccctgagccgactcagccctgagcacaggcggctgcggagccctgcacagtaccaggttgggggaggcccaccctgtcattctgccctgtgcgcccccgccctcaccctgcccaccgctcctgtcctctgctccctgcaggtggtgctgtccgagaggctgcaggccctggtgaacagtctgtgtgcggggcagtccccctga

SEQ ID NO: 20251 - DNA, 1654 bp, Homo sapiens
  source 1..1654: mol_type = unassigned DNA
gcggagtccggacgtcgggagcaggatggcggcggagcaggaccccgaggcgcgcgcggcggcgcggccgctgctcactgacctctaccaggccaccatggcgttgggctattggcgcgcgggccgggcgcgggacgccgccgagttcgagctcttcttccgccgctgcccgttcggcggcgccttcgccttggccgccggcttgcgcgactgtgtgcgcttcctgcgcgccttccgcctgcgggacgccgacgtgcagttcctggcctcggtgctgcccccagacacggatcctgcgttcttcgagcaccttcgggccctcgactgctccgaggtgacggtgcgagccctgcccgagggctccctcgccttccccggagtgccgctcctgcaggtgtccgggccgctcctggtggtgcagctgctggagacaccgctgctctgcctggtcagctacgccagcctggtggccaccaacgcagcgcggcttcgcttgatcgcagggccagagaagcggctgctagagatgggcctgaggcgggctcagggccccgatgggggcctgacagcctccacctacagctacctgggcggcttcgacagcagcagcaacgtgctagcgggccagctgcgaggtgtgccggtggccgggaccctggcccactccttcgtcacttccttttcaggcagcgaggtgccccctgacccgatgttggcgccagcagctggtgagggccctggggtggacctggcggccaaagcccaggtgtggctggagcaggtgtgtgcccacctggggctgggggtgcaggagccgcatccaggcgagcgggcagcctttgtggcctatgccttggcttttccccgggccttccagggcctcctggacacctacagcgtgtggaggagtggtctccccaacttcctagcagtcgccctggccctgggagagctgggctaccgggcagtgggcgtgaggctggacagtggtgacctgctacagcaggctcaggagatccgcaaggtcttccgagctgctgcagcccagttccaggtgccctggctggagtcagtcctcatcgtagtcagcaacaacattgacgaggaggcgctggcccgactggcccaggagggcagtgaggtgaatgtcattggcattggcaccagtgtggtcacctgcccccaacagccttccctgggtggcgtctataagctggtggccgtggggggccagccacgaatgaagctgaccgaggaccccgagaagcagacgttgcctgggagcaaggctgctttccggctcctgggctctgacgggtctccactcatggacatgctgcagttagcagaagagccagtgccacaggctgggcaggagctgagggtgtggcctccaggggcccaggagccctgcaccgtgaggccagcccagctgtgtgagccgctcccatccctggcagagtctagagccttggcccagctgtccctgagccgactcagccctgagcacaggcggctgcggagccctgcacagtaccaggtggtgctgtccgagaggctgcaggccctggtgaacagtctgtgtgcggggcagtccccctgagactcggagcggggctgactggaaacaacacgaatcactcacttttcccca

SEQ ID NO: 20252 - DNA, 1877 bp, Homo sapiens
  source 1..1877: mol_type = unassigned DNA
gcggagtccggacgtcgggagcaggatggcggcggagcaggaccccgaggcgcgcgcggcggcgcggccgctgctcactgacctctaccaggccaccatggcgttgggctattggcgcgcgggccgggcgcgggacgccgccgagttcgagctcttcttccgccgctgcccgttcggcggcgccttcgccttggccgccggcttgcgcgactgtgtgcgcttcctgcgcgccttccgcctgcgggacgccgacgtgcagttcctggcctcggtgctgcccccagacacggatcctgcgttcttcgagcaccttcgggccctcgactgctccgaggtgacggtgcgagccctgcccgagggctccctcgccttccccggagtgccgctcctgcaggtgtccgggccgctcctggtggtgcagctgctggagacaccgctgctctgcctggtcagctacgccagcctggtggccaccaacgcagcgcggcttcgcttgatcgcagggccagagaagcggctgctagagatgggcctgaggcgggctcagggccccgatgggggcctgacagcctccacctacagctacctgggcggcttcgacagcagcagcaacgtgctagcgggccagctgcgaggtgtgccggtggccgggaccctggcccactccttcgtcacttccttttcaggcagcgaggtgccccctgacccgatgttggcgccagcagctggtgagggccctggggtggacctggcggccaaagcccaggtgtggctggagcaggtgtgtgcccacctggggctgggggtgcaggagccgcatccaggcgagcgggcagcctttgtggcctatgccttggcttttccccgggccttccagggcctcctggacacctacagcgtgtggaggagtggtctccccaacttcctagcagtcgccctggccctgggagagctgggctaccgggcagtgggcgtgaggctggacagtggtgacctgctacagcaggctcaggagatccgcaaggtcttccgagctgctgcagcccagttccaggtgccctggctggagtcagtcctcatcgtagtcagcaacaacattgacgaggaggcgctggcccgactggcccaggagggcagtgaggtgaatgtcattggcattggcaccagtgtggtcacctgcccccaacagccttccctgggtggcgtctataagctggtggccgtggggggccagccacgaatgaagctgaccgaggaccccgagaagcagacgttgcctgggagcaaggctgctttccggctcctgggctctgacgggtctccactcatggacatgctgcagttagcagaagagccagtgccacaggctgggcaggagctgagggtgtggcctccaggggcccaggagccctgcaccgtgaggccagcccaggtggagccactactgcggctctgcctccagcagggacaggtggctgccccaccgccctcatcctgacccccagccccggtagagccctgactgggagctagccccaagcttctctttccttacctcctccctgcagctgtgtgagccgctcccatccctggcagagtctagagccttggcccagctgtccctgagccgactcagccctgagcacaggcggctgcggagccctgcacagtaccaggttggggggaggcccaccctgtcattctgccctgtgcgcccccgccctcaccctgcccaccgctcctgtcctctgctccctgcaggtggtgctgtccgagaggctgcaggccctggtgaacagtctgtgtgcggggcagtccccctgagactcggagcggggctgactggaaacaacacgaatcactcacttttccccaca

SEQ ID NO: 20253 - DNA, 1965 bp, Homo sapiens
  source 1..1965: mol_type = unassigned DNA
gagacacgagcgactgggggcacctctggtgaccaagaccgggctgcgctccaaagaggccgttgggcctggagtggggttggggggtccgagaggagttgggtgacatcccccaccccatcccgggtccagctgtttcagcccctctcggcgcgccgatactattagccccacccgtcctccatcgagtcccgtgccgctcccaaacggcacgataagccccacagggagtgcgccataggccggggcgcgtcacggggtcggggcggggcggagtccggacgtcgggagcaggatggcggcggagcaggaccccgaggcgcgcgcggcggcgcggccgctgctcactgacctctaccaggccaccatggcgttgggctattggcgcgcgggccgggcgcgggacgccgccgagttcgagctcttcttccgccgctgcccgttcggcggcgccttcgccttggccgccggcttgcgcgactgtgtgcgcttcctgcgcgccttccgcctgcgggacgccgacgtgcagttcctggcctcggtgctgcccccagacacggatcctgcgttcttcgagcaccttcgggccctcgactgctccgaggtgacggtgcgagccctgcccgagggctccctcgccttccccggagtgccgctcctgcaggtgtccgggccgctcctggtggtgcagctgctggagacaccgctgctctgcctggtcagctacgccagcctggtggccaccaacgcagcgcggcttcgcttgatcgcagggccagagaagcggctgctagagatgggcctgaggcgggctcagggccccgatgggggcctgacagcctccacctacagctacctgggcggcttcgacagcagcagcaacgtgctagcgggccagctgcgaggtgtgccggtggccgggaccctggcccactccttcgtcacttccttttcaggcagcgaggtgccccctgacccgatgttggcgccagcagctggtgagggccctggggtggacctggcggccaaagcccaggtgtggctggagcaggtgtgtgcccacctggggctgggggtgcaggagccgcatccaggcgagcgggcagcctttgtggcctatgccttggcttttccccgggccttccagggcctcctggacacctacagcgtgtggaggagtggtctccccaacttcctagcagtcgccctggccctgggagagctgggctaccgggcagtgggcgtgaggctggacagtggtgacctgctacagcaggctcaggagatccgcaaggtcttccgagctgctgcagcccagttccaggtgccctggctggagtcagtcctcatcgtagtcagcaacaacattgacgaggaggcgctggcccgactggcccaggagggcagtgaggtgaatgtcattggcattggcaccagtgtggtcacctgcccccaacagccttccctgggtggcgtctataagctggtggccgtggggggccagccacgaatgaagctgaccgaggaccccgagaagcagacgttgcctgggagcaaggctgctttccggctcctgggctctgacgggtctccactcatggacatgctgcagttagcagaagagccagtgccacaggctgggcaggagctgagggtgtggcctccaggggcccaggagccctgcaccgtgaggccagcccaggtggagccactactgcggctctgcctccagcagggacagctgtgtgagccgctcccatccctggcagagtctagagccttggcccagctgtccctgagccgactcagccctgagcacaggcggctgcggagccctgcacagtaccaggtggtgctgtccgagaggctgcaggccctggtgaacagtctgtgtgcggggcagtccccctgagactcggagcggggctgactggaaacaacacgaatcactcacttttccccaca

SEQ ID NO: 20254 - DNA, 4811 bp, Homo sapiens
  source 1..4811: mol_type = unassigned DNA
atggagggggaccgggtggccgggcggccggtgctgtcgtcgttaccagtgctactgctgctgccgttgctaatgttgcgggccgcggcgctgcacccagacgagctcttcccacacggggagtcgtggggggaccagctcctgcaggaaggcgacgacgaaagctcagccgtggtgaagctggcgaatcccctgcacttctacgaagcccgattcagcaacctctacgtgggcaccaacggcatcatctccactcaggacttccccagggaaacgcagtatgtggactatgatttccccaccgacttcccggccatcgccccttttctggcggacatcgacacgagccacggcagaggccgagtcctgtaccgagaggacacctcccccgcagtgctgggcctggccgcccgctatgtgcgcgctggcttcccgcgctctgcgcgctttacccccacccacgccttcctggccacctgggagcaggtaggcgcttacgaggaggtcaagcgcggggcgctgccctcgggagagctgaacactttccaggcagttttggcatctgatgggtctgatagctacgccctctttctttatcctgccaacggcctgcagttccttggaacccgccccaaagagtcttacaatgtccagcttcagcttccagctcgggtgggcttctgccgaggggaggctgatgatctgaagtcagaaggaccatatttcagcttgactagcactgaacagtctgtgaaaaatctctatcaactaagcaacctggggatccctggagtgtgggctttccatatcggcagcacttccccgttggacaatgtcaggccagctgcagttggagacctttccgctgcccactcttctgttcccctgggacgttccttcagccatgctacagccctggaaagtgactataatgaggacaatttggattactatgatgtgaatgaggaggaagctgaataccttccgggtgaaccagaggaggcattgaatggccacagcagcattgatgtttccttccaatccaaagtggatacaaagcctttagaggaatcttccaccttggatcctcacaccaaagaaggaacatctctgggagaggtagggggcccagatttaaaaggccaagttgagccctgggatgagagagagaccagaagcccagctccaccagaggtagacagagattcactggctccttcctgggaaaccccaccaccgtaccccgaaaacggaagcatccagccctacccagatggagggccagtgccttcggaaatggatgttcccccagctcatcctgaagaagaaattgttcttcgaagttaccctgcttcaggtcacactacacccttaagtcgagggacgtatgaggtgggactggaagacaacataggttccaacaccgaggtcttcacgtataatgctgccaacaaggaaacctgtgaacacaaccacagacaatgctcccggcatgccttctgcacggactatgccactggcttctgctgccactgccaatccaagttttatggaaatgggaagcactgtctgcctgaaggggcacctcaccgagtgaatgggaaagtgagtggccacctccacgtgggccatacacccgtgcacttcactgatgtggacctgcatgcgtatatcgtgggcaatgatggcagagcctacacggccatcagccacatcccacagccagcagcccaggccctcctccccctcacaccaattggaggcctgtttggctggctctttgctttagaaaaacctggctctgagaacggcttcagcctcgcaggtgctgcctttacccatgacatggaagttacattctacccgggagaggagacggttcgtatcactcaaactgctgagggacttgacccagagaactacctgagcattaagaccaacattcaaggccaggtgccttacgtctcagcaaatttcacagcccacatctctccctacaaggagctgtaccactactccgactccactgtgacctctacaagttccagagactactctctgacttttggtgcaatcaaccaaacatggtcctaccgcatccaccagaacatcacttaccaggtgtgcaggcacgcccccagacacccgtccttccccaccacccagcagctgaacgtggaccgggtctttgccttgtataatgacgaagaaagagtgcttagatttgctgtgaccaatcaaattggcccggtcaaagaggattcagaccccactccggggaatccttgctatgatgggagccacatgtgtgacacaacagcacggtgccatccagggacaggtgtagattacacctgtgagtgcgcatctgggtaccagggagatggacggaactgtgtggatgaaaatgaatgtgcaactggctttcatcgctgtggccccaactctgtatgtatcaacttgcctggaagctacaggtgtgagtgccggagtggttatgagtttgcagatgaccggcatacttgcatcttgatcaccccacctgccaacccctgtgaggatggcagtcatacctgtgctcctgctgggcaggcccggtgtgttcaccatggaggcagcacgttcagctgtgcctgcctgcctggttatgccggcgatgggcaccagtgcactgatgtagatgaatgctcagaaaacagatgtcaccctgcagctacctgctacaatactcctggttccttctcctgccgttgtcaacccggatattatggggatggatttcagtgcatacctgactccacctcaagcctgacaccctgtgaacaacagcagcgccatgcccaggcccagtatgcctaccctggggcccggttccacatcccccaatgcgacgagcagggcaacttcctgcccctacagtgtcatggcagcactggtttctgctggtgcgtggaccctgatggtcatgaagttcctggtacccagactccacctggctccaccccgcctcactgtggaccatcaccagagcccacccagaggcccccgaccatctgtgagcgctggagggaaaacctgctggagcactacggtggcaccccccgggatgaccagtacgtgccccagtgcgatgacctgggccacttcatccccctgcagtgccacggaaagagcgacttctgctggtgtgtggacaaagatggcagagaggtgcagggcacccgctcccagccaggcaccacccctgcgtgtatacccaccgtcgctccacccatggtccggcccacgccccggccagatgtgacccctccatctgtgggcaccttcctgctctatactcagggccagcagattggctacttacccctcaatggcaccaggcttcagaaggatgcagctaagaccctgctgtctctgcatggctccataatcgtgggaattgattacgactgccgggagaggatggtgtactggacagatgttgctggacggacaatcagccgtgctggtctggaactgggagcagagcctgagacgatcgtgaattcaggtctgataagccctgaaggacttgccatagaccacatccgcagaacaatgtactggacggacagtgtcctggataagatagagagcgccctgctggatggctctgagcgcaaggtcctcttctacacagatctggtgaatccccgtgccatcgctgtggatccaatccgaggcaacttgtactggacagactggaatagagaagctcctaaaattgaaacgtcatctttagatggagaaaacagaagaattctgatcaatacagacattggattgcccaatggcttaacctttgaccctttctctaaactgctctgctgggcagatgcaggaaccaaaaaactggagtgtacactacctgatggaactggacggcgtgtcattcaaaacaacctcaagtaccccttcagcatcgtaagctatgcagatcacttctaccacacagactggaggagggatggtgttgtatcagtaaataaacatagtggccagtttactgatgagtatctcccagaacaacgatctcacctctacgggataactgcagtctacccctactgcccaacaggaagaaagtaagtacagtaatgtaaaggaagacttggagtttacaatcagaacctggaccctaaagaacagtgactgcaaaggcaaagaaagtaaaaaaggaattggccattagacgttcctgagcatccaagatgaacattttgtagtgcaaaaagacttttgtgaaaagctgatacctcaatctttactactgtatttttaaaaatgaaggttgttattgcaagtttaaaaaggtaacagaattttaactgttgcttattaaagcaacttcttgtaaacatttatcattaatatttaaaagatcaaattcattcaactaagaattagagtttaagactctaaacctgatttttgccatggattccttctggccaagaaattaaagcacatgtgatcaatataacaatataatcctaaaccttgacagttggagaagccaatgcagaactgatgggaaaggaccaattatttatagtttcccaacaaaagttctaagattttttacctctgcatcagtgcatttctatttatatcaaaaggtgctaaaatgattcaatttgcattttctgatcctgtagtgcctctatagaagtacccacagaaagtaaagtatcacatttataaataccaaagatgtaacaattttaaaattttctagattactccaataaagtgttttaagttttcctatg

SEQ ID NO: 20255 - DNA, 3647 bp, Homo sapiens
  source 1..3647: mol_type = unassigned DNA
tggaggccggggcgggacgcgttgtgcagcgggtaagcgcacggccgagcgagcatggagggggaccgggtggccgggcggccggtgctgtcgtcgttaccagtgctactgctgctgccgttgctaatgttgcgggccgcggcgctgcacccagacgagctcttcccacacggggagtcgtggggggaccagctcctgcaggaaggcgacgacgaaagctcagccgtggtgaagctggcgaatcccctgcacttctacgaagcccgattcagcaacctctacgtgggcaccaacggcatcatctccactcaggacttccccagggaaacgcagtatgtggactatgatttccccaccgacttcccggccatcgccccttttctggcggacatcgacacgagccacggcagaggccgagtcctgtaccgagtgaatgggaaagtgagtggccacctccacgtgggccatacacccgtgcacttcactgatgtggacctgcatgcgtatatcgtgggcaatgatggcagagcctacacggccatcagccacatcccacagccagcagcccaggccctcctccccctcacaccaattggaggcctgtttggctggctctttgctttagaaaaacctggctctgagaacggcttcagcctcgcaggtgctgcctttacccatgacatggaagttacattctacccgggagaggagacggttcgtatcactcaaactgctgagggacttgacccagagaactacctgagcattaagaccaacattcaaggccaggtgccttacgtctcagcaaatttcacagcccacatctctccctacaaggagctgtaccactactccgactccactgtgacctctacaagttccagagactactctctgacttttggtgcaatcaaccaaacatggtcctaccgcatccaccagaacatcacttaccaggtgtgcaggcacgcccccagacacccgtccttccccaccacccagcagctgaacgtggaccgggtctttgccttgtataatgacgaagaaagagtgcttagatttgctgtgaccaatcaaattggcccggtcaaagaggattcagaccccactccggggaatccttgctatgatgggagccacatgtgtgacacaacagcacggtgccatccagggacaggtgtagattacacctgtgagtgcgcatctgggtaccagggagatggacggaactgtgtggatgaaaatgaatgtgcaactggctttcatcgctgtggccccaactctgtatgtatcaacttgcctggaagctacaggtgtgagtgccggagtggttatgagtttgcagatgaccggcatacttgcatcttgatcaccccacctgccaacccctgtgaggatggcagtcatacctgtgctcctgctgggcaggcccggtgtgttcaccatggaggcagcacgttcagctgtgcctgcctgcctggttatgccggcgatgggcaccagtgcactgatgtagatgaatgctcagaaaacagatgtcaccctgcagctacctgctacaatactcctggttccttctcctgccgttgtcaacccggatattatggggatggatttcagtgcatacctgactccacctcaagcctgacaccctgtgaacaacagcagcgccatgcccaggcccagtatgcctaccctggggcccggttccacatcccccaatgcgacgagcagggcaacttcctgcccctacagtgtcatggcagcactggtttctgctggtgcgtggaccctgatggtcatgaagttcctggtacccagactccacctggctccaccccgcctcactgtggaccatcaccagagcccacccagaggcccccgaccatctgtgagcgctggagggaaaacctgctggagcactacggtggcaccccccgggatgaccagtacgtgccccagtgcgatgacctgggccacttcatccccctgcagtgccacggaaagagcgacttctgctggtgtgtggacaaagatggcagagaggtgcagggcacccgctcccagccaggcaccacccctgcgtgtatacccaccgtcgctccacccatggtccggcccacgccccggccagatgtgacccctccatctgtgggcaccttcctgctctatactcagggccagcagattggctacttacccctcaatggcaccaggcttcagaaggatgcagctaagaccctgctgtctctgcatggctccataatcgtgggaattgattacgactgccgggagaggatggtgtactggacagatgttgctggacggacaatcagccgtgctggtctggaactgggagcagagcctgagacgatcgtgaattcaggtctgataagccctgaaggacttgccatagaccacatccgcagaacaatgtactggacggacagtgtcctggataagatagagagcgccctgctggatggctctgagcgcaaggtcctcttctacacagatctggtgaatccccgtgccatcgctgtggatccaatccgaggcaacttgtactggacagactggaatagagaagctcctaaaattgaaacgtcatctttagatggagaaaacagaagaattctgatcaatacagacattggattgcccaatggcttaacctttgaccctttctctaaactgctctgctgggcagatgcaggaaccaaaaaactggagtgtacactacctgatggaactggacggcgtgtcattcaaaacaacctcaagtaccccttcagcatcgtaagctatgcagatcacttctaccacacagactggaggagggatggtgttgtatcagtaaataaacatagtggccagtttactgatgagtatctcccagaacaacgatctcacctctacgggataactgcagtctacccctactgcccaacaggaagaaagtaagtacagtaatgtaaaggaagacttggagtttacaatcagaacctggaccctaaagaacagtgactgcaaaggcaaagaaagtaaaaaaggaattggccattagacgttcctgagcatccaagatgaacattttgtagtgcaaaaagacttttgtgaaaagctgatacctcaatctttactactgtatttttaaaaatgaaggttgttattgcaagtttaaaaaggtaacagaattttaactgttgcttattaaagcaacttcttgtaaacatttatcattaatatttaaaagatcaaattcattcaactaagaattagagtttaagactctaaacctgatttttgccatggattccttctggccaagaaattaaagcacatgtgatcaatataacaatataatcctaaaccttgacagttggagaagccaatgcagaactgatgggaaaggaccaattatttatagtttcccaacaaaagttctaagattttttacctctgcatcagtgcatttctatttatatcaaaaggtgctaaaatgattcaatttgcattttctgatcctgtagtgcctctatagaagtacccacagaaagtaaagtatcacatttataaataccaaagatgtaacaattttaaaattttctagattactccaataaagtgttttaagttttcctatg

SEQ ID NO: 20256 - DNA, 3543 bp, Homo sapiens
  source 1..3543: mol_type = unassigned DNA
actccccaaacggagcggatcacacacagtagtatttcatggtctttcctgctgcggttttcccgggggaagttgctaatgttgcgggccgcggcgctgcacccagacgagctcttcccacacggggagtcgtggggggaccagctcctgcaggaaggcgacgacgaaagctcagccgtggtgaagctggcgaatcccctgcacttctacgaagcccgattcagcaacctctacgtgggcaccaacggcatcatctccactcaggacttccccagggaaacgcagtatgtggactatgatttccccaccgacttcccggccatcgccccttttctggcggacatcgacacgagccacggcagaggccgagtcctgtaccgagaggacacctcccccgcagtgctgggcctggccgcccgctatgtgcgcgctggcttcccgcgctctgcgcgctttacccccacccacgccttcctggccacctgggagcaggtaggcgcttacgaggaggtcaagcgcggggcgctgccctcgggagagctgaacactttccaggcagttttggcatctgatgggtctgatagctacgccctctttctttatcctgccaacggcctgcagttccttggaacccgccccaaagagtcttacaatgtccagcttcagcttccagctcgggtgggcttctgccgaggggaggctgatgatctgaagtcagaaggaccatatttcagcttgactagcactgaacagtctgtgaaaaatctctatcaactaagcaacctggggatccctggagtgtgggctttccatatcggcagcacttccccgttggacaatgtcaggccagctgcagttggagacctttccgctgcccactcttctgttcccctgggacgttccttcagccatgctacagccctggaaagtgactataatgaggacaatttggattactatgatgtgaatgaggaggaagctgaataccttccgggtgaaccagaggaggcattgaatggccacagcagcattgatgtttccttccaatccaaagtggatacaaagcctttagaggaatcttccaccttggatcctcacaccaaagaaggaacatctctgggagaggtagggggcccagatttaaaaggccaagttgagccctgggatgagagagagaccagaagcccagctccaccagaggtagacagagattcactggctccttcctgggaaaccccaccaccgtaccccgaaaacggaagcatccagccctacccagatggagggccagtgccttcggaaatggatgttcccccagctcatcctgaagaagaaattgttcttcgaagttaccctgcttcaggtcacactacacccttaagtcgagggacgtatgaggtgggactggaagacaacataggttccaacaccgaggtcttcacgtataatgctgccaacaaggaaacctgtgaacacaaccacagacaatgctcccggcatgccttctgcacggactatgccactggcttctgctgccactgccaatccaagttttatggaaatgggaagcactgtctgcctgaaggggcacctcaccgagtgaatgggaaagtgagtggccacctccacgtgggccatacacccgtgcacttcactgatgtggacctgcatgcgtatatcgtgggcaatgatggcagagcctacacggccatcagccacatcccacagccagcagcccaggccctcctccccctcacaccaattggaggcctgtttggctggctctttgctttagaaaaacctggctctgagaacggcttcagcctcgcaggtgctgcctttacccatgacatggaagttacattctacccgggagaggagacggttcgtatcactcaaactgctgagggacttgacccagagaactacctgagcattaagaccaacattcaaggccaggtgccttacgtctcagcaaatttcacagcccacatctctccctacaaggagctgtaccactactccgactccactgtgacctctacaagttccagagactactctctgacttttggtgcaatcaaccaaacatggtcctaccgcatccaccagaacatcacttaccaggtgtgcaggcacgcccccagacacccgtccttccccaccacccagcagctgaacgtggaccgggtctttgccttgtataatgacgaagaaagagtgcttagatttgctgtgaccaatcaaattggcccggtcaaagaggattcagaccccactccggggaatccttgctatgatgggagccacatgtgtgacacaacagcacggtgccatccagggacaggtgtagattacacctgtgagtgcgcatctgggtaccagggagatggacggaactgtgtggatgaaaatgaatgtgcaactggctttcatcgctgtggccccaactctgtatgtatcaacttgcctggaagctacaggtgtgagtgccggagtggttatgagtttgcagatgaccggcatacttgcatcttgatcaccccacctgccaacccctgtgaggatggcagtcatacctgtgctcctgctgggcaggcccggtgtgttcaccatggaggcagcacgttcagctgtgcctgcctgcctggttatgccggcgatgggcaccagtgcactgatgtagatgaatgctcagaaaacagatgtcaccctgcagctacctgctacaatactcctggttccttctcctgccgttgtcaacccggatattatggggatggatttcagtgcatacctgactccacctcaagcctgacaccctgtgaacaacagcagcgccatgcccaggcccagtatgcctaccctggggcccggttccacatcccccaatgcgacgagcagggcaacttcctgcccctacagtgtcatggcagcactggtttctgctggtgcgtggaccctgatggtcatgaagttcctggtacccagactccacctggctccaccccgcctcactgtggaccatcaccagagcccacccagaggcccccgaccatctgtgagcgctggagggaaaacctgctggagcactacggtggcaccccccgggatgaccagtacgtgccccagtgcgatgacctgggccacttcatccccctgcagtgccacggaaagagcgacttctgctggtgtgtggacaaagatggcagagaggtgcagggcacccgctcccagccaggcaccacccctgcgtgtatacccaccgtcgctccacccatggtccggcccacgccccggccagatgtgacccctccatctgtgggcaccttcctgctctatactcagggccagcagattggctacttacccctcaatggcaccaggcttcagaaggatgcagctaagaccctgctgtctctgcatgtaaagtggatttctcctgtagggggcagggctgcgtggctttcccagtgggagccacctcacaggccctgttgcagtgaggtggactggtgcagggaagtcctggagggtttctga

SEQ ID NO: 20257 - DNA, 4508 bp, Homo sapiens
  source 1..4508: mol_type = unassigned DNA
atggagggggaccgggtgaagctggcgaatcccctgcacttctacgaagcccgattcagcaacctctacgtgggcaccaacggcatcatctccactcaggacttccccagggaaacgcagtatgtggactatgatttccccaccgacttcccggccatcgccccttttctggcggacatcgacacgagccacggcagaggccgagtcctgtaccgagaggacacctcccccgcagtgctgggcctggccgcccgctatgtgcgcgctggcttcccgcgctctgcgcgctttacccccacccacgccttcctggccacctgggagcaggtaggcgcttacgaggaggtcaagcgcggggcgctgccctcgggagagctgaacactttccaggcagttttggcatctgatgggtctgatagctacgccctctttctttatcctgccaacggcctgcagttccttggaacccgccccaaagagtcttacaatgtccagcttcagcttccagctcgggtgggcttctgccgaggggaggctgatgatctgaagtcagaaggaccatatttcagcttgactagcactgaacagtctgtgaaaaatctctatcaactaagcaacctggggatccctggagtgtgggctttccatatcggcagcacttccccgttggacaatgtcaggccagctgcagttggagacctttccgctgcccactcttctgttcccctgggacgttccttcagccatgctacagccctggaaagtgactataatgaggacaatttggattactatgatgtgaatgaggaggaagctgaataccttccgggtgaaccagaggaggcattgaatggccacagcagcattgatgtttccttccaatccaaagtggatacaaagcctttagaggaatcttccaccttggatcctcacaccaaagaaggaacatctctgggagaggtagggggcccagatttaaaaggccaagttgagccctgggatgagagagagaccagaagcccagctccaccagaggtagacagagattcactggctccttcctgggaaaccccaccaccgtaccccgaaaacggaagcatccagccctacccagatggagggccagtgccttcggaaatggatgttcccccagctcatcctgaagaagaaattgttcttcgaagttaccctgcttcaggtcacactacacccttaagtcgagggacgtatgaggtgggactggaagacaacataggttccaacaccgaggtcttcacgtataatgctgccaacaaggaaacctgtgaacacaaccacagacaatgctcccggcatgccttctgcacggactatgccactggcttctgctgccactgccaatccaagttttatggaaatgggaagcactgtctgcctgaaggggcacctcaccgagtgaatgggaaagtgagtggccacctccacgtgggccatacacccgtgcacttcactgatgtggacctgcatgcgtatatcgtgggcaatgatggcagagcctacacggccatcagccacatcccacagccagcagcccaggccctcctccccctcacaccaattggaggcctgtttggctggctctttgctttagaaaaacctggctctgagaacggcttcagcctcgcaggtgctgcctttacccatgacatggaagttacattctacccgggagaggagacggttcgtatcactcaaactgctgagggacttgacccagagaactacctgagcattaagaccaacattcaaggccaggtgccttacgtctcagcaaatttcacagcccacatctctccctacaaggagctgtaccactactccgactccactgtgacctctacaagttccagagactactctctgacttttggtgcaatcaaccaaacatggtcctaccgcatccaccagaacatcacttaccaggtgtgcaggcacgcccccagacacccgtccttccccaccacccagcagctgaacgtggaccgggtctttgccttgtataatgacgaagaaagagtgcttagatttgctgtgaccaatcaaattggcccggtcaaagaggattcagaccccactccggggaatccttgctatgatgggagccacatgtgtgacacaacagcacggtgccatccagggacaggtgtagattacacctgtgagtgcgcatctgggtaccagggagatggacggaactgtgtggatgaaaatgaatgtgcaactggctttcatcgctgtggccccaactctgtatgtatcaacttgcctggaagctacaggtgtgagtgccggagtggttatgagtttgcagatgaccggcatacttgcatctatgtagatgaatgctcagaaaacagatgtcaccctgcagctacctgctacaatactcctggttccttctcctgccgttgtcaacccggatattatggggatggatttcagtgcatacctgactccacctcaagcctgacaccctgtgaacaacagcagcgccatgcccaggcccagtatgcctaccctggggcccggttccacatcccccaatgcgacgagcagggcaacttcctgcccctacagtgtcatggcagcactggtttctgctggtgcgtggaccctgatggtcatgaagttcctggtacccagactccacctggctccaccccgcctcactgtggaccatcaccagagcccacccagaggcccccgaccatctgtgagcgctggagggaaaacctgctggagcactacggtggcaccccccgggatgaccagtacgtgccccagtgcgatgacctgggccacttcatccccctgcagtgccacggaaagagcgacttctgctggtgtgtggacaaagatggcagagaggtgcagggcacccgctcccagccaggcaccacccctgcgtgtatacccaccgtcgctccacccatggtccggcccacgccccggccagatgtgacccctccatctgtgggcaccttcctgctctatactcagggccagcagattggctacttacccctcaatggcaccaggcttcagaaggatgcagctaagaccctgctgtctctgcatggctccataatcgtgggaattgattacgactgccgggagaggatggtgtactggacagatgttgctggacggacaatcagccgtgctggtctggaactgggagcagagcctgagacgatcgtgaattcaggtctgataagccctgaaggacttgccatagaccacatccgcagaacaatgtactggacggacagtgtcctggataagatagagagcgccctgctggatggctctgagcgcaaggtcctcttctacacagatctggtgaatccccgtgccatcgctgtggatccaatccgaggcaacttgtactggacagactggaatagagaagctcctaaaattgaaacgtcatctttagatggagaaaacagaagaattctgatcaatacagacattggattgcccaatggcttaacctttgaccctttctctaaactgctctgctgggcagatgcaggaaccaaaaaactggagtgtacactacctgatggaactggacggcgtgtcattcaaaacaacctcaagtaccccttcagcatcgtaagctatgcagatcacttctaccacacagactggaggagggatggtgttgtatcagtaaataaacatagtggccagtttactgatgagtatctcccagaacaacgatctcacctctacgggataactgcagtctacccctactgcccaacaggaagaaagtaagtacagtaatgtaaaggaagacttggagtttacaatcagaacctggaccctaaagaacagtgactgcaaaggcaaagaaagtaaaaaaggaattggccattagacgttcctgagcatccaagatgaacattttgtagtgcaaaaagacttttgtgaaaagctgatacctcaatctttactactgtatttttaaaaatgaaggttgttattgcaagtttaaaaaggtaacagaattttaactgttgcttattaaagcaacttcttgtaaacatttatcattaatatttaaaagatcaaattcattcaactaagaattagagtttaagactctaaacctgatttttgccatggattccttctggccaagaaattaaagcacatgtgatcaatataacaatataatcctaaaccttgacagttggagaagccaatgcagaactgatgggaaaggaccaattatttatagtttcccaacaaaagttctaagattttttacctctgcatcagtgcatttctatttatatcaaaaggtgctaaaatgattcaatttgcattttctgatcctgtagtgcctctatagaagtacccacagaaagtaaagtatcacatttataaataccaaagatgtaacaattttaaaattttctagattactccaataaagtgttttaagttttcctatg

SEQ ID NO: 20258 - DNA, 4741 bp, Homo sapiens
  source 1..4741: mol_type = unassigned DNA
gctgccgcggtcagcgcctgctcctgctcctccgctcctcctgcgcggggtgctgaaacagcccggggaagtagagccgcctccggggagcccaaccagccgaacgccgccggcgtcagcagccttgcgcggccacagcatgaccgctcgcggcctggcccttggcctcctcctgctgctactgtgtccagcgcaggtgttttcacagtcctgtgtttggtatggagagtgtggaattgcatatggggacaagaggtacaattgcgaatattctggcccaccaaaaccattgccaaaggatggatatgacttagtgcaggaactctgtccaggattcttctttggcaatgtcagtctctgttgtgatgttcggcagcttcagacactaaaagacaacctgcagctgcctctacagtttctgtccagatgtccatcctgtttttataacctactgaacctgttttgtgagctgacatgtagccctcgacagagtcagtttttgaatgttacagctactgaagattatgttgatcctgttacaaaccagacgaaaacaaatgtgaaagagttacaatactacgtcggacagagttttgccaatgcaatgtacaatgcctgccgggatgtggaggccccctcaagtaatgacaaggccctgggactcctgtgtgggaaggacgctgacgcctgtaatgccaccaactggattgaatacatgttcaataaggacaatggacaggcaccttttaccatcactcctgtgttttcagattttccagtccatgggatggagcccatgaacaatgccaccaaaggctgtgacgagtctgtggatgaggtcacagcaccatgtagctgccaagactgctctattgtctgtggccccaagccccagcccccacctcctcctgctccctggacgatccttggcttggacgccatgtatgtcatcatgtggatcacctacatggcgtttttgcttgtgttttttggagcattttttgcagtgtggtgctacagaaaacggtattttgtctccgagtacactcccatcgatagcaatatagctttttctgttaatgcaagtgacaaaggagaggcgtcctgctgtgaccctgtcagcgcagcatttgagggctgcttgaggcggctgttcacacgctgggggtctttctgcgtccgaaaccctggctgtgtcattttcttctcgctggtcttcattactgcgtgttcgtcaggcctggtgtttgtccgggtcacaaccaatccagttgacctctggtcagcccccagcagccaggctcgcctggaaaaagagtactttgaccagcactttgggcctttcttccggacggagcagctcatcatccgggcccctctcactgacaaacacatttaccagccatacccttcgggagctgatgtaccctttggacctccgcttgacatacagatactgcaccaggttcttgacttacaaatagccatcgaaaacattactgcctcttatgacaatgagactgtgacacttcaagacatctgcttggcccctctttcaccgtataacacgaactgcaccattttgagtgtgttaaattacttccagaacagccattccgtgctggaccacaagaaaggggacgacttctttgtgtatgccgattaccacacgcactttctgtactgcgtacgggctcctgcctctctgaatgatacaagtttgctccatgacccttgtctgggtacgtttggtggaccagtgttcccgtggcttgtgttgggaggctatgatgatcaaaactacaataacgccactgcccttgtgattaccttccctgtcaataattactataatgatacagagaagctccagagggcccaggcctgggaaaaagagtttattaattttgtgaaaaactacaagaatcccaatctgaccatttccttcactgctgaacgaagtattgaagatgaactaaatcgtgaaagtgacagtgatgtcttcaccgttgtaattagctatgccatcatgtttctatatatttccctagccttggggcacatgaaaagctgtcgcaggcttctggtggattcgaaggtctcactaggcatcgcgggcatcttgatcgtgctgagctcggtggcttgctccttgggtgtcttcagctacattgggttgcccttgaccctcattgtgattgaagtcatcccgttcctggtgctggctgttggagtggacaacatcttcattctggtgcaggcctaccagagagatgaacgtcttcaaggggaaaccctggatcagcagctgggcagggtcctaggagaagtggctcccagtatgttcctgtcatccttttctgagactgtagcatttttcttaggagcattgtccgtgatgccagccgtgcacaccttctctctctttgcgggattggcagtcttcattgactttcttctgcagattacctgtttcgtgagtctcttggggttagacattaaacgtcaagagaaaaatcggctagacatcttttgctgtgtcagaggtgctgaagatggaacaagcgtccaggcctcagagagctgtttgtttcgcttcttcaaaaactcctattctccacttctgctaaaggactggatgagaccaattgtgatagcaatatttgtgggtgttctgtcattcagcatcgcagtcctgaacaaagtagatattggattggatcagtctctttcgatgccagatgactcctacatggtggattatttcaaatccatcagtcagtacctgcatgcgggtccgcctgtgtactttgtcctggaggaagggcacgactacacttcttccaaggggcagaacatggtgtgcggcggcatgggctgcaacaatgattccctggtgcagcagatatttaacgcggcgcagctggacaactatacccgaataggcttcgccccctcgtcctggatcgacgattatttcgactgggtgaagccacagtcgtcttgctgtcgagtggacaatatcactgaccagttctgcaatgcttcagtggttgaccctgcctgcgttcgctgcaggcctctgactccggaaggcaaacagaggcctcaggggggagacttcatgagattcctgcccatgttcctttcggataaccctaaccccaagtgtggcaaagggggacatgctgcctatagttctgcagttaacatcctccttggccatggcaccagggtcggagccacgtacttcatgacctaccacaccgtgctgcagacctctgctgactttattgacgctctgaagaaagcccgacttatagccagtaatgtcaccgaaaccatgggcattaacggcagtgcctaccgagtatttccttacagtgtgttttatgtcttctacgaacagtacctgaccatcattgacgacactatcttcaacctcggtgtgtccctgggcgcgatatttctggtgaccatggtcctcctgggctgtgagctctggtctgcagtcatcatgtgtgccaccatcgccatggtcttggtcaacatgtttggagttatgtggctctggggcatcagtctgaacgctgtatccttggtcaacctggtgatgagctgtggcatctccgtggagttctgcagccacataaccagagcgttcacggtgagcatgaaaggcagccgcgtggagcgcgcggaagaggcacttgcccacatgggcagctccgtgttcagtggaatcacacttacaaaatttggagggattgtggtgttggcttttgccaaatctcaaattttccagatattctacttcaggatgtatttggccatggtcttactgggagccactcacggattaatatttctccctgtcttactcagttacatagggccatcagtaaataaagccaaaagttgtgccactgaagagcgatacaaaggaacagagcgcgaacggcttctaaatttctagccctctcgcagggcatcctgactgaactgtgtctaagggtcggtcggtttaccactggacgggtgctgcatcggcaaggccaagttgaacaccggatggtgccaaccatcggttgtttggcagcagctttgaacgtagcgcctgtgaactcaggaatgcacagttgacttgggaagcagtattactagatctggaggcaaccacaggacactaaacttctcccagcctcttcaggaaagaaacctcattctttggcaagcaggaggtgacactagatggctgtgaatgtgatccgctcactgacactctgtaaaggccaatcaatgcactgtctgtctctccttttaggagtaagccatcccacaagttctataccatatttttagtgacagttgaggttgtagatacactttataacattttatagtttaaagagctttattaatgcaataaattaactttgtacacatttttatataaaaaaacagcaagtgatttcagaatgttgtaggcctcattagagcttggtctccaaaaatctgtttgaaaaaagcaacatgttcttcacagtgttcccctagaaaggaagagatttaattgccagttagatgtggcatgaaatgagggacaaagaaagcatctcgtaggtgtgtctactgggttttaacttatttttctttaataaaatacattgttttcctaagttttggggttaccctatctgctttgagagacaaatacaaaagctaaatggaagagattcta

SEQ ID NO: 20259 - DNA, 3171 bp, Homo sapiens
  source 1..3171: mol_type = unassigned DNA
ctgctccctggacgatccttggcttggacgccatgtatgtcatcatgtggatcacctacatggcgtttttgcttgtgttttttggagcattttttgcagtgtggtgctacagaaaacggtattttgtctccgagtacactcccatcgatagcaatatagctttttctgttaatgcaagtgacaaaggaacggcttggctcttaacctccaccttcccttcctctcccgttcttccaggagaggcgtcctgctgtgaccctgtcagcgcagcatttgagggctgcttgaggcggctgttcacacgctgggggtctttctgcgtccgaaaccctggctgtgtcattttcttctcgctggtcttcattactgcgtgttcgtcaggcctggtgtttgtccgggtcacaaccaatccagttgacctctggtcagcccccagcagccaggctcgcctggaaaaagagtactttgaccagcactttgggcctttcttccggacggagcagctcatcatccgggcccctctcactgacaaacacatttaccagccatacccttcgggagctgatgtaccctttggacctccgcttgacatacagatactgcaccaggttcttgacttacaaatagccatcgaaaacattactgcctcttatgacaatgagactgtgacacttcaagacatctgcttggcccctctttcaccgtataacacgaactgcaccattttgagtgtgttaaattacttccagaacagccattccgtgctggaccacaagaaaggggacgacttctttgtgtatgccgattaccacacgcactttctgtactgcgtacggtttattaattttgtgaaaaactacaagaatcccaatctgaccatttccttcactgctgaacgaagtattgaagatgaactaaatcgtgaaagtgacagtgatgtcttcaccgttgtaattagctatgccatcatgtttctatatatttccctagccttggggcacatgaaaagctgtcgcaggcttctggtggattcgaaggtctcactaggcatcgcgggcatcttgatcgtgctgagctcggtggcttgctccttgggtgtcttcagctacattgggttgcccttgaccctcattgtgattgaagtcatcccgttcctggtgctggctgttggagtggacaacatcttcattctggtgcaggcctaccagagagatgaacgtcttcaaggggaaaccctggatcagcagctgggcagggtcctaggagaagtggctcccagtatgttcctgtcatccttttctgagactgtagcatttttcttaggagcattgtccgtgatgccagccgtgcacaccttctctctctttgcgggattggcagtcttcattgactttcttctgcagattacctgtttcgtgagtctcttggggttagacattaaacgtcaagagaaaaatcggctagacatcttttgctgtgtcagaggtgctgaagatggaacaagcgtccaggcctcagagagctgtttgtttcgcttcttcaaaaactcctattctccacttctgctaaaggactggatgagaccaattgtgatagcaatatttgtgggtgttctgtcattcagcatcgcagtcctgaacaaagtagatattggattggatcagtctctttcgatgccagatgactcctacatggtggattatttcaaatccatcagtcagtacctgcatgcgggtccgcctgtgtactttgtcctggaggaagggcacgactacacttcttccaaggggcagaacatggtgtgcggcggcatgggctgcaacaatgattccctggtgcagcagatatttaacgcggcgcagctggacaactatacccgaataggcttcgccccctcgtcctggatcgacgattatttcgactgggtgaagccacagtcgtcttgctgtcgagtggacaatatcactgaccagttctgcaatgcttcagtggttgaccctgcctgcgttcgctgcaggcctctgactccggaaggcaaacagaggcctcaggggggagacttcatgagattcctgcccatgttcctttcggataaccctaaccccaagtgtggcaaagggggacatgctgcctatagttctgcagttaacatcctccttggccatggcaccagggtcggagccacgtacttcatgacctaccacaccgtgctgcagacctctgctgactttattgacgctctgaagaaagcccgacttatagccagtaatgtcaccgaaaccatgggcattaacggcagtgcctaccgagtatttccttacagtgtgttttatgtcttctacgaacagtacctgaccatcattgacgacactatcttcaacctcggtgtgtccctgggcgcgatatttctggtgaccatggtcctcctgggctgtgagctctggtctgcagtcatcatgtgtgccaccatcgccatggtcttggtcaacatgtttggagttatgtggctctggggcatcagtctgaacgctgtatccttggtcaacctggtgatgagctgtggcatctccgtggagttctgcagccacataaccagagcgttcacggtgagcatgaaaggcagccgcgtggagcgcgcggaagaggcacttgcccacatgggcagctccgtgttcagtggaatcacacttacaaaatttggagggattgtggtgttggcttttgccaaatctcaaattttccagatattctacttcaggatgtatttggccatggtcttactgggagccactcacggattaatatttctccctgtcttactcagttacatagggccatcagtaaataaagccaaaagttgtgccactgaagagcgatacaaaggaacagagcgcgaacggcttctaaatttctagccctctcgcagggcatcctgactgaactgtgtctaagggtcggtcggtttaccactggacgggtgctgcatcggcaaggccaagttgaacaccggatggtgccaaccatcggttgtttggcagcagctttgaacgtagcgcctgtgaactcaggaatgcacagttgacttgggaagcagtattactagatctggaggcaaccacaggacactaaacttctcccagcctcttcaggaaagaaacctcattctttggc

SEQ ID NO: 20260 - DNA, 2790 bp, Homo sapiens
  source 1..2790: mol_type = unassigned DNA
agcctgctgccgcggtcagcgcctgctcctgctcctccgctcctcctgcgcggggtgctgaaacagcccggggaagtagagccgcctccggggagcccaaccagccgaacgccgccggcgtcagcagccttgcgcggccacagcatgaccgctcgcggcctggcccttggcctcctcctgctgctactgtgtccagcgcagatgtccatcctgtttttataacctactgaacctgttttgtgagctgacatgtagccctcgacagagtcagtttttgaatgttacagctactgaagattatgttgatcctgttacaaaccagacgaaaacaaatgtgaaagagttacaatactacgtcggacagagttttgccaatgcaatgtacaatgcctgccgggatgtggaggccccctcaagtaatgacaaggccctgggactcctgtgtgggaaggacgctgacgcctgtaatgccaccaactggattgaatacatgttcaataaggacaatggacaggcaccttttaccatcactcctgtgttttcagattttccagtccatgggatggagcccatgaacaatgccaccaaaggctgtgacgagtctgtggatgaggtcacagcaccatgtagctgccaagactgctctattgtctgtggccccaagccccagcccccacctcctcctgctccctggacgatccttggcttggacgccatgtatgtcatcatgtggatcacctacatggcgtttttgcttgtgttttttggagcattttttgcagtgtggtgctacagaaaacggtattttgtctccgagtacactcccatcgatagcaatatagctttttctgttaatgcaagtgacaaaggagaggcgtcctgctgtgaccctgtcagcgcagcatttgagggctgcttgaggcggctgttcacacgctgggggtctttctgcgtccgaaaccctggctgtgtcattttcttctcgctggtcttcattactgcgtgttcgtcaggcctggtgtttgtccgggtcacaaccaatccagttgacctctggtcagcccccagcagccaggctcgcctggaaaaagagtactttgaccagcactttgggcctttcttccggacggagcagctcatcatccgggcccctctcactgacaaacacatttaccagccatacccttcgggagctgatgtaccctttggacctccgcttgacatacagatactgcaccaggttcttgacttacaaatagccatcgaaaacattactgcctcttatgacaatgagactgtgacacttcaagacatctgcttggcccctctttcaccgtataacacgaactgcaccattttgagtgtgttaaattacttccagaacagccattccgtgctggaccacaagaaaggggacgacttctttgtgtatgccgattaccacacgcactttctgtactgcgtacgggctcctgcctctctgaatgatacaagtttgctccatgacccttgtctgggtacgtttggtggaccagtgttcccgtggcttgtgttgggaggctatgatgatcaaaactacaataacgccactgcccttgtgattaccttccctgtcaataattactataatgatacagagaagctccagagggcccaggcctgggaaaaagagtttattaattttgtgaaaaactacaagaatcccaatctgaccatttccttcactgctgaacgaagtattgaagatgaactaaatcgtgaaagtgacagtgatgtcttcaccgttgtaattagctatgccatcatgtttctatatatttccctagccttggggcacatgaaaagctgtcgcaggcttctggtggattcgaaggtctcactaggcatcgcgggcatcttgatcgtgctgagctcggtggcttgctccttgggtgtcttcagctacattgggttgcccttgaccctcattgtgattgaagtcatcccgttcctggtgctggctgttggagtggacaacatcttcattctggtgcaggcctaccagagagatgaacgtcttcaaggggaaaccctggatcagcagctgggcagggtcctaggagaagtggctcccagtatgttcctgtcatccttttctgagactgtagcatttttcttaggagcattgtccgtgatgccagccgtgcacaccttctctctctttgcgggattggcagtcttcattgactttcttctgcagattacctgtttcgtgagtctcttggggttagacattaaacgtcaagagaaaaatcggctagacatcttttgctgtgtcagaggtgctgaagatggaacaagcgtccaggcctcagagagctgtttgtttcgcttcttcaaaaactcctattctccacttctgctaaaggactggatgagaccaattgtgatagcaatatttgtgggtgttctgtcattcagcatcgcagtcctgaacaaagtagatattggattggatcagtctctttcgatgccagatgactcctacatggtggattatttcaaatccatcagtcagtacctgcatgcgggtccgcctgtgtactttgtcctggaggaagggcacgactacacttcttccaaggggcagaacatggtgtgcggcggcatgggctgcaacaatgattccctggtgcagcagatatttaacgcggcgcagctggacaactagtcagtaccaccttgtcttgtacttcagaagcagcggaggaggctctcagccaggcagtcagctcaggcctgaaatgtctc

SEQ ID NO: 20261 - DNA, 469 bp, Homo sapiens
  source 1..469: mol_type = unassigned DNA
agacggcagcggcggggacgcacccaggaagccggagaggtttgtcttgtgaccgcgggcggccgctgcttctttcccgagcttggaacttcgttatccgcgatgcgtttcctggcagctacattcctgctcctggcgctcagcaccgctgcccaggccgaaccggtgcagttcaaggactgcggttctgtggatggagttataaaggaagtgaatgtgagcccatgccccacccaaccctgccagctgagcaaaggacagtcttacagcgtcaatgtcaccttcaccagcaatattcagtctaaaagcagcaaggccgtggtgcatggcatcctgatgggcgtcccagttccctttcccattcctgagcctgatggttgtaagagtggaattaactgccctatccaaaaagacaagacctatagctacctgaataaactaccagtgaaaagcgaatatccctctgtaa

SEQ ID NO: 20262 - DNA, 1035 bp, Homo sapiens
  source 1..1035: mol_type = unassigned DNA
ggtccgggcgggtcaggcctctgaggggatggcatgggcggagactgcaggcttctgggcctgagagggctggagctggctttccggagccgggggcggggcgcgggcgggcctcagctgtggttactggtgacaggtcgcctgactgggctcctccccgggcccgccccgacaggtttgtcttgtgaccgcgggcggccgctgcttctttcccgagcttggaacttcgttatccgcgatgcgtttcctggcagctacattcctgctcctggcgctcagcaccgctgcccaggccgaaccggtgcagttcaaggactgcggttctgtggatggagttataaaggaagtgaatgtgagcccatgccccacccaaccctgccagctgagcaaaggacagtcttacagcgtcaatgtcaccttcaccagcaatattcagtctaaaagcagcaaggccgtggtgcatggcatcctgatgggcgtcccagttccctttcccattcctgagcctgatggttgtaagagtggaattaactgccctatccaaaaagacaagacctatagctacctgaataaactaccagtgaaaagcgaatatccctctataaaactggtggtggagtggcaacttcaggatgacaaaaaccaaagtctcttctgctgggaaatcccagtacagatcgtttctcatctctaagtgcctcattgagttcggtgcatctggccaatgagtctgctgagactcttgacagcacctccagctctgctgcttcaacaacagtgacttgctctccaatggtatccagtgattcgttgaagaggaggtgctctgtagcagaaactgagctccgggtggctggttctcagtggttgtctcatgtctctttttctgtcttaggtggtttcattaaatgcagcacttggttagcagatgtttaattttttttttaacaacattaacttgtggcctctttctacacctggaaatttactcttgaataaataaaaactcgtttgtcttgtcttctgcatgtgggc

SEQ ID NO: 20263 - DNA, 1626 bp, Homo sapiens
  source 1..1626: mol_type = unassigned DNA
actggtgagtagtgggcgatttaaaaacccgcgagtgtagttgtgaccttcgcggtaggtgccggttggggccggctgtgattgttatcttggtgctgcagaggacagcagaagaggagattgggtcagaaaactgccctgccgcaccagagcacagcgcactagtgggacaggggtcctgactcagacttaactggctgtgtctcgtggtttttcactgtcctggaaaaggcctgaagtggcactgaaatgaggcatagatgagtccccacgacagtccggtttgtagattccctgatctgcaattcttcccgttccttcatggatttgaaggctctcctttcttccttgaatgactttgcatccctctcgtttgctgagagttgggacaatgttggattactggtggaaccaagcccaccacatactgtaaatacactcttcctgaccaatgacctgactgaggaagtgatggaggaggtgctgcaaaagaaggcagacctcattctctcctaccatccgcctatcttccgacccatgaagcgcataacctggaacacatggaaggagcgcctggtgatccgggctctggagaacagagtcggtatctactctcctcatacagcctatgatgctgcgccccagggcgtcaacaactggttggctaaagggcttggagcttgtacctccaggcccatacatccttccaaagctcccaactaccctacagagggaaaccaccgagtagaattcaacgttaactacacccaagacctggacaaagtcatgtctgcagtgaaaggaattgacggtgtttctgtcacttctttttctgctaggactggtaatgaggaacaaacacggattaatctgaattgtactcagaaggctttgatgcaggtggtagattttctttcccggaacaaacaactttatcagaagacggaaattctgtcactggagaagcctttgcttctacatactggaatgggacggttatgcacactggatgaatctgtctccctggcaaccatgattgatcgaataaaaagacacctaaaactatctcatattcgcttagcccttggggtggggagaaccttagagtctcaagtcaaagtcgtggccctgtgtgctggttctgggagcagcgttctgcagggtgttgaggctgacctttacctcacaggtgagatgtcccatcatgatactttggatgctgcttcccaaggaataaatgtcatcctctgtgaacacagcaacactgaacgaggctttctttctgaccttcgagatatgctggattctcacttggagaataagataaatattatcctatcagagactgacagggaccctcttcaggtggtataattgcagaaacatcaggataacacattctacaaatcagctggatgccaacttaaatttgtaacatgagtcagtgggactggtgtgcttccagagagtgtcttcgagggtatcatcatttccggtttgttaatcttattcaccaaatgttctatcgctcgtaaggtaaaactgtaatataactaccatattaaataacaaatgttcattataaactctaggaaagattgaataaaatctgtttacttaacattc

SEQ ID NO: 20264 - DNA, 967 bp, Homo sapiens
  source 1..967: mol_type = unassigned DNA
cagaaacttgaactttacctgatttctgtatgttgtcatcttgcgtacgcccagtccccacgacagtccggtttgtagattccctgatctgcaattcttcccgttccttcatggatttgaaggctctcctttcttccttgaatgactttgcatccctctcgtttgctgagagttgggacaatgttggattactggtggaaccaagcccaccacatactgtaaatacactcttcctgaccaatgacctgactgaggaagtgatggaggaggtgctgcaaaagaaggcagacctcattctctcctaccatccgcctatcttccgacccatgaagcgcataacctggaacacatggaaggagcgcctggtgatccgggctctggagaacagagtcggtatctactctcctcatacagcctatgatgctgcgccccagggcgtcaacaactggttggctaaagggcttggagcttgtacctccaggcccatacatccttccaaagctcccaactaccctacagagggaaaccaccgagtagaattcaacgttaactacacccaagacctggacaaagtcatgtctgcagtgaaaggaattgacggtgtttctgtcacttctttttctgctaggactggtaatgaggaacaaacacggattaatctgaattgtactcagaaggctttgatgcaggtggtagattttctttcccggaacaaacaactttatcagaaacatcaggataacacattctacaaatcagctggatgccaacttaaatttgtaacatgagtcagtgggactggtgtgcttccagagagtgtcttcgagggtatcatcatttccggtttgttaatcttattcaccaaatgttctatcgctcgtaaggtaaaactgtaatataactaccatattaaataacaaatgttcattataaactctaggaaagattgaataaaatctgtttactt

SEQ ID NO: 20265 - DNA, 1680 bp, Homo sapiens
  source 1..1680: mol_type = unassigned DNA
gggactggtgagtagtgggcgatttaaaaacccgcgagtgtagttgtgaccttcgcggtaggtgccggttggggccggctgtgattgttatcttggtgctgcagaggacagcagaagaggagattgggtcagaaaactgccctgccgcaccagagcacagcgcactagtgggacaggggtcctgactcagacttaactggctgtgtctcgtggtttttcactgtcctggaaaaggcctgaagtggcactgaaatgaggcatagatgagaaacttgaactttacctgatttctgtatgttgtcatcttgcgtacgcccagtccccacgacagtccggtttgtagattccctgatctgcaattcttcccgttccttcatggatttgaaggctctcctttcttccttgaatgactttgcatccctctcgtttgctgagagttgggacaatgttggattactggtggaaccaagcccaccacatactgtaaatacactcttcctgaccaatgacctgactgaggaagtgatggaggaggtgctgcaaaagaaggcagacctcattctctcctaccatccgcctatcttccgacccatgaagcgcataacctggaacacatggaaggagcgcctggtgatccgggctctggagaacagagtcggtatctactctcctcatacagcctatgatgctgcgccccagggcgtcaacaactggttggctaaagggcttggagcttgtacctccaggcccatacatccttccaaagctcccaactaccctacagagggaaaccaccgagtagaattcaacgttaactacacccaagacctggacaaagtcatgtctgcagtgaaaggaattgacggtgtttctgtcacttctttttctgctaggactggtaatgaggaacaaacacggattaatctgaattgtactcagaaggctttgatgcaggtggtagattttctttcccggaacaaacaactttatcagaagacggaaattctgtcactggagaagcctttgcttctacatactggaatgggacggttatgcacactggatgaatctgtctccctggcaaccatgattgatcgaataaaaagacacctaaaactatctcatattcgcttagcccttggggtggggagaaccttagagtctcaagtcaaagtcgtggccctgtgtgctggttctgggagcagcgttctgcagggtgttgaggctgacctttacctcacaggtgagatgtcccatcatgatactttggatgctgcttcccaaggaataaatgtcatcctctgtgaacacagcaacactgaacgaggctttctttctgaccttcgagatatgctggattctcacttggagaataagataaatattatcctatcagagactgacagggaccctcttcaggtggtataattgcagaaacatcaggataacacattctacaaatcagctggatgccaacttaaatttgtaacatgagtcagtgggactggtgtgcttccagagagtgtcttcgagggtatcatcatttccggtttgttaatcttattcaccaaatgttctatcgctcgtaaggtaaaactgtaatataactaccatattaaataacaaatgttcattataaactctaggaaagattgaataaaatctgtttacttaacattc

SEQ ID NO: 20266 - DNA, 813 bp, Homo sapiens
  source 1..813: mol_type = unassigned DNA
tgccggttggggccggctgtgattgttatcttggtgctgcagaggacagcagaagaggagattgggtcagaaaactgccctgccgcaccagagcacagcgcactagtgggacaggggtcctgactcagacttaactggctgtgtctcgtggtttttcactgtcctggaaaaggcctgaagtggcactgaaatgaggcatagatgagttggctatgctttcttattgtgcatactatgaaatgtttttcttcaaaaagtgtttataagtgtccccacgacagtccggtttgtagattccctgatctgcaattcttcccgttccttcatggatttgaaggctctcctttcttccttgaatgactttgcatccctctcgtttgctgagagttgggacaatgttggattactggtggaaccaagcccaccacatactgtaaatacactcttcctgaccaatgacctgactgaggaagtgatggaggaggtgctgcaaaagaaggcagacctcattctctcctaccatccgcctatcttccgacccatgaagcgcataacctggaacacatggaaggagcgcctggtgatccgggctctggagaacagagtcggtatctactctcctcatacagcctatgatgctgcgccccagggcgtcaacaactggttggctaaagggcttggagcttgtacctccaggcccatacatccttccaaagctcccaactaccctacagagggaaaccaccgagtagaattcaacgttaactacacccaagacctggacaaagtcatgtctgcagtgaaaggaattga

SEQ ID NO: 20267 - DNA, 1679 bp, Homo sapiens
  source 1..1679: mol_type = unassigned DNA
cccgcgagtgtagttgtgaccttcgcggtaggtgccggttggggccggctgtgattgttatcttggtgctgcagaggacagcagaagaggagattgggtcagaaaactgccctgccgcaccagagcacagcgcactagtgggacaggggtcctgactcagacttaactggctgtgtctcgtggtttttcactgtcctggaaaaggcctgaagtggcactgaaatgaggcatagatgagttggctatgctttcttattgtgcatactatgaaatgtttttcttcaaaaagtgtttataagtgaaacttgaactttacctgatttctgtatgttgtcatcttgcgtacgcccagtccccacgacagtccggtttgtagattccctgatctgcaattcttcccgttccttcatggatttgaaggctctcctttcttccttgaatgactttgcatccctctcgtttgctgagagttgggacaatgttggattactggtggaaccaagcccaccacatactgtaaatacactcttcctgaccaatgacctgactgaggaagtgatggaggaggtgctgcaaaagaaggcagacctcattctctcctaccatccgcctatcttccgacccatgaagcgcataacctggaacacatggaaggagcgcctggtgatccgggctctggagaacagagtcggtatctactctcctcatacagcctatgatgctgcgccccagggcgtcaacaactggttggctaaagggcttggagcttgtacctccaggcccatacatccttccaaagctcccaactaccctacagagggaaaccaccgagtagaattcaacgttaactacacccaagacctggacaaagtcatgtctgcagtgaaaggaattgacggtgtttctgtcacttctttttctgctaggactggtaatgaggaacaaacacggattaatctgaattgtactcagaaggctttgatgcaggtggtagattttctttcccggaacaaacaactttatcagaagacggaaattctgtcactggagaagcctttgcttctacatactggaatgggacggttatgcacactggatgaatctgtctccctggcaaccatgattgatcgaataaaaagacacctaaaactatctcatattcgcttagcccttggggtggggagaaccttagagtctcaagtcaaagtcgtggccctgtgtgctggttctgggagcagcgttctgcagggtgttgaggctgacctttacctcacaggtgagatgtcccatcatgatactttggatgctgcttcccaaggaataaatgtcatcctctgtgaacacagcaacactgaacgaggctttctttctgaccttcgagatatgctggattctcacttggagaataagataaatattatcctatcagagactgacagggaccctcttcaggtggtataattgcagaaacatcaggataacacattctacaaatcagctggatgccaacttaaatttgtaacatgagtcagtgggactggtgtgcttccagagagtgtcttcgagggtatcatcatttccggtttgttaatcttattcaccaaatgttctatcgctcgtaaggtaaaactgtaatataactaccatattaaataacaaatgttcattataaactctag

SEQ ID NO: 20268 - DNA, 1269 bp, Homo sapiens
  source 1..1269: mol_type = unassigned DNA
gaaacttgaactttacctgatttctgtatgttgtcatcttgcgtacgcccagtccccacgacagtccggtttgtagattccctgatctgcaattcttcccgttccttcatggatttgaaggctctcctttcttccttgaatgactttgcatccctctcgtttgctgagagttgggacaatgttggattactggtggaaccaagcccaccacatactgtaaatacactcttcctgaccaatgacctgactgaggaagtgatggaggaggtgctgcaaaagaaggcagacctcattctctcctaccatccgcctatcttccgacccatgaagcgcataacctggaacacatggaaggagcgcctggtgatccgggctctggagaacagagtcggtatctactctcctcatacagcctatgatgctgcgccccagggcgtcaacaactggttggctaaagggcttggagcttgtacctccaggcccatacatccttccaaagctcccaactaccctacagagggaaaccaccgagtagaattcaacgttaactacacccaagacctggacaaagtcatgtctgcagtgaaaggaattgacggtgtttctgtcacttctttttctgctaggactggtaatgaggaacaaacacggattaatctgaattgtactcagaaggctttgatgcaggtggtagattttctttcccggaacaaacaactttatcagaagacggaaattctgtcactggagaagagtctcaagtcaaagtcgtggccctgtgtgctggttctgggagcagcgttctgcagggtgttgaggctgacctttacctcacaggtgagatgtcccatcatgatactttggatgctgcttcccaaggaataaatgtcatcctctgtgaacacagcaacactgaacgaggctttctttctgaccttcgagatatgctggattctcacttggagaataagataaatattatcctatcagagactgacagggaccctcttcaggtggtataattgcagaaacatcaggataacacattctacaaatcagctggatgccaacttaaatttgtaacatgagtcagtgggactggtgtgcttccagagagtgtcttcgagggtatcatcatttccggtttgttaatcttattcaccaaatgttctatcgctcgtaaggtaaaactgtaatataactaccatattaaataacaaatgttcattataaactctaggaaagattgaataaaatctgtttacttaa

SEQ ID NO: 20269 - DNA, 1479 bp, Homo sapiens
  source 1..1479: mol_type = unassigned DNA
aagtgccacagcatccggagcgccgacgcgggaccggaagtgacgcagagaagtttccgggactgaaacttgaactttacctgatttctgtatgttgtcatcttgcgtacgcccagtccccacgacagtccggtttgtagattccctgatctgcaattcttcccgttccttcatggatttgaaggctctcctttcttccttgaatgactttgcatccctctcgtttgctgagagttgggacaatgttggattactggtggaaccaagcccaccacatactgtaaatacactcttcctgaccaatgacctgactgaggaagtgatggaggaggtgctgcaaaagaaggcagacctcattctctcctaccatccgcctatcttccgacccatgaagcgcataacctggaacacatggaaggagcgcctggtgatccgggctctggagaacagagtcggtatctactctcctcatacagcctatgatgctgcgccccagggcgtcaacaactggttggctaaagggcttggagcttgtacctccaggcccatacatccttccaaagctcccaactaccctacagagggaaaccaccgagtagaattcaacgttaactacacccaagacctggacaaagtcatgtctgcagtgaaaggaattgacggtgtttctgtcacttctttttctgctaggactggtaatgaggaacaaacacggattaatctgaattgtactcagaaggctttgatgcaggtggtagattttctttcccggaacaaacaactttatcagaagacggaaattctgtcactggagaagcctttgcttctacatactggaatgggacggttatgcacactggatgaatctgtctccctggcaaccatgattgatcgaataaaaagacacctaaaactatctcatattcgcttagcccttggggtggggagaaccttagagtctcaagtcaaagtcgtggccctgtgtgctggttctgggagcagcgttctgcagggtgttgaggctgacctttacctcacaggtgagatgtcccatcatgatactttggatgctgcttcccaaggaataaatgtcatcctctgtgaacacagcaacactgaacgaggctttctttctgaccttcgagatatgctggattctcacttggagaataagataaatattatcctatcagagactgacagggaccctcttcaggtggtataattgcagaaacatcaggataacacattctacaaatcagctggatgccaacttaaatttgtaacatgagtcagtgggactggtgtgcttccagagagtgtcttcgagggtatcatcatttccggtttgttaatcttattcaccaaatgttctatcgctcgtaaggtaaaactgtaatataactaccatattaaataacaaatgttcattataaactctaggaaagattgaataaaatctgtttacttaacattctt

SEQ ID NO: 20270 - DNA, 749 bp, Homo sapiens
  source 1..749: mol_type = unassigned DNA
aagtgccacagcatccggagcgccgacgcgggaccggaagtgacgcagagaagtttccgggactgtccccacgacagtccggtttgtagattccctgatctgcaattcttcccgttccttcatggatttgaaggctctcctttcttccttgaatgactttgcatccctctcgtttgctgagagttgggacaatgttggattactggtggaaccaagcccaccacatactgtaaatacactcttcctgaccaatgacctgactgaggaagtgatggaggaggtgctgcaaaagaaggcagacctcattctctcctaccatccgcctatcttccgacccatgaagcgcataacctggaacacatggaaggagcgcctggtgatccgggctctggagaacagagtcggtatctactctcctcatacagcctatgatgctgcgccccagggcgtcaacaactggttggctaaagggcttggagcttgtacctccaggcccatacatccttccaaagctcccaactaccctacagagggaaaccaccgagtagaattcaacgttaactacacccaagacctggacaaagtcatgtctgcagtgaaaggaattgacggtgtttctgtcacttctttttctgctaggactggtaatgaggaacaaacacggattaatctgaattgtactcagaaggctttgatgcaggtggtagattttctttcccggaacaaacaactttatcagaagacggaaa

SEQ ID NO: 20271 - DNA, 719 bp, Homo sapiens
  source 1..719: mol_type = unassigned DNA
acgcagagaagtttccgggactggtgagaaaacaagattggagaggttaaatggcttacctaagttacagtgtgctggtaagtggcagagccactatttgaacccagatctctatgacgacagctcttttgcccatatgttttgatgcctcaaagatccaggcctaaagtatacctgtgtaccattttctttgttttgacatcagaaacttgaactttacctgatttctgtatgttgtcatcttgcgtacgcccagtccccacgacagtccggtttgtagattccctgatctgcaattcttcccgttccttcatggatttgaaggctctcctttcttccttgaatgactttgcatccctctcgtttgctgagagttgggacaatgttggattactggtggaaccaagcccaccacatactgtaaatacactcttcctgaccaatgacctgactgaggaagtgatggaggaggtgctgcaaaagaaggcagacctcattctctcctaccatccgcctatcttccgacccatgaagcgcataacctggaacacatggaaggagcgcctggtgatccgggctctggagaacagagtcggtatctactctcctcatacagcctatgatgctgcgccccagggcgtcaacaactggttggctaaagggcttggagcttgtacctccaggcccatacatccttccaaagctcccaactaccctac

SEQ ID NO: 20272 - DNA, 8062 bp, Homo sapiens
  source 1..8062: mol_type = unassigned DNA
acagcgctctcgacacggagcacccttctagcttcttcgtctccaggactgacgctcaggctcctctctcgccttagcccaacttgctttcccgcctcgcaaactccggtttccctccactcccaactcttttcactacacgtttcccctcctctatctcccacgccacgaaccccgatccccagactcctctctcccgccctcctccttcctctctcctcccttcaactcttcatccgcttccacctcagactctgcgcgcacccaattcagtcgcccgctcccgttcggctcctcgaagccatggcgggacctgggggctggagggacagggaggtcacggatctgggccacctgccggatccaactggaatattctcactagataaaaccattggccttggtacttatggcagaatctatttgggacttcatgagaagactggtgcatttacagctgttaaagtgatgaacgctcgtaagacccctttacctgaaataggaaggcgagtgagagtgaataaatatcaaaaatctgttgggtggagatacagtgatgaggaagaggatctcaggactgaactcaaccttctgaggaagtactctttccacaaaaacattgtgtccttctatggagcatttttcaagctgagtccccctggtcagcggcaccaactttggatggtgatggagttatgtgcagcaggttcggtcactgatgtagtgagaatgaccagtaatcagagtttaaaagaagattggattgcttatatctgccgagaaatccttcagggcttagctcaccttcacgcacaccgagtaattcaccgggacatcaaaggtcagaatgtgctgctgactcataatgctgaagtaaaactggttgattttggagtgagtgcccaggtgagcagaactaatggaagaaggaatagtttcattgggacaccatactggatggcacctgaggtgattgactgtgatgaggacccaagacgctcctatgattacagaagtgatgtgtggtctgtgggaattactgccattgaaatggctgaaggagcccctcctctgtgtaaccttcaacccttggaagctctcttcgttattttgcgggaatctgctcccacagtcaaatccagcggatggtcccgtaagttccacaatttcatggaaaagtgtacgataaaaaatttcctgtttcgtcctacttctgcaaacatgcttcaacacccatttgttcgggatataaaaaatgaacgacatgttgttgagtcattaacaaggcatcttactggaatcattaaaaaaagacagaaaaaaggaatacctttgatctttgaaagagaagaagctattaaggaacagtacaccgtgagaagattcagaggaccctcttgcactcacgagcttctgagattgccaaccagcagcagatgcagaccacttagagtcctgcatggggaaccctctcagccaaggtggctacctgatcgagaagagccacaggtccaggcacttcagcagctacagggagcagccagggtattcatgccactgcaggctctggacagtgcacctaagcctctaaaggggcaggctcaggcacctcaacgactacaaggggcagctcgggtgttcatgccactacaggctcaggtgaaggctaaagcctctaaacctctacaaatgcagattaaggcacctccacgactacggagggcagccagggtgctcatgccactacaggcacaggttagggcacctaggcttctgcaggtacagtcccaggtatccaaaaagcagcaggcccagacccagacatcagaaccacaagatttggaccaggtaccagaggaatttcagggtcaagatcaggtacccgaacaacaaaggcagggccaggcccctgaacaacagcagaggcacaaccaggtgcctgaacaagagctggagcagaaccaggcacctgaacagccagaggtacaggaacaggctgccgagcctgcacaggcagagactgaggcagaggaacctgagtcattacgagtaaatgcccaggtatttctgcccctgctatcacaagatcaccatgtgctgttgccactacatttggatactcaggtgctcattccagtagaggggcaaactgaaggatcacctcaggcacaggcttggacactagaacccccacaggcaattggctcagttcaagcactgatagagggactatcaagagacttgcttcgggcaccaaactcaaataactcaaagccacttggtccgttgcaaaccctgatggaaaatctgtcatcaaataggttttactcacaaccagaacaggcacgggagaaaaaatcaaaagtttctactctgaggcaagcactggcaaaaagactatcaccaaagaggttcagggcaaagtcatcatggagacctgaaaagcttgaactctcggatttagaagcccgcaggcaaaggcgccaacgcagatgggaagatatctttaatcagcatgaggaagaattgagacaagttgataaagacaaagaagatgaatcatcagacaatgatgaagtatttcattcgattcaggctgaagtccagatagagccattgaagccatacatttcaaatcctaaaaaaattgaggttcaagagagatctccttctgtgcctaacaaccaggatcatgcacatcatgtcaagttctcttcaagcgttcctcagcggtctcttttggaacaagctcagaagcccattgacatcagacaaaggagttcgcaaaatcgtcaaaattggctggcagcatcagaatcttcttctgaggaagaaagtcctgtgactggaaggaggtctcagtcatcaccaccttattctactattgatcagaagttgctggttgacatccatgttccagatggatttaaagtaggaaaaatatcaccccctgtatacttgacaaacgaatgggtaggctataatgcactctctgaaatcttccggaatgattggttaactccggcacctgtcattcagccacctgaagaggatggtgattatgttgaactctatgatgccagtgctgatactgatggtgatgatgatgatgagtctaatgatacttttgaagatacctatgatcatgccaatggcaatgatgacttggataaccaggttgatcaggctaatgatgtttgtaaagaccatgatgatgacaacaataagtttgttgatgatgtaaataataattattatgaggcgcctagttgtccaagggcaagctatggcagagatggaagctgcaagcaagatggttatgatggaagtcgtggaaaagaggaagcctacagaggctatggaagccatacagccaatagaagccatggaggaagtgcagccagtgaggacaatgcagccattggagatcaggaagaacatgcagccaatataggcagtgaaagaagaggcagtgagggtgatggaggtaagggagtcgttcgaaccagtgaagagagtggagcccttggactcaatggagaagaaaattgctcagagacagatggtccaggattgaagagacctgcgtctcaggactttgaatatctacaggaggagccaggtggtggaaatgaggcctcaaatgccattgactcaggtgctgcaccgtcagcacctgatcatgagagtgacaataaggacatatcagaatcatcaacacaatcagatttttctgccaatcactcatctccttccaaaggttctgggatgtctgctgatgctaactttgccagtgccatcttatacgctggattcgtagaagtacctgaggaatcacctaagcaaccctctgaagtcaatgttaacccactctatgtctctcctgcatgtaaaaaaccactaatccacatgtatgaaaaggagttcacttctgagatctgctgtggttctttgtggggagtcaatttgctgttgggaacccgatctaatctatatctgatggacagaagtggaaaggctgacattactaaacttataaggcgaagaccattccgccagattcaagtcttagagccactcaatttgctgattaccatctcaggtcataagaacagacttcgggtgtatcatctgacctggttgaggaacaagattttgaataatgatccagaaagtaaaagaaggcaagaagaaatgctgaagacagaggaagcctgcaaagctattgataagttaacaggctgtgaacacttcagtgtcctccaacatgaagaaacaacatatattgcaattgctttgaaatcatcaattcacctttatgcatgggcaccaaagtcctttgatgaaagcactgctattaaagtatgcattgatcaatcagcagactctgaaggagactacatgtcctatcaagcctatatacgaatactggcaaaaatacaggcagctgatccagtgaaccggtttaagagaccagatgagctccttcatttgctgaagctcaaggtatttccaacacttgatcataagccagtgacagttgacctggctattggttctgaaaaaagactaaagattttcttcagctcagcagatggatatcacctcatcgatgcagaatctgaggttatgtctgatgtgaccctgccaaagaatcccctggaaatcattataccacagaatatcatcattttacctgattgcttgggaattggcatgatgctcaccttcaatgctgaagccctctctgtggaagcaaatgaacaactcttcaagaagatccttgaaatgtggaaagacataccatcttctatagcttttgaatgtacacagcgaaccacaggatggggccaaaaggccattgaagtgcgctctttgcaatccagggttctggaaagtgagctgaagcgcaggtcaattaagaagctgagattcctgtgcacccggggtgacaagctgttctttacctctaccctgcgcaatcaccacagccgggtttacttcatgacacttggaaaacttgaagagctccaaagcaattatgatgtctaaaagtttccagtgatttattaccacattataaacatcatgtataggcagtctgcatcttcagatttcagagattaaatgagtattcagttttatttttagtaaagattaaatccaaaactttacttttaatgtagcacagaatagttttaatgagaaatgcagctttatgtataaaattaactatagcaagctctaggtactccaatggtgtacaatgtcttttgcacaaactttgtaacttttgttactgtgaattcaaacattactctttggacagtttggacagtatctgtattcagattttacaacatggagtaaagaaacctgttatgaattagattacaagcagccttcaaaagaattggcactgggataagatttttcagaaaaagaaaaacatcggcaaactgtgtgtgatttttccaaagctatataaagaaccaaaggtttagtcaagaaacaaaaatcttaaagattattataacccagactaaggttgaacaacctgcatgcccagagaaaactatggcgacaaaggggaaaaggccaccactcgttttctcactgattcatgccaattaagcctacagttaaagaccagttttgttcttttcacccatttttaagctggttttctcctgataagaagaaaggaagaaagccccagacgcttggtttttctcagaacccccaaaagatgtgcaatagctgttgttacaaaccaccaaataatacagttgtgagcctgaatacaggactgaactcctatacacgtgtactgtagaatgagtattttttaataccttaaggtaggcgtcaaattctactccccaaagcagagatagattgatttatcaaaattattatctggccaacagtgtgactatcagacagcatcaaatatttgcccaatccaagattagactacacaaaagcttccttccagtattaaacaaaaagaattaaacataactatgaaaaaactttgctaatatctgtgtttttcagatttcattttttgtaaaatcagaaattaatctaaacatattcagtgataagttcatgtgtaacgacttaatgttaaaggttaaaaaaaagatttcacaaaatatacaactttcaccatatatataagcctgcaaaattagagtagtgaaagtcatgctagtccatcacccaaatatgttatagacgccatagacaggtgatgtttggtcacctatggtaactgctacctgatgaagagcataatttctgcatatccatcctcaataccatggtaaattctggggcaatagagaagcaacagaactgccacaaagtatacctcaatataattcctctagttctgcttctaaaatctgaggacagtgctagtgggaaaataattttcaaactacctggttaaccaaaatacaaaagcagctgactatgtgtgatttcataatagcacatttcttgacacttagtgctagaaatgaagatttggattttcctaacaacttacatcaagaatgtagtgtagctcattattgagaatttaggaaagcctgaatccattaattaaggaaataaatgtgactcacatttcttttactgtgacacaataatgtgatcctaaaactggcttatccttgagtgtttacaactcaaacaactttttgaatgcagtagttttttttttttaaaaacaaacttttatgtcaaattttttttcttagaagtagtcttcattattataaatttgtacaccaaaaggccatggggaactttgtgcaagtacctcatcgctgagcaaatggagcttgctatgttttaatttcagaaaatttcctcatatacgtagtgtgtagaatcaagtcttttaataattcattttttcttcataatatttactcaaagttaagcttaaaaataagttttatcttaaaatcatatttgaagacagtaagacagtaaactattttaggaagtcaacccccattgcactctgtggcagttattctggtaaaaataggcaaaagtgacctgaatctacaatgatgtcccaaagtaaccaagtaagagagattgtaaatgataaaccgagctttaaaggataaagtgttaataaagaaaggaagctgggcacatgtcaaaaagggagatcgaaatgttaggtaatcatttagaaaggacagaaaatatttaaagtggctcataggtaatgaatatttctgacttagatgtaaatccatctggaatctttacatcctttgccagctgaaacaagaaagtgaagggacaatgatatttcatggtcagtttattttgtaagagacagaagaaattatatctatacattaccttgtagcagcagtacctggaagccccagcccgtcacagaagtgtggaggggggctcctgactagacaatttccctagcccttgtgatttgaagcatgaaagttctggcaggttatgagcagcactagggataaagtatggttttattttggtgtaatttaggtttttcaacaaagcccttgtctaaaataaaaggcattattggaaatatttgaaaactagaaaatgatggataaaagggctgataagaaaatttctgactgtcagtagaagtgagataagatcctcagaggaaacagtaagaagggataatcattaagatagtaaaacaggcaaagcagaatcacatgtgcacacacacatacacatgtaaacattggaatgcataagttttaatattttagcgctatcagtttctaaatgcattaattactaactgccctctcccaagattcatttagttcaaacagtatccgtaaactaggaataatgccacatgcattcaatgggatcttttaagtactcttcagtttgttccaagaaatgtgcctactgaaatcaaattaatttgtattcaatgtgtacttcaagactgctaattgtttcatctgaaagcctacaatgaatcattgttcaaccttgaaaaataaaattttgtaaaaca

SEQ ID NO: 20273 - DNA, 8064 bp, Homo sapiens
  source 1..8064: mol_type = unassigned DNA
acagcgctctcgacacggagcacccttctagcttcttcgtctccaggactgacgctcaggctcctctctcgccttagcccaacttgctttcccgcctcgcaaactccggtttccctccactcccaactcttttcactacacgtttcccctcctctatctcccacgccacgaaccccgatccccagactcctctctcccgccctcctccttcctctctcctcccttcaactcttcatccgcttccacctcagactctgcgcgcacccaattcagtcgcccgctcccgttcggctcctcgaagccatggcgggacctgggggctggagggacagggaggtcacggatctgggccacctgccggatccaactggaatattctcactagataaaaccattggccttggtacttatggcagaatctatttgggacttcatgagaagactggtgcatttacagctgttaaagtgatgaacgctcgtaagacccctttacctgaaataggaaggcgagtgagagtgaataaatatcaaaaatctgttgggtggagatacagtgatgaggaagaggatctcaggactgaactcaaccttctgaggaagtactctttccacaaaaacattgtgtccttctatggagcatttttcaagctgagtccccctggtcagcggcaccaactttggatggtgatggagttatgtgcagcaggttcggtcactgatgtagtgagaatgaccagtaatcagagtttaaaagaagattggattgcttatatctgccgagaaatccttcagggcttagctcaccttcacgcacaccgagtaattcaccgggacatcaaaggtcagaatgtgctgctgactcataatgctgaagtaaaactggttgattttggagtgagtgcccaggtgagcagaactaatggaagaaggaatagtttcattgggacaccatactggatggcacctgaggtgattgactgtgatgaggacccaagacgctcctatgattacagaagtgatgtgtggtctgtgggaattactgccattgaaatggctgaaggagcccctcctctgtgtaaccttcaacccttggaagctctcttcgttattttgcgggaatctgctcccacagtcaaatccagcggatggtcccgtaagttccacaatttcatggaaaagtgtacgataaaaaatttcctgtttcgtcctacttctgcaaacatgcttcaacacccatttgttcgggatataaaaaatgaacgacatgttgttgagtcattaacaaggcatcttactggaatcattaaaaaaagacagaaaaaaaaaggaatacctttgatctttgaaagagaagaagctattaaggaacagtacaccgtgagaagattcagaggaccctcttgcactcacgagcttctgagattgccaaccagcagcagatgcagaccacttagagtcctgcatggggaaccctctcagccaaggtggctacctgatcgagaagagccacaggtccaggcacttcagcagctacagggagcagccagggtattcatgccactgcaggctctggacagtgcacctaagcctctaaaggggcaggctcaggcacctcaacgactacaaggggcagctcgggtgttcatgccactacaggctcaggtgaaggctaaagcctctaaacctctacaaatgcagattaaggcacctccacgactacggagggcagccagggtgctcatgccactacaggcacaggttagggcacctaggcttctgcaggtacagtcccaggtatccaaaaagcagcaggcccagacccagacatcagaaccacaagatttggaccaggtaccagaggaatttcagggtcaagatcaggtacccgaacaacaaaggcagggccaggcccctgaacaacagcagaggcacaaccaggtgcctgaacaagagctggagcagaaccaggcacctgaacagccagaggtacaggaacaggctgccgagcctgcacaggcagagactgaggcagaggaacctgagtcattacgagtaaatgcccaggtatttctgcccctgctatcacaagatcaccatgtgctgttgccactacatttggatactcaggtgctcattccagtagaggggcaaactgaaggatcacctcaggcacaggcttggacactagaacccccacaggcaattggctcagttcaagcactgatagagggactatcaagagacttgcttcgggcaccaaactcaaataactcaaagccacttggtccgttgcaaaccctgatggaaaatctgtcatcaaataggttttactcacaaccagaacaggcacgggagaaaaaatcaaaagtttctactctgaggcaagcactggcaaaaagactatcaccaaagaggttcagggcaaagtcatcatggagacctgaaaagcttgaactctcggatttagaagcccgcaggcaaaggcgccaacgcagatgggaagatatctttaatcagcatgaggaagaattgagacaagttgataaagacaaagaagatgaatcatcagacaatgatgaagtatttcattcgattcaggctgaagtccagatagagccattgaagccatacatttcaaatcctaaaaaaattgaggttcaagagagatctccttctgtgcctaacaaccaggatcatgcacatcatgtcaagttctcttcaagcgttcctcagcggtctcttttggaacaagctcagaagcccattgacatcagacaaaggagttcgcaaaatcgtcaaaattggctggcagcatcagaatcttcttctgaggaagaaagtcctgtgactggaaggaggtctcagtcatcaccaccttattctactattgatcagaagttgctggttgacatccatgttccagatggatttaaagtaggaaaaatatcaccccctgtatacttgacaaacgaatgggtaggctataatgcactctctgaaatcttccggaatgattggttaactccggcacctgtcattcagccacctgaagaggatggtgattatgttgaactctatgatgccagtgctgatactgatggtgatgatgatgatgagtctaatgatacttttgaagatacctatgatcatgccaatggcaatgatgacttggataaccaggttgatcaggctaatgatgtttgtaaagaccatgatgatgacaacaataagtttgttgatgatgtaaataataattattatgaggcgcctagttgtccaagggcaagctatggcagagatggaagctgcaagcaagatggttatgatggaagtcgtggaaaagaggaagcctacagaggctatggaagccatacagccaatagaagccatggaggaagtgcagccagtgaggacaatgcagccattggagatcaggaagaacatgcagccaatataggcagtgaaagaagaggcagtgagggtgatggaggtaagggagtcgttcgaaccagtgaagagagtggagcccttggactcaatggagaagaaaattgctcagagacagatggtccaggattgaagagacctgcgtctcaggactttgaatatctacaggaggagccaggtggtggaaatgaggcctcaaatgccattgactcaggtgctgcaccgtcagcacctgatcatgagagtgacaataaggacatatcagaatcatcaacacaatcagatttttctgccaatcactcatctccttccaaaggttctgggatgtctgctgatgctaactttgccagtgccatcttatacgctggattcgtagaagtacctgaggaatcacctaagcaaccctctgaagtcaatgttaacccactctatgtctctcctgcatgtaaaaaaccactaatccacatgtatgaaaaggagttcacttctgagatctgctgtggttctttgtggggagtcaatttgctgttgggaacccgatctaatctatatctgatggacagaagtggaaaggctgacattactaaacttataaggcgaagaccattccgccagattcaagtcttagagccactcaatttgctgattaccatctcaggtcataagaacagacttcgggtgtatcatctgacctggttgaggaacaagattttgaataatgatccagaaagtaaaagaaggcaagaagaaatgctgaagacagaggaagcctgcaaagctattgataagttaacaggctgtgaacacttcagtgtcctccaacatgaagaaacaacatatattgcaattgctttgaaatcatcaattcacctttatgcatgggcaccaaagtcctttgatgaaagcactgctattaaagtatgcattgatcaatcagcagactctgaaggagactacatgtcctatcaagcctatatacgaatactggcaaaaatacaggcagctgatccagtgaaccggtttaagagaccagatgagctccttcatttgctgaagctcaaggtatttccaacacttgatcataagccagtgacagttgacctggctattggttctgaaaaaagactaaagattttcttcagctcagcagatggatatcacctcatcgatgcagaatctgaggttatgtctgatgtgaccctgccaaagaatcccctggaaatcattataccacagaatatcatcattttacctgattgcttgggaattggcatgatgctcaccttcaatgctgaagccctctctgtggaagcaaatgaacaactcttcaagaagatccttgaaatgtggaaagacataccatcttctatagcttttgaatgtacacagcgaaccacaggatggggccaaaaggccattgaagtgcgctctttgcaatccagggttctggaaagtgagctgaagcgcaggtcaattaagaagctgagattcctgtgcacccggggtgacaagctgttctttacctctaccctgcgcaatcaccacagccgggtttacttcatgacacttggaaaacttgaagagctccaaagcaattatgatgtctaaaagtttccagtgatttattaccacattataaacatcatgtataggcagtctgcatcttcagatttcagagattaaatgagtattcagttttatttttagtaaagattaaatccaaaactttacttttaatgtagcacagaatagttttaatgagaaatgcagctttatgtataaaattaactatagcaagctctaggtactccaatggtgtacaatgtcttttgcacaaactttgtaacttttgttactgtgaattcaaacattactctttggacagtttggacagtatctgtattcagattttacaacatggagtaaagaaacctgttatgaattagattacaagcagccttcaaaagaattggcactgggataagatttttcagaaaaagaaaaacatcggcaaactgtgtgtgatttttccaaagctatataaagaaccaaaggtttagtcaagaaacaaaaatcttaaagattattataacccagactaaggttgaacaacctgcatgcccagagaaaactatggcgacaaaggggaaaaggccaccactcgttttctcactgattcatgccaattaagcctacagttaaagaccagttttgttcttttcacccatttttaagctggttttctcctgataagaagaaaggaagaaagccccagacgcttggtttttctcagaacccccaaaagatgtgcaatagctgttgttacaaaccaccaaataatacagttgtgagcctgaatacaggactgaactcctatacacgtgtactgtagaatgagtattttttaataccttaaggtaggcgtcaaattctactccccaaagcagagatagattgatttatcaaaattattatctggccaacagtgtgactatcagacagcatcaaatatttgcccaatccaagattagactacacaaaagcttccttccagtattaaacaaaaagaattaaacataactatgaaaaaactttgctaatatctgtgtttttcagatttcattttttgtaaaatcagaaattaatctaaacatattcagtgataagttcatgtgtaacgacttaatgttaaaggttaaaaaaaagatttcacaaaatatacaactttcaccatatatataagcctgcaaaattagagtagtgaaagtcatgctagtccatcacccaaatatgttatagacgccatagacaggtgatgtttggtcacctatggtaactgctacctgatgaagagcataatttctgcatatccatcctcaataccatggtaaattctggggcaatagagaagcaacagaactgccacaaagtatacctcaatataattcctctagttctgcttctaaaatctgaggacagtgctagtgggaaaataattttcaaactacctggttaaccaaaatacaaaagcagctgactatgtgtgatttcataatagcacatttcttgacacttagtgctagaaatgaagatttggattttcctaacaacttacatcaagaatgtagtgtagctcattattgagaatttaggaaagcctgaatccattaattaaggaaataaatgtgactcacatttcttttactgtgacacaataatgtgatcctaaaactggcttatccttgagtgtttacaactcaaacaactttttgaatgcagtagttttttttttttaaaaacaaacttttatgtcaaattttttttcttagaagtagtcttcattattataaatttgtacaccaaaaggccatggggaactttgtgcaagtacctcatcgctgagcaaatggagcttgctatgttttaatttcagaaaatttcctcatatacgtagtgtgtagaatcaagtcttttaataattcattttttcttcataatatttactcaaagttaagcttaaaaataagttttatcttaaaatcatatttgaagacagtaagacagtaaactattttaggaagtcaacccccattgcactctgtggcagttattctggtaaaaataggcaaaagtgacctgaatctacaatgatgtcccaaagtaaccaagtaagagagattgtaaatgataaaccgagctttaaaggataaagtgttaataaagaaaggaagctgggcacatgtcaaaaagggagatcgaaatgttaggtaatcatttagaaaggacagaaaatatttaaagtggctcataggtaatgaatatttctgacttagatgtaaatccatctggaatctttacatcctttgccagctgaaacaagaaagtgaagggacaatgatatttcatggtcagtttattttgtaagagacagaagaaattatatctatacattaccttgtagcagcagtacctggaagccccagcccgtcacagaagtgtggaggggggctcctgactagacaatttccctagcccttgtgatttgaagcatgaaagttctggcaggttatgagcagcactagggataaagtatggttttattttggtgtaatttaggtttttcaacaaagcccttgtctaaaataaaaggcattattggaaatatttgaaaactagaaaatgatggataaaagggctgataagaaaatttctgactgtcagtagaagtgagataagatcctcagaggaaacagtaagaagggataatcattaagatagtaaaacaggcaaagcagaatcacatgtgcacacacacatacacatgtaaacattggaatgcataagttttaatattttagcgctatcagtttctaaatgcattaattactaactgccctctcccaagattcatttagttcaaacagtatccgtaaactaggaataatgccacatgcattcaatgggatcttttaagtactcttcagtttgttccaagaaatgtgcctactgaaatcaaattaatttgtattcaatgtgtacttcaagactgctaattgtttcatctgaaagcctacaatgaatcattgttcaaccttgaaaaataaaattttgtaaaac

SEQ ID NO: 20274 - DNA, 832 bp, Homo sapiens
  source 1..832: mol_type = unassigned DNA
gtctccaggactgacgctcaggctcctctctcgccttagcccaacttgctttcccgcctcgcaaactccggtttccctccactcccaactcttttcactacacgtttcccctcctctatctcccacgccacgaaccccgatccccagactcctctctcccgccctcctccttcctctctcctcccttcaactcttcatccgcttccacctcagactctgcgcgcacccaattcagtcgcccgctcccgttcggctcctcgaagccatggcgggacctgggggctggagggacagggaggtcacggatctgggccacctgccggatccaactggaatattctcactagataaaaccattggccttggtacttatggcagaatctatttgggacttcatgagaagactggtgcatttacagctgttaaagtgatgaacgctcgtaagacccctttacctgaaataggaaggcgagtgagagtgaataaatatcaaaaatctgttgggtggagatacagtgatgaggaagaggatctcaggactgaactcaaccttctgaggaagtactctttccacaaaaacattgtgtccttctatggagcatttttcaagctgagtccccctggtcagcggcaccaactttggatggtgatggagttatgtgcagcaggttcggtcactgatgtagtgagaatgaccagtaatcagagtttaaaagaagattggattgcttatatctgccgagaaatccttcagccaaaagtcatatttctgggaacgggttgtagtgattccagcctaaagaaagaattgtgtctgaaacatcaaaattaa

SEQ ID NO: 20275 - DNA, 1687 bp, Homo sapiens
  source 1..1687: mol_type = unassigned DNA
attacaaaagctgtaatgatacaagggaaccatgtgtgctaaagaatatctagttacttcaggaatcatctgagaagcatctgaggctgtatggatttgcagcagtccagtttttttctaaacagattttattaagacaaccttctttcctgcaatttcttttactctcttcctttatcttttttttctgattcaattgctcatgcaagtgcccagggaacgcattaaaattgcttttcgtctctggatccccattttagttataaggattgttgttgctgggacatggcctcaagcacctggcctgagtacgctgggtttgaatatcatcattttacctgattgcttgggaattggcatgatgctcaccttcaatgctgaagccctctctgtggaagcaaatgaacaactcttcaagaagatccttgaaatgtggaaagacataccatcttctatagcttttgaatgtacacagcgaaccacaggatggggccaaaaggccattgaagtgcgctctttgcaatccagggttctggaaagtgagctgaagcgcaggtcaattaagaagctgagattcctgtgcacccggggtgacaagctgttctttacctctaccctgcgcaatcaccacagccgggtttacttcatgacacttggaaaacttgaagagctccaaagcaattatgatgtctaaaagtttccagtgatttattaccacattataaacatcatgtataggcagtctgcatcttcagatttcagagattaaatgagtattcagttttatttttagtaaagattaaatccaaaactttacttttaatgtagcacagaatagttttaatgagaaatgcagctttatgtataaaattaactatagcaagctctaggtactccaatggtgtacaatgtcttttgcacaaactttgtaacttttgttactgtgaattcaaacattactctttggacagtttggacagtatctgtattcagattttacaacatggagtaaagaaacctgttatgaattagattacaagcagccttcaaaagaattggcactgggataagatttttcagaaaaagaaaaacatcggcaaactgtgtgtgatttttccaaagctatataaagaaccaaaggtttagtcaagaaacaaaaatcttaaagattattataacccagactaaggttgaacaacctgcatgcccagagaaaactatggcgacaaaggggaaaaggccaccactcgttttctcactgattcatgccaattaagcctacagttaaagaccagttttgttcttttcacccatttttaagctggttttctcctgataagaagaaaggaagaaagccccagacgcttggtttttctcagaacccccaaaagatgtgcaatagctgttgttacaaaccaccaaataatacagttgtgagcctgaatacaggactgaactcctatacacgtgtactgtagaatgagtattttttaataccttaaggtaggcgtcaaattctactccccaaagcagagatagattgatttatcaaaattattatctggccaacagtgtgactatcagacagcatcaaatatttgcccaatccaagattagactacacaaaagcttccttccagtattaaacaaaaagaattaaacataactatgaaaaaactttgctaat

SEQ ID NO: 20276 - DNA, 1702 bp, Homo sapiens
  source 1..1702: mol_type = unassigned DNA
agtatgccccgcgccgtctccctggccacggttccaaacagccgtggcccgcggtgtctggcgctcggtgggtgtggttgcccctagtttgaggcctgcccgattacccgcaagacttgggcagccccgggcgccgctccgaccacgacagggaaaggaactgaccaacactggatgaatttgaccatttcttaggagactggaatgttaagtttctataaatgaatgaaccagttctctcttgtttggagcaatgctgaaattccaagaggcagctaagtgtgtgagtggatcaacagccatttccacttatccaaagaccttgattgcaagaagatacgtgcttcaacaaaaacttggcagtggaagttttggaactgtctatctggtttcagacaagaaagccaaacgaggagaggaattaaaggtacttaaggaaatatctgttggagaactaaatccaaatgaaactgtacaggccaatttggaagcccaactcctctccaagctggaccacccagccattgtcaagttccatgcaagttttgtggagcaagataatttctgcattatcacggagtactgtgagggccgagatctggacgataaaattcaggaatataaacaagctggaaaaatctttccagaaaatcaaataatagaatggtttatccagctgctgctgggagttgactacatgcatgagaggaggatacttcatcgagacttaaagtcaaagaatgtatttctgaaaaataatctccttaaaattggagattttggagtttctcgacttctaatgggatcctgtgacctggccacaactttaactggaactccccattatatgagtcctgaggctctgaaacaccaaggctatgacacaaagtcggacatctggtcactggcatgcattttgtatgagatgtgctgcatgaatcatgcattcgctggctccaatttcttatccattgttttaaaaattgttgaaggtgacacaccttctctccctgagagatatccaaaagaactaaatgccatcatggaaagcatgttgaacaagaatccttcattaagaccatctgctatcgaaattttaaaaatcccttaccttgatgagcagctacagaacctaatgtgtagatattcagaaatgactctggaagacaaaaatttggattgtcagaaggaggctgctcatataattaatgccatgcaaaaaaggatccacctgcagactctgagggcactgtcagaagtacagaaaatgacgccaagagaaaggatgcggctgaggaagctccaggcggctgatgagaaagccaggaagctgaaaaagattgtggaagaaaaatatgaagaaaatagcaaacgaatgcaagaattgagatctcggaactttcagcagctgagtgttgatgtactccatgaaaaaacacatttaaaaggaatggaagaaaaggaggagcaacctgagggaagactttcttgttcaccccaggacgaggatgaagagaggtggcaaggcagggaagaggaatctgatgaaccaactttagagaacctgcctgagtctcagcctattccttccatggacctccacgaacttgaatcaattgtagaggatgccacatctgaccttggataccatggagactgtaatctaatttcactagacgaatactggaaaaatgaaaaataa

SEQ ID NO: 20277 - DNA, 2914 bp, Homo sapiens
  source 1..2914: mol_type = unassigned DNA
ccaaacagccgtggcccgcggtgtctggcgctcggtgggtgtggttgcccctagtttgaggcctgcccgattacccgcaagacttgggcagccccgggcgccgctccgaccacgacagggaaaggaaccttaatctcatctttaaaataaggagaattactgagtgacctgaaggacccttttcagctggaaagtctgaactgaccaacactggatgaatttgaccatttcttaggagactggaatgttaagtttctataaatgaatgaaccagttctctcttgtttggagcaatgctgaaattccaagaggcagctaagtgtgtgagtggatcaacagccatttccacttatccaaagaccttgattgcaagaagatacgtgcttcaacaaaaacttggcagtggaagttttggaactgtctatctggtttcagacaagaaagccaaacgaggagaggaattaaaggtacttaaggaaatatctgttggagaactaaatccaaatgaaactgtacaggccaatttggaagcccaactcctctccaagctggaccacccagccattgtcaagttccatgcaagttttgtggagcaagataatttctgcattatcacggagtactgtgagggccgagatctggacgataaaattcaggaatataaacaagctggaaaaatctttccagaaaatcaaataatagaatggtttatccagctgctgctgggagttgactacatgcatgagaggaggatacttcatcgagacttaaagtcaaagaatgtatttctgaaaaataatctccttaaaattggagattttggagtttctcgacttctaatgggatcctgtgacctggccacaactttaactggaactccccattatatgagtcctgaggctctgaaacaccaaggctatgacacaaagtcggacatctggtcactggcatgcattttgtatgagatgtgctgcatgaatcatgcattcgctggctccaatttcttatccattgttttaaaaattgttgaaggtgacacaccttctctccctgagagatatccaaaagaactaaatgccatcatggaaagcatgttgaacaagaatccttcattaagaccatctgctatcgaaattttaaaaatcccttaccttgatgagcagctacagaacctaatgtgtagatattcagaaatgactctggaagacaaaaatttggattgtcagaaggaggctgctcatataattaatgccatgcaaaaaaggatccacctgcagactctgagggcactgtcagaagtacagaaaatgacgccaagagaaaggatgcggctgaggaagctccaggcggctgatgagaaagccaggaagctgaaaaagattgtggaagaaaaatatgaagaaaatagcaaacgaatgcaagaattgagatctcggaactttcagcagctgagtgttgatgtactccatgaaaaaacacatttaaaaggaatggaagaaaaggaggagcaacctgagggaagactttcttgttcaccccaggacgaggatgaagagaggtggcaaggcagggaagaggaatctgatgaaccaactttagagaacctgcctgagtctcagcctattccttccatggacctccacgaacttgaatcaattgtagaggatgccacatctgaccttggataccatgagatcccagaagacccacttgtggctgaagagtactacgctgatgcatttgattcctattgtgaagagagtgatgaggaggaagaagaaatagcgttagaaagaccagagaaagaaatcaggaatgagggatcccagcctgcttacagaacaaaccaacaggacagtgatatcgaagcgttggccaggtgtttggaaaatgtcctgggttgcacttctctagacacaaagaccatcaccaccatggctgaagacatgtccccaggaccaccaattttcaacagtgtgatggccaggaccaagatgaaacgcatgagggaatcagccatgcagaagctggggacagaagtatttgaagaggtctataattacctcaagagagcaaggcatcagaatgctagcgaagcagagatccgcgagtgtttggaaaaagtggtgcctcaagccagcgactgttttgaagtggaccagctcctgtactttgaagagcagttgctgatcacgatgggaaaagaacctactctccagaaccatctctaggcaactatcaaaaagaagcagaagttcaagtggacaaatttatgtgaaaattcatttaacatataagctgaactctattatggggaatggatacaaaagcagagctcccatcttgactttcaattcctcatcagaagtactggcttctttagagagtagtaagcatggctgcctatgcttggagtcataagtgttatttggactataccctgagataagcttatagatcaagtttggctcccttgaaaagcatttctctcatgtgcgccctcagggcttccagcaggattgagtcaccctgacgatgaccggggagaagccgtgtgctcttcattattttcagctggaggacagagctcagtgcctgactgcctagggtctcatggactgtaggcagcctgccagtgaaggtcactggactctagcctacaacatgctgagctacagcccagaagccagacatgcctgtcttagctgacctgtttttggtccacttttgcccttccatgactaataaggaagatatgtgtgtatttcatacacacacaaggacctggattaaaaatccaaaaagtgattctcttctatgatttatttcaaactcatccatagataattcaagatttgtattcaaaataaacatagttttcacagttacaaaataaatcacctattttatcttt

SEQ ID NO: 20278 - DNA, 2337 bp, Homo sapiens
  source 1..2337: mol_type = unassigned DNA
agtttgaggcctgcccgattacccgcaagacttgggcagccccgggcgccgctccgaccacgacagggaaaggaactgaccaacactggatgaatttgaccatttcttaggagactggaatgttaagtttctataaatgaatgaaccagttctctcttgtttggagcaatgctgaaattccaagaggcagctaagtgtgtgagtggatcaacagccatttccacttatccaaagaccttgattgcaagaagatacgtgcttcaacaaaaacttggcagtggaagttttggaactgtctatctggtttcagacaagaaagccaaacgaggagaggaattggccgagatctggacgataaaattcaggaatataaacaagctggaaaaatctttccagaaaatcaaataatagaatggtttatccagctgctgctgggagttgactacatgcatgagaggaggatacttcatcgagacttaaagtcaaagaatgtatttctgaaaaataatctccttaaaattggagattttggagtttctcgacttctaatgggatcctgtgacctggccacaactttaactggaactccccattatatgagtcctgaggctctgaaacaccaaggctatgacacaaagtcggacatctggtcactggcatgcattttgtatgagatgtgctgcatgaatcatgcattcgctggctccaatttcttatccattgttttaaaaattgttgaaggtgacacaccttctctccctgagagatatccaaaagaactaaatgccatcatggaaagcatgttgaacaagaatccttcattaagaccatctgctatcgaaattttaaaaatcccttaccttgatgagcagctacagaacctaatgtgtagatattcagaaatgactctggaagacaaaaatttggattgtcagaaggaggctgctcatataattaatgccatgcaaaaaaggatccacctgcagactctgagggcactgtcagaagtacagaaaatgacgccaagagaaaggatgcggctgaggaagctccaggcggctgatgagaaagccaggaagctgaaaaagattgtggaagaaaaatatgaagaaaatagcaaacgaatgcaagaattgagatctcggaactttcagcagctgagtgttgatgtactccatgaatctgatgaaccaactttagagaacctgcctgagtctcagcctattccttccatggacctccacgaacttgaatcaattgtagaggatgccacatctgaccttggataccatgagatcccagaagacccacttgtggctgaagagtactacgctgatgcatttgattcctattgtgaagagagtgatgaggaggaagaagaaatagcgttagaaagaccagagaaagaaatcaggaatgagggatcccagcctgcttacagaacaaaccaacaggacagtgatatcgaagcgttggccaggtgtttggaaaatgtcctgggttgcacttctctagacacaaagaccatcaccaccatggctgaagacatgtccccaggaccaccaattttcaacagtgtgatggccaggaccaagatgaaacgcatgagggaatcagccatgcagaagctggggacagaagtatttgaagaggtctataattacctcaagagagcaaggcatcagaatgctagcgaagcagagatccgcgagtgtttggaaaaagtggtgcctcaagccagcgactgttttgaagtggaccagctcctgtactttgaagagcagttgctgatcacgatgggaaaagaacctactctccagaaccatctctaggcaactatcaaaaagaagcagaagttcaagtggacaaatttatgtgaaaattcatttaacatataagctgaactctattatggggaatggatacaaaagcagagctcccatcttgactttcaattcctcatcagaagtactggcttctttagagagtagtaagcatggctgcctatgcttggagtcataagtgttatttggactataccctgagataagcttatagatcaagtttggctcccttgaaaagcatttctctcatgtgcgccctcagggcttccagcaggattgagtcaccctgacgatgaccggggagaagccgtgtgctcttcattattttcagctggaggacagagctcagtgcctgactgcctagggtctcatggactgtaggcagcctgccagtgaaggtcactggactctagcctacaacatgctgagctacagcccagaagccagacatgcctgtcttagctgacctgtttttggtccacttttgcccttc

SEQ ID NO: 20279 - DNA, 2879 bp, Homo sapiens
  source 1..2879: mol_type = unassigned DNA
agtatgccccgcgccgtctccctggccacggttccaaacagccgtggcccgcggtgtctggcgctcggtgggtgtggttgcccctagtttgaggcctgcccgattacccgcaagacttgggcagccccgggcgccgctccgaccacgacagggaaaggaactgaccaacactggatgaatttgaccatttcttaggagactggaatgttaagtttctataaatgaatgaaccagttctctcttgtttggagcaatgctgaaattccaagaggcagctaagtgtgtgagtggatcaacagccatttccacttatccaaagaccttgattgcaagaagatacgtgcttcaacaaaaacttggcagtggaagttttggaactgtctatctggtttcagacaagaaagccaaacgaggagaggaattaaaggtacttaaggaaatatctgttggagaactaaatccaaatgaaactgtacaggccaatttggaagcccaactcctctccaagctggaccacccagccattgtcaagttccatgcaagttttgtggagcaagataatttctgcattatcacggagtactgtgagggccgagatctggacgataaaattcaggaatataaacaagctggaaaaatctttccagaaaatcaaataatagaatggtttatccagctgctgctgggagttgactacatgcatgagaggaggatacttcatcgagacttaaagtcaaagaatgtatttctgaaaaataatctccttaaaattggagattttggagtttctcgacttctaatgggatcctgtgacctggccacaactttaactggaactccccattatatgagtcctgaggctctgaaacaccaaggctatgacacaaagtcggacatctggtcactggcatgcattttgtatgagatgtgctgcatgaatcatgcattcgctggctccaatttcttatccattgttttaaaaattgttgaaggtgacacaccttctctccctgagagatatccaaaagaactaaatgccatcatggaaagcatgttgaacaagaatccttcattaagaccatctgctatcgaaattttaaaaatcccttaccttgatgagcagctacagaacctaatgtgtagatattcagaaatgactctggaagacaaaaatttggattgtcagaaggaggctgctcatataattaatgccatgcaaaaaaggatccacctgcagactctgagggcactgtcagaagtacagaaaatgacgccaagagaaaggatgcggctgaggaagctccaggcggctgatgagaaagccaggaagctgaaaaagattgtggaagaaaaatatgaagaaaatagcaaacgaatgcaagaattgagatctcggaactttcagcagctgagtgttgatgtactccatgaaaaaacacatttaaaaggaatggaagaaaaggaggagcaacctgagggaagactttcttgttcaccccaggacgaggatgaagagaggtggcaaggcagggaagaggaatctgatgaaccaactttagagaacctgcctgagtctcagcctattccttccatggacctccacgaacttgaatcaattgtagaggatgccacatctgaccttggataccatgagatcccagaagacccacttgtggctgaagagtactacgctgatgcatttgattcctattgtgaagagagtgatgaggaggaagaagaaatagcgttagaaagaccagagaaagaaatcaggaatgagggatcccagcctgcttacagaacaaaccaacaggacagtgatatcgaagcgttggccaggtgtttggaaaatgtcctgggttgcacttctctagacacaaagaccatcaccaccatggctgaagacatgtccccaggaccaccaattttcaacagtgtgatggccaggaccaagatgaaacgcatgagggaatcagccatgcagaagctggggacagaagtatttgaagaggtctataattacctcaagagagcaaggcatcagaatgctagcgaagcagagatccgcgagtgtttggaaaaagtggtgcctcaagccagcgactgttttgaagtggaccagctcctgtactttgaagagcagttgctgatcacgatgggaaaagaacctactctccagaaccatctctaggcaactatcaaaaagaagcagaagttcaagtggacaaatttatgtgaaaattcatttaacatataagctgaactctattatggggaatggatacaaaagcagagctcccatcttgactttcaattcctcatcagaagtactggcttctttagagagtagtaagcatggctgcctatgcttggagtcataagtgttatttggactataccctgagataagcttatagatcaagtttggctcccttgaaaagcatttctctcatgtgcgccctcagggcttccagcaggattgagtcaccctgacgatgaccggggagaagccgtgtgctcttcattattttcagctggaggacagagctcagtgcctgactgcctagggtctcatggactgtaggcagcctgccagtgaaggtcactggactctagcctacaacatgctgagctacagcccagaagccagacatgcctgtcttagctgacctgtttttggtccacttttgcccttccatgactaataaggaagatatgtgtgtatttcatacacacacaaggacctggattaaaaatccaaaaagtgattctcttctatgatttatttcaaactcatccatagataattcaagatttgtattcaaaataaacatagttttcacagttacaaaataaatcacctattttatcttttcctt

SEQ ID NO: 20280 - DNA, 1841 bp, Homo sapiens
  source 1..1841: mol_type = unassigned DNA
ggatgacctaaaagtggactgggatgggggtggcagggctgagtctgtgagggtgggcgggagggaacctagtcccagagtcttctgcagcctggaccagactacttaagcactgctgggtttagactgtcctttaaaataagagccgctagaagtgaacttctcattctgtccgtccctaattctgtccttctctaaaaggaaccttaatctcatctttaaaataaggagaattactgagtgacctgaaggacccttttcagctggaaagtctgaactgaccaacactggatgaatttgaccatttcttaggagactggaatgttaagtttctataaatgaatgaaccagttctctcttgtttggagcaatgctgaaattccaagaggcagctaagtgtgtgagtggatcaacagccatttccacttatccaaagaccttgattgcaagaagatacgtgcttcaacaaaaacttggcagtggaagttttggaactgtctatctggtttcagacaagaaagccaaacgaggagaggaattaaaggtacttaaggaaatatctgttggagaactaaatccaaatgaaactgtacaggccaatttggaagcccaactcctctccaagctggaccacccagccattgtcaagttccatgcaagttttgtggagcaagataatttctgcattatcacggagtactgtgagggccgagatctggacgataaaattcaggaatataaacaagctggaaaaatctttccagaaaatcaaataatagaatggtttatccagctgctgctgggagttgactacatgcatgagaggaggatacttcatcgagacttaaagtcaaagaatgtatttctgaaaaataatctccttaaaattggagattttggagtttctcgacttctaatgggatcctgtgacctggccacaactttaactggaactccccattatatgagtcctgaggctctgaaacaccaaggctatgacacaaagtcggacatctggtcactggcatgcattttgtatgagatgtgctgcatgaatcatgcattcgctggctccaatttcttatccattgttttaaaaattgttgaaggtgacacaccttctctccctgagagatatccaaaagaactaaatgccatcatggaaagcatgttgaacaagaatccttcattaagaccatctgctatcgaaattttaaaaatcccttaccttgatgagcagctacagaacctaatgtgtagatattcagaaatgactctggaagacaaaaatttggattgtcagaaggaggctgctcatataattaatgccatgcaaaaaaggatccacctgcagactctgagggcactgtcagaagtacagaaaatgacgccaagagaaaggatgcggctgaggaagctccaggcggctgatgagaaagccaggaagctgaaaaagattgtggaagaaaaatatgaagaaaatagcaaacgaatgcaagaattgagatctcggaactttcagcagctgagtgttgatgtactccatgaaaaaacacatttaaaaggaatggaagaaaaggaggagcaacctgagggaagactttcttgttcaccccaggacgaggatgaagagaggtggcaaggcagggaagaggaatctgatgaaccaactttagagaacctgcctgagtctcagcctattccttccatggacctccacgaacttgaatcaattgtagaggatgccacatctgaccttggataccatggagactgtaatctaatttcactagacgaatactggaaaaatgaaaaataaaggaatttctgaaataaggaaa

SEQ ID NO: 20281 - DNA, 1938 bp, Homo sapiens
  source 1..1938: mol_type = unassigned DNA
atgctgaaattccaagaggcagctaagtgtgtgagtggatcaacagccatttccacttatccaaagaccttgattgcaagaagatacgtgcttcaacaaaaacttggcagtggaagttttggaactgtctatctggtttcagacaagaaagccaaacgaggagaggaattaaaggtacttaaggaaatatctgttggagaactaaatccaaatgaaactgtacaggccaatttggaagcccaactcctctccaagctggaccacccagccattgtcaagttccatgcaagttttgtggagcaagataatttctgcattatcacggagtactgtgagggccgagatctggacgataaaattcaggaatataaacaagctggaaaaatctttccagaaaatcaaataatagaatggtttatccagctgctgctgggagttgactacatgcatgagaggaggatacttcatcgagacttaaagtcaaagaatgtatttctgaaaaataatctccttaaaattggagattttggagtttctcgacttctaatgggatcctgtgacctggccacaactttaactggaactccccattatatgagtcctgaggctctgaaacaccaaggctatgacacaaagtcggacatctggtcactggcatgcattttgtatgagatgtgctgcatgaatcatgcattcgctggctccaatttcttatccattgttttaaaaattgttgaaggtgacacaccttctctccctgagagatatccaaaagaactaaatgccatcatggaaagcatgttgaacaagaatccttcattaagaccatctgctatcgaaattttaaaaatcccttaccttgatgagcagctacagaacctaatgtgtagatattcagaaatgactctggaagacaaaaatttggattgtcagaaggaggctgctcatataattaatgccatgcaaaaaaggatccacctgcagactctgagggcactgtcagaagtacagaaaatgacgccaagagaaaggatgcggctgaggaagctccaggcggctgatgagaaagccaggaagctgaaaaagattgtggaagaaaaatatgaagaaaatagcaaacgaatgcaagaattgagatctcggaactttcagcagctgagtgttgatgtactccatgaaaaaacacatttaaaaggaatggaagaaaaggaggagcaacctgagggaagactttcttgttcaccccaggacgaggatgaagagaggtggcaaggcagggaagaggaatctgatgaaccaactttagagaacctgcctgagtctcagcctattccttccatggacctccacgaacttgaatcaattgtagaggatgccacatctgaccttggataccatgagatcccagaagacccacttgtggctgaagagtactacgctgatgcatttgattcctattgtgaagagagtgatgaggaggaagaagaaatagcgttagaaagaccagagaaagaaatcaggaatgagggatcccagcctgcttacagaacaaaccaacaggacagtgatatcgaagcgttggccaggtgtttggaaaatgtcctgggttgcacttctctagacacaaagaccatcaccaccatggctgaagacatgtccccaggaccaccaattttcaacagtgtgatggccaggaccaagatgaaacgcatgagggaatcagccatgcagaagctggggacagaagtatttgaagaggtctataattacctcaagagagcaaggcatcagaatgctagcgaagcagagatccgcgagtgtttggaaaaagtggtgcctcaagccagcgactgttttgaagtggaccagctcctgtactttgaagagcagttgctgatcacgatgggaaaagaacctactctccagaaccatctctag

SEQ ID NO: 20282 - DNA, 2056 bp, Homo sapiens
  source 1..2056: mol_type = unassigned DNA
ccaaacagccgtggcccgcggtgtctggcgctcggtgggtgtggttgcccctagtttgaggcctgcccgattacccgcaagacttgggcagccccgggcgccgctccgaccacgacagggaaaggaaccttaatctcatctttaaaataaggagaattactgagtgacctgaaggacccttttcagctggaaagtctgaactgaccaacactggatgaatttgaccatttcttaggagactggaatgttaagtttctataaatgaatgaaccagttctctcttgtttggagcaatgctgaaattccaagaggcagctaagtgtgtgagtggatcaacagccatttccacttatccaaagaccttgattgcaagaagatacgtgcttcaacaaaaacttggcagtggaagttttggaactgtctatctggtttcagacaagaaagccaaacgaggagaggaattaaaggtacttaaggaaatatctgttggagaactaaatccaaatgaaactgtacaggccaatttggaagcccaactcctctccaagctggaccacccagccattgtcaagttccatgcaagttttgtggagcaagataatttctgcattatcacggagtactgtgagggccgagatctggacgataaaattcaggaatataaacaagctggaaaaatctttccagaaaatcaaataatagaatggtttatccagctgctgctgggagttgactacatgcatgagaggaggatacttcatcgagacttaaagtcaaagaatgtatttctgaaaaataatctccttaaaattggagattttggagtttctcgacttctaatgggatcctgtgacctggccacaactttaactggaactccccattatatgagtcctgaggctctgaaacaccaaggctatgacacaaagtcggacatctggtcactggcatgcattttgtatgagatgtgctgcatgaatcatgcattcgctggctccaatttcttatccattgttttaaaaattgttgaaggtgacacaccttctctccctgagagatatccaaaagaactaaatgccatcatggaaagcatgttgaacaagaatccttcattaagaccatctgctatcgaaattttaaaaatcccttaccttgatgagcagctacagaacctaatgtgtagatattcagaaatgactctggaagacaaaaatttggattgtcagaaggaggctgctcatataattaatgccatgcaaaaaaggatccacctgcagactctgagggcactgtcagaagtacagaaaatgacgccaagagaaaggatgcggctgaggaagctccaggcggctgatgagaaagccaggaagctgaaaaagattgtggaagaaaaatatgaagaaaatagcaaacgaatgcaagaattgagatctcggaactttcagcagctgagtgttgatgtactccatgaaaaaacacatttaaaaggaatggaagaaaaggaggagcaacctgagggaagactttcttgttcaccccaggacgaggatgaagagaggtggcaaggcagggaagaggaatctgatgaaccaactttagagaacctgcctgagtctcagcctattccttccatggacctccacgaacttgaatcaattgtagaggatgccacatctgaccttggataccatgcaactcacagctgactttcagagcagtgttttttccaaagctggaatagcctgagactctagggcctgggtctacaaggagcatgactccctaccccaccattcagatgtggagaatgcagtgaagtaggccttggctgcttacccacatcctgaccagctgtcacctcttcatttcctgttcagccactctttaagcaatcactgagcccaatgctcagagatagctcagacctgtaggtggttgtgctttgcttgcctgtaggagccccacatgccctttacagttctgggctgtctatgacttacgatatcacctcttctttttaaatgtccaagtggaaataaagtgatttgaactttgc

SEQ ID NO: 20283 - DNA, 2858 bp, Homo sapiens
  source 1..2858: mol_type = unassigned DNA
atggagaagtacgagcggatccgagtggtggggagaggtgccttcgggattgtgcacctgtgcctgcgaaaggctgaccagaagctggtgatcatcaagcagattccagtggaacagatgaccaaggaagagcggcaggcagcccagaatgagtgccaggtcctcaagctgctcaaccaccccaatgtcattgagtactacgagaacttcctggaagacaaagcccttatgatcgccatggaatatgcaccaggcggcactctggctgagttcatccaaaagcgctgtaattccctgctggaggaggagaccatcctgcacttcttcgtgcagatcctgcttgcactgcatcatgtgcacacccacctcatcctgcaccgagacctcaagacccagaacatcctgcttgacaaacaccgcatggtcgtcaagatcggtgatttcggcatctccaagatccttagcagcaagagcaaggcctacacggtggtgggtaccccatgctatatctcccctgagctgtgtgagggcaagccctacaaccagaagagtgacatctgggccctgggctgtgtcctctacgagctggccagcctcaagagggctttcgaggctgcgaacttgccagcactggtgctgaagatcatgagtggcacctttgcacctatctctgaccggtacagccctgagcttcgccagctggtcctgagtctactcagcctggagcctgcccagcggccaccactcagccacatcatggcacagcccctctgcatccgtgccctcctcaacctccacaccgacgtgggcagtgtccgcatgcggagggcagagaagtccgtggcccccagcaacacagggagcaggaccaccagtgtccgctgcagaggtatcccccggggacctgtgaggccagccatcccaccaccactgtcgtcagtgtatgcctggggtggtgggctgggcacccccctgcggctgccaatgctcaacacagaggtggtccaggtggcagctgggcgcacgcagaaagccggcgtcacgcgctctgggcgtctcatcctgtgggaggccccacccctaggtgcaggcggaggcagtctccttcctggggcagtggagcagccacagccccagttcatctcgcgtttcctggagggccagtcgggtgtgaccatcaagcacgtggcctgtggggacttcttcactgcctgcctgactgacagaggcatcatcatgacattcggcagcggcagcaatgggtgcctaggccatggcagcctcactgacatcagccagcccaccattgtggaggctttgctgggctatgaaatggtgcaggtggcctgtggggcctctcacgtgctggccctgtccactgagcgagaactatttgcctggggccgtggagacagcggcagactggggctaggcaccagggagtcccacagctgcccccagcaggtgcccatgcccccaggacaggaagctcagcgagttgtatgtggtatcgattcctccatgatcctcactgtgcctggccaagccctagcctgtgggagcaacaggttcaacaagctgggcctggaccacctctccctgggggaggagcctgtcccccaccagcaagtggaggaggccctgagcttcacactactaggctctgcacccctggaccaggagcctctgctgagtatagacctgggcactgctcactcagctgctgtgactgcctcgggtgattgctacacttttggcagcaatcagcacggacagttgggcaccaatactcgccgaggcagtcgggcaccctgtaaggtccaaggccttgagggcatcaagatggcaatggtagcctgtggggatgccttcactgtagctattggggcagagagcgaagtgtactcttggggcaaaggggcgcgaggtcgattgggaaggagggatgaggatgccggactccctcggccagtgcagttggatgagacacacccttacacggtgacttccgtgtcctgttgccatggaaacaccctcctggctgttcgatcggtcacagatgagccggtccccccctgaggcacccggattcacctctggaccaccctgatattgcttctcctctgaatgctctgaaaagtgcaggtgcccaaggcatgacttgcagctgtctcctggattgtgtcatcatggggtatcagggctggcaaaacccctgctctgcttttggccttggatatggaaacctcaaccactttgttctcctaccacctctttgcccttcctaccccttcctcccttcagtcagtgtccccagggtccagcctggctagagttagaaggcagacctagcctttggaagcagggtggcctccagagccttgccataaaaaggctgaaggcagccgggcgcagtggctcacgcctgtaatcccagcactttgggaggctgaggcgggcggatcacgaggtcaggagatcgagaccatcctggctaacgtggtgaaaccccatctctactaaaaatacaaaaaaattagctgggcgtggtggcacgcgcctgtagtcccagctgctcaggaggctgaggcaggagaatggcgtaaacccctccagcctgggcgacagaaccagactccgtctcaaaaaaaaaaaaaaaacaaaaaaggctgaaggcagctgtagctccacacagaccctaccctttcccctagcccagttagaaaataagtctgggccggcggcggtggctcacacctgcataggcagtgctttggccaggaggatcccttgatcccttgtggccaggagttgggagaccagcctggggaccatagcgagaccgctgtctccaccaa

SEQ ID NO: 20284 - DNA, 2055 bp, Homo sapiens
  source 1..2055: mol_type = unassigned DNA
aagaaatgagatggagaagtacgagcggatccgagtggtggggagaggtgccttcgggattgtgcacctgtgcctgcgaaaggctgaccagaagctggtgatcatcaagcagattccagtggaacagatgaccaaggaagagcggcaggcagcccagaatgagtgccaggtcctcaagctgctcaaccaccccaatgtcattgagtactacgagaacttcctggaagacaaagcccttatgatcgccatggaatatgcaccaggcggcactctggctgagttcatccaaaagcgctgtaattccctgctggaggaggagaccatcctgcacttcttcgtgcagatcctgcttgcactgcatcatgtgcacacccacctcatcctgcaccgagacctcaagacccagaacatcctgcttgacaaacaccgcatggtcgtcaagatcggtgatttcggcatctccaagatccttagcagcaagagcaaggcctacacggtggtgggtaccccatgctatatctcccctgagctgtgtgagggcaagccctacaaccagaagagtgacatctgggccctgggctgtgtcctctacgagctggccagcctcaagagggctttcgaggctgcgaacttgccagcactggtgctgaagatcatgagtggcacctttgcacctatctctgaccggtacagccctgagcttcgccagctggtcctgagtctactcagcctggagcctgcccagcggccaccactcagccacatcatggcacagcccctctgcatccgtgccctcctcaacctccacaccgacgtgggcagtgtccgcatgcggaggcctgtgcagggacagcgagcggtcctgggcggcagggtgtgggcacccagtgggagcacaggaggtctgaggcagagggaaacctggggcaagtcctcccttcctgcatgtaggaatgtcaggagggtctttgtccttaggcccccatctgtcctgcagggcagagaagtccgtggcccccagcaacacagggagcaggaccaccagtgtccgctgcagaggtatcccccggggacctgtgaggccagccatcccaccaccactgtcgtcagtgtatgcctggggtggtgggctgggcacccccctgcggctgccaatgctcaacacagaggtggtccaggtggcagctgggcgcacgcagaaagccggcgtcacgcgctctgggcgtctcatcctgtgggaggccccacccctaggtgcaggcggaggcagtctccttcctggggcagtggagcagccacagccccagttcatctcgcgtttcctggagggccagtcgggtgtgaccatcaagcacgtggcctgtggggacttcttcactgcctgcctgactgacagaggcatcatcatgacattcggcagcggcagcaatgggtgcctaggccatggcagcctcactgacatcagccagcccaccattgtggaggctttgctgggctatgaaatggtgcagttggatgagacacacccttacacggtgacttccgtgtcctgttgccatggaaacaccctcctggctgttcgatcggtcacagatgagccggtccccccctgaggcacccggattcacctctggaccaccctgatattgcttctcctctgaatgctctgaaaagtgcaggtgcccaaggcatgacttgcagctgtctcctggattgtgtcatcatggggtatcagggctggcaaaacccctgctctgcttttggccttggatatggaaacctcaaccactttgttctcctaccacctctttgcccttcctaccccttcctcccttcagtcagtgtccccagggtccagcctggctagagttagaaggcagacctagcctttggaagcagggtggcctccagagccttgccataaaaaggctgaaggcagccgggcgcagtggctcacgcctgtaatcccagcactttgggaggctgaggcgggcggatcacgaggtcaggagatcgagaccatcctggctaacgtggtgaaaccccatctctact

SEQ ID NO: 20285 - DNA, 5544 bp, Homo sapiens
  source 1..5544: mol_type = unassigned DNA
gagaactgtttccgggtcggggggcaggagccaccatcgagcttcgcggggttgctgggctgacggatccgcgggccggcatctgaagcgagcgggacgcagcgcggccagggcctccgggcatacgcaggctggtccccaaggcccgcggccgccgccatgtcggtgctgggcgagtacgagcgacactgcgattccatcaactcggactttgggagcgagtccgggggttgcggggactcgagtccggggcctagcgccagtcaggggccgcgagccggcggcggcgcggcggagcaggaggaactgcactacatccccatccgcgtcctgggccgcggcgccttcggggaagccacgctgtaccgccgcaccgaggatgactcactggttgtgtggaaggaagtcgatttgacccggctgtctgagaaggaacgtcgtgatgccttgaatgagattgttattctggcactgctgcagcacgacaacattattgcctactacaatcacttcatggacaataccacgctgctgattgagctggaatattgtaatggagggaacctgtatgacaaaatccttcgtcagaaggacaagttgtttgaggaagagatggtggtgtggtacctatttcagattgtttcagcagtgagctgcatccataaagctggaatccttcatagagatataaagacattaaatatttttctgaccaaggcaaacctgataaaacttggagattatggcctagcaaagaaacttaattctgagtattccatggctgagacgcttgtgggaaccccatattacatgtctccagagctctgtcaaggagtaaagtacaatttcaagtctgatatctgggcagttggctgcgtcatttttgaactgcttaccttaaagaggacgtttgatgctacaaacccacttaacctgtgtgtgaagatcgtgcaaggaattcgggccatggaagttgactctagccagtactctttggaattgatccaaatggttcattcgtgccttgaccaggatcctgagcagagacctactgcagatgaacttctagatcgccctcttctcaggaaacgcaggagagagatggaggaaaaagtcactctgcttaatgcacctacaaagagaccaaggtcaagcactgtgactgaagcacccattgctgtagtaacatcacgaaccagtgaagtctatgtttggggtggtggaaaatccaccccccagaaactggatgttatcaagagtggctgtagtgcccggcaggtctgtgcagggaatacccactttgctgtggtcacagtggagaaggaactgtacacttgggtgaacatgcaaggaggcactaaactccatggtcagctgggccatggagacaaagcctcctatcgacagccaaagcatgtggaaaagttgcaaggcaaagctatccgtcaggtgtcatgtggtgatgatttcactgtctgtgtgactgatgagggtcagctctatgccttcggatcagattattatggctgcatgggggtggacaaagttgctggccctgaagtgctagaacccatgcagctgaacttcttcctcagcaatccagtggagcaggtctcctgtggagataatcatgtggtggttctgacacgaaacaaggaagtctattcttggggctgtggcgaatatggacgactgggtttggattcagaagaggattattatacaccacaaaaggtggatgttcccaaggccttgattattgttgcagttcaatgtggctgtgatgggacatttctgttgacccagtcaggcaaagtgctggcctgtggactcaatgaattcaataagctgggtctgaatcagtgcatgtcgggaattatcaaccatgaagcataccatgaagttccctacacaacgtcctttaccttggccaaacagttgtccttttataagatccgtaccattgccccaggcaagactcacacagctgctattgatgagcgaggccggctgctgacctttggctgcaacaagtgtgggcagctgggcgttgggaactacaagaagcgtctgggaatcaacctgttggggggaccccttggtgggaagcaagtgatcagggtctcctgcggtgatgagtttaccattgctgccactgatgataatcacatttttgcctggggcaatggtggtaatggccgcctggcaatgacccccacagagagaccacatggctctgatatctgtacctcatggcctcggcctatttttggatctctgcatcatgtcccggacctgtcttgccgtggatggcataccattctcatcgttgagaaagtattgaattctaagaccatccgttccaatagcagtggcttatccattggaactgtgtttcagagctctagcccgggaggaggcggcgggggcggcggtggtgaagaagaggacagtcagcaggaatctgaaactcctgacccaagtggaggcttccgaggaacaatggaagcagaccgaggaatggaaggtttaatcagtcccacagaggccatggggaacagtaatggggccagcagctcctgtcctggctggcttcgaaaggagctggaaaatgcagaatttatccccatgcctgacagcccatctcctctcagtgcagcgttttcagaatctgagaaagataccctgccctatgaagagctgcaaggactcaaagtggcctctgaagctcctttggaacacaaaccccaagtagaagcctcgtcacctcggctgaatcctgcagtaacctgtgctgggaagggaacaccactgactcctcctgcgtgtgcgtgcagctctctgcaggtggaggttgagagattgcagggtctggtgttaaagtgtctggctgaacaacagaagctacagcaagaaaacctccagatttttacccaactgcagaagttgaacaagaaattagaaggagggcagcaggtggggatgcattccaaaggaactcagacagcaaaggaagagatggaaatggatccaaagcctgacttagattcagattcctggtgcctcctgggaacagactcctgtagacccagcctctagtctcctgagcctgtagagcccccaggagactgggacccaaagaacttcacagcacacttaccgaatgcagagagcagctttcctggctttgttcacttgcagaaaaggagcgcaaggcagaggctctgaagcactttccttgtacatttggagagtggcattgccttttagataggatctaggagtgattttattgttttggagaatggaagggcccccatggccctggctttgtcatcagtgactgccatagcaacagcagctctgtacctcatctgttgatcccacctttgaagaggagacacagtgctcaccttaattgcgctggtagcagcttatatcccatgtatcattttcaccattgattggaagctgccttgggaattcagtaccaggcattacccctctgggtgggagagggagaagtgtaaagttggagtgggctggaatcaggtgtggcccgcccagtgtcctctgcagagtggtgaagtagtctggccctcttgggagccctgagtccaggaaaatatgtctgatggagtcaatctagggcttgtttcgaaaaagttcagttactctgtgcagctaaatgctttaggaggaaaggtaggcttaggttgcttttcctctgagggttgattgaaatttcttcagtgaggaatagagaaagggcaggaccctcctcatcacacagctggtgtttcaggctgtgaccaatgcagggtgggatttcctaactgtggatgaggggatgaggtgtctctgagggatgaggtgtctcagagaattgagtccatggggcagtcagaatagccttaagagaaaatcatgaaggagaagaggtcctcctttagctgcctctacttggtatcttagagagggcttagagggctctcagtcttctgcccatgaaaagacttctttgagcctctgccttcatggctcttagggttctgatcttgatatcagcagccccaaccactttctttctgaatgtctagtcagtatttttccccttttggtgttttatgaagccatgtggtaacgaatgaatctgtatcatttttcctacctgagtggcccaaagccagcaccaaaccctgggagtccctgaagcctaacagaacaggtagaacttgcaaaaggaatttggctgagagctcacttctaatcctgtactcactgtgtctttgtagatagaaacaagctagctttaccaaagagaaatagtgtcatagaagaacaaaacttcatatagaaagttctaggcaagtatttgatggtttccttaaggatgtgagctttgtatttccacctagccttgtaaaatgttcctgtggtattttgtgtcacacatcctacctttgatgagtctcacatcccaccttcctataaacagctaaattaattttgtttcatcttccccagaccaaaatgtttgataatcttatcaacattgtgggaggtcttgtgcaatggaaattttgccatttctccaaaactggtggcataaaggctgatgcttggggagaaccccattgctcgggacaggcaactctgttcaatgggatcttctttggtttgatgttcccattgttttctcagttctgggaagcctagtacattagtactaatgtaatcactgaaaccttttcttgaaataagggaagcagccaaactttgattaaagttgcaagttctggggacttgcgggggttgtcataaactgtaacagtgggttttggttcagcatgtaaatgcaactttgattttcttgaggaccgattgacctgtcatgtccctgtatcctcatgctcatcatctcagcaggcctgagaggctgggtcagtttgggtgttcatcatgaggattgcttctgccatggagctgatggacatgggcaggttgctgagaaggtggggtgaaagtgagtgccgggggtgggtgagtgccctggtcttgttcataggggagcctttccctagcagtggaacgctgtggtcattttctctagcatattcccttgggaagtctagatttgctattaatctggctgagaatctaagttctgtgccttagagacagtttgcactttcccatattgtgcctgggacagccatatgattttttttcccaccaaacaagtatgcaaacagaaaccagttcaaagggggatggagtaaaagatgaggcagtagaaatgcctttgaatggttttctgtagctaattctctttaaattttgtcctgctttttttctttatgcagtgctaggtgttttaagttttctagtagtattgcttttgagttacagtataacctgagttactcctctgctctaacattgttgcagaagaactagtttattgttagccaggttgcttgaaaggttgagagtggagtggtttggcatttctgttttaaataaacatttaagctcttaatc

SEQ ID NO: 20286 - DNA, 1545 bp, Homo sapiens
  source 1..1545: mol_type = unassigned DNA
atgtcggtgctgggcgagtacgagcgacactgcgattccatcaactcggactttgggagcgagtccgggggttgcggggactcgagtccggggcctagcgccagtcaggggccgcgagccggcggcggcgccttcggggaagccacgctgtaccgccgcaccgaggatgactcactggttgtgtggaaggaagtcgatttgacccggctgtctgagaaggaacgtcgtgatgccttgaatgagattgttattctggcactgctgcagcacgacaacattattgcctactacaatcacttcatggacaataccacgctgctgattgagctggaatattgtaatggagggaacctgtatgacaaaatccttcgtcagaaggacaagttgtttgaggaagagatggtggtgtggtacctatttcagattgtttcagcagtgagctgcatccataaagctggaatccttcatagagatataaagacattaaatatttttctgaccaaggcaaacctgataaaacttggagattatggcctagcaaagaaacttaattctgagtattccatggctgagacgcttgtgggaaccccatattacatgtctccagagctctgtcaaggagtaaagtacaatttcaagtctgatatctgggcagttggctgcgtcatttttgaactgcttaccttaaagaggacgtttgatgctacaaacccacttaacctgtgtgtgaagatcgtgcaaggaattcgggccatggaagttgactctagccagtactctttggaattgatccaaatggttcattcgtgccttgaccaggatcctgagcagagacctactgcagatgaacttctagatcgccctcttctcaggaaacgcaggagagagatggaggaaaaagtcactctgcttaatgcacctacaaagagaccaaggtcaagcactgtgactgaagcacccattgctgtagtaacatcacgaaccagtgaagtctatgtttggggtggtggaaaatccaccccccagaaactggatgttatcaagagtggctgtagtgcccggcaggtctgtgcagggaatacccactttgctgtggtcacagtggagaaggaactgtacacttgggtgaacatgcaaggaggcactaaactccatggtcagctgggccatggagacaaagcctcctatcgacagccaaagcatgtggaaaagttgcaaggcaaagctatccgtcaggtgtcatgtggtgatgatttcactgtctgtgtgactgatgagggtcagctctatgccttcggatcagattattatggctgcatgggggtggacaaagttgctggccctgaagtgctagaacccatgcagctgaacttcttcctcagcaatccagtggagcaggtctcctgtggagataatcatgtggtggttctgacacgaaacaaggaagtctattcttggggctgtggcgaatatggtaggggtagccttgtctctgtccacttcttcacaggtatacaacctgacttcaaagttgtatgcatctaa

SEQ ID NO: 20287 - DNA, 5653 bp, Homo sapiens
  source 1..5653: mol_type = unassigned DNA
gtgacgcgccggccgctctcccttagtccgcattcgctccagggttttgggaccctaggttgcggagtccttaccctaccctggcctctcgagcagttgtccccataactcggaatctagagccgctgttgcgaggcaggagcacgtggcagtcaagtagcttcccagtcccgaacgccgcccgtccccaccccgccgtggccactagcaacgacctctgtgaagttggagaggcggtaacggaggcactccccctgctgcaccccgccgtttctacggggctcagaaaccagtttgtttgtttcgtcggggtagtgtcgacctgtcttacgggcgtcgcccgagacaggacggagtcaaacccgtggtatcaactgaagacgagtgtcaggtgtggagagtctcagtgccccctttcagtctggactgtgagctgctgctggttagacagtcttggtttctctttcaggatgtcattttcaaaatgcgggatggtacctctgctttattaagccccgtaggaagactgccacacctagactgatgcttattagtcatcaccgttattcctactaacgtcctgtgtcactgagttttttaaatgtctagcatatctgtaaagatgccttagaaaaagaatcatggagaagtatgttagactacagaagattggagaaggttcatttggaaaagccattcttgttaaatctacagaagatggcagacagtatgttatcaaggaaattaacatctcaagaatgtccagtaaagaaagagaagaatcaaggagagaagttgcagtattggcaaacatgaagcatccaaatattgtccagtatagagaatcatttgaagaaaatggctctctctacatagtaatggattactgtgagggaggggatctgtttaagcgaataaatgctcagaaaggcgttttgtttcaagaggatcagattttggactggtttgtacagatatgtttggccctgaaacatgtacatgatagaaaaattcttcatcgagacattaaatctcagaacatatttttaactaaagatggaacagtacaacttggagattttggaattgctagagttcttaatagtactgtagagctggctcgaacttgcatagggaccccatactacttgtcacctgaaatctgtgaaaacaaaccttacaataataaaagtgacatttgggctctggggtgtgtcctttatgagctgtgtacacttaaacatgcttttgaagctggcagtatgaaaaacctggtactgaagataatatctggatcttttccacctgtgtctttgcattattcctatgatctccgcagtttggtgtctcagttatttaaaagaaatcctagggatagaccatcagtcaactccatattggagaaaggttttatagccaaacgcattgaaaagtttctctctcctcagcttattgcagaagaattttgtctaaaaacattttcgaagtttggatcacagcctataccagctaaaagaccagcttcaggacaaaactcgatttctgttatgcctgctcagaaaattacaaagcctgccgctaaatatggaatacctttagcatataagaaatatggagataaaaaattacacgaaaagaaaccactgcaaaaacataaacaggcccatcaaactccagagaagagagtgaatactggagaagaaaggaggaaaatatctgaggaagcagcaagaaagagaaggctggaatttattgaaaaagaaaagaaacaaaaggatcagattattagtttaatgaaggctgaacaaatgaaaaggcaagaaaaggaaaggttggaaagaataaatagggccagggaacaaggatggagaaatgtgctaagtgctggtggaagtggtgaagtaaaggctccttttctgggcagtggagggactatagctccatcatctttttcttctcgaggacagtatgaacattaccatgccatttttgaccaaatgcagcaacaaagagcagaagataatgaagctaaatggaaaagagaaatatatggtcgaggtcttccagaaagaggaattctgcctggagttcgtccaggatttccttatggggctgcaggtcatcaccattttcctgatgctgatgatattagaaaaactttgaaaagattgaaggcggtgtctaaacaagccaatgcaaacaggcaaaaagggcagctagctgtagaaagagctaaacaagtagaagagttcctgcagcgaaaacgggaagctatgcagaataaagctcgagccgaaggacatatggtttatctggcaagactgaggcaaataagactacagaatttcaatgagcgccaacagattaaagccaaacttcgtggtgaaaagaaagaagctaatcattctgaaggacaagaaggaagtgaagaggctgacatgaggcgcaaaaaaatcgaatcactgaaggcccatgcaaatgcacgtgctgctgtactaaaagaacaactagaacgaaagagaaaggaggcttatgagagagaaaaaaaagtgtgggaagagcatttggtggctaaaggagttaagagttctgatgtttctccacctttgggacagcatgaaacaggtggctctccatcaaagcaacagatgagatctgttatttctgtaacttcagctttgaaagaagttggcgtggacagtagtttaactgatacccgggaaacttcagaagagatgcaaaagaccaacaatgctatttcaagtaagcgagaaatacttcgtagattaaatgaaaatcttaaagctcaagaagatgaaaaaggaaagcagaatctctctgatacttttgagataaatgttcatgaagatgccaaagagcatgaaaaagaaaaatcagtttcatctgatcgcaagaagtgggaggcaggaggtcaacttgtgattcctctggatgagttaacactagatacatccttctctacaactgaaagacatacagtgggagaagttattaaattaggtcctaatggatctccaagaagagcctgggggaaaagtccgacagattctgttctaaagatacttggagaagctgaactacaacttcagacagaactattagaaaatacaactattagaagtgagatttctcccgaaggggaaaagtacaaacccttaattactggagaaaaaaaagtacaatgtatttcacatgaaataaacccatcagctattgttgattctcctgttgagacaaaaagtcccgagttcagtgaggcatctccacagatgtcattgaaactggaaggaaatttagaagaacctgatgatttggaaacagaaattctacaagagccaagtggaacaaacaaagatgagagcttgccatgcactattactgatgtgtggattagtgaggaaaaagaaacaaaggaaactcagtcggcagataggatcaccattcaggaaaatgaagtttctgaagatggagtctcgagtactgtggaccaacttagtgacattcatatagagcctggaaccaatgattctcagcactctaaatgtgatgtagataagtctgtgcaaccggaaccatttttccataaggtggttcattctgaacacttgaacttagtccctcaagttcaatcagttcagtgttcaccagaagaatcctttgcatttcgatctcactcgcatttaccaccaaaaaataaaaacaagaattccttgctgattggactttcaactggtctgtttgatgcaaacaacccaaagatgttaaggacatgttcacttccagatctctcaaagctgttcagaacccttatggatgttcccaccgtaggagatgttcgtcaagacaatcttgaaatagatgaaattgaagatgaaaacattaaagaaggaccttctgattctgaagacattgtgtttgaagaaactgacacagatttacaagagctgcaggcctcgatggaacagttacttagggaacaacctggtgaagaatacagtgaagaagaagagtcagtcttgaagaacagtgatgtggagccaactgcaaatgggacagatgtggcagatgaagatgacaatcccagcagtgaaagtgccctgaacgaagaatggcactcagataacagtgatggtgaaattgctagtgaatgtgaatgcgatagtgtctttaaccatttagaggaactgagacttcatctggagcaggaaatgggctttgaaaaattctttgaggtttatgagaaaataaaggctattcatgaagatgaagatgaaaatattgaaatttgttcaaaaatagttcaaaatattttgggaaatgaacatcagcatctttatgccaagattcttcatttagtcatggcagatggagcctaccaagaagataatgatgaataatcctcaaaatgttttttaatcctcaactatatgaaagcatttgaatttggcttatcagaataacaagcttcagtgggaaatacagcaattatttatttaaaaaatcagatttaagatggactttcttattgcatgaaaaagatggagaaacatgccatttttcagtgaagattctaatattttatctattttgttcattgaattccatggttaaatctcataaaatatatactttattaaatcatccaaccaaagcataggaaacattgacccagaacctgacttaatggttttgaagatttactatgcaatagggtaactttgagtttcagcaaatgtctttaggttgaaggaattacctatgtcatgaaggacctgtctgtggtttttcaatggagtctttaagcatgatcttttttctgtctagtacttgttttcattctggccagcagttctacattaaatcaccttgtcaagggctctgtttacatctatacattttgaagatgaaatttttagccttaaagtttatattctcaagtccttttacaatcagtgtgtctcctgaactagcacacaggctgtagaaacagtcttagaaatcattgaaagatttgattatgaaagaatagcaaaattatatttcttgacatataaaaagttggtttaatgcctttatttctctttaaggaccagaaccaggaatactatatcgaaaaattagtctgtggatttaacactgacttagcatatagcttaaagttgctcttttggtttttaacttcctccatacataagcttcaaggacaataagatgttaaaaaggaggaaataattatttttattttgacactgtgacagttttggtaactaggatcctagggagggaaatgtttgcctgttgaacttctttctgttatgagaggatttagttaggtcattaagatgttgatcacacagcttcaatcacaatatgccaagtataacctggtttcgttagaggtgtctacagtccagatgttcttcgtaataaaagcaaagtttttgaacctctgagtccaaagcaggctggttggcataatatgtaatttgaaaaataaaatcttatcttgcagcactatcagtatgttgaatttattatgtatattatttctaatatccgaaactaaatacttgattttttaatatgtgtgtttattttatgatattgctattaaatttttattatctacctg

SEQ ID NO: 20288 - DNA, 5556 bp, Homo sapiens
  source 1..5556: mol_type = unassigned DNA
gtcacacgccagcgccggtgacgcgccggccgctctcccttagtccgcattcgctccagggttttgggaccctaggttgcggagtccttaccctaccctggcctctcgagcagttgtccccataactcggaatctagagccgctgttgcgaggcaggagcacgtggcagtcaagtagcttcccagtcccgaacgccgcccgtccccaccccgccgtggccactagcaacgacctctgtgaagttggagaggcggtaacggaggcactccccctgctgcaccccgccgtttctacggggctcagaaaccagtttgtttgtttcgtcggggtagtgtcgacctgtcttacgggcgtcgcccgagacaggacggagtcaaacccgtggtatcaactgaagacgagtgtcaggatgtcattttcaaaatgcgggatggtacctctgctttattaagccccgtaggaagactgccacacctagactgatgcttattagtcatcaccgttattcctactaacgtcctgtgtcactgagttttttaaatgtctagcatatctgtaaagatgccttagaaaaagaatcatggagaagtatgttagactacagaagattggagaaggttcatttggaaaagccattcttgttaaatctacagaagatggcagacagtatgttatcaaggaaattaacatctcaagaatgtccagtaaagaaagagaagaatcaaggagagaagttgcagtattggcaaacatgaagcatccaaatattgtccagtatagagaatcatttgaagaaaatggctctctctacatagtaatggattactgtgagggaggggatctgtttaagcgaataaatgctcagaaaggcgttttgtttcaagaggatcagattttggactggtttgtacagatatgtttggccctgaaacatgtacatgatagaaaaattcttcatcgagacattaaatctcagaacatatttttaactaaagatggaacagtacaacttggagattttggaattgctagagttcttaatagtactgtagagctggctcgaacttgcatagggaccccatactacttgtcacctgaaatctgtgaaaacaaaccttacaataataaaagtgacatttgggctctggggtgtgtcctttatgagctgtgtacacttaaacatgcttttgaagctggcagtatgaaaaacctggtactgaagataatatctggatcttttccacctgtgtctttgcattattcctatgatctccgcagtttggtgtctcagttatttaaaagaaatcctagggatagaccatcagtcaactccatattggagaaaggttttatagccaaacgcattgaaaagtttctctctcctcagcttattgcagaagaattttgtctaaaaacattttcgaagtttggatcacagcctataccagctaaaagaccagcttcaggacaaaactcgatttctgttatgcctgctcagaaaattacaaagcctgccgctaaatatggaatacctttagcatataagaaatatggagataaaaaattacacgaaaagaaaccactgcaaaaacataaacaggcccatcaaactccagagaagagagtgaatactggagaagaaaggaggaaaatatctgaggaagcagcaagaaagagaaggctggaatttattgaaaaagaaaagaaacaaaaggatcagattattagtttaatgaaggctgaacaaatgaaaaggcaagaaaaggaaaggttggaaagaataaatagggccagggaacaaggatggagaaatgtgctaagtgctggtggaagtggtgaagtaaaggctccttttctgggcagtggagggactatagctccatcatctttttcttctcgaggacagtatgaacattaccatgccatttttgaccaaatgcagcaacaaagagcagaagataatgaagctaaatggaaaagagaaatatatggtcgaggtcttccagaaagaggaattctgcctggagttcgtccaggatttccttatggggctgcaggtcatcaccattttcctgatgctgatgatattagaaaaactttgaaaagattgaaggcggtgtctaaacaagccaatgcaaacaggcaaaaagggcagctagctgtagaaagagctaaacaagtagaagagttcctgcagcgaaaacgggaagctatgcagaataaagctcgagccgaaggacatatgggaatcctgcaaaacctggcagctatgtatggaggcaggcccagctcttcaagaggagggaagccaagaaacaaagaggaagaggtttatctggcaagactgaggcaaataagactacagaatttcaatgagcgccaacagattaaagccaaacttcgtggtgaaaagaaagaagctaatcattctgaaggacaagaaggaagtgaagaggctgacatgaggcgcaaaaaaatcgaatcactgaaggcccatgcaaatgcacgtgctgctgtactaaaagaacaactagaacgaaagagaaaggaggcttatgagagagaaaaaaaagtgtgggaagagcatttggtggctaaaggagttaagagttctgatgtttctccacctttgggacagcatgaaacaggtggctctccatcaaagcaacagatgagatctgttatttctgtaacttcagctttgaaagaagttggcgtggacagtagtttaactgatacccgggaaacttcagaagagatgcaaaagaccaacaatgctatttcaagtaagcgagaaatacttcgtagattaaatgaaaatcttaaagctcaagaagatgaaaaaggaaagcagaatctctctgatacttttgagataaatgttcatgaagatgccaaagagcatgaaaaagaaaaatcagtttcatctgatcgcaagaagtgggaggcaggaggtcaacttgtgattcctctggatgagttaacactagatacatccttctctacaactgaaagacatacagtgggagaagttattaaattaggtcctaatggatctccaagaagagcctgggggaaaagtccgacagattctgttctaaagatacttggagaagctgaactacaacttcagacagaactattagaaaatacaactattagaagtgagatttctcccgaaggggaaaagtacaaacccttaattactggagaaaaaaaagtacaatgtatttcacatgaaataaacccatcagctattgttgattctcctgttgagacaaaaagtcccgagttcagtgaggcatctccacagatgtcattgaaactggaaggaaatttagaagaacctgatgatttggaaacagaaattctacaagagccaagtggaacaaacaaagatgagagcttgccatgcactattactgatgtgtggattagtgaggaaaaagaaacaaaggaaactcagtcggcagataggatcaccattcaggaaaatgaagtttctgaagatggagtctcgagtactgtggaccaacttagtgacattcatatagagcctggaaccaatgattctcagcactctaaatgtgatgtagataagtctgtgcaaccggaaccatttttccataaggtggttcattctgaacacttgaacttagtccctcaagttcaatcagttcagtgttcaccagaagaatcctttgcatttcgatctcactcgcatttaccaccaaaaaataaaaacaagaattccttgctgattggactttcaactggtctgtttgatgcaaacaacccaaagatgttaaggacatgttcacttccagatctctcaaagctgttcagaacccttatggatgttcccaccgtaggagatgttcgtcaagacaatcttgaaatagatgaaattgaagatgaaaacattaaagaaggaccttctgattctgaagacattgtgtttgaagaaactgacacagatttacaagagctgcaggcctcgatggaacagttacttagggaacaacctggtgaagaatacagtgaagaagaagagtcagtcttgaagaacagtgatgtggagccaactgcaaatgggacagatgtggcagatgaagatgacaatcccagcagtgaaagtgccctgaacgaagaatggcactcagataacagtgatggtgaaattgctagtgaatgtgaatgcgatagtgtctttaaccatttagaggaactgagacttcatctggagcaggaaatgggctttgaaaaattctttgaggtttatgagaaaataaaggctattcatgaagatgaagatgaaaatattgaaatttgttcaaaaatagttcaaaatattttgggaaatgaacatcagcatctttatgccaagattcttcatttagtcatggcagatggagcctaccaagaagataatgatgaataatcctcaaaatgttttttaatcctcaactatatgaaagcatttgaatttggcttatcagaataacaagcttcagtgggaaatacagcaattatttatttaaaaaatcagatttaagatggactttcttattgcatgaaaaagatggagaaacatgccatttttcagtgaagattctaatattttatctattttgttcattgaattccatggttaaatctcataaaatatatactttattaaatcatccaaccaaagcataggaaacattgacccagaacctgacttaatggttttgaagatttactatgcaatagggtaactttgagtttcagcaaatgtctttaggttgaaggaattacctatgtcatgaaggacctgtctgtggtttttcaatggagtctttaagcatgatcttttttctgtctagtacttgttttcattctggccagcagttctacattaaatcaccttgtcaagggctctgtttacatctatacattttgaagatgaaatttttagccttaaagtttatattctcaagtccttttacaatcagtgtgtctcctgaactagcacacaggctgtagaaacagtcttagaaatcattgaaagatttgattatgaaagaatagcaaaattatatttcttgacatataaaaagttggtttaatgcctttatttctctttaaggaccagaaccaggaatactatatcgaaaaattagtctgtggatttaacactgacttagcatatagcttaaagttgctcttttggtttttaacttcctccatacataagcttcaaggacaataagatgttaaaaaggaggaaataattatttttattttgacactgtgacagttttggtaactaggatcctagggagggaaatgtttgcctgttgaacttctttctgttatgagaggatttagttaggtcattaagatgttgatcacacagcttcaatcacaatatgccaagtataacctggtttcgttagaggtgtctacagtccagatgttcttcgtaataaaagcaaagtttttgaacctctgagtccaaagcaggctggttggcataatatgtaatttgaaaaataaaatcttatcttgcag

SEQ ID NO: 20289 - DNA, 5377 bp, Homo sapiens
  source 1..5377: mol_type = unassigned DNA
gcattcgctccagggttttgggaccctaggttgcggagtccttaccctaccctggcctctcgagcagttgtccccataactcggaatctagagccgctgttgcgaggcaggagcacgtggcagtcaagtagcttcccagtcccgaacgccgcccgtccccaccccgccgtggccactagcaacgacctctgtgaagttggagaggcggtaacggaggcactccccctgctgcaccccgccgtttctacggggctcagaaaccagtttgtttgtttcgtcggggtagtgtcgacctgtcttacgggcgtcgcccgagacaggacggagtcaaacccgtggtatcaactgaagacgagtgtcaggtgtggagagtctcagtgccccctttcagtctggactgtgagctgctgctggttagacagtcttggtttctctttcaggatgtcattttcaaaatgcgggatggtacctctgctttattaagccccgtaggaagactgccacacctagactgatgcttattagtcatcaccgttattcctactaacgtcctgtgtcactgagttttttaaatgtctagcatatctgtaaagatgccttagaaaaagaatcatggagaagtatgttagactacagaagattggagaaggttcatttggaaaagccattcttgttaaatctacagaagatggcagacagtatgttatcaaggaaattaacatctcaagaatgtccagtaaagaaagagaagaatcaaggagagaagttgcagtattggcaaacatgaagcatccaaatattgtccagtatagagaatcatttgaagaaaatggctctctctacatagtaatggattactgtgagggaggggatctgtttaagcgaataaatgctcagaaaggcgttttgtttcaagaggatcagattttggactggtttgtacagatatgtttggccctgaaacatgtacatgatagaaaaattcttcatcgagacattaaatctcagaacatatttttaactaaagatggaacagtacaacttggagattttggaattgctagagttcttaatagtactgtagagctggctcgaacttgcatagggaccccatactacttgtcacctgaaatctgtgaaaacaaaccttacaataataaaagtgacatttgggctctggggtgtgtcctttatgagctgtgtacacttaaacatgcttttgaagctggcagtatgaaaaacctggtactgaagataatatctggatcttttccacctgtgtctttgcattattcctatgatctccgcagtttggtgtctcagttatttaaaagaaatcctagggatagaccatcagtcaactccatattggagaaaggttttatagccaaacgcattgaaaagtttctctctcctcagcttattgcagaagaattttgtctaaaaacattttcgaagtttggatcacagcctataccagctaaaagaccagcttcaggacaaaactcgatttctgttatgcctgctcagaaaattacaaagcctgccgctaaatatggaatacctttagcatataagaaatatggagataaaaaattacacgaaaagaaaccactgcaaaaacataaacaggcccatcaaactccagagaagagagtgaatactggagaagaaaggaggaaaatatctgaggaagcagcaagaaagagaaggctggaatttattgaaaaagaaaagaaacaaaaggatcagattattagtttaatgaaggctgaacaaatgaaaaggcaagaaaaggaaaggttggaaagaataaatagggccagggaacaaggatggagaaatgtgctaagtgctggtggaagtggtgaagtaaaggctccttttctgggcagtggagggactatagctccatcatctttttcttctcgaggacagtatgaacattaccatgccatttttgaccaaatgcagcaacaaagagcagaagataatgaagctaaatggaaaagagaaatatatggtcgaggtcttccagaaaggcaaaaagggcagctagctgtagaaagagctaaacaagtagaagagttcctgcagcgaaaacgggaagctatgcagaataaagctcgagccgaaggacatatggtttatctggcaagactgaggcaaataagactacagaatttcaatgagcgccaacagattaaagccaaacttcgtggtgaaaagaaagaagctaatcattctgaaggacaagaaggaagtgaagaggctgacatgaggcgcaaaaaaatcgaatcactgaaggcccatgcaaatgcacgtgctgctgtactaaaagaacaactagaacgaaagagaaaggaggcttatgagagagaaaaaaaagtgtgggaagagcatttggtggctaaaggagttaagagttctgatgtttctccacctttgggacagcatgaaacaggtggctctccatcaaagcaacagatgagatctgttatttctgtaacttcagctttgaaagaagttggcgtggacagtagtttaactgatacccgggaaacttcagaagagatgcaaaagaccaacaatgctatttcaagtaagcgagaaatacttcgtagattaaatgaaaatcttaaagctcaagaagatgaaaaaggaaagcagaatctctctgatacttttgagataaatgttcatgaagatgccaaagagcatgaaaaagaaaaatcagtttcatctgatcgcaagaagtgggaggcaggaggtcaacttgtgattcctctggatgagttaacactagatacatccttctctacaactgaaagacatacagtgggagaagttattaaattaggtcctaatggatctccaagaagagcctgggggaaaagtccgacagattctgttctaaagatacttggagaagctgaactacaacttcagacagaactattagaaaatacaactattagaagtgagatttctcccgaaggggaaaagtacaaacccttaattactggagaaaaaaaagtacaatgtatttcacatgaaataaacccatcagctattgttgattctcctgttgagacaaaaagtcccgagttcagtgaggcatctccacagatgtcattgaaactggaaggaaatttagaagaacctgatgatttggaaacagaaattctacaagagccaagtggaacaaacaaagatgagagcttgccatgcactattactgatgtgtggattagtgaggaaaaagaaacaaaggaaactcagtcggcagataggatcaccattcaggaaaatgaagtttctgaagatggagtctcgagtactgtggaccaacttagtgacattcatatagagcctggaaccaatgattctcagcactctaaatgtgatgtagataagtctgtgcaaccggaaccatttttccataaggtggttcattctgaacacttgaacttagtccctcaagttcaatcagttcagtgttcaccagaagaatcctttgcatttcgatctcactcgcatttaccaccaaaaaataaaaacaagaattccttgctgattggactttcaactggtctgtttgatgcaaacaacccaaagatgttaaggacatgttcacttccagatctctcaaagctgttcagaacccttatggatgttcccaccgtaggagatgttcgtcaagacaatcttgaaatagatgaaattgaagatgaaaacattaaagaaggaccttctgattctgaagacattgtgtttgaagaaactgacacagatttacaagagctgcaggcctcgatggaacagttacttagggaacaacctggtgaagaatacagtgaagaagaagagtcagtcttgaagaacagtgatgtggagccaactgcaaatgggacagatgtggcagatgaagatgacaatcccagcagtgaaagtgccctgaacgaagaatggcactcagataacagtgatggtgaaattgctagtgaatgtgaatgcgatagtgtctttaaccatttagaggaactgagacttcatctggagcaggaaatgggctttgaaaaattctttgaggtttatgagaaaataaaggctattcatgaagatgaagatgaaaatattgaaatttgttcaaaaatagttcaaaatattttgggaaatgaacatcagcatctttatgccaagattcttcatttagtcatggcagatggagcctaccaagaagataatgatgaataatcctcaaaatgttttttaatcctcaactatatgaaagcatttgaatttggcttatcagaataacaagcttcagtgggaaatacagcaattatttatttaaaaaatcagatttaagatggactttcttattgcatgaaaaagatggagaaacatgccatttttcagtgaagattctaatattttatctattttgttcattgaattccatggttaaatctcataaaatatatactttattaaatcatccaaccaaagcataggaaacattgacccagaacctgacttaatggttttgaagatttactatgcaatagggtaactttgagtttcagcaaatgtctttaggttgaaggaattacctatgtcatgaaggacctgtctgtggtttttcaatggagtctttaagcatgatcttttttctgtctagtacttgttttcattctggccagcagttctacattaaatcaccttgtcaagggctctgtttacatctatacattttgaagatgaaatttttagccttaaagtttatattctcaagtccttttacaatcagtgtgtctcctgaactagcacacaggctgtagaaacagtcttagaaatcattgaaagatttgattatgaaagaatagcaaaattatatttcttgacatataaaaagttggtttaatgcctttatttctctttaaggaccagaaccaggaatactatatcgaaaaattagtctgtggatttaacactgacttagcatatagcttaaagttgctcttttggtttttaacttcctccatacataagcttcaaggacaataagatgttaaaaaggaggaaataattatttttattttgacactgtgacagttttggtaactaggatcctagggagggaaatgtttgcctgttgaacttctttctgttatgagaggatttagttaggtcattaagatgttgatcacacagcttcaatcacaatatgccaagtataacctggtttcgttagaggtgtctacagtccagatgttcttcgtaataaaagcaaagtttttgaacctctgagtccaaagcaggctggttggcataatatgtaatttgaaaaataaaatcttatcttgcagcacta

SEQ ID NO: 20290 - DNA, 4430 bp, Homo sapiens
  source 1..4430: mol_type = unassigned DNA
cacacgccagcgccggtgacgcgccggccgctctcccttagtccgcattcgctccagggttttgggaccctaggttgcggagtccttaccctaccctggcctctcgagcagttgtccccataactcggaatctagagccgctgttgcgaggcaggagcacgtggcagtcaagtagcttcccagtcccgaacgccgcccgtccccaccccgccgtggccactagcaacgacctctgtgaagttggagaggcggtaacggaggcactccccctgctgcaccccgccgtttctacggggctcagaaaccagtttgtttgtttcgtcggggtagtgtcgacctgtcttacgggcgtcgcccgagacaggacggagtcaaacccgtggtatcaactgaagacgagtgtcaggatgtcattttcaaaatgcgggatggtacctctgctttattaagccccgtaggaagactgccacacctagactgatgcttattagtcatcaccgttattcctactaacgtcctgtgtcactgagttttttaaatgtctagcatatctgtaaagatgccttagaaaaagaatcatggagaagtatgttagactacagaagattggagaaggttcatttggaaaagccattcttgttaaatctacagaagatggcagacagtatgttatcaaggaaattaacatctcaagaatgtccagtaaagaaagagaagaatcaaggagagaagttgcagtattggcaaacatgaagcatccaaatattgtccagtatagagaatcatttgaagaaaatggctctctctacatagtaatggattactgtgagggaggggatctgtttaagcgaataaatgctcagaaaggcgttttgtttcaagaggatcagattttggactggtttgtacagatatgtttggccctgaaacatgtacatgatagaaaaattcttcatcgagacattaaatctcagaacatatttttaactaaagatggaacagtacaacttggagattttggaattgctagagttcttaatagtactgtagagctggctcgaacttgcatagggaccccatactacttgtcacctgaaatctgtgaaaacaaaccttacaataataaaagtgacatttgggctctggggtgtgtcctttatgagctgtgtacacttaaacatgcttttgaagctggcagtatgaaaaacctggtactgaagataatatctggatcttttccacctgtgtctttgcattattcctatgatctccgcagtttggtgtctcagttatttaaaagaaatcctagggatagaccatcagtcaactccatattggagaaaggttttatagccaaacgcattgaaaagtttctctctcctcagcttattgcagaagaattttgtctaaaaacattttcgaagtttggatcacagcctataccagctaaaagaccagcttcaggacaaaactcgatttctgttatgcctgctcagaaaattacaaagcctgccgctaaatatggaatacctttagcatataagaaatatggagataaaaaattacacgaaaagaaaccactgcaaaaacataaacaggcccatcaaactccagagaagagagtgaatactggagaagaaaggaggaaaatatctgaggaagcagcaagaaagagaaggctggaatttattgaaaaagaaaagaaacaaaaggatcagattattagtttaatgaaggctgaacaaatgaaaaggcaagaaaaggaaagggctccttttctgggcagtggagggactatagctccatcatctttttcttctcgaggacagtatgaacattaccatgccatttttgaccaaatgcagcaacaaagagcagaagataatgaagctaaatggaaaagagaaatatatggtcgaggtcttccagaaaggcaaaaagggcagctagctgtagaaagagctaaacaagtagaagagttcctgcagcgaaaacgggaagctatgcagaataaagctcgagccgaaggacatatggtttatctggcaagactgaggcaaataagactacagaatttcaatgagcgccaacagattaaagccaaacttcgtggtgaaaagaaagaagctaatcattctgaaggacaagaaggaagtgaagaggctgacatgaggcgcaaaaaaatcgaatcactgaaggcccatgcaaatgcacgtgctgctgtactaaaagaacaactagaacgaaagagaaaggaggcttatgagagagaaaaaaaagtgtgggaagagcatttggtggctaaaggagttaagagttctgatgtttctccacctttgggacagcatgaaacaggtggctctccatcaaagcaacagatgagatctgttatttctgtaacttcagctttgaaagaagttggcgtggacagtagtttaactgatacccgggaaacttcagaagagatgcaaaagaccaacaatgctatttcaagtaagcgagaaatacttcgtagattaaatgaaaatcttaaagctcaagaagatgaaaaaggaaagcagaatctctctgatacttttgagataaatgttcatgaagatgccaaagagcatgaaaaagaaaaatcagtttcatctgatcgcaagaagtgggaggcaggaggtcaacttgtgattcctctggatgagttaacactagatacatccttctctacaactgaaagacatacagtgggagaagttattaaattaggtcctaatggatctccaagaagagcctgggggaaaagtccgacagattctgttctaaagatacttggagaagctgaactacaacttcagacagaactattagaaaatacaactattagaagtgagatttctcccgaaggggaaaagtacaaacccttaattactggagaaaaaaaagtacaatgtatttcacatgaaataaacccatcagctattgttgattctcctgttgagacaaaaagtcccgagttcagtgaggcatctccacagatgtcattgaaactggaaggaaatttagaagaacctgatgatttggaaacagaaattctacaagagccaagtggaacaaacaaagatgagagcttgccatgcactattactgatgtgtggattagtgaggaaaaagaaacaaaggaaactcagtcggcagataggatcaccattcaggaaaatgaagtttctgaagatggagtctcgagtactgtggaccaacttagtgacattcatatagagcctggaaccaatgattctcagcactctaaatgtgatgtagataagtctgtgcaaccggaaccatttttccataaggtggttcattctgaacacttgaacttagtccctcaagttcaatcagttcagtgttcaccagaagaatcctttgcatttcgatctcactcgcatttaccaccaaaaaataaaaacaagaattccttgctgattggactttcaactggtctgtttgatgcaaacaacccaaagatgttaaggacatgttcacttccagatctctcaaagctgttcagaacccttatggatgttcccaccgtaggagatgttcgtcaagacaatcttgaaatagatgaaattgaagatgaaaacattaaagaaggaccttctgattctgaagacattgtgtttgaagaaactgacacagatttacaagagctgcaggcctcgatggaacagttacttagggaacaacctggtgaagaatacagtgaagaagaagagtcagtcttgaagaacagtgatgtggagccaactgcaaatgggacagatgtggcagatgaagatgacaatcccagcagtgaaagtgccctgaacgaagaatggcactcagataacagtgatggtgaaattgctagtgaatgtgaatgcgatagtgtctttaaccatttagaggaactgagacttcatctggagcaggaaatgggctttgaaaaattctttgaggtttatgagaaaataaaggctattcatgaagatgaagatgaaaatattgaaatttgttcaaaaatagttcaaaatattttgggaaatgaacatcagcatctttatgccaagattcttcatttagtcatggcagatggagcctaccaagaagataatgatgaataatcctcaaaatgttttttaatcctcaactatatgaaagcatttgaatttggcttatcagaataacaagcttcagtgggaaatacagcaattatttatttaaaaaatcagatttaagatggactttcttattgcatgaaaaagatggagaaacatgccatttttcagtgaagattctaatattttatctattttgttcattgaattccatggttaaatctcataaaatatatactttattaaatcatccaaccaaagcataggaaacattgacccagaacctga

SEQ ID NO: 20291 - DNA, 1865 bp, Homo sapiens
  source 1..1865: mol_type = unassigned DNA
ggagttcctggtccctggagctccgcacttggcggcgcaacctgcgtgaggcagcgcgactctggcgactggccggccatgccttcccgggctgaggactatgaagtgttgtacaccattggcacaggctcctacggccgctgccagaagatccggaggaagagtgatggcaagatattagtttggaaagaacttgactatggctccatgacagaagctgagaaacagatgcttgtttctgaagtgaatttgcttcgtgaactgaaacatccaaacatcgttcgttactatgatcggattattgaccggaccaatacaacactgtacattgtaatggaatattgtgaaggaggggatctggctagtgtaattacaaagggaaccaaggaaaggcaatacttagatgaagagtttgttcttcgagtgatgactcagttgactctggccctgaaggaatgccacagacgaagtgatggtggtcataccgtattgcatcgggatctgaaaccagccaatgttttcctggatggcaagcaaaacgtcaagcttggagactttgggctagctagaatattaaaccatgacacgagttttgcaaaaacatttgttggcacaccttattacatgtctcctgaacaaatgaatcgcatgtcctacaatgagaaatcagatatctggtcattgggctgcttgctgtatgagttatgtgcattaatgcctccatttacagcttttagccagaaagaactcgctgggaaaatcagagaaggcaaattcaggcgaattccataccgttactctgatgaattgaatgaaattattacgaggatgttaaacttaaaggattaccatcgaccttctgttgaagaaattcttgagaaccctttaatagcagatttggttgcagacgagcaaagaagaaatcttgagagaagagggcgacaattaggagagccagaaaaatcgcaggattccagccctgtattgagtgagctgaaactgaaggaaattcagttacaggagcgagagcgagctctcaaagcaagagaagaaagattggagcagaaagaacaggagctttgtgttcgtgagagactagcagaggacaaactggctagagcagaaaatctgttgaagaactacagcttgctaaaggaacggaagttcctgtctctggcaagtaatccaggtatgagaatcaacttggtcaacagaagctggtgctacaaatgaagaaatgtgcaccagtgttgctcccaaagtggcttaggtagcccttttcatttacaaatctcaaattttaagatggatttcattgaatatatgcatttcaatggaaacaaaattctgttatagcaatgatttatttcctgggttcatagacctgaggcaatgagtcatagaatttcatgtttgattttctttaccttatcaaactacatgtttagtaattgatacttatttttattatcattatttatttttttattttttttgagatggagtctcactctgtagcccaggctggagtgcagtggcacaatctcggctcactgcaagctctgcctcccgggttcacgccattcttctgcctcagcctcccaagtagctgggactacagacacccgccaccaagcccggctaatttttgtatttttagtagagacggggtttcaccgtgttagccaggatggtctcgatttcctgacctcgtgatccgcctgcctcggcctcccaatgtgctgggattacaggcatgagacaccgtgcccagccgatacttatttttaaaaattagggcatttacaaaactattgtatgtttcagatttcagagagataaactgcatttcaagtaaaaataaa

SEQ ID NO: 20292 - DNA, 2131 bp, Homo sapiens
  source 1..2131: mol_type = unassigned DNA
cggggcccaaggcaggggtggcgggtcagtgctgctcgggggcttctccatccaggtccctggagttcctggtccctggagctccgcacttggcggcgcaacctgcgtgaggcagcgcgactctggcgactggccggccatgccttcccgggctgaggactatgaagtgttgtacaccattggcacaggctcctacggccgctgccagaagatccggaggaagagtgatggcaagatattagtttggaaagaacttgactatggctccatgacagaagctgagaaacagatgcttgtttctgaagtgaatttgcttcgtgaactgaaacatccaaacatcgttcgttactatgatcggattattgaccggaccaatacaacactgtacattgtaatggaatattgtgaaggaggggatctggctagtgtaattacaaagggaaccaaggaaaggcaatacttagatgaagagtttgttcttcgagtgatgactcagttgactctggccctgaaggaatgccacagacgaagtgatggtggtcataccgtattgcatcgggatctgaaaccagccaatgttttcctggatggcaagcaaaacgtcaagcttggagactttgggctagctagaatattaaaccatgacacgagttttgcaaaaacatttgttggcacaccttattacatgtctcctgaacaaatgaatcgcatgtcctacaatgagaaatcagatatctggtcattgggctgcttgctgtatgagttatgtgcattaatgcctccatttacagcttttagccagaaagaactcgctgggaaaatcagagaaggcaaattcaggcgaattccataccgttactctgatgaattgaatgaaattattacgaggatgttaaacttaaaggattaccatcgaccttctgttgaagaaattcttgagaaccctttaatagcagatttggttgcagacgagcaaagaagaaatcttgagagaagagggcgacaattaggagagccagaaaaatcgcaggattccagccctgtattgagtgagctgaaactgaaggaaattcagttacaggagcgagagcgagctctcaaagcaagagaagaaagattggagcagaaagaacaggagctttgtgttcgtgagagactagcagaggacaaactggctagagcagaaaatctgttgaagaactacagcttgctaaaggaacggaagttcctgtctctggcaagtaatccagaacttcttaatcttccatcctcagtaattaagaagaaagttcatttcagtggggaaagtaaagagaacatcatgaggagtgagaattctgagagtcagctcacatctaagtccaagtgcaaggacctgaagaaaaggcttcacgctgcccagctgcgggctcaagccctgtcagatattgagaaaaattaccaactgaaaagcagacagatcctgggcatgcgctagccaggtagagagacacagagctgtgtacaggatgtaatattaccaacctttaaagactgatattcaaatgctgtagtgttgaatacttggttccatgagccatgcctttctgtatagtacacatgatatttcggaattggttttactgttcttcagcaactattgtacaaaatgttcacatttaatttttctttcttcttttaagaacatattataaaaagaatactttcttggttgggcttttaatcctgtgtgtgattactagtaggaacatgagatgtgacattctaaatcttgggagaaaaaataatgttaggaaaaaaatatttatgcaggaagagtagcactcactgaatagttttaaatgactgagtggtatgcttacaattgtcatgtctagatttaaattttaagtctgagattttaaatgtttttgagcttagaaaacccagttagatgcaatttggtcattaataccatgacatcttgcttataaatattccattgctctgtagttcaaatctgttagctttgtgaaaattcatcactgtgatgtttgtattctttttttttttctgtttaacagaatatgagctgtctgtcatttacctacttctttcccactaaataaaagaattcttcagtttccctgta

SEQ ID NO: 20293 - DNA, 1641 bp, Homo sapiens
  source 1..1641: mol_type = unassigned DNA
agtgctgctcgggggcttctccatccaggtccctggagttcctggtccctggagctccgcacttggctcctacggccgctgccagaagatccggaggaagagtgatggcaagatattagtttggaaagaacttgactatggctccatgacagaagctgagaaacagatgcttgtttctgaagtgaatttgcttcgtgaactgaaacatccaaacatcgttcgttactatgatcggattattgaccggaccaatacaacactgtacattgtaatggaatattgtgaaggaggggatctggctagtgtaattacaaagggaaccaaggaaaggcaatacttagatgaagagtttgttcttcgagtgatgactcagttgactctggccctgaaggaatgccacagacgaagtgatggtggtcataccgtattgcatcgggatctgaaaccagccaatgttttcctggatggcaagcaaaacgtcaagcttggagactttgggctagctagaatattaaaccatgacacgagttttgcaaaaacatttgttggcacaccttattacatgtctcctgaacaaatgaatcgcatgtcctacaatgagaaatcagatatctggtcattgggctgcttgctgtatgagttatgtgcattaatgcctccatttacagcttttagccagaaagaactcgctgggaaaatcagagaaggcaaattcaggcgaattccataccgttactctgatgaattgaatgaaattattacgaggatgttaaacttaaaggattaccatcgaccttctgttgaagaaattcttgagaaccctttaatagcagatttggttgcagacgagcaaagaagaaatcttgagagaagagggcgacaattaggagagccagaaaaatcgcaggattccagccctgtattgagtgagctgaaactgaaggaaattcagttacaggagcgagagcgagctctcaaagcaagagaagaaagattggagcagaaagaacaggagctttgtgttcgtgagagactagcagaggacaaactggctagagcagaaaatctgttgaagaactacagcttgctaaaggaacggaagttcctgtctctggcaagtaatccagaacttcttaatcttccatcctcagtaattaagaagaaagttcatttcagtggggaaagtaaagagaacatcatgaggagtgagaattctgagagtcagctcacatctaagtccaagtgcaaggacctgaagaaaaggcttcacgctgcccagctgcgggctcaagccctgtcagatattgagaaaaattaccaactgaaaagcagacagatcctgggcatgcgctagccaggtagagagacacagagctgtgtacaggatgtaatattaccaacctttaaagactgatattcaaatgctgtagtgttgaatacttggttccatgagccatgcctttctgtatagtacacatgatatttcggaattggttttactgttcttcagcaactattgtacaaaatgttcacatttaatttttctttcttcttttaagaacatattataaaaagaatactttcttggttgggcttttaatcctgtgtgtgattactagtaggaacatgagatgtgacatt

SEQ ID NO: 20294 - DNA, 2396 bp, Homo sapiens
  source 1..2396: mol_type = unassigned DNA
cacatagctagtaagttctagctagcactgagtgctgtgcccgtgaaatttatctacataggctttcacttaacctgcagacagaactcagttagtcggggacaatttccctcaatgttaacagcactgttccaccgcaacgtggaacaacagctttaaaacgtgctcttcgtaggcccggctactccaagaacagtgcctcccgccagacccaggcggcttccttcacccgcaacccgagagacgacccgccgggcccgccccgcggaagccgccggttgccaggccaaggagtggactagggtcgccggggaagcggtttgggagagcccatggtgactgcgtgagtggagcccagctgtgtggatgccccagcatggatgactacatggtcctgagaatgattggggagggctccttcggcagagctcttttggttcagcatgaaagcagtaatcagatgtttgccatgaaagaaataaggcttcccaagtctttctctaatacacagaattctaggaaggaggctgttcttttagccaaaatgaaacaccctaatattgttgccttcaaagaatcatttgaagctgaaggacacttgtatattgtgatggaatactgtgatggaggggatctaatgcaaaagattaaacagcagaaaggaaagttatttcctgaagacatgatacttaattggtttacccaaatgtgccttggagtaaatcacattcacaagaaacgtgtgctacacagagatatcaagtccaagaatatcttcctcactcagaatggaaaagtgaaattgggagactttggatctgcccgtcttctctccaatccgatggcatttgcttgtacctatgtgggaactccttattatgtgcctccagaaatttgggaaaacctgccttataacaataaaagtgacatctggtccttgggttgcatcctgtatgaactctgtacccttaagcatccatttcaggcaaatagttggaaaaatcttatcctcaaagtatgtcaagggtgcatcagtccactgccgtctcattactcctatgaacttcagttcctagtcaagcagatgtttaaaaggaatccctcacatcgcccctcggctacaacgcttctctctcgaggcatcgtagctcggcttgtccagaagtgcttaccccccgagatcatcatggaatatggtgaggaagtattagaagaaataaaaaattcgaagcataacacaccaagaaaaaaagcaaaccccagcagaatcaggatagctttgggaaatgaagcaagcacagtgcaagaggaagaacaagatagaaagggtagccatactgatttggaaagcattaatgaaaatttagttgaaagtgcattgagaagagtaaacagagaagaaaaaggtaataagtcagtccatctgaggaaagccagttcaccaaatcttcatagacgacagtgggagaaaaatgtacccaatacagctcttacagctttggaaaatgcatccatactcacctccagtttaacagcagaggacgatagaggtggttctgtaataaagtacagcaaaaatactactcgtaagcagtggctcaaagagacccctgacactttgttgaacatccttaagaatgctgatctcagcttggcttttcaaacatacacaatatatagaccaggttcagaagggttcttgaaaggccccctgtctgaagaaacagaagcatcggacagtgttgatggaggtcacgattctgtcattttggatccagagcgacttgagcctgggctagatgaggaggacacggactttgaggaggaagatgacaaccccgactgggtgtcagagctgaagaagcgagctggatggcaaggcctgtgcgacagataatgcctgaggaaatgttcctgagtcacgctgaggagaggcttcactcaggagttcatgctgagatgatcatgagttcatgcgacgtatattttcctttggaaacagaatgaagcagaggaaactcttaatacttaaaatcgttcttgattagtatcgtgagtttgaaaagtctagaactcctgtaagtttttgaactcaagggagaaggtatagtggaatgagtgtgagcatcgggctttgcagtcccatagaacagaaatgggatgctagcgtgccactacctacttgtgtgattgtgggaaattacttaacctcttcaagccccaatttcctcaaccataaaatgaagataataatgcctacctcagagggatgctgaccacagacctttatagcagcccgtatgatattattcacattatgatatgtgtttattattatgtgactctttttacatttcctaaaggtttgagaattaaatatatttaattatgattta

SEQ ID NO: 20295 - DNA, 2255 bp, Homo sapiens
  source 1..2255: mol_type = unassigned DNA
cgccgccttggggtctgggcgcgcggtgccgtgggggtcagcagggcggagcggcttttccaggagaaagggccctcacgggtgagcggggcgactgggctcccccgcggtgcagttgccccgcgggcgccggccccggctcaacggattcttctcgctcgctgcccggaaagaaccatttgggagagcccatggtgactgcgtgagtggagcccagctgtgtggatgccccagcatggatgactacatggtcctgagaatgattggggagggctccttcggcagagctcttttggttcagcatgaaagcagtaatcagatgtttgccatgaaagaaataaggcttcccaagtctttctctaatacacagaattctaggaaggaggctgttcttttagccaaaatgaaacaccctaatattgttgccttcaaagaatcatttgaagctgaaggacacttgtatattgtgatggaatactgtgatggaggggatctaatgcaaaagattaaacagcagaaaggaaagttatttcctgaagacatgatacttaattggtttacccaaatgtgccttggagtaaatcacattcacaagaaacgtgtgctacacagagatatcaagtccaagaatatcttcctcactcagaatggaaaagtgaaattgggagactttggatctgcccgtcttctctccaatccgatggcatttgcttgtacctatgtgggaactccttattatgtgcctccagaaatttgggaaaacctgccttataacaataaaagtgacatctggtccttgggttgcatcctgtatgaactctgtacccttaagcatccatttcaggcaaatagttggaaaaatcttatcctcaaagtatgtcaagggtgcatcagtccactgccgtctcattactcctatgaacttcagttcctagtcaagcagatgtttaaaaggaatccctcacatcgcccctcggctacaacgcttctctctcgaggcatcgtagctcggcttgtccagaagtgcttaccccccgagatcatcatggaatatggtgaggaagtattagaagaaataaaaaattcgaagcataacacaccaagaaaaaaagcaaaccccagcagaatcaggatagctttgggaaatgaagcaagcacagtgcaagaggaagaacaagatagaaagggtagccatactgatttggaaagcattaatgaaaatttagttgaaagtgcattgagaagagtaaacagagaagaaaaaggtaataagtcagtccatctgaggaaagccagttcaccaaatcttcatagacgacagtgggagaaaaatgtacccaatacagctcttacagctttggaaaatgcatccatactcacctccagtttaacagcagaggacgatagaggtggttctgtaataaagtacagcaaaaatactactcgtaagcagtggctcaaagagacccctgacactttgttgaacatccttaagaatgctgatctcagcttggcttttcaaacatacacaatatatagaccaggttcagaagggttcttgaaaggccccctgtctgaagaaacagaagcatcggacagtgttgatggaggtcacgattctgtcattttggatccagagcgacttgagcctgggctagatgaggaggacacggactttgaggaggaagatgacaaccccgactgggtgtcagagctgaagaagcgagctggatggcaaggcctgtgcgacagataatgcctgaggaaatgttcctgagtcacgctgaggagaggcttcactcaggagttcatgctgagatgatcatgagttcatgcgacgtatattttcctttggaaacagaatgaagcagaggaaactcttaatacttaaaatcgttcttgattagtatcgtgagtttgaaaagtctagaactcctgtaagtttttgaactcaagggagaaggtatagtggaatgagtgtgagcatcgggctttgcagtcccatagaacagaaatgggatgctagcgtgccactacctacttgtgtgattgtgggaaattacttaacctcttcaagccccaatttcctcaaccataaaatgaagataataatgcctacctcagagggatgctgaccacagacctttatagcagcccgtatgatattattcacattatgatatgtgtttattattatgtgactctttttacatttcctaaaggtttgagaattaaatatatttaattatgattta

SEQ ID NO: 20296 - DNA, 3255 bp, Homo sapiens
  source 1..3255: mol_type = unassigned DNA
attgtgcctttcctctctcagggagtgccaagaaaccatctggttcatgccagaaacttgggagtcaaccttgcccccttctctgcttgccccccataaatctgccaccacaaatcctgtcaactgttcttacatctttccttcccattttttctgaccccattgcctccactctattccatttcattattttcctgccttttctattgttggagcctcctaactggcctgtgtctctgagctggccttcctgcccctcctccactggtccatttaatctgcaatctgagtgaatgttttttctaatatgcaaatatgattatattgccttcttggttaaaatgcttcagcagcttgttacattcttctttcaatttcttgaactgaatgtaatttctttagctcttaaatatgcaatttcctcttccttgattactcttttcctcctctttgtctagccaagtttcattcatccttcaggcttcagcttaaatagcctacatttgttgaggtttatggttatctctgcatgggatgtccacgttggcagggactatgagagatttttcagattataacatctgactcagagttggtgctcagtgtctgcctgttgtatgtagtataggggaggaaaaacattttttctctgccctcttaggttcagtagctgggccctgcaaaataaactgatgaaagatagattaacaggaaaaaaggtttatgcataaatgtaaagaagtggttagaccagggggctcatatgccattttaacaaagagtgataaattatagagaagtaactagacaaaagtaggggaatgcttcttgggtaaattgtaggaaggtaaatatatggcggaagctaacataagataagggttattcagtaaagtttgttatgtggactcaagttggtgccttccccattggtaagagttgctctcctcttcctggtactggaaaggaagacacatttacaaatggatatttattacctgtacataggaaaatttatgccctgcatttatacaaaaaagggagggcaaagagcaaattggtttcagctcaaaacaattcttacatgaaagtggcatattttggggtagcatacactgatcctcttcaaaaggaataatttgcttttctcttatcatggttatgagagctactttgaattaatttttgctttttgaaagtacatttaattctcaaatgtttctgcttttgaatgcagtttgggagagcccatggtgactgcgtgagtggagcccagctgtgtggatgccccagcatggatgactacatggtcctgagaatgattggggagggctccttcggcagagctcttttggttcagcatgaaagcagtaatcagatgtttgccatgaaagaaataaggcttcccaagtctttctctaatacacagaattctaggaaggaggctgttcttttagccaaaatgaaacaccctaatattgttgccttcaaagaatcatttgaagctgaaggacacttgtatattgtgatggaatactgtgatggaggggatctaatgcaaaagattaaacagcagaaaggaaagttatttcctgaagacatgatacttaattggtttacccaaatgtgccttggagtaaatcacattcacaagaaacgtgtgctacacagagatatcaagtccaagaatatcttcctcactcagaatggaaaagtgaaattgggagactttggatctgcccgtcttctctccaatccgatggcatttgcttgtacctatgtgggaactccttattatgtgcctccagaaatttgggaaaacctgccttataacaataaaagtgacatctggtccttgggttgcatcctgtatgaactctgtacccttaagcatccatttcaggcaaatagttggaaaaatcttatcctcaaagtatgtcaagggtgcatcagtccactgccgtctcattactcctatgaacttcagttcctagtcaagcagatgtttaaaaggaatccctcacatcgcccctcggctacaacgcttctctctcgaggcatcgtagctcggcttgtccagaagtgcttaccccccgagatcatcatggaatatggtgaggaagtattagaagaaataaaaaattcgaagcataacacaccaagaaaaaaacaagaggaagaacaagatagaaagggtagccatactgatttggaaagcattaatgaaaatttagttgaaagtgcattgagaagagtaaacagagaagaaaaaggtaataagtcagtccatctgaggaaagccagttcaccaaatcttcatagacgacagtgggagaaaaatgtacccaatacagctcttacagctttggaaaatgcatccatactcacctccagtttaacagcagaggacgatagaggtggttctgtaataaagtacagcaaaaatactactcgtaagcagtggctcaaagagacccctgacactttgttgaacatccttaagaatgctgatctcagcttggcttttcaaacatacacaatatatagaccaggttcagaagggttcttgaaaggccccctgtctgaagaaacagaagcatcggacagtgttgatggaggtcacgattctgtcattttggatccagagcgacttgagcctgggctagatgaggaggacacggactttgaggaggaagatgacaaccccgactgggtgtcagagctgaagaagcgagctggatggcaaggcctgtgcgacagataatgcctgaggaaatgttcctgagtcacgctgaggagaggcttcactcaggagttcatgctgagatgatcatgagttcatgcgacgtatattttcctttggaaacagaatgaagcagaggaaactcttaatacttaaaatcgttcttgattagtatcgtgagtttgaaaagtctagaactcctgtaagtttttgaactcaagggagaaggtatagtggaatgagtgtgagcatcgggctttgcagtcccatagaacagaaatgggatgctagcgtgccactacctacttgtgtgattgtgggaaattacttaacctcttcaagccccaatttcctcaaccataaaatgaagataataatgcctacctcagagggatgctgaccacagacctttatagcagcccgtatgatattattcacattatgatatgtgtttattattatgtgactctttttacatttcctaaaggtttgagaattaaatatatttaatt

SEQ ID NO: 20297 - DNA, 3255 bp, Homo sapiens; identical to SEQ ID NO: 20296
  source 1..3255: mol_type = unassigned DNA

SEQ ID NO: 20298 - DNA, 569 bp, Homo sapiens
  source 1..569: mol_type = unassigned DNA
gtccccgccctggcgggctgcctctagaacgaggagggcggcgcgtggtcgcggcgcggagccgagtgggagcgaggggtagacgcgccccggacgcgcggccgcgcccctcacttccgccccgcggtctggaccactcgccgcaaacccgcaagtccctcgccgccttggggtctgggcgcgcggtgccgtgggggtcagcagggcggagcggcttttccaggagaaagggccctcacgggtgagcggggcgactgggctcccccgcggtgcagttgccccgcgggcgccggccccggctcaacggattcttctcgctcgctgcccggaaagaaccatttgggagagcccatggtgactgcgtgagtggagcccagctgtgtggatgccccagcatggatgactacatggtcctgagaatgattggggagggctccttcggcagagctcttttggttcagcatgaaagcagtaatcagatgtttgccatgaaagaaataaggcttcccaagtctttctctaatacacagaattctaggaaggaggctgttcttttagccaaaatgaaa

SEQ ID NO: 20299 - DNA, 3722 bp, Homo sapiens
  source 1..3722: mol_type = unassigned DNA
agcatgcgcagaactgctcccggcccggatcgctatggcagcggcgtcgtcgcgggccgggccccagcaatcccgcccgggcccggctgcctcaacagccgcccccactgccccctctcgggcatgaaccgagcttcttgttgccgcccgctgccctacccgccgctgccgccgcatcccgactctgggccagcgctgggaacatgcccctggccgcctactgctacctgcgggtcgtgggcaaggggagctatggagaggtgacgcttgtgaagcaccggcgggacggcaagcagtatgtcatcaaaaaactgaacctccgaaatgcctctagccgagagcggcgagctgctgaacaggaagcccagctcttgtctcagttgaagcatcccaacattgtcacctacaaggagtcatgggaaggaggagatggtctgctctacattgtcatgggcttctgtgaaggaggtgatttgtaccgaaagctcaaggagcagaaagggcagcttctgcctgagaatcaggtggtagagtggtttgtacagatcgccatggctttgcagtatttacatgaaaaacacatccttcatcgagatctgaaaactcaaaatgtcttcctaacaagaacaaacatcatcaaagtaggggacctaggaattgcccgagtgttagagaaccactgtgacatggctagcaccctcattggcacaccctactacatgagccctgaattgttctcaaacaaaccctacaactataagtctgatgtttgggctctaggatgctgtgtctatgaaatggccaccttgaagcatgctttcaatgcaaaagatatgaattctttagtttatcggattattgaaggaaagctgccaccaatgccaagagattacagcccagagctggcagaactgataagaacaatgctgagcaaaaggcctgaagaaaggccgtctgtgaggagcatcctgaggcagccttatataaagcggcaaatctccttctttttggaggccacaaagataaaaacctccaaaaataacattaaaaatggtgactctcaatccaagccttttgctacagtggtttctggagaggcagaatcaaatcatgaagtaatccacccccaaccactctcttctgagggctcccagacatatataatgggtgaaggcaaatgtttgtcccaggagaaacccagggcctctggtctcttgaagtcacctgccagtctgaaagcccatacctgcaaacaggacttgagcaataccacagaactagccacaatcagtagcgtaaatattgacatcttacctgcaaaagggagggattcagtgagtgatggctttgttcaggagaatcagccaagatatttggatgcctctaatgagttaggaggtatatgcagtatttctcaagtggaagaggagatgctgcaggacaacactaaatccagtgcccagcctgaaaacctgattcccatgtggtcctctgacattgtcactggggaaaagaatgaaccagtgaagcctctgcagcccctaatcaaagaacaaaagccaaaggaccagagtcttgccctgtcgcccaagctggagtgcagtggcacaatcttggctcacagcaacctccgcctcctgggttcaagtgattctccagcctcagcctcccgagtagctgggattacaggcgtgtgccaccacgcccaggatcaagttgctggtgaatgtattatagaaaaacagggcagaatccacccagatttacagccacacaactctgggtctgaaccttccctgtctcgacagcgacggcaaaagaggagagaacagactgagcacagaggggaaaagagacaggtccgcagagatctctttgctttccaagagtcgcctcctcgatttttgccttctcatcccattgttgggaaagtggatgtcacatcaacacaaaaagaggctgaaaaccaacgtagagtggtcactgggtctgtgagcagttcaaggagcagtgagatgtcatcatcaaaggatcgaccattatcagccagagagaggaggcgactaaagcagtcacaggaagaaatgtcctcttcaggcccttcagtgaggaaagcgtctctgagtgtagcagggccaggaaaaccccaggaagaagaccagcccttgcctgcccgacggctctcctctgactgcagcgtcactcaggaaaggaaacagattcattgtctgtctgaggatgagttaagttcttctacaagttcaactgataagtcagatggggattacggggaagggaaaggtcagacaaatgaaattaatgccttggtacaattgatgactcagaccctgaaactggattctaaagagagctgtgaagatgtcccggtagcaaacccagtgtcagaattcaaacttcatcggaaatatcgggacacactgatacttcatgggaaggttgcagaagaggcagaggaaatccattttaaagagctaccttcagctattatgccaggttctgaaaagatcaggagactagttgaagtcttgagaactgatgtaattcgtggcctgggagttcagcttttagagcaggtgtatgatcttttggaggaggaggatgaatttgatagagaggtacgtttgcgggagcacatgggtgaaaagtatacaacttacagtgtgaaagctcgccagttgaaattttttgaagaaaacatgaatttttgagcatttgtcctaatctgctgccagaattaaagacctatttttagaggattttggcttaaaaagcaagggcaaacagtcatttggaagccactcaccactgttttatatctcttttttatatctctttggcgtttccctacagaaaagaaattggacagaacagaataatatgaagcaggatcacaaaagaaaaaaaactttggctttcatattctctttgtgaggacaaatctgttgtttgtttgattactgtttactgagccttaatccaccaagtttatatttagaattttatttttttaaggtactaattaacttaaacacagagctataaaatgctggattgaaaattttatattgtaatgtagagataaaagcagtaggagaaacaaatgacataatatgtcgtcataattcctgctattgttaataaccttaaggagtagttgataaattataaaattttaaaaagtcaattcagttctagaaatagatttaaagaatatgaagttctatctagtacttgagcagctgtatttcttttctacacattgatggacttttaatattttattctcatttaatataaacctcatctagggtatatacaaattaaaactgagacacattggctttgtaaatcagtatgtttttacataatggttttgttagatttatttttccatcagtgaaaacatttcttaaacacaaatttcatttccatttaagcaatttgtaagcaaagtccaggtccatttagtttttggatatatttaatgtttgtctcctgaagtttgtcttcatgtactgtaagatattagttgtctttccatgttttaaatgtatgattatatagcacatattttattagttgtttaataagaggtaatacccatctaggaaagaaattttatgaagttaaatacaagtcttgaatagtacattttcacttctgtattcgagggactctaaaaataaatattgctccagaaa

SEQ ID NO: 20300 - DNA, 2553 bp, Homo sapiens
  source 1..2553: mol_type = unassigned DNA
aacagccgcccccactgccccctctcgggcatgaaccgagcttcttgttgccgcccgctgccctacccgccgctgccgccgcatcccgactctgggccagcgctgggaacatgcccctggccgcctactgctacctgcgggtcgtgggcaaggggagctatggagaggtgacgcttgtgaagcaccggcgggacggcaagcagtatttacatgaaaaacacatccttcatcgagatctgaaaactcaaaatgtcttcctaacaagaacaaacatcatcaaagtaggggacctaggaattgcccgagtgttagagaaccactgtgacatggctagcaccctcattggcacaccctactacatgagccctgaattgttctcaaacaaaccctacaactataagtctgatgtttgggctctaggatgctgtgtctatgaaatggccaccttgaagcatgctttcaatgcaaaagatatgaattctttagtttatcggattattgaaggaaagctgccaccaatgccaagagattacagcccagagctggcagaactgataagaacaatgctgagcaaaaggcctgaagaaaggccgtctgtgaggagcatcctgaggcagccttatataaagcggcaaatctccttctttttggaggccacaaagataaaaacctccaaaaataacattaaaaatggtgactctcaatccaagccttttgctacagtggtttctggagaggcagaatcaaatcatgaagtaatccacccccaaccactctcttctgagggctcccagacatatataatgggtgaaggcaaatgtttgtcccaggagaaacccagggcctctggtctcttgaagtcacctgccagtctgaaagcccatacctgcaaacaggacttgagcaataccacagaactagccacaatcagtagcgtaaatattgacatcttacctgcaaaagggagggattcagtgagtgatggctttgttcaggagaatcagccaagatatttggatgcctctaatgagttaggaggtatatgcagtatttctcaagtggaagaggagatgctgcaggacaacactaaatccagtgcccagcctgaaaacctgattcccatgtggtcctctgacattgtcactggggaaaagaatgaaccagtgaagcctctgcagcccctaatcaaagaacaaaagccaaaggaccagagtcttgccctgtcgcccaagctggagtgcagtggcacaatcttggctcacagcaacctccgcctcctgggttcaagtgattctccagcctcagcctcccgagtagctgggattacaggcgtgtgccaccacgcccaggatcaagttgctggtgaatgtattatagaaaaacagggcagaatccacccagatttacagccacacaactctgggtctgaaccttccctgtctcgacagcgacggcaaaagaggagagaacagactgagcacagaggggaaaagagacaggtccgcagagatctctttgctttccaagagtcgcctcctcgatttttgccttctcatcccattgttgggaaagtggatgtcacatcaacacaaaaagaggctgaaaaccaacgtagagtggtcactgggtctgtgagcagttcaaggagcagtgagatgtcatcatcaaaggatcgaccattatcagccagagagaggaggcgactaaagcagtcacaggaagaaatgtcctcttcaggcccttcagtgaggaaagcgtctctgagtgtagcagggccaggaaaaccccaggaagaagaccagcccttgcctgcccgacggctctcctctgactgcagcgtcactcaggaaaggaaacagattcattgtctgtctgaggatgagttaagttcttctacaagttcaactgataagtcagatggggattacggggaagggaaaggtcagacaaatgaaattaatgccttggtacaattgatgactcagaccctgaaactggattctaaagagagctgtgaagatgtcccggtagcaaacccagtgtcagaattcaaacttcatcggaaatatcgggacacactgatacttcatgggaaggttgcagaagaggcagaggaaatccattttaaagagctaccttcagctattatgccaggttctgaaaagatcaggagactagttgaagtcttgagaactgatgtaattcgtggcctgggagttcagcttttagagcaggtgtatgatcttttggaggaggaggatgaatttgatagagaggtacgtttgcgggagcacatgggtgaaaagtatacaacttacagtgtgaaagctcgccagttgaaattttttgaagaaaacatgaatttttgagcatttgtcctaatctgctgccagaattaaagacctatttttagaggattttggcttaaaaagcaagggcaaacagtcatttggaagccactcaccactgttttatatctcttttttatatctctttggcgtttccctacagaaaagaaattggacagaacagaataatatgaagcaggatcac

SEQ ID NO: 20301 - DNA, 3447 bp, Homo sapiens
  source 1..3447: mol_type = unassigned DNA
ccgagctgacgggcgtgcggccgctgcgccgcaaactcgtgtgggacgcaccgctccagccgcccgcgggccagcgcaccggtcccccagcggcagccgagcccgcccgcgcgccgttcgtgccctcgtgaggctggcatgcaggatggcaggacagcccggccacatgccccatggagggagttccaacaacctctgccacaccctggggcctgtgcatcctcctgacccacagaggcatcccaacacgctgtcttttcgctgctcgctggcggacttccagatcgaaaagaagataggccgaggacagttcagcgaggtgtacaaggccacctgcctgctggacaggaagacagtggctctgaagaaggtgcagatctttgagatgatggacgccaaggcgaggcaggactgtgtcaaggagatcggcctcttgaagcaactgaaccacccaaatatcatcaagtatttggactcgtttatcgaagacaacgagctgaacattgtgctggagttggctgacgcaggggacctctcgcagatgatcaagtactttaagaagcagaagcggctcatcccggagaggacagtatggaagtactttgtgcagctgtgcagcgccgtggagcacatgcattcacgccgggtgatgcaccgagacatcaagcctgccaacgtgttcatcacagccacgggcgtcgtgaagctcggtgaccttggtctgggccgcttcttcagctctgagaccaccgcagcccactccctagtggggacgccctactacatgtcaccggagaggatccatgagaacggctacaacttcaagtccgacatctggtccctgggctgtctgctgtacgagatggcagccctccagagccccttctatggagataagatgaatctcttctccctgtgccagaagatcgagcagtgtgactaccccccactccccggggagcactactccgagaagttacgagaactggtcagcatgtgcatctgccctgacccccaccagagacctgacatcggatacgtgcaccaggtggccaagcagatgcacatctggatgtccagcacctgagcgtggatgcaccgtgccttatcaaagccagcaccactttgccttacttgagtcgtcttctcttcgagtggccacctggtagcctagaacagctaagaccacagggttcagcaggttccccaaaaggctgcccagccttacagcagatgctgaaggcagagcagctgagggaggggcgctggccacatgtcactgatggtcagattccaaagtcctttctttatactgttgtggacaatctcagctgggtcaataagggcaggtggttcagcgagccacggcagccccctgtatctggattgtaatgtgaatctttagggtaattcctccagtgacctgtcaaggcttatgctaacaggagacttgcaggagaccgtgtgatttgtgtagtgagcctttgaaaatggttagtaccgggttcagtttagttcttagtatcttttcaatcaagctgtgtgcttaatttactctgttgtaaagggataaagtggaaatcatttttttccgtggagtggtgattctgctaacatttttatctacgttttataacttggtgagtgacgatgagagccctgcacctggccagagtgtcacaggcaaaaggcatcgggaagcaggagcatcttcttggcagccaggctgggccatcttctcctggacacctgctgtgtaccaggaacttcgtcacctccttgaatgctggcggttcatttcatgatcagtgttaagcattttcctccatgggaaggaagcatgggatatagaaaagcgaagggctgtcctttacaaattctggttctgcaacttcctagcgtgactttgggcttgggcaagtttcttagccgttctgagccttcatttcctcatctgtacaatgagattaatagtacctatcatctaccttcaggattgctgacagacagaatttgaaataaaatatgcaagttagctaatacaaaaagtagatgatccaaaaatggtagccactcacccttcacaaactgaagtccatggaccacggaagtcgagaattaatgtacacctgtatcatgtgtaggaaaccagaaatgtgttccttatttcttgttcccaaacaggattaactgtgaagactaatttataaatgtgaacctaagaaaactccacctctgaaggaaatcatttgaattttgtttttgtacgtaaagttaaccttccaattgtctgagctgtcgtcactgacttcatgacagtctggccctccagacaagagcagcgctggcatcgggcaggtgattcctgacacctgctgcctgcaggcattcactgaccaggcctttcctggaggaaacacccagggccgggcggctgctgtttccacacgtggactcggatctgctgtgacaccgtcagcccgacagtctctccatatgcagcctttcctctgtacttttctccatggttgaaataaaacagggtgactgggagttacttagaattcatgaagattttaaaatggctttggagattttgcttttaaaccagtagattcaaaacttaaacagcgtctgcagcacaatttcttgaggaaccttgaaaaacacaacttcccaggccccattcagtaatcccaggatttctttaagctccccaaataattttgaaactcatcatcagccgagtttctgccctcatgaggtaattccatcgttctccccagcctgcccctggcagctgtaacacaggagctggcctgagagcagattcaccctggaatgttctctccacagaacaatcaagtccctgtcgcctgcctagtgcttaccactgaagatttttctgattccagaccaactttttgccaacattctgcttccagctctctgagcccctgccgtgtctccccaacactgccagccccagcacgcaatcaacctactttgtgcatgccacccgctttccacactgtgagaacaatctgcccaactggaccctctggaggcgcacgatctcagccactcaccaggcctgagtgtttgtgaaatgatcatgtcctacttattacaaaaccgtaaccccaaaacattccttttatttctgtgaaaccggccaaagtgaggtccacccaccttcacacagctctggcggtgcacctgctcaccttctcttggttctcagaactgagctgggcttgagaacacagctttggctttgccatttttttcctacttggctgctgaggtggagggtgtgctgcacttatcaccccatttcaaaaccaaaccaaacctgaggccaccccaaacaaattcagccagcaaaaagggtaggtatcgatggtcacctgaagcctcaagggagtccactctgacttctgacag

SEQ ID NO: 20302 - DNA, 758 bp, Homo sapiens
  source 1..758: mol_type = unassigned DNA
gatgaggctgggacactgttcgcaggaagagtccggtgttctggccccctgatgtcaccttcacgggcctgactcacagtcctaaatatctgacagcgagatcgcttttcgtgccctcgtgaggctggcatgcaggatggcaggacagcccggccacatgccccatggagggagttccaacaacctctgccacaccctggggcctgtgcatcctcctgacccacagaggcatcccaacacgctgtcttttcgctgctcgctggcggacttccagatcgaaaagaagataggccgaggacagttcagcgaggtgtacaaggccacctgcctgctggacaggaagacagtggctctgaagaaggtgcagatctttgagatgatggacgccaaggcgaggcaggactgtgtcaaggagatcggcctcttgaagcaactgaaccacccaaatatcatcaagtatttggactcgtttatcgaagacaacgagctgaacattgtgctggagttggctgacgcaggggacctctcgcagatgatcaagtactttaagaagcagaagcggctcatcccggagaggacagtatggaagtactttgtgcagctgtgcagcgccgtggagcacatgcattcacgccgggtgatgcaccgagacatcaagcctgccaacgtgttcatcacagccacgggcgtcgtgaagctcggtgaccttggtctgggccgcttcttcagctctgagaccaccgcagcccactccctag

SEQ ID NO: 20303 - DNA, 3619 bp, Homo sapiens
  source 1..3619: mol_type = unassigned DNA
ggcggaaccgagctgacgggcgtgcggccgctgcgccgcaaactcgtgtgggacgcaccgctccagccgcccgcgggccagcgcaccggtcccccagcggcagccgagcccgcccgcgcgccggagaagaagacacatgaattagagacagcacgggggagcaggctgtggagctgggagtgacggggtgagtccaggaaggctgcctggaggagatgcccaggagagaagtttgctgggaggcagctcatttccggcaggaggagcagagcctgccaaggcctcgagttcgtgccctcgtgaggctggcatgcaggatggcaggacagcccggccacatgccccatggagggagttccaacaacctctgccacaccctggggcctgtgcatcctcctgacccacagaggcatcccaacacgctgtcttttcgctgctcgctggcggacttccagatcgaaaagaagataggccgaggacagttcagcgaggtgtacaaggccacctgcctgctggacaggaagacagtggctctgaagaaggtgcagatctttgagatgatggacgccaaggcgaggcaggactgtgtcaaggagatcggcctcttgaagcaactgaaccacccaaatatcatcaagtatttggactcgtttatcgaagacaacgagctgaacattgtgctggagttggctgacgcaggggacctctcgcagatgatcaagtactttaagaagcagaagcggctcatcccggagaggacagtatggaagtactttgtgcagctgtgcagcgccgtggagcacatgcattcacgccgggtgatgcaccgagacatcaagcctgccaacgtgttcatcacagccacgggcgtcgtgaagctcggtgaccttggtctgggccgcttcttcagctctgagaccaccgcagcccactccctagtggggacgccctactacatgtcaccggagaggatccatgagaacggctacaacttcaagtccgacatctggtccctgggctgtctgctgtacgagatggcagccctccagagccccttctatggagataagatgaatctcttctccctgtgccagaagatcgagcagtgtgactaccccccactccccggggagcactactccgagaagttacgagaactggtcagcatgtgcatctgccctgacccccaccagagacctgacatcggatacgtgcaccaggtggccaagcagatgcacatctggatgtccagcacctgagcgtggatgcaccgtgccttatcaaagccagcaccactttgccttacttgagtcgtcttctcttcgagtggccacctggtagcctagaacagctaagaccacagggttcagcaggttccccaaaaggctgcccagccttacagcagatgctgaaggcagagcagctgagggaggggcgctggccacatgtcactgatggtcagattccaaagtcctttctttatactgttgtggacaatctcagctgggtcaataagggcaggtggttcagcgagccacggcagccccctgtatctggattgtaatgtgaatctttagggtaattcctccagtgacctgtcaaggcttatgctaacaggagacttgcaggagaccgtgtgatttgtgtagtgagcctttgaaaatggttagtaccgggttcagtttagttcttagtatcttttcaatcaagctgtgtgcttaatttactctgttgtaaagggataaagtggaaatcatttttttccgtggagtggtgattctgctaacatttttatctacgttttataacttggtgagtgacgatgagagccctgcacctggccagagtgtcacaggcaaaaggcatcgggaagcaggagcatcttcttggcagccaggctgggccatcttctcctggacacctgctgtgtaccaggaacttcgtcacctccttgaatgctggcggttcatttcatgatcagtgttaagcattttcctccatgggaaggaagcatgggatatagaaaagcgaagggctgtcctttacaaattctggttctgcaacttcctagcgtgactttgggcttgggcaagtttcttagccgttctgagccttcatttcctcatctgtacaatgagattaatagtacctatcatctaccttcaggattgctgacagacagaatttgaaataaaatatgcaagttagctaatacaaaaagtagatgatccaaaaatggtagccactcacccttcacaaactgaagtccatggaccacggaagtcgagaattaatgtacacctgtatcatgtgtaggaaaccagaaatgtgttccttatttcttgttcccaaacaggattaactgtgaagactaatttataaatgtgaacctaagaaaactccacctctgaaggaaatcatttgaattttgtttttgtacgtaaagttaaccttccaattgtctgagctgtcgtcactgacttcatgacagtctggccctccagacaagagcagcgctggcatcgggcaggtgattcctgacacctgctgcctgcaggcattcactgaccaggcctttcctggaggaaacacccagggccgggcggctgctgtttccacacgtggactcggatctgctgtgacaccgtcagcccgacagtctctccatatgcagcctttcctctgtacttttctccatggttgaaataaaacagggtgactgggagttacttagaattcatgaagattttaaaatggctttggagattttgcttttaaaccagtagattcaaaacttaaacagcgtctgcagcacaatttcttgaggaaccttgaaaaacacaacttcccaggccccattcagtaatcccaggatttctttaagctccccaaataattttgaaactcatcatcagccgagtttctgccctcatgaggtaattccatcgttctccccagcctgcccctggcagctgtaacacaggagctggcctgagagcagattcaccctggaatgttctctccacagaacaatcaagtccctgtcgcctgcctagtgcttaccactgaagatttttctgattccagaccaactttttgccaacattctgcttccagctctctgagcccctgccgtgtctccccaacactgccagccccagcacgcaatcaacctactttgtgcatgccacccgctttccacactgtgagaacaatctgcccaactggaccctctggaggcgcacgatctcagccactcaccaggcctgagtgtttgtgaaatgatcatgtcctacttattacaaaaccgtaaccccaaaacattccttttatttctgtgaaaccggccaaagtgaggtccacccaccttcacacagctctggcggtgcacctgctcaccttctcttggttctcagaactgagctgggcttgagaacacagctttggctttgccatttttttcctacttggctgctgaggtggagggtgtgctgcacttatcaccccatttcaaaaccaaaccaaacctgaggccaccccaaacaaattcagccagcaaaaagggtaggtatcgatggtcacctgaagcctcaagggagtccactctgacttctgacag

SEQ ID NO: 20304 - DNA, 2374 bp, Homo sapiens
  source 1..2374: mol_type = unassigned DNA
ccgagctgacgggcgtgcggccgctgcgccgcaaactcgtgtgggacgcaccgctccagccgcccgcgggccagcgcaccggtcccccagcggcagccgagcccgcccgcgcgccgttcgtgccctcgtgaggctggcatgcaggatggcaggacagcccggccacatgccccatggagggagttccaacaacctctgccacaccctggggcctgtgcatcctcctgacccacagcaactgaaccacccaaatatcatcaagtatttggactcgtttatcgaagacaacgagctgaacattgtgctggagttggctgacgcaggggacctctcgcagatgatcaagtactttaagaagcagaagcggctcatcccggagaggacagtatggaagtactttgtgcagctgtgcagcgccgtggagcacatgcattcacgccgggtgatgcaccgagacatcaagcctgccaacgtgttcatcacagccacgggcgtcgtgaagctcggtgaccttggtctgggccgcttcttcagctctgagaccaccgcagcccactccctagtggggacgccctactacatgtcaccggagaggatccatgagaacggctacaacttcaagtccgacatctggtccctgggctgtctgctgtacgagatggcagccctccagagccccttctatggagataagatgaatctcttctccctgtgccagaagatcgagcagtgtgactaccccccactccccggggagcactactccgagaagttacgagaactggtcagcatgtgcatctgccctgacccccaccagagacctgacatcggatacgtgcaccaggtggccaagcagatgcacatctggatgtccagcacctgagcgtggatgcaccgtgccttatcaaagccagcaccactttgccttacttgagtcgtcttctcttcgagtggccacctggtagcctagaacagctaagaccacagggttcagcaggttccccaaaaggctgcccagccttacagcagatgctgaaggcagagcagctgagggaggggcgctggccacatgtcactgatggtcagattccaaagtcctttctttatactgttgtggacaatctcagctgggtcaataagggcaggtggttcagcgagccacggcagccccctgtatctggattgtaatgtgaatctttagggtaattcctccagtgacctgtcaaggcttatgctaacaggagacttgcaggagaccgtgtgatttgtgtagtgagcctttgaaaatggttagtaccgggttcagtttagttcttagtatcttttcaatcaagctgtgtgcttaatttactctgttgtaaagggataaagtggaaatcatttttttccgtggagtggtgattctgctaacatttttatctacgttttataacttggtgagtgacgatgagagccctgcacctggccagagtgtcacaggcaaaaggcatcgggaagcaggagcatcttcttggcagccaggctgggccatcttctcctggacacctgctgtgtaccaggaacttcgtcacctccttgaatgctggcggttcatttcatgatcagtgttaagcattttcctccatgggaaggaagcatgggatatagaaaagcgaagggctgtcctttacaaattctggttctgcaacttcctagcgtgactttgggcttgggcaagtttcttagccgttctgagccttcatttcctcatctgtacaatgagattaatagtacctatcatctaccttcaggattgctgacagacagaatttgaaataaaatatgcaagttagctaatacaaaaagtagatgatccaaaaatggtagccactcacccttcacaaactgaagtccatggaccacggaagtcgagaattaatgtacacctgtatcatgtgtaggaaaccagaaatgtgttccttatttcttgttcccaaacaggattaactgtgaagactaatttataaatgtgaacctaagaaaactccacctctgaaggaaatcatttgaattttgtttttgtacgtaaagttaaccttccaattgtctgagctgtcgtcactgacttcatgacagtctggccctccagacaagagcagcgctggcatcgggcaggtgattcctgacacctgctgcctgcaggcattcactgaccaggcctttcctggaggaaacacccagggccgggcggctgctgtttccacacgtggactcggatctgctgtgacaccgtcagcccgacagtctctccatatgcagcctttcctctgtacttttctccatggttgaaataaaacagggtgactgggagttacttagaattcatgaagatttt

SEQ ID NO: 20305 - DNA, 3447 bp, Homo sapiens
  source 1..3447: mol_type = unassigned DNA
gcaatgctaggcgatggggaatccgaagacgcacaggagtccaagggttggctgactgcagaccctcatcataagtctagagccggagaagatggggagacgccggcctgcgccctttcgtgccctcgtgaggctggcatgcaggatggcaggacagcccggccacatgccccatggagggagttccaacaacctctgccacaccctggggcctgtgcatcctcctgacccacagaggcatcccaacacgctgtcttttcgctgctcgctggcggacttccagatcgaaaagaagataggccgaggacagttcagcgaggtgtacaaggccacctgcctgctggacaggaagacagtggctctgaagaaggtgcagatctttgagatgatggacgccaaggcgaggcaggactgtgtcaaggagatcggcctcttgaagcaactgaaccacccaaatatcatcaagtatttggactcgtttatcgaagacaacgagctgaacattgtgctggagttggctgacgcaggggacctctcgcagatgatcaagtactttaagaagcagaagcggctcatcccggagaggacagtatggaagtactttgtgcagctgtgcagcgccgtggagcacatgcattcacgccgggtgatgcaccgagacatcaagcctgccaacgtgttcatcacagccacgggcgtcgtgaagctcggtgaccttggtctgggccgcttcttcagctctgagaccaccgcagcccactccctagtggggacgccctactacatgtcaccggagaggatccatgagaacggctacaacttcaagtccgacatctggtccctgggctgtctgctgtacgagatggcagccctccagagccccttctatggagataagatgaatctcttctccctgtgccagaagatcgagcagtgtgactaccccccactccccggggagcactactccgagaagttacgagaactggtcagcatgtgcatctgccctgacccccaccagagacctgacatcggatacgtgcaccaggtggccaagcagatgcacatctggatgtccagcacctgagcgtggatgcaccgtgccttatcaaagccagcaccactttgccttacttgagtcgtcttctcttcgagtggccacctggtagcctagaacagctaagaccacagggttcagcaggttccccaaaaggctgcccagccttacagcagatgctgaaggcagagcagctgagggaggggcgctggccacatgtcactgatggtcagattccaaagtcctttctttatactgttgtggacaatctcagctgggtcaataagggcaggtggttcagcgagccacggcagccccctgtatctggattgtaatgtgaatctttagggtaattcctccagtgacctgtcaaggcttatgctaacaggagacttgcaggagaccgtgtgatttgtgtagtgagcctttgaaaatggttagtaccgggttcagtttagttcttagtatcttttcaatcaagctgtgtgcttaatttactctgttgtaaagggataaagtggaaatcatttttttccgtggagtggtgattctgctaacatttttatctacgttttataacttggtgagtgacgatgagagccctgcacctggccagagtgtcacaggcaaaaggcatcgggaagcaggagcatcttcttggcagccaggctgggccatcttctcctggacacctgctgtgtaccaggaacttcgtcacctccttgaatgctggcggttcatttcatgatcagtgttaagcattttcctccatgggaaggaagcatgggatatagaaaagcgaagggctgtcctttacaaattctggttctgcaacttcctagcgtgactttgggcttgggcaagtttcttagccgttctgagccttcatttcctcatctgtacaatgagattaatagtacctatcatctaccttcaggattgctgacagacagaatttgaaataaaatatgcaagttagctaatacaaaaagtagatgatccaaaaatggtagccactcacccttcacaaactgaagtccatggaccacggaagtcgagaattaatgtacacctgtatcatgtgtaggaaaccagaaatgtgttccttatttcttgttcccaaacaggattaactgtgaagactaatttataaatgtgaacctaagaaaactccacctctgaaggaaatcatttgaattttgtttttgtacgtaaagttaaccttccaattgtctgagctgtcgtcactgacttcatgacagtctggccctccagacaagagcagcgctggcatcgggcaggtgattcctgacacctgctgcctgcaggcattcactgaccaggcctttcctggaggaaacacccagggccgggcggctgctgtttccacacgtggactcggatctgctgtgacaccgtcagcccgacagtctctccatatgcagcctttcctctgtacttttctccatggttgaaataaaacagggtgactgggagttacttagaattcatgaagattttaaaatggctttggagattttgcttttaaaccagtagattcaaaacttaaacagcgtctgcagcacaatttcttgaggaaccttgaaaaacacaacttcccaggccccattcagtaatcccaggatttctttaagctccccaaataattttgaaactcatcatcagccgagtttctgccctcatgaggtaattccatcgttctccccagcctgcccctggcagctgtaacacaggagctggcctgagagcagattcaccctggaatgttctctccacagaacaatcaagtccctgtcgcctgcctagtgcttaccactgaagatttttctgattccagaccaactttttgccaacattctgcttccagctctctgagcccctgccgtgtctccccaacactgccagccccagcacgcaatcaacctactttgtgcatgccacccgctttccacactgtgagaacaatctgcccaactggaccctctggaggcgcacgatctcagccactcaccaggcctgagtgtttgtgaaatgatcatgtcctacttattacaaaaccgtaaccccaaaacattccttttatttctgtgaaaccggccaaagtgaggtccacccaccttcacacagctctggcggtgcacctgctcaccttctcttggttctcagaactgagctgggcttgagaacacagctttggctttgccatttttttcctacttggctgctgaggtggagggtgtgctgcacttatcaccccatttcaaaaccaaaccaaacctgaggccaccccaaacaaattcagccagcaaaaagggtaggtatcgatggtcacctgaagcctcaagggagtccactctgacttctgacag

SEQ ID NO: 20306 - DNA, 2745 bp, Homo sapiens
  source 1..2745: mol_type = unassigned DNA
cacccaccccagcccagagaggcgacccagctccctggaggcccaggcacctcatgtctgccctcaacccagagtggagcagaccttccctggagcttctcaggagccacttcaaaaggagaagaagacacatgaattagagacagcacgggggagcaggctgtggagctgggagtgacggggtgagtccaggaaggctgcctggaggagatgcccaggagagaagtttgctgggaggcagctcatttccggcaggaggagcagagcctgccaaggcctcgagttcgtgccctcgtgaggctggcatgcaggatggcaggacagcccggccacatgccccatggagggagttccaacaacctctgccacaccctggggcctgtgcatcctcctgacccacagaggcatcccaacacgctgtcttttcgctgctcgctggcggacttccagatcgaaaagaagataggccgaggacagttcagcgaggtgtacaaggccacctgcctgctggacaggaagacagtggctctgaagaaggtgcagatctttgagatgatggacgccaaggcgaggcaggactgtgtcaaggagatcggcctcttgaagcaactgaaccacccaaatatcatcaagtatttggactcgtttatcgaagacaacgagctgaacattgtgctggagttggctgacgcaggggacctctcgcagatgatcaagtactttaagaagcagaagcggctcatcccggagaggacagtatggaagtactttgtgcagctgtgcagcgccgtggagcacatgcattcacgccgggtgatgcaccgagacatcaagcctgccaacgtgttcatcacagccacgggcgtcgtgaagctcggtgaccttggtctgggccgcttcttcagctctgagaccaccgcagcccactccctagtggggacgccctactacatgtcaccggagaggatccatgagaacggctacaacttcaagtccgacatctggtccctgggctgtctgctgtacgagatggcagccctccagagccccttctatggagataagatgaatctcttctccctgtgccagaagatcgagcagtgtgactaccccccactccccggggagcactactccgagaagttacgagaactggtcagcatgtgcatctgccctgacccccaccagagacctgacatcggatacgtgcaccaggtggccaagcagatgcacatctggatgtccagcacctgagcgtggatgcaccgtgccttatcaaagccagcaccactttgccttacttgagtcgtcttctcttcgagtggccacctggtagcctagaacagctaagaccacagggttcagcaggttccccaaaaggctgcccagccttacagcagatgctgaaggcagagcagctgagggaggggcgctggccacatgtcactgatggtcagattccaaagtcctttctttatactgttgtggacaatctcagctgggtcaataagggcaggtggttcagcgagccacggcagccccctgtatctggattgtaatgtgaatctttagggtaattcctccagtgacctgtcaaggcttatgctaacaggagacttgcaggagaccgtgtgatttgtgtagtgagcctttgaaaatggttagtaccgggttcagtttagttcttagtatcttttcaatcaagctgtgtgcttaatttactctgttgtaaagggataaagtggaaatcatttttttccgtggagtggtgattctgctaacatttttatctacgttttataacttggtgagtgacgatgagagccctgcacctggccagagtgtcacaggcaaaaggcatcgggaagcaggagcatcttcttggcagccaggctgggccatcttctcctggacacctgctgtgtaccaggaacttcgtcacctccttgaatgctggcggttcatttcatgatcagtgttaagcattttcctccatgggaaggaagcatgggatatagaaaagcgaagggctgtcctttacaaattctggttctgcaacttcctagcgtgactttgggcttgggcaagtttcttagccgttctgagccttcatttcctcatctgtacaatgagattaatagtacctatcatctaccttcaggattgctgacagacagaatttgaaataaaatatgcaagttagctaatacaaaaagtagatgatccaaaaatggtagccactcacccttcacaaactgaagtccatggaccacggaagtcgagaattaatgtacacctgtatcatgtgtaggaaaccagaaatgtgttccttatttcttgttcccaaacaggattaactgtgaagactaatttataaatgtgaacctaagaaaactccacctctgaaggaaatcatttgaattttgtttttgtacgtaaagttaaccttccaattgtctgagctgtcgtcactgacttcatgacagtctggccctccagacaagagcagcgctggcatcgggcaggtgattcctgacacctgctgcctgcaggcattcactgaccaggcctttcctggaggaaacacccagggccgggcggctgctgtttccacacgtggactcggatctgctgtgacaccgtcagcccgacagtctctccatatgcagcctttcctctgtacttttctccatggttgaaataaaacagggtgactgggagttacttagaattcatgaagatttt

SEQ ID NO: 20307 - DNA, 799 bp, Homo sapiens
  source 1..799: mol_type = unassigned DNA
ccagcccagagaggcgacccagctccctggaggcccaggcacctcatgtctgccctcaacccagagtggagcagaccttccctggagcttctcaggagccacttcaaaagttcgtgccctcgtgaggctggcatgcaggatggcaggacagcccggccacatgccccatggagggagttccaacaacctctgccacaccctggggcctgtgcatcctcctgacccacagaggcatcccaacacgctgtcttttcgctgctcgctggcggacttccagatcgaaaagaagataggccgaggacagttcagcgaggtgtacaaggccacctgcctgctggacaggaagacagtggctctgaagaaggtgcagatctttgagatgatggacgccaaggcgaggcaggactgtgtcaaggagatcggcctcttgaagcaactgaaccacccaaatatcatcaagtatttggactcgtttatcgaagacaacgagctgaacattgtgctggagttggctgacgcaggggacctctcgcagatgatcaagtactttaagaagcagaagcggctcatcccggagaggacagtatggaagtactttgtgcagctgtgcagcgccgtggagcacatgcattcacgccgggtgatgcaccgagacatcaagcctgccaacgtgttcatcacagccacgggcgtcgtgaagctcggtgaccttggtctgggccgcttcttcagctctgagaccaccgcagcccactccctagtggggacgccctactacatgtcaccggagaggatccat

SEQ ID NO: 20308 - DNA, 726 bp, Homo sapiens
  source 1..726: mol_type = unassigned DNA
attgccacagagacaagccagccaagaagtgccaccctggacgaaggtcgggagaagaagacacatgaattagagacagcacgggggagcaggctgtggagctgggagtgacggggtgagtccaggaaggctgcctggaggagatgcccaggagagaagtttgctgggaggcagctcatttccggcaggaggagcagagcctgccaaggcctcgagttcgtgccctcgtgaggctggcatgcaggatggcaggacagcccggccacatgccccatggagggagttccaacaacctctgccacaccctggggcctgtgcatcctcctgacccacagaggcatcccaacacgctgtcttttcgctgctcgctggcggacttccagatcgaaaagaagataggccgaggacagttcagcgaggtgtacaaggccacctgcctgctggacaggaagacagtggctctgaagaaggtgcagatctttgagatgatggacgccaaggcgaggcaggactgtgtcaaggagatcggcctcttgaagcaactgaaccacccaaatatcatcaagtatttggactcgtttatcgaagacaacgagctgaacattgtgctggagttggctgacgcaggggacctctcgcagatgatcaagtactttaagaagcagaagcggctcatcccggagaggacagtatggaagtactttgtgcagctgtgcagcgccgtgg

SEQ ID NO: 20309 - DNA, 806 bp, Homo sapiens
  source 1..806: mol_type = unassigned DNA
gatgaggctgggacactgttcgcaggaagagtccggtgttctggccccctgatgtcaccttcacgggcctgactcacagtcctaaatatctgacagcgagatcgcttgtagttcgtgccctcgtgaggctggcatgcaggatggcaggacagcccggccacatgccccatggagggagttccaacaacctctgccacaccctggggcctgtgcatcctcctgacccacagaggcatcccaacacgctgtcttttcgctgctcgctggcggacttccagatcgaaaagaagataggccgaggacagttcagcgaggtgtacaaggccacctgcctgctggacaggaagacagtggctctgaagaaggtgcagatctttgagatgatggacgccaaggcgaggcaggactgtgtcaaggagatcggcctcttgaagcaactgaaccacccaaatatcatcaagtatttggactcgtttatcgaagacaacgagctgaacattgtgctggagttggctgacgcaggggacctctcgcagatgatcaagtactttaagaagcagaagcggctcatcccggagaggacagtatggaagtactttgtgcagctgtgcagcgccgtggagcacatgcattcacgccgggtgatgcaccgagacatcaagcctgccaacgtgttcatcacagccacgggcgtcgtgaagctcggtgaccttggtctgggccgcttcttcagctctgagaccaccgcagcccactccctagtggggacgccctactacatgtcaccggagaggatccatgagaac

SEQ ID NO: 20310 - DNA, 790 bp, Homo sapiens
  source 1..790: mol_type = unassigned DNA
ggcggccgggcgggcgggggcggcgtgtccgcgtgtcccggggtgtgcgcgtccccggcgggtgtgcgtgtgcaccccggagcgtctggtggcgttgttgggttcgtgccctcgtgaggctggcatgcaggatggcaggacagcccggccacatgccccatggagggagttccaacaacctctgccacaccctggggcctgtgcatcctcctgacccacagaggcatcccaacacgctgtcttttcgctgctcgctggcggacttccagatcgaaaagaagataggccgaggacagttcagcgaggtgtacaaggccacctgcctgctggacaggaagacagtggctctgaagaaggtgcagatctttgagatgatggacgccaaggcgaggcaggactgtgtcaaggagatcggcctcttgaagcaactgaaccacccaaatatcatcaagtatttggactcgtttatcgaagacaacgagctgaacattgtgctggagttggctgacgcaggggacctctcgcagatgatcaagtactttaagaagcagaagcggctcatcccggagaggacagtatggaagtactttgtgcagctgtgcagcgccgtggagcacatgcattcacgccgggtgatgcaccgagacatcaagcctgccaacgtgttcatcacagccacgggcgtcgtgaagctcggtgaccttggtctgggccgcttcttcagctctgagaccaccgcagcccactccctagtggggacgccctactacatgtcaccggagaggatcca

SEQ ID NO: 20311 - DNA, 716 bp, Homo sapiens
  source 1..716: mol_type = unassigned DNA
tattttgagagagcaggtttaccccagaacagtctgtggaaggtgtggggcagggaggagagctgggccgccctgaggacacagagggagaagggtgctgggagccagcctgcaagttctggggagcctcagggtgcctttgagggcacaacttgggaggccaagctcagcggttcgtgccctcgtgaggctggcatgcaggatggcaggacagcccggccacatgccccatggagggagttccaacaacctctgccacaccctggggcctgtgcatcctcctgacccacagaggcatcccaacacgctgtcttttcgctgctcgctggcggacttccagatcgaaaagaagataggccgaggacagttcagcgaggtgtacaaggccacctgcctgctggacaggaagacagtggctctgaagaaggtgcagatctttgagatgatggacgccaaggcgaggcaggactgtgtcaaggagatcggcctcttgaagcaactgaaccacccaaatatcatcaagtatttggactcgtttatcgaagacaacgagctgaacattgtgctggagttggctgacgcaggggacctctcgcagatgatcaagtactttaagaagcagaagcggctcatcccggagaggacagtatggaagtactttgtgcagctgtgcagcgccgtggagcacatgcattcacgccgggtgatgcaccgag

SEQ ID NO: 20312 - DNA, 732 bp, Homo sapiens
  source 1..732: mol_type = unassigned DNA
gcggccgggcgggcgggggcggcgtgtccgcgtgtcccggggtgtgcgcgtccccggcgggtgtgcgtgtgcaccccggagcgtctggtggcgttgttgggttcgtgccctcgtgaggctggcatgcaggatggcaggacagcccggccacatgccccatggagggagttccaacaacctctgccacaccctggggcctgtgcatcctcctgacccacagcaactgaaccacccaaatatcatcaagtatttggactcgtttatcgaagacaacgagctgaacattgtgctggagttggctgacgcaggggacctctcgcagatgatcaagtactttaagaagcagaagcggctcatcccggagaggacagtatggaagtactttgtgcagctgtgcagcgccgtggagcacatgcattcacgccgggtgatgcaccgagacatcaagcctgccaacgtgttcatcacagccacgggcgtcgtgaagctcggtgaccttggtctgggccgcttcttcagctctgagaccaccgcagcccactccctagtggggacgccctactacatgtcaccggagaggatccatgagaacggctacaacttcaagtccgacatctggtccctgggctgtctgctgtacgagatggcagccctccagagccccttctatggagataagatgaatctcttctccctgtgccagaagatcgagcagtgtgactaccccccact

SEQ ID NO: 20313 - DNA, 2582 bp, Homo sapiens
  source 1..2582: mol_type = unassigned DNA
ttttgtctgccccttcctgcctgtgggaaggagagaaaattaggggaggccacgggcttgaaagctttccctgcatggaggccactggatgggattctagatgctcgcctgggacccaggttcgtgccctcgtgaggctggcatgcaggatggcaggacagcccggccacatgccccatggagggagttccaacaacctctgccacaccctggggcctgtgcatcctcctgacccacagaggcatcccaacacgctgtcttttcgctgctcgctggcggacttccagatcgaaaagaagataggccgaggacagttcagcgaggtgtacaaggccacctgcctgctggacaggaagacagtggctctgaagaaggtgcagatctttgagatgatggacgccaaggcgaggcaggactgtgtcaaggagatcggcctcttgaagcaactgaaccacccaaatatcatcaagtatttggactcgtttatcgaagacaacgagctgaacattgtgctggagttggctgacgcaggggacctctcgcagatgatcaagtactttaagaagcagaagcggctcatcccggagaggacagtatggaagtactttgtgcagctgtgcagcgccgtggagcacatgcattcacgccgggtgatgcaccgagacatcaagcctgccaacgtgttcatcacagccacgggcgtcgtgaagctcggtgaccttggtctgggccgcttcttcagctctgagaccaccgcagcccactccctagtggggacgccctactacatgtcaccggagaggatccatgagaacggctacaacttcaagtccgacatctggtccctgggctgtctgctgtacgagatggcagccctccagagccccttctatggagataagatgaatctcttctccctgtgccagaagatcgagcagtgtgactaccccccactccccggggagcactactccgagaagttacgagaactggtcagcatgtgcatctgccctgacccccaccagagacctgacatcggatacgtgcaccaggtggccaagcagatgcacatctggatgtccagcacctgagcgtggatgcaccgtgccttatcaaagccagcaccactttgccttacttgagtcgtcttctcttcgagtggccacctggtagcctagaacagctaagaccacagggttcagcaggttccccaaaaggctgcccagccttacagcagatgctgaaggcagagcagctgagggaggggcgctggccacatgtcactgatggtcagattccaaagtcctttctttatactgttgtggacaatctcagctgggtcaataagggcaggtggttcagcgagccacggcagccccctgtatctggattgtaatgtgaatctttagggtaattcctccagtgacctgtcaaggcttatgctaacaggagacttgcaggagaccgtgtgatttgtgtagtgagcctttgaaaatggttagtaccgggttcagtttagttcttagtatcttttcaatcaagctgtgtgcttaatttactctgttgtaaagggataaagtggaaatcatttttttccgtggagtggtgattctgctaacatttttatctacgttttataacttggtgagtgacgatgagagccctgcacctggccagagtgtcacaggcaaaaggcatcgggaagcaggagcatcttcttggcagccaggctgggccatcttctcctggacacctgctgtgtaccaggaacttcgtcacctccttgaatgctggcggttcatttcatgatcagtgttaagcattttcctccatgggaaggaagcatgggatatagaaaagcgaagggctgtcctttacaaattctggttctgcaacttcctagcgtgactttgggcttgggcaagtttcttagccgttctgagccttcatttcctcatctgtacaatgagattaatagtacctatcatctaccttcaggattgctgacagacagaatttgaaataaaatatgcaagttagctaatacaaaaagtagatgatccaaaaatggtagccactcacccttcacaaactgaagtccatggaccacggaagtcgagaattaatgtacacctgtatcatgtgtaggaaaccagaaatgtgttccttatttcttgttcccaaacaggattaactgtgaagactaatttataaatgtgaacctaagaaaactccacctctgaaggaaatcatttgaattttgtttttgtacgtaaagttaaccttccaattgtctgagctgtcgtcactgacttcatgacagtctggccctccagacaagagcagcgctggcatcgggcaggtgattcctgacacctgctgcctgcaggcattcactgaccaggcctttcctggaggaaacacccagggccgggcggctgctgtttccacacgtggactcggatctgctgtgacaccgtcagcccgacagtctctccatatgcagcctttcctctgtacttttctccatggttgaaataaaacagggtgactgggagttacttagaattcatgaagatttt

SEQ ID NO: 20314 - DNA, 2578 bp, Homo sapiens
  source 1..2578: mol_type = unassigned DNA
gcaatgctaggcgatggggaatccgaagacgcacaggagtccaagggttggctgactgcagaccctcatcataagtctagagccggagaagatggggagacgccggcctgcgccctttcgtgccctcgtgaggctggcatgcaggatggcaggacagcccggccacatgccccatggagggagttccaacaacctctgccacaccctggggcctgtgcatcctcctgacccacagaggcatcccaacacgctgtcttttcgctgctcgctggcggacttccagatcgaaaagaagataggccgaggacagttcagcgaggtgtacaaggccacctgcctgctggacaggaagacagtggctctgaagaaggtgcagatctttgagatgatggacgccaaggcgaggcaggactgtgtcaaggagatcggcctcttgaagcaactgaaccacccaaatatcatcaagtatttggactcgtttatcgaagacaacgagctgaacattgtgctggagttggctgacgcaggggacctctcgcagatgatcaagtactttaagaagcagaagcggctcatcccggagaggacagtatggaagtactttgtgcagctgtgcagcgccgtggagcacatgcattcacgccgggtgatgcaccgagacatcaagcctgccaacgtgttcatcacagccacgggcgtcgtgaagctcggtgaccttggtctgggccgcttcttcagctctgagaccaccgcagcccactccctagtggggacgccctactacatgtcaccggagaggatccatgagaacggctacaacttcaagtccgacatctggtccctgggctgtctgctgtacgagatggcagccctccagagccccttctatggagataagatgaatctcttctccctgtgccagaagatcgagcagtgtgactaccccccactccccggggagcactactccgagaagttacgagaactggtcagcatgtgcatctgccctgacccccaccagagacctgacatcggatacgtgcaccaggtggccaagcagatgcacatctggatgtccagcacctgagcgtggatgcaccgtgccttatcaaagccagcaccactttgccttacttgagtcgtcttctcttcgagtggccacctggtagcctagaacagctaagaccacagggttcagcaggttccccaaaaggctgcccagccttacagcagatgctgaaggcagagcagctgagggaggggcgctggccacatgtcactgatggtcagattccaaagtcctttctttatactgttgtggacaatctcagctgggtcaataagggcaggtggttcagcgagccacggcagccccctgtatctggattgtaatgtgaatctttagggtaattcctccagtgacctgtcaaggcttatgctaacaggagacttgcaggagaccgtgtgatttgtgtagtgagcctttgaaaatggttagtaccgggttcagtttagttcttagtatcttttcaatcaagctgtgtgcttaatttactctgttgtaaagggataaagtggaaatcatttttttccgtggagtggtgattctgctaacatttttatctacgttttataacttggtgagtgacgatgagagccctgcacctggccagagtgtcacaggcaaaaggcatcgggaagcaggagcatcttcttggcagccaggctgggccatcttctcctggacacctgctgtgtaccaggaacttcgtcacctccttgaatgctggcggttcatttcatgatcagtgttaagcattttcctccatgggaaggaagcatgggatatagaaaagcgaagggctgtcctttacaaattctggttctgcaacttcctagcgtgactttgggcttgggcaagtttcttagccgttctgagccttcatttcctcatctgtacaatgagattaatagtacctatcatctaccttcaggattgctgacagacagaatttgaaataaaatatgcaagttagctaatacaaaaagtagatgatccaaaaatggtagccactcacccttcacaaactgaagtccatggaccacggaagtcgagaattaatgtacacctgtatcatgtgtaggaaaccagaaatgtgttccttatttcttgttcccaaacaggattaactgtgaagactaatttataaatgtgaacctaagaaaactccacctctgaaggaaatcatttgaattttgtttttgtacgtaaagttaaccttccaattgtctgagctgtcgtcactgacttcatgacagtctggccctccagacaagagcagcgctggcatcgggcaggtgattcctgacacctgctgcctgcaggcattcactgaccaggcctttcctggaggaaacacccagggccgggcggctgctgtttccacacgtggactcggatctgctgtgacaccgtcagcccgacagtctctccatatgcagcctttcctctgtacttttctccatggttgaaataaaacagggtgactgggagttacttagaattcatgaagatttt

SEQ ID NO: 20315 - DNA, 2573 bp, Homo sapiens
  source 1..2573: mol_type = unassigned DNA
gagcgtgtcggcggccgggcgggcgggggcggcgtgtccgcgtgtcccggggtgtgcgcgtccccggcgggtgtgcgtgtgcaccccggagcgtctggtggcgttgttgggttcgtgccctcgtgaggctggcatgcaggatggcaggacagcccggccacatgccccatggagggagttccaacaacctctgccacaccctggggcctgtgcatcctcctgacccacagaggcatcccaacacgctgtcttttcgctgctcgctggcggacttccagatcgaaaagaagataggccgaggacagttcagcgaggtgtacaaggccacctgcctgctggacaggaagacagtggctctgaagaaggtgcagatctttgagatgatggacgccaaggcgaggcaggactgtgtcaaggagatcggcctcttgaagcaactgaaccacccaaatatcatcaagtatttggactcgtttatcgaagacaacgagctgaacattgtgctggagttggctgacgcaggggacctctcgcagatgatcaagtactttaagaagcagaagcggctcatcccggagaggacagtatggaagtactttgtgcagctgtgcagcgccgtggagcacatgcattcacgccgggtgatgcaccgagacatcaagcctgccaacgtgttcatcacagccacgggcgtcgtgaagctcggtgaccttggtctgggccgcttcttcagctctgagaccaccgcagcccactccctagtggggacgccctactacatgtcaccggagaggatccatgagaacggctacaacttcaagtccgacatctggtccctgggctgtctgctgtacgagatggcagccctccagagccccttctatggagataagatgaatctcttctccctgtgccagaagatcgagcagtgtgactaccccccactccccggggagcactactccgagaagttacgagaactggtcagcatgtgcatctgccctgacccccaccagagacctgacatcggatacgtgcaccaggtggccaagcagatgcacatctggatgtccagcacctgagcgtggatgcaccgtgccttatcaaagccagcaccactttgccttacttgagtcgtcttctcttcgagtggccacctggtagcctagaacagctaagaccacagggttcagcaggttccccaaaaggctgcccagccttacagcagatgctgaaggcagagcagctgagggaggggcgctggccacatgtcactgatggtcagattccaaagtcctttctttatactgttgtggacaatctcagctgggtcaataagggcaggtggttcagcgagccacggcagccccctgtatctggattgtaatgtgaatctttagggtaattcctccagtgacctgtcaaggcttatgctaacaggagacttgcaggagaccgtgtgatttgtgtagtgagcctttgaaaatggttagtaccgggttcagtttagttcttagtatcttttcaatcaagctgtgtgcttaatttactctgttgtaaagggataaagtggaaatcatttttttccgtggagtggtgattctgctaacatttttatctacgttttataacttggtgagtgacgatgagagccctgcacctggccagagtgtcacaggcaaaaggcatcgggaagcaggagcatcttcttggcagccaggctgggccatcttctcctggacacctgctgtgtaccaggaacttcgtcacctccttgaatgctggcggttcatttcatgatcagtgttaagcattttcctccatgggaaggaagcatgggatatagaaaagcgaagggctgtcctttacaaattctggttctgcaacttcctagcgtgactttgggcttgggcaagtttcttagccgttctgagccttcatttcctcatctgtacaatgagattaatagtacctatcatctaccttcaggattgctgacagacagaatttgaaataaaatatgcaagttagctaatacaaaaagtagatgatccaaaaatggtagccactcacccttcacaaactgaagtccatggaccacggaagtcgagaattaatgtacacctgtatcatgtgtaggaaaccagaaatgtgttccttatttcttgttcccaaacaggattaactgtgaagactaatttataaatgtgaacctaagaaaactccacctctgaaggaaatcatttgaattttgtttttgtacgtaaagttaaccttccaattgtctgagctgtcgtcactgacttcatgacagtctggccctccagacaagagcagcgctggcatcgggcaggtgattcctgacacctgctgcctgcaggcattcactgaccaggcctttcctggaggaaacacccagggccgggcggctgctgtttccacacgtggactcggatctgctgtgacaccgtcagcccgacagtctctccatatgcagcctttcctctgtacttttctccatggttgaaataaaacagggtgactgggagttacttagaattcatgaagatttt

SEQ ID NO: 20316 - DNA, 2580 bp, Homo sapiens
  source 1..2580: mol_type = unassigned DNA
cacccaccccagcccagagaggcgacccagctccctggaggcccaggcacctcatgtctgccctcaacccagagtggagcagaccttccctggagcttctcaggagccacttcaaaagttcgtgccctcgtgaggctggcatgcaggatggcaggacagcccggccacatgccccatggagggagttccaacaacctctgccacaccctggggcctgtgcatcctcctgacccacagaggcatcccaacacgctgtcttttcgctgctcgctggcggacttccagatcgaaaagaagataggccgaggacagttcagcgaggtgtacaaggccacctgcctgctggacaggaagacagtggctctgaagaaggtgcagatctttgagatgatggacgccaaggcgaggcaggactgtgtcaaggagatcggcctcttgaagcaactgaaccacccaaatatcatcaagtatttggactcgtttatcgaagacaacgagctgaacattgtgctggagttggctgacgcaggggacctctcgcagatgatcaagtactttaagaagcagaagcggctcatcccggagaggacagtatggaagtactttgtgcagctgtgcagcgccgtggagcacatgcattcacgccgggtgatgcaccgagacatcaagcctgccaacgtgttcatcacagccacgggcgtcgtgaagctcggtgaccttggtctgggccgcttcttcagctctgagaccaccgcagcccactccctagtggggacgccctactacatgtcaccggagaggatccatgagaacggctacaacttcaagtccgacatctggtccctgggctgtctgctgtacgagatggcagccctccagagccccttctatggagataagatgaatctcttctccctgtgccagaagatcgagcagtgtgactaccccccactccccggggagcactactccgagaagttacgagaactggtcagcatgtgcatctgccctgacccccaccagagacctgacatcggatacgtgcaccaggtggccaagcagatgcacatctggatgtccagcacctgagcgtggatgcaccgtgccttatcaaagccagcaccactttgccttacttgagtcgtcttctcttcgagtggccacctggtagcctagaacagctaagaccacagggttcagcaggttccccaaaaggctgcccagccttacagcagatgctgaaggcagagcagctgagggaggggcgctggccacatgtcactgatggtcagattccaaagtcctttctttatactgttgtggacaatctcagctgggtcaataagggcaggtggttcagcgagccacggcagccccctgtatctggattgtaatgtgaatctttagggtaattcctccagtgacctgtcaaggcttatgctaacaggagacttgcaggagaccgtgtgatttgtgtagtgagcctttgaaaatggttagtaccgggttcagtttagttcttagtatcttttcaatcaagctgtgtgcttaatttactctgttgtaaagggataaagtggaaatcatttttttccgtggagtggtgattctgctaacatttttatctacgttttataacttggtgagtgacgatgagagccctgcacctggccagagtgtcacaggcaaaaggcatcgggaagcaggagcatcttcttggcagccaggctgggccatcttctcctggacacctgctgtgtaccaggaacttcgtcacctccttgaatgctggcggttcatttcatgatcagtgttaagcattttcctccatgggaaggaagcatgggatatagaaaagcgaagggctgtcctttacaaattctggttctgcaacttcctagcgtgactttgggcttgggcaagtttcttagccgttctgagccttcatttcctcatctgtacaatgagattaatagtacctatcatctaccttcaggattgctgacagacagaatttgaaataaaatatgcaagttagctaatacaaaaagtagatgatccaaaaatggtagccactcacccttcacaaactgaagtccatggaccacggaagtcgagaattaatgtacacctgtatcatgtgtaggaaaccagaaatgtgttccttatttcttgttcccaaacaggattaactgtgaagactaatttataaatgtgaacctaagaaaactccacctctgaaggaaatcatttgaattttgtttttgtacgtaaagttaaccttccaattgtctgagctgtcgtcactgacttcatgacagtctggccctccagacaagagcagcgctggcatcgggcaggtgattcctgacacctgctgcctgcaggcattcactgaccaggcctttcctggaggaaacacccagggccgggcggctgctgtttccacacgtggactcggatctgctgtgacaccgtcagcccgacagtctctccatatgcagcctttcctctgtacttttctccatggttgaaataaaacagggtgactgggagttacttagaattcatgaagatttt

SEQ ID NO: 20317 - DNA, 4149 bp, Homo sapiens
  source 1..4149: mol_type = unassigned DNA
gccccgcccctctcctcggggatgccgggatgtttacactcctgacagcggcggcagcaggaggaggatcgggagtcgcgggaggatgggccgccgctaggctcgcactccggacgcgcctcgcagtgcgcagggtgggtgccccgcgcctgcagcgtccgccggggcggcgcggcgggaggtggccgacaggctccgggcctcgcagcctcagcccccggcccagcgcgctttccgacggcggcgccgcgccgagccacccgcccgcccaaggtctctcgcgggcgggagaacggaaaactcccaacttcctgagttctaaagttcctgttgcttcagacaatggatgagcaatcacaaggaatgcaagggccacctgttcctcagttccaaccacagaaggccttacgaccggatatgggctataatacattagccaactttcgaatagaaaagaaaattggtcgcggacaatttagtgaagtttatagagcagcctgtctcttggatggagtaccagtagctttaaaaaaagtgcagatatttgatttaatggatgccaaagcacgtgctgattgcatcaaagaaatagatcttcttaagcaactcaaccatccaaatgtaataaaatattatgcatcattcattgaagataatgaactaaacatagttttggaactagcagatgctggcgacctatccagaatgatcaagcattttaagaagcaaaagaggctaattcctgaaagaactgtttggaagtattttgttcagctttgcagtgcattggaacacatgcattctcgaagagtcatgcatagagatataaaaccagctaatgtgttcattacagccactggggtggtaaaacttggagatcttgggcttggccggtttttcagctcaaaaaccacagctgcacattctttagttggtacgccttattacatgtctccagagagaatacatgaaaatggatacaacttcaaatctgacatctggtctcttggctgtctactatatgagatggctgcattacaaagtcctttctatggtgacaaaatgaatttatactcactgtgtaagaagatagaacagtgtgactacccacctcttccttcagatcactattcagaagaactccgacagttagttaatatgtgcatcaacccagatccagagaagcgaccagacgtcacctatgtttatgacgtagcaaagaggatgcatgcatgcactgcaagcagctaaacatgcaagatcatgaagagtgtaaccaaagtaattgaaagtattttgtgcaagtcatacctccccatttatgtctggtgttaagattaatatttcagagctagtgtgctttgaatccttaaccagttttcatataagcttcattttgtaccagtcacctaaatcacctccttgcaacccccaaatgactttggaataactgaattgcatgttaggagagaaaatgaaacatgatggttttgaatggctaaaggtttatagaatttcttacagttttctgctgataaattgtgtttagatagactgtcagtgccaaatattgaaggtgcagcttggcacacatcagaatagactcatacctgagaaaaagtatctgaacatgtgacttgtttcttttttagtaatttatggacattgagatgaacacaattgtgaacttttgtgaagattttatttttaaacgtttgaagtactagttttagttcttagcagagtagttttcaaatatgattcttatgataaatgtagacacaaactatttgagaaacatttagaactcttagcttatacattcaaaatgtaactattaaatgtgaagatttggggacaaaatgtgagtcagacactgaagagttttttgttttgttttaatatttttgatattctctttgcattgaaatggtataaatgaatccatttaaaaagtggttaaggatttgtttagctggtgtgataataatttttaaagttgcacattgcccaaggctttttttgtgtgtttttattgttgtttgtacatttgaaaaatattctttgaataaccttgcagtactatatttcaatttctttataaatttaagtgcattttaactcataattgtacactataatataagcctaagtttttattcataagttttattgaagttctgatcggtccccttcagaaatttttttatattattcttcaagttactttcttatttatattgtatgtgcattttatccattaatgtttcatactttctgagagtataatacccttttaaaagatatttggtataccaatacttttcctggattgaaaactttttttaaactttttaaaatttgggccactctgtatgcatatgtttggtcttgttaaagaggaagaaaggatgtgtgttatactgtacctgtgaatgttgatacagttacaatttatttgacaaggttgtaattctagaatatgcttaataaaatgaaaactggccatgactacagccagaactgttatgagattaacatttctattgagaagcttttgagtaaagtactgtatttgttcatgaagatgactgagatggtaacacttcgtgtagcttaaggaaatgggcagaatttcgtaaatgctgttgtgcagatgtgttttccctgaatgctttcgtattagtggcgaccagtttctcacagaattgtgaagcctgaaggccaagaggaagtcactgttaaaggactctgtgccatcttacaaccttggatgaattatcctgccaacgtgaaaacctcatgttcaaagaacacttccctttagccgatgtaactgctggttttgtttttcatatgtgtttttcttacactcatttgaatgctttcaagcatttgtaaacttaaaaaatgtataaagggcaaaaagtctgaacccttgttttctgaaatctaatcagttatgtatggtttctgaagggtaattttattttggaataggtaaaggaaacctgttttgtttgtttttcctgagggctagatgcattttttttctcacactcttaatgacttttaacatttatactgagcatccatagatatattcctagaagtatgagaagaattattcttattgaccattaatgtcatgttcattttaatgtaatataattgagatgaaatgttctctggttggaacagatactctcttttttttcttgcaatctttaagaatacatagatctaaaattcattagcttgacccctcaaagtaacttttaagtaaagattaaagcttttcttctcagtgaatatatctgctagaaggaaatagctgggaagaatttaatgatcagggaaattcattatttctatatgtggaaactttttgcttcgaatattgtatctttttaaatctaaatgttcatatttttcctgaagaaaccactgtgtaaaaatcaaattttaattttgaatggaataatttcaaagaactatgaagatgatttgaagctctaatttatatagtcacctataaaatgttctttatatgtgttcataagtaaattttatattgattaagttaaacttttgaattgatttgaggagcagtaaaatgaaagctatatctattctaaaccttatttagacattggtaccagttacccaggtgaaaatatggagtaactttgttttgtatggtaaggtttaggaatggtggatgaagggtatctctatataaataaagtgctcaacaatgtgcaatgattgtaaatttagtaagatattacagccatttcatgaatgctttaccattcaacatagtatctattacaaaacacctttcttgtatccatatacttcaggtgttgctgttaacatttactatgatatttattttaaccaaaatgttactcacattaaatgtttattctttaaaatgaatgtattatgtttttaacccacaaatgcatacttaccctgtgcctcatatttcaatagtactgtaatatggacatcttttgtgaaatacttttattttgttatgctttaaatatacatacaaaaagatttctgttattagctttgaaaattgtataatatcctaatataaacaaaaatataaaaataaaaatgaatacagtaaaa

SEQ ID NO: 20318 - DNA, 587 bp, Homo sapiens
  source 1..587: mol_type = unassigned DNA
cagtcaataattttcctttggatgggagtagtgttgctacttaaatatgattgatcctctttttttgttatttatgagctgtagttgtaatcaatgaaatgtcttattaatattctcagaatatttaaatggtacatgtaactagaaggaatattgagtttttgaataaccttgaagattgaaaagacactttatttcaggaaaaggaaactattaataagcttggacgaatatgcttcaactctagaattctgaaaaaaatcagaaaactaaaaacttctgaagctctatttgaaatctctcttcaaattgagttctaaagttcctgttgcttcagacaatggatgagcaatcacaaggaatgcaagggccacctgttcctcagttccaaccacagaaggccttacgaccggatatgggctataatacattagccaactttcgaatagaaaagaaaattggtcgcggacaatttagtgaagtttatagagcagcctgtctcttggatggagtaccagtagctttaaaaaaagtgcagatatttgatttaatggatgccaaagcacgtgctgattgcatcaaagaaa

SEQ ID NO: 20319 - DNA, 519 bp, Homo sapiens
  source 1..519: mol_type = unassigned DNA
gtttacactcctgacagcggcggcagcaggaggaggatcgggagtcgcgggaggatgggccgccgctaggctcgcactccggacgcgcctcgcagtgcgcagggtgggtgccccgcgcctgcagcgtccgccggggcggcgcggcgggaggtggccgacaggctccgggcctcgcagcctcagcccccggcccagcgcgctttccgacggcggcgccgcgccgagccacccgcccgcccaaggtctctcgcgggcgggagaacggaaaactcccaacttcctggaaaaggaaactattaataagcttggacgaatatgcttcaactctagaattctgaaaaaaatcagaaaactaaaaacttctgaagctctatttgaaatctctcttcaaattgagttctaaagttcctgttgcttcagacaatggatgagcaatcacaaggaatgcaagggccacctgttcctcagttccaaccacagaaggccttacgaccggatatgggctataatacattagcc

SEQ ID NO: 20320 - DNA, 1036 bp, Homo sapiens
  source 1..1036: mol_type = unassigned DNA
acactcctgacagcggcggcagcaggaggaggatcgggagtcgcgggaggatgggccgccgctaggctcgcactccggacgcgcctcgcagtgcgcaggagttctaaagttcctgttgcttcagacaatggatgagcaatcacaaggaatgcaagggccacctgttcctcagttccaaccacagaaggccttacgaccggatatgggctataatacattagccaactttcgaatagaaaagaaaattggtcgcggacaatttagtgaagtttatagagcagcctgtctcttggatggagtaccagtagctttaaaaaaagtgcagatatttgatttaatggatgccaaagcacgtgctgattgcatcaaagaaatagatcttcttaagcaactcaaccatccaaatgtaataaaatattatgcatcattcattgaagataatgaactaaacatagttttggaactagcagatgctggcgacctatccagaatgatcaagcattttaagaagcaaaagaggctaattcctgaaagaactgtttggaagtattttgttcagctttgcagtgcattggaacacatgcattctcgaagagtcatgcatagagatataaaaccagctaatgtgttcattacagccactggggtggtaaaacttggagatcttgggcttggccggtttttcagctcaaaaaccacagctgcacattctttagttggtacgccttattacatgtctccagagagaatacatgaaaatggatacaacttcaaatctgacatctggtctcttggctgtctactatatgagatggctgcattacaaagtcctttctatggtgacaaaatgaatttatactcactgtgtaagaagatagaacagtgtgactacccacctcttccttcagatcactattcagaagaactccgacagttagttaatatgtgcatcaacccagatccagagaagcgaccagacgtcacctatgtttatgacgtagcaaagaggatgcatgcatgcactgcaagcagctaa

SEQ ID NO: 20321 - DNA, 565 bp, Homo sapiens
  source 1..565: mol_type = unassigned DNA
gaattcataaacaactgtcctcatagtgggcttaattttctgatgaaaatatggcatttatatgctttcagcatacaatttaagatttcattttaagtccattctaattcagtgaatagtcaggggaaggtaatgtctgcttttccaaagaattgaaaggttcattacatttctcaatttgtcacaatttttattaaaatcctattacttgtttcttctttatcacttgatgaattgacgaaaatacaaattcagtaggcaaatatgatatccagtatttttgataatcttattagagtagtaagcaataaaataatgagtgacaggaacatcgccgagaccacaaagaagagttctaaagttcctgttgcttcagacaatggatgagcaatcacaaggaatgcaagggccacctgttcctcagttccaaccacagaaggccttacgaccggatatgggctataatacattagccaactttcgaatagaaaagaaaattggtcgcggacaatttagtgaagtttatagagcagcctgtctcttggatggagtaccagtagcttta

SEQ ID NO: 20322 - DNA, 5536 bp, Homo sapiens
  source 1..5536: mol_type = unassigned DNA
cacacgccagcgccggtgacgcgccggccgctctcccttagtccgcattcgctccagggttttgggaccctaggttgcggagtccttaccctaccctggcctctcgagcagttgtccccataactcggaatctagagccgctgttgcgaggcaggagcacgtggcagtcaagtagcttcccagtcccgaacgccgcccgtccccaccccgccgtggccactagcaacgacctctgtgaagttggagaggcggtaacggaggcactccccctgctgcaccccgccgtttctacggggctcagaaaccagtttgtttgtttcgtcggggtagtgtcgacctgtcttacgggcgtcgcccgagacaggacggagtcaaacccgtggtatcaactgaagacgagtgtcaggatgtcattttcaaaatgcgggatggtacctctgctttattaagccccgtaggaagactgccacacctagactgatgcttattagtcatcaccgttattcctactaacgtcctgtgtcactgagttttttaaatgtctagcatatctgtaaagatgccttagaaaaagaatcatggagaagtatgttagactacagaagattggagaaggttcatttggaaaagccattcttgttaaatctacagaagatggcagacagtatgttatcaaggaaattaacatctcaagaatgtccagtaaagaaagagaagaatcaaggagagaagttgcagtattggcaaacatgaagcatccaaatattgtccagtatagagaatcatttgaagaaaatggctctctctacatagtaatggattactgtgagggaggggatctgtttaagcgaataaatgctcagaaaggcgttttgtttcaagaggatcagattttggactggtttgtacagatatgtttggccctgaaacatgtacatgatagaaaaattcttcatcgagacattaaatctcagaacatatttttaactaaagatggaacagtacaacttggagattttggaattgctagagttcttaatagtactgtagagctggctcgaacttgcatagggaccccatactacttgtcacctgaaatctgtgaaaacaaaccttacaataataaaagtgacatttgggctctggggtgtgtcctttatgagctgtgtacacttaaacatgcttttgaagctggcagtatgaaaaacctggtactgaagataatatctggatcttttccacctgtgtctttgcattattcctatgatctccgcagtttggtgtctcagttatttaaaagaaatcctagggatagaccatcagtcaactccatattggagaaaggttttatagccaaacgcattgaaaagtttctctctcctcagcttattgcagaagaattttgtctaaaaacattttcgaagtttggatcacagcctataccagctaaaagaccagcttcaggacaaaactcgatttctgttatgcctgctcagaaaattacaaagcctgccgctaaatatggaatacctttagcatataagaaatatggagataaaaaattacacgaaaagaaaccactgcaaaaacataaacaggcccatcaaactccagagaagagagtgaatactggagaagaaaggaggaaaatatctgaggaagcagcaagaaagagaaggctggaatttattgaaaaagaaaagaaacaaaaggatcagattattagtttaatgaaggctgaacaaatgaaaaggcaagaaaaggaaaggttggaaagaataaatagggccagggaacaaggatggagaaatgtgctaagtgctggtggaagtggtgaagtaaaggctccttttctgggcagtggagggactatagctccatcatctttttcttctcgaggacagtatgaacattaccatgccatttttgaccaaatgcagcaacaaagagcagaagataatgaagctaaatggaaaagagaaatatatggtcgaggtcttccagaaaggcaaaaagggcagctagctgtagaaagagctaaacaagtagaagagttcctgcagcgaaaacgggaagctatgcagaataaagctcgagccgaaggacatatgggaatcctgcaaaacctggcagctatgtatggaggcaggcccagctcttcaagaggagggaagccaagaaacaaagaggaagaggtttatctggcaagactgaggcaaataagactacagaatttcaatgagcgccaacagattaaagccaaacttcgtggtgaaaagaaagaagctaatcattctgaaggacaagaaggaagtgaagaggctgacatgaggcgcaaaaaaatcgaatcactgaaggcccatgcaaatgcacgtgctgctgtactaaaagaacaactagaacgaaagagaaaggaggcttatgagagagaaaaaaaagtgtgggaagagcatttggtggctaaaggagttaagagttctgatgtttctccacctttgggacagcatgaaacaggtggctctccatcaaagcaacagatgagatctgttatttctgtaacttcagctttgaaagaagttggcgtggacagtagtttaactgatacccgggaaacttcagaagagatgcaaaagaccaacaatgctatttcaagtaagcgagaaatacttcgtagattaaatgaaaatcttaaagctcaagaagatgaaaaaggaaagcagaatctctctgatacttttgagataaatgttcatgaagatgccaaagagcatgaaaaagaaaaatcagtttcatctgatcgcaagaagtgggaggcaggaggtcaacttgtgattcctctggatgagttaacactagatacatccttctctacaactgaaagacatacagtgggagaagttattaaattaggtcctaatggatctccaagaagagcctgggggaaaagtccgacagattctgttctaaagatacttggagaagctgaactacaacttcagacagaactattagaaaatacaactattagaagtgagatttctcccgaaggggaaaagtacaaacccttaattactggagaaaaaaaagtacaatgtatttcacatgaaataaacccatcagctattgttgattctcctgttgagacaaaaagtcccgagttcagtgaggcatctccacagatgtcattgaaactggaaggaaatttagaagaacctgatgatttggaaacagaaattctacaagagccaagtggaacaaacaaagatgagagcttgccatgcactattactgatgtgtggattagtgaggaaaaagaaacaaaggaaactcagtcggcagataggatcaccattcaggaaaatgaagtttctgaagatggagtctcgagtactgtggaccaacttagtgacattcatatagagcctggaaccaatgattctcagcactctaaatgtgatgtagataagtctgtgcaaccggaaccatttttccataaggtggttcattctgaacacttgaacttagtccctcaagttcaatcagttcagtgttcaccagaagaatcctttgcatttcgatctcactcgcatttaccaccaaaaaataaaaacaagaattccttgctgattggactttcaactggtctgtttgatgcaaacaacccaaagatgttaaggacatgttcacttccagatctctcaaagctgttcagaacccttatggatgttcccaccgtaggagatgttcgtcaagacaatcttgaaatagatgaaattgaagatgaaaacattaaagaaggaccttctgattctgaagacattgtgtttgaagaaactgacacagatttacaagagctgcaggcctcgatggaacagttacttagggaacaacctggtgaagaatacagtgaagaagaagagtcagtcttgaagaacagtgatgtggagccaactgcaaatgggacagatgtggcagatgaagatgacaatcccagcagtgaaagtgccctgaacgaagaatggcactcagataacagtgatggtgaaattgctagtgaatgtgaatgcgatagtgtctttaaccatttagaggaactgagacttcatctggagcaggaaatgggctttgaaaaattctttgaggtttatgagaaaataaaggctattcatgaagatgaagatgaaaatattgaaatttgttcaaaaatagttcaaaatattttgggaaatgaacatcagcatctttatgccaagattcttcatttagtcatggcagatggagcctaccaagaagataatgatgaataatcctcaaaatgttttttaatcctcaactatatgaaagcatttgaatttggcttatcagaataacaagcttcagtgggaaatacagcaattatttatttaaaaaatcagatttaagatggactttcttattgcatgaaaaagatggagaaacatgccatttttcagtgaagattctaatattttatctattttgttcattgaattccatggttaaatctcataaaatatatactttattaaatcatccaaccaaagcataggaaacattgacccagaacctgacttaatggttttgaagatttactatgcaatagggtaactttgagtttcagcaaatgtctttaggttgaaggaattacctatgtcatgaaggacctgtctgtggtttttcaatggagtctttaagcatgatcttttttctgtctagtacttgttttcattctggccagcagttctacattaaatcaccttgtcaagggctctgtttacatctatacattttgaagatgaaatttttagccttaaagtttatattctcaagtccttttacaatcagtgtgtctcctgaactagcacacaggctgtagaaacagtcttagaaatcattgaaagatttgattatgaaagaatagcaaaattatatttcttgacatataaaaagttggtttaatgcctttatttctctttaaggaccagaaccaggaatactatatcgaaaaattagtctgtggatttaacactgacttagcatatagcttaaagttgctcttttggtttttaacttcctccatacataagcttcaaggacaataagatgttaaaaaggaggaaataattatttttattttgacactgtgacagttttggtaactaggatcctagggagggaaatgtttgcctgttgaacttctttctgttatgagaggatttagttaggtcattaagatgttgatcacacagcttcaatcacaatatgccaagtataacctggtttcgttagaggtgtctacagtccagatgttcttcgtaataaaagcaaagtttttgaacctctgagtccaaagcaggctggttggcataatatgtaatttgaaaaataaaatcttatcttgcagcactatcagtatgttgaatttattatgtatattatttctaatatccgaaactaaatacttgattttttaatatgtgtgtttattttatgatattgctattaaatttttattatc

SEQ ID NO: 20323 - DNA, 2754 bp, Homo sapiens
  source 1..2754: mol_type = unassigned DNA
ggttccaaacagccgtggcccgcggtgtctggcgctcggtgggtgtggttgcccctagtttgaggcctgcccgattacccgcaagacttgggcagccccgggcgccgctccgaccacgacagggaaaggaactgaccaacactggatgaatttgaccatttcttaggagactggaatgttaagtttctataaatgaatgaaccagttctctcttgtttggagcaatgctgaaattccaagaggcagctaagtgtgtgagtggatcaacagccatttccacttatccaaagaccttgattgcaagaagatacgtgcttcaacaaaaacttggcagtggaagttttggaactgtctatctggtttcagacaagaaagccaaacgaggagaggaattaaaggtacttaaggaaatatctgttggagaactaaatccaaatgaaactgtacaggccaatttggaagcccaactcctctccaagctggaccacccagccattgtcaagttccatgcaagttttgtggagcaagataatttctgcattatcacggagtactgtgagggccgagatctggacgataaaattcaggaatataaacaagctggaaaaatctttccagaaaatcaaataatagaatggtttatccagctgctgctgggagttgactacatgcatgagaggaggatacttcatcgagacttaaagtcaaagaatgtatttctgaaaaataatctccttaaaattggagattttggagtttctcgacttctaatgggatcctgtgacctggccacaactttaactggaactccccattatatgagtcctgaggctctgaaacaccaaggctatgacacaaagtcggacatctggtcactggcatgcattttgtatgagatgtgctgcatgaatcatgcattcgctggctccaatttcttatccattgttttaaaaattgttgaaggtgacacaccttctctccctgagagatatccaaaagaactaaatgccatcatggaaagcatgttgaacaagaatccttcattaagaccatctgctatcgaaattttaaaaatcccttaccttgatgagcagctacagaacctaatgtgtagatattcagaaatgactctggaagacaaaaatttggattgtcagaaggaggctgctcatataattaatgccatgcaaaaaaggatccacctgcagactctgagggcactgtcagaagtacagaaaatgacgccaagagaaaggatgcggctgaggaagctccaggcggctgatgagaaagccaggaagctgaaaaagattgtggaagaaaaatatgaagaaaatagcaaacgaatgcaagaattgagatctcggaactttcagcagctgagtgttgatgtactccatgaaaaaacacatttaaaaggaatggaagaaaaggaggagcaacctgagggaagactttcttgttcaccccaggacgaggatgaagagaggtggcaaggcagggaagaggaatctgatgaaccaactttagagaacctgcctgagtctcagcctattccttccatggacctccacgaacttgaatcaattgtagaggatgccacatctgaccttggataccatgagatcccagaagacccacttgtggctgaagagtactacgctgatgcatttgattcctattgtgaagagagtgatgaggaggaagaagaaatagcgttagaaagaccagagaaagaaatcaggaatgagggatcccagcctgcttacagaacaaaccaacaggacagtgatatcgaagcgttggccaggtgtttggaaaatgtcctgggttgcacttctctagatcagccatgcagaagctggggacagaagtatttgaagaggtctataattacctcaagagagcaaggcatcagaatgctagcgaagcagagatccgcgagtgtttggaaaaagtggtgcctcaagccagcgactgttttgaagtggaccagctcctgtactttgaagagcagttgctgatcacgatgggaaaagaacctactctccagaaccatctctaggcaactatcaaaaagaagcagaagttcaagtggacaaatttatgtgaaaattcatttaacatataagctgaactctattatggggaatggatacaaaagcagagctcccatcttgactttcaattcctcatcagaagtactggcttctttagagagtagtaagcatggctgcctatgcttggagtcataagtgttatttggactataccctgagataagcttatagatcaagtttggctcccttgaaaagcatttctctcatgtgcgccctcagggcttccagcaggattgagtcaccctgacgatgaccggggagaagccgtgtgctcttcattattttcagctggaggacagagctcagtgcctgactgcctagggtctcatggactgtaggcagcctgccagtgaaggtcactggactctagcctacaacatgctgagctacagcccagaagccagacatgcctgtcttagctgacctgtttttggtccacttttgcccttccatgactaataaggaagatatgtgtgtatttcatacacacacaaggacctggattaaaaatccaaaaagtgattctcttctatgatttatttcaaactcatccatagataattcaagatttgtattcaaaataaacatagttttcacagttacaaaataaatcacctattttatcttttcctta

SEQ ID NO: 20324 - DNA, 1281 bp, Homo sapiens
  source 1..1281: mol_type = unassigned DNA
cgcagctggagcctgcggctgaggctcgggcgcgctcaggcccggatcctggcggcctgggcggccgcaccatggactcgggaaccgaggagtacgagctcaacggcggcctgcctccgggcacacccggctccccggacgcctcgccggcccgctggggctggaggcacgggcccatcaacgtgaaccattacgccagcaagaagagcgcagccgagagcatgctggacatcgcgctgctgatggccaacgcgtcccagctgaaggccgtcgtggaacagggccccagcttcgccttctatgtgcccctggtggtcctcatctccatctcccttgtgctgcagatcggcgtgggggtgctgctcatcttccttgtcaagtacgaccttaacaacccggccaagcacgccaagctggacttcctcaacaacctggccacgggcctggtgttcatcatcgtggtagtcaacatcttcatcacggccttcggggtccagaagcccttgatggacatggcaccccagcagtaggacacccaggaccctggatgttgcctgccctgcaactcagctgcccgaccccaggagtcgccatacctgtgaggtgtccacctccctgcacatggcactacccagactgccagagcccaggctggcctcatctgcaccatgtccccggaccagcccttgctctgactgcggccaagcaccacgcaggaggccactcttgtctctcagcagctgttcccaggaggcagctccctcctggcacatgggggctggccacaatagcccagagggtcagaactggacagctgcagagacctgtgcccagagaagggtctcgacccactcaaggacacacagcaggtccgtggatgggctggatgagtgaccagggccagcctctgtctcaggacattccagaaggacaaggagatgtctctccctctcccaaagcaccagcgtccctgcctcccgtgggccctgtccgggttgccctggtgaccccagcctctgtccacttcctaacccagggaccctgcacagccagaactgcctttggccctacggatggccactggctctggtcttaagtgcctgggcttggtggccatcaagagggagccagtcaggcctgtgagggccgtagaccttgtatataccctgcaccagcagtgaccgggcagagcccaaccccctccacgggggtcccagcacccacttttctaatcatgaatgaacaataaagcccacgctctttgtcaggctccacatgcca

SEQ ID NO: 20325 - DNA, 1252 bp, Homo sapiens
  source 1..1252: mol_type = unassigned DNA
aatttgcttgataaacatgcaggatttctttgccagtcataaagctactagctcaaagcaggctgggtgacctcagatggctccgctgggactggaaggtcactggagccactggtgaaaatgatgctgtcactaccaactcaaaaggtcacctatcagtgtgccatgtgccacctcctggagcacacacatgtgcacacacatacactcacacgtgtgtgcaggtgcacacctcccccagaggctgcagccaagacgggcatcccacatcagagggatgaatggcaggtctgtcccgccagctgtgtgctctctcccacccgaagaaagcagcagagactcagacggcggagcctggaggagcccacgcagtctgttcccggcacccggtgcgtgtgaagggacttgagggcagcgagatggaatcagcaagagaaaacatcgaccttcaacctggaagctccgaccccaggagccagcccatcaacctgaaccattacgccaccaagaagagcgtggcggagagcatgctggacgtggccctgttcatgtccaacgccatgcggctgaaggcggtgctggagcagggaccatcctctcactactacaccaccctggtcaccctcatcagcctctctctgctcctgcaggtggtcatcggtgtcctgctcgtggtcattgcacggctgaacctgaatgaggtagaaaagcagtggcgactcaaccagctcaacaacgcagccaccatcttggtcttcttcactgtggtcatcaatgttttcattacagccttcggggcacataaaacagggttcctggctgccagggcctcaaggaatcctctctgaatgcagcctgggacccaggttctgggcctggaacttctgcctccttcctccgtgatctgccaggctcgtgggcactttccacagcccaggagagcttctgaaaggacagtatagctgcccttgctccctacccacagcacctgagttaaaaagtgatttttatgttattggtctaagggacttccatcttggtctgaagtcctgagctcagacgcaggtactgccagccataccttcctggtagcatctgctggacctaagtaaggcatgtctgtctaaggccaagtctgcccggcttaaggatgctggttctgactctaccccactgcttccttctgctccaggcctcaattttcccttcttgtaaaatggaatctatatctataaaggtttcttcaaatcca

SEQ ID NO: 20326 - DNA, 945 bp, Homo sapiens
  source 1..945: mol_type = unassigned DNA
gttgcaaagcagccgctcggtggccgtacaacgcttcatctctccgagcctcggtttcctcatctccagccctaaaatgacgacacgccccacaggtcttgggaggattaagtgaggggacatgagcctggaagctccgaccccaggagccagcccatcaacctgaaccattacgccaccaagaagagcgtggcggagagcatgctggacgtggccctgttcatgtccaacgccatgcggctgaaggcggtgctggagcagggaccatcctctcactactacaccaccctggtcaccctcatcagcctctctctgctcctgcaggtggtcatcggtgtcctgctcgtggtcattggtgaggagcccagcctgcagtcagaccttctgcctcggcacccgtggctggcagaaaggccccacgtgtcccctgggccaccctgcattggcacaggcagctttgcaaccacacgctgacctgcagtgagccctccgctaacagaggcccaaagaccaacttccaccccgcgagggcaggcgccctgtcctgtctcctggtatcccatggagcagaccctccgcagtacctgctgaatgactgcgccagcacctcgctaactgctaactcactcactcgctcaccgcttctccatgagcactcgtccccacgcttacaggacccagcttaagttcccaaatcctggtgggatgaagcacactagggtgccccattgtactggttggcgagggcagaggcatctcagcccgatgacgaccacctcccttgatttctgccacatgggtttctgaagggcccctctctccaaactctggtgggtgttgtgggggcagctccgtgctgtggccccgtctctgaccctttccccccactccacttccctgcagcacggctgaacctgaatgaggtagaaaagcagtggcgactca

SEQ ID NO: 20327 - DNA, 3274 bp, Homo sapiens
  source 1..3274: mol_type = unassigned DNA
agcacggggcggtgactccagagctgggagcctggcagcgtcctcaccccaggaaggcatgcgcccctctgcgggcggccccagccctgggccccctgcccccggaattgcccaagatgccgggtgactcctccccggggactctcccactctgggacgcgtcactctccccacccctgggtccggaccccggcggcttctcgcgcgcgagccacgcgggggacaagtcgcggccacctgctccggagctggggagcccgggcgccgtccgcccgcgcgtcggttcgtgtgccccgggccccatggagctgcgggtcagcaacaccagctgcgagaacggttccctgctccacctctactgctcctcccaagaagtcctgtgccagattgtcaatgacctcagccctgaggtgcccagcaatgccacctttcacagctggcaggaaagaatcaggcagaactatggcttctacatcggcctgggcctggcattcctgtctagcttcctcatcggcagcagcgtcatcctcaagaagaaaggcctcttgcgactcgtggccacgggagccactcgagctgtggatggaggcttcggctacctgaaagatgcaatgtggtgggctggatttctcaccatggctgctggagaagttgccaactttggagcctacgcatttgcacctgcaacagtcgtcacgcctctgggagcgctgagtgtcctcataagtgccatcctctcctcatatttcctgagggagagtctgaacctgctggggaagctgggctgtgtgatctgtgtggccggaagcacagtgatggtgatacatgctcctgaggaagagaaggtcactaccatcatggagatggcttccaagatgaaagacacagggttcatcgtgtttgctgtgcttctgctggtgtcatgcctcatcctcatctttgtcattgccccacgttacgggcaaaggaatatcctcatctacatcatcatctgctctgtgatcggggccttctctgtggctgctgtcaaggggctgggcatcaccatcaagaacttcttccaggggctgccagttgtccggcacccgctcccctacatcctgtccctcatcctggcactgtccctcagcactcaggtcaacttcctcaacagagcactggacattttcaacacttccctggtgttccccatctactacgtgttcttcaccacggtggtcgttacctcgtccatcatcctcttcaaggagtggtacagcatgtctgctgtggacattgcaggcaccctctcgggctttgtcaccatcatcttgggcgtgttcatgctgcatgctttcaaagacctggacatcagctgcgccagcttgccccacatgcacaaaaacccacccccttctcccgccccggaacccactgttattagactggaagacaagaacgtccttgtggacaatatagaacttgccagcacctcatcaccagaagagaaacccaaagtatttataatccattcctgaagcttggaatatgtgagtgagaggatgagtccgatggtacagcctgccctcccaatttcaaaaccacctggttattttccagtgcaactgttaccaatgggctctcttttcttgagaagttcatttatacctcatcactgtttccaggagaaaaatctttacccaaatagcaatggtggcagaacttcctggaaacagattcagtgaccaaatacccaagtttacatcagtgcctgcaggttccctggaccttccttctcattcattctttcggtgccatctctatgccgttgggaagaagatggagtctgacccactgaatgtagcacagtccaaggacttctctaagatattggtcattggaagttccttcacaccaattctcctcctgagacggaatctccgttgttgttgttgttgttgttttctagcccaaggatgacatagagctggctcccagaggcccacagagcaattggccatgcctccctatccagagctgacagggacacaaccagtgtaaaatatcctgttgcctttgtcacttcctctttggaggcagaagcaagacctcagctgaccttcttactgtgaaagccacttgatgtctcagggaaaaatttcaaccagctcattccccgagcactccagcctggcagtcagcacctcggcatccacccagtccatcccaccatcaccccttccccctctacttacatcctaaggagtcggtcactgagacataaaggcagtaatcgcagaactggaaacaaaacaataatagagccacagccaaactctggtggccaaacccagtgttgcattttgtcttactctgaaagaagaacagcaaattcactgcttcaaagtggcctggctgccaagctagaatttggcagaacgcactttactattcctcaaggagtcaaccaacctatgatctggggaggtgggaagaggatgaggagcaaagttgggatttggcagaaggcagtcccaggctctctggatactaggggctaacttttgtgttgactctggtgctcatctgggaacttaggagaaacgagctcaggggtaatttctgggttgcagccttaaaggcttggacagctgtgaatctcaatggccaactggaggtgcagacttggcatggggtgcattctagctgttgaccagattgctaccgagtcccctcctccactgatgagctgcccacactgggaagcagcatgccctgactgttccaacaccacctgctatggggagtacctttggtcccctcacatttggccagaggcatacaaaaaaccagagcagctggagagggagataattactattccttcccttcctatctcctttctagccacaagagtgtgggggttggagaagaaccattagaaagggaaattagtgggctggtgtatctggaaagagggaagacttgatcctcagccccgaggttggtgcagggcctcccctgtgtgactctacctgcactctgtgtttatatcctgtgccctaagtgggccaagcccaggtaaattcctgctggccttggaactccaaggtttggctgaccagcagactggctccctgactcttcagcctcaaatccccagtttttgatgaatgtggatttctgtctgtaattaaaagcaatgcaacaagttggctcttgagaatggcagtaaactgagggccctaagagtgtggtctgcagggtcaagaataaagattacagattatattta

SEQ ID NO: 20328 - DNA, 1600 bp, Homo sapiens
  source 1..1600: mol_type = unassigned DNA
agcacggggcggtgactccagagctgggagcctggcagcgtcctcaccccaggaaggcatgcgcccctctgcgggcggccccagccctgggccccctgcccccggaattgcccaagatgccgggtgactcctccccggggactctcccactctgggacgcgtcactctccccacccctgggtccggaccccggcggcttctcgcgcgcgagccacgcgggggacaagtcgcggccacctgctccggagctggggagcccgggcgccgtccgcccgcgcgtcggttcgtgtgccccgggccccatggagctgcgggtcagcaacaccagctgcgagaacggttccctgctccacctctactgctcctcccaagaagtcctgtgccagattgtcaatgacctcagccctgaggtgcccagcaatgccacctttcacagctggcaggaaagaatcaggcagaactatggcttctacatcggcctgggcctggcattcctgtctagcttcctcatcggcagcagcgtcatcctcaagaagaaaggcctcttgcgactcgtggccacgggagccactcgagctgtggctgctggagaagttgccaactttggagcctacgcatttgcacctgcaacagtcgtcacgcctctgggagcgctgagtgtcctcataagtgccatcctctcctcatatttcctgagggagagtctgaacctgctggggaagctgggctgtgtgatctgtgtggccggaagcacagtgatggtgatacatgctcctgaggaagagaaggtcactaccatcatggagatggcttccaagatgaaagacacagggttcatcgtgtttgctgtgcttctgctggtgtcatgcctcatcctcatctttgtcattgccccacgttacgggcaaaggaatatcctcatctacatcatcatctgctctgtgatcggggccttctctgtggctgctgtcaaggggctgggcatcaccatcaagaacttcttccaggggctgccagttgtccggcacccgctcccctacatcctgtccctcatcctggcactgtccctcagcactcaggtcaacttcctcaacagagcactggacattttcaacacttccctggtgttccccatctactacgtgttcttcaccacggtggtcgttacctcgtccatcatcctcttcaaggagtggtacagcatgtctgctgtggacattgcaggcaccctctcgggctttgtcaccatcatcttgggcgtgttcatgctgcatgctttcaaagacctggacatcagctgcgccagcttgccccacatgcacaaaaacccacccccttctcccgccccggaacccactgttattagactggaagacaagaacgtccttgtggacaatatagaacttgccagcacctcatcaccagaagagaaacccaaagtatttataatccattcctgaagcttggaatatgtgagtgagaggatgagtccgatggtacagcctgccctcccaatttcaaaaccacctggttattttccagtgcaactgttaccaatgggctctcttttcttgagaagttcatttatacctcatcactg

SEQ ID NO: 20329 - DNA, 10435 bp, Homo sapiens
  source 1..10435: mol_type = unassigned DNA
tccggtcggcattttgttctgagagggagagacggaacgagagagagacacacacagggctccttccccccgccctcccccccctccctccgtcggtaccgactcacccgacaccaccaagccgcagggagggacgcccccgccgacaggagaattggttcccgggcccgcggcgatgcccccccggtagctcgggcccgtggtcgggtgtttgtgagtgtttctatgtgggagaaggaggaggaggaggaagaagaagcaacgatttgtcttctcggctggtctccccccggctctacatgttccccgcactgaggagacggaagaggagccgtagccaccccccctcccggcccggattatagtctctcgccacagcggcctcggcctccccttggattcagacgccgattcgcccagtgtttgggaaatgggaagtaatgacagctggcacctgaactaagtacttttataggcaacaccattccagaaattcaggatgaatggggatatgccccatgtccccattactactcttgcggggattgctagtctcacagacctcctgaaccagctgcctcttccatctcctttacctgctacaactacaaagagccttctctttaatgcacgaatagcagaagaggtgaactgccttttggcttgtagggatgacaatttggtttcacagcttgtccatagcctcaaccaggtatcaacagatcacatagagttgaaagataaccttggcagtgatgacccagaaggtgacataccagtcttgttgcaggccgtcctggcaaggagtcctaatgttttcagggagaaaagcatgcagaacagatatgtacaaagtggaatgatgatgtctcagtataaactttctcagaattccatgcacagtagtcctgcatcttccaattatcaacaaaccactatctcacatagcccctccagccggtttgtgccaccacagacaagctctgggaacagatttatgccacagcaaaatagcccagtgcctagtccatacgccccacaaagccctgcaggatacatgccatattcccatccttcaagttacacaacacatccacagatgcaacaagcatcggtatcaagtcccattgttgcaggtggtttgagaaacatacatgataataaagtttctggtccgttgtctggcaattcagctaatcatcatgctgataatcctagacatggttcaagtgaggactacctacacatggtgcacaggctaagtagtgacgatggagattcttcaacaatgaggaatgctgcatcttttcccttgagatctccacagccagtatgctcccctgctggaagtgaaggaactcctaaaggctcaagaccacctttaatcctacaatctcagtctctaccttgttcatcacctcgagatgttccaccagatatcttgctagattctccagaaagaaaacaaaagaagcagaagaaaatgaaattaggcaaggatgaaaaagagcagagtgagaaagcggcaatgtatgatataattagttctccatccaaggactctactaaacttacattaagactttctcgtgtaaggtcttcagacatggaccagcaagaggatatgatttctggtgtggaaaatagcaatgtttcagaaaatgatattccttttaatgtgcagtacccaggacagacttcaaaaacacccattactccacaagatataaaccgcccactaaatgctgctcaatgtttgtcgcagcaagaacaaacagcattccttccagcaaatcaagtgcctgttttacaacagaacacttcagttgctgcaaaacaaccccagacttctgtggtacagaatcaacaacagatatcacaacagggacctatatatgatgaagtggaattggatgcattggctgaaattgagcgaatagagagagaatcagctattgaaagggagcgcttctcaaaagaagttcaagataaagataagcctttgaaaaaaagaaaacaagattcttacccacaggaggctgggggtgctacaggaggtaatagaccagcttctcaggagacgggttctacgggaaatgggtcaaggccagcattaatggttagcattgatcttcatcaggcaggaagagtggactctcaggcttctataactcaggattcagactccataaaaaagcctgaagaaatcaaacaatgtaatgatgcacctgtttctgttcttcaggaagatattgttggaagtcttaaatctacaccagaaaaccatcctgagacacctaaaaaaaagtctgatcctgagctttcaaagagtgaaatgaaacaaagtgaaagtagattagcagaatctaaaccaaatgaaaaccgattggtggagacaaaatcaagtgaaaataagttagaaactaaagttgagacccaaacagaagaacttaaacagaatgagagcagaacaactgaatgcaaacaaaacgagagcaccatagttgagcctaaacaaaatgaaaatagactgtctgacacaaaaccaaatgacaacaaacaaaataatggcagatcagaaacaacaaaatcaaggcctgaaaccccaaagcaaaagggtgaaagccggcctgagactccaaaacaaaagagtgatgggcatcctgaaaccccaaaacagaagggtgatggaaggcctgaaactccaaagcaaaaaggtgagagccgccctgaaactccaaagcaaaaaaatgaagggcgacctgaaacaccaaaacacaggcatgacaataggagggattctggaaagccatctacagagaaaaaacctgaagtgtctaaacataaacaagatactaaatctgactcacctcggttaaaatcagaacgagctgaagccttaaagcagagacctgatgggcgatctgtttctgagtcactaagacgtgaccatgataataaacaaaaatcagatgacaggggtgaatcagagcgacatcgaggggatcagtctagggttcgaagaccagaaacattgagatcctctagtagaaatgaacatggcattaaatctgatagttcaaaaactgataaactagaacgaaaacacaggcatgaatcaggggactcaagggaaagaccatcttctggggaacaaaaatcaagacctgacagtcctcgtgttaaacaaggagattctaataaatcaagatctgataaacttggttttaaatcaccaactagtaaagatgacaaaaggacagagggtaacaagagtaaagtagacactaataaagcacaccctgacaataaggcagaatttccaagttatttgttggggggcaggtctggtgcgttgaaaaattttgtcattccgaaaatcaagagggataaagatggcaatgttactcaggagacaaagaaaatggaaatgaaaggagagccgaaagacaaagtagaaaaaataggattagttgaagatctaaataaaggagctaagcctgtagttgtgctacaaaaactgtctttggatgatgttcagaaacttattaaagatagagaggacaaatcaagaagttcccttaaacctatcaagaataaaccatcaaagtcaaataaaggtagtatagatcaatcagtgttaaaagaattaccccctgaactcctggcagaaattgagtccaccatgccactttgtgaacgtgtgaaaatgaacaaacgcaagcgtagcacagttaatgaaaagccaaaatatgctgaaatcagttcagatgaagataatgatagtgatgaagcttttgaatcctctaggaaacgacataaaaaagatgatgataaagcttgggaatatgaagagcgtgacagaagaagctctggggatcataggagaagtggccactctcatgaaggaagaaggagttcaggtggtggtcgttatcgaaaccgaagtccgtcagattctgacatggaagattattctcctcctcccagccttagtgaggttgctaggaaaatgaagaaaaaagaaaaacagaagaaaaggaaagcatatgaaccaaaactaacacctgaagaaatgatggactcttcaacttttaagagattcacagcctcaatagagaatattttggataatttggaagatatggattttactgcgtttggtgatgatgatgaaattcctcaggaactgctcttaggaaaacatcagcttaatgaacttggcagtgaatctgctaaaataaaagcaatgggtataatggataagctttcaactgacaaaactgtgaaagtcttaaatatcttggagaagaatattcaggatgggtcaaagctttccactttgttaaatcataataacgatactgaagaagaagaaaggttatggagagaccttattatggagagagttacaaaatcagcggatgcttgtcttacaactatcaacattatgacatcccctaacatgccaaaagctgtgtacattgaggatgtaattgaaagagttatacagtacactaaatttcatttgcagaatacactttatcctcagtatgatcctgtttacagattagatcctcatggaggaggcttattaagttcaaaagcaaaacgggctaaatgttctacccataagcagagagtaatagtaatgctttataacaaagtttgtgacattgttagcagcttatcagaattgctagagatacaacttcttacagacacaacaattcttcaggtttcatctatgggaataacaccattttttgtggaaaatgtcagtgaactacagttgtgtgccattaagttagtcactgcagtattctcaagatatgaaaaacataggcagttaattttggaagaaatttttacttcacttgcaagattaccaaccagcaagaggagtttaaggaacttcaggttaaacagtagtgatatggatggagaacctatgtatattcagatggttacagcactggttttacaacttattcagtgtgtggtacacttaccatcatcagagaaggactctaatgcagaagaagattcaaataaaaaaattgaccaggatgttgtcattactaactcttatgaaacagctatgcgaacagcccaaaacttcctctccatcttccttaaaaaatgtggtagtaagcaaggtgaagaagattacagaccactgtttgaaaattttgttcaagaccttctttcaacagtcaataagcctgaatggccagctgctgaactactccttagtttgttagggagactgttggttcatcagttcagtaacaagtcaacagagatggctttaagagtggcatctcttgattaccttggaactgttgctgcacggctaagaaaagatgctgttacaagcaaaatggatcaaggatctatagaacgcattttaaaacaggtttcaggaggggaagatgaaatccaacaattacaaaaagcattgcttgattacttggatgaaaacactgagactgatccttcactagtgttttctcgtaaattctatatagcccagtggtttcgagacacaactctggaaacagaaaaagcaatgaaatcacaaaaagatgaagaatcatctgaaggaacacatcatgcaaaggaaattgagacaactggccaaattatgcatcgagctgaaaaccgaaaaaagtttcttagaagcattatcaaaaccacaccttctcagtttagcacattaaagatgaactctgatactgtggactatgatgatgcttgcttgattgttcgatacttggcctccatgaggccgtttgcccagagctttgatatttatttgacacagatcctacgagttcttggtgaaaatgcaattgctgttcgaacaaaagccatgaagtgtttgtctgaggttgttgctgtagaccccagtattctagcaaggcttgatatgcaacgaggtgttcatggacgattgatggataattcgactagtgtccgagaagcagcagtagaattactaggtcgatttgtcctttgtcgacctcagcttgctgaacagtattatgatatgctgattgaaagaatattggatactggtatcagtgtcaggaaaagagtaataaagattctcagagacatttgtattgaacaaccaacatttccaaaaatcacagaaatgtgtgtaaaaatgattcgcagagtcaatgatgaagagggcattaagaaattagtaaatgaaacattccagaaactctggtttactccaactccacacaatgacaaagaagcaatgacaaggaaaattttaaacattaccgatgtggttgcagcatgcagagatactggatatgactggtttgagcaactgcttcaaaacttgttgaagtccgaagaggattcctcatataaacctgtgaagaaagcttgtactcaacttgttgataacctagttgagcacattcttaaatatgaggaatctctagctgactctgacaataaaggtgtgaattctggaagattggtagcttgcataaccactttgttcttattcagcaaaataagaccccagctcatggttaaacatgcaatgactatgcaaccataccttaccactaaatgtagtacgcaaaatgatttcatggttatctgcaatgttgcaaaaatcctagagctagttgtaccactgatggagcatccaagtgaaacttttcttgccactattgaggaagatctaatgaagctcatcatcaaatatggcatgactgtagtgcaacattgtgtgagctgtcttggagctgttgtaaataaagtgacacaaaattttaaatttgtgtgggcttgtttcaatagatactatggtgccatttcaaaattaaaaagtcaacaccaagaggacccaaataacacttcacttctaacaaacaaaccagcacttcttagatcccttttcaccgttggagcactatgtcggcattttgattttgatctggaagattttaaaggcaacagcaaggttaacataaaagataaagtacttgaactattgatgtattttacaaaacactcagatgaagaagtacaaacaaaagctatcattggtctaggatttgcctttattcagcatccaagtctaatgttcgagcaagaagtgaagaatctatataataatattttatctgataagaactcctcagtcaatttaaaaatacaagtgttaaaaaacctccagacctacctacaagaagaagatacacgtatgcagcaggcagatagagactggaagaaagttgcaaaacaggaagacttaaaagaaatgggtgatgtttcctcagggatgagtagttccatcatgcagctttatctcaaacaggtgcttgaggcattttttcacacccagtcaagtgtacgccactttgccctaaatgtcattgcattgactctaaatcaaggtcttattcatccagttcagtgtgtgccatatttaattgctatgggcacagacccagaacctgctatgcggaacaaggctgatcagcaacttgtggaaatagacaaaaaatatgctggattcattcatatgaaagcagtggctggtatgaagatgtcttaccaggtacaacaggcaatcaacacatgcctaaaagatcctgtaaggggtttcagacaagacgagtcctctagcgctttgtgttcacacctttactccatgatccgtggaaaccgccaacacagacgagcctttcttatttctttactcaacctctttgatgacacagcaaaaacagacgtgactatgctcttgtatatagcagacaatctagcctgttttccataccagacacaggaagagccgttgtttataatgcatcatatagacattacactctcagtttctggtagtaacctactgcagtcattcaaggagtctatggtaaaggacaaaaggaaagagagaaaatcatcacctagtaaggaaaatgagtcaagcgacagtgaagaagaagtttccaggcctcggaagtcacggaaacgtgtagattcagattcagattcagattcagaagacgatataaattcagtgatgaaatgtttgccagaaaattcagctcctttaatcgaatttgcaaatgtgtcccagggtattttattacttctcatgttaaaacaacatttgaagaatctttgtggattttctgatagtaaaattcagaagtactctccatctgaatctgcaaaagtatatgataaagcgataaaccgaaaaacaggagttcattttcatccaaaacaaacactggacttcctgcggagtgacatggctaattccaaaatcacagaagaggtgaaaaggagtatagtaaaacagtatctagatttcaaacttctcatggaacatctggaccctgatgaagaagaagaagaaggggaggtttcagctagcacaaatgctcggaacaaagcaattacctcactgcttggaggaggcagccctaaaaataatacagcagcagagacagaagatgatgaaagtgatggggaggatagaggaggaggcacttcagggtcattgagaaggtcaaaacgaaattcagactctacggagttggcagcacagatgaatgaaagtgttgacgtcatggatgtcatcgctatttgctgtccaaagtacaaagatcgaccacaaattgcaagagtagtgcagaaaaccagcagtggcttcagtgttcagtggatggcaggctcctacagtggctcctggactgaggctaagcgccgtgatggccgcaaactggtgccttgggtagacactattaaagagtcagacattatttacaaaaaaattgctctaacgagtgctaataagctgactaataaagttgttcagactttacgatccctgtatgccgccaaggatgggacttccagctaatgaatttgtacatgcagccaaatttacaggaatttttttaaaaggcagaaaaacttgaaataccaacattctggcaaaaaaaaatcagttttatgaagagtaagtggaacctgggatgcaggaacaaaagaaggaaatgttgggcaaacatttttgtgggagctcccttcgctgttgtgcagcagaaacagattctcagttcatttttactcccactgtattatagtttaacaaaaattgtttatatcttggaaaaaaaactttctgtttaaaaaaaataaacaagtgaatgttggaaattagtctgttaatgttcttaataaagtgttcttggagtttaacctagcagcggatggctttctttagcttagcccagtttccagggaagcattgttttttccaggctgtaaaatggcagaatctcctggatatataatttattctgttgaaaaaaaaaaaagcatgcagtatctatgacctatctgcagaaggagtttttgtaaatgtagattttgatgtattaggtcaccctgaaaacaatacaagaaaagggatccccaggtaatctggtggagcgaatactgcaataaatttttttacttctctttgttacttgtctgtttccatttgaatttcttattgtaaaaatctgtttaaatccatttatattattttacagtcttttatgtaaaatttattatatcactggttttcaaagcaaaacataaaatattgtttatacagtttgtataggctgacttctgaataattggtatctattattttcattcccataagagggtgtaaacaattaactccagggttttattgtatcctgcaatatttagtattaactatatatgatttagcactgtgccaaacacattttcaagagtacattttgatataaaaagaaactatagtttattccttgtatgcttcaatttctttctagtgatgtcatgatgctgatatttattctttaaacctcgggtaaaggtaacctgttatttggaaaaccagcatttctcttggttaaaatgatgtccggttattttagaactagagttgagatgaatatgacacttcataattacactcactacatttttcacaaattattttttaatgctgaaaagagtaattttacttgttgagatgtttattcattttctaatctatgctaaaagcttttatcataagtcttgggaacagttgtcatttacacattacttactgcagatatcttgactaaatcaggagggaggtgtttaatcatttgatatgtatagttgacactcaggaatagtaatgcctaaaatttacagtggatgaggtctgtttcaagtttaattctttttaaaaatgttttacttatttttaaatcactttgaaaaaattgacctccagaatgctgttttatgaaattggcaaataaatgaaggtattcaatttttgaggaagaatgacattgccacaaaatacctttttgtgacacctattaaaccactatgaaaataa

SEQ ID NO: 20330 - DNA, 8729 bp, Homo sapiens
  source 1..8729: mol_type = unassigned DNA
acggaacgagagagagacacacacagggctccttccccccgccctcccccccctccctccgtcggtaccgactcacccgacaccaccaagccgcagggagggacgcccccgccgacaggagaattggttcccgggcccgcggcgatgcccccccggtagctcgggcccgtggtcgggtgtttgtgagtgtttctatgtgggagaaggaggaggaggaggaagaagaagcaacgatttgtcttctcggctggtctccccccggctctacatgttccccgcactgaggagacggaagaggagccgtagccaccccccctcccggcccggattatagtctctcgccacagcggcctcggcctccccttggattcagacgccgattcgcccagtgtttgggaaatgggaagtaatgacagctggcacctgaactaagtacttttataggcaacaccattccagaaattcaggatgaatggggatatgccccatgtccccattactactcttgcggggattgctagtctcacagacctcctgaaccagctgcctcttccatctcctttacctgctacaactacaaagagccttctctttaatgcacgaatagcagaagaggtgaactgccttttggcttgtagggatgacaatttggtttcacagcttgtccatagcctcaaccaggtatcaacagatcacatagagttgaaagataaccttggcagtgatgacccagaaggtgacataccagtcttgttgcaggccgtcctggcaaggagtcctaatgttttcagggagaaaagcatgcagaacagatatgtacaaagtggaatgatgatgtctcagtataaactttctcagaattccatgcacagtagtcctgcatcttccaattatcaacaaaccactatctcacatagcccctccagccggtttgtgccaccacagacaagctctgggaacagatttatgccacagcaaaatagcccagtgcctagtccatacgccccacaaagccctgcaggatacatgccatattcccatccttcaagttacacaacacatccacagatgcaacaagcatcggtatcaagtcccattgttgcaggtggtttgagaaacatacatgataataaagtttctggtccgttgtctggcaattcagctaatcatcatgctgataatcctagacatggttcaagtgaggactacctacacatggtgcacaggctaagtagtgacgatggagattcttcaacaatgaggaatgctgcatcttttcccttgagatctccacagccagtatgctcccctgctggaagtgaaggaactcctaaaggctcaagaccacctttaatcctacaatctcagtctctaccttgttcatcacctcgagatgttccaccagatatcttgctagattctccagaaagaaaacaaaagaagcagaagaaaatgaaattaggcaaggatgaaaaagagcagagtgagaaagcggcaatgtatgatataattagttctccatccaaggactctactaaacttacattaagactttctcgtgtaaggtcttcagacatggaccagcaagaggatatgatttctggtgtggaaaatagcaatgtttcagaaaatgatattccttttaatgtgcagtacccaggacagacttcaaaaacacccattactccacaagatataaaccgcccactaaatgctgctcaatgtttgtcgcagcaagaacaaacagcattccttccagcaaatcaagtgcctgttttacaacagaacacttcagttgctgcaaaacaaccccagacttctgtggtacagaatcaacaacagatatcacaacagggacctatatatgatgaagtggaattggatgcattggctgaaattgagcgaatagagagagaatcagctattgaaagggagcgcttctcaaaagaagttcaagataaagataagcctttgaaaaaaagaaaacaagattcttacccacaggaggctgggggtgctacaggaggtaatagaccagcttctcaggagacgggttctacgggaaatgggtcaaggccagcattaatggttagcattgatcttcatcaggcaggaagagtggactctcaggcttctataactcaggattcagactccataaaaaagcctgaagaaatcaaacaatgtaatgatgcacctgtttctgttcttcaggaagatattgttggaagtcttaaatctacaccagaaaaccatcctgagacacctaaaaaaaagtctgatcctgagctttcaaagagtgaaatgaaacaaagtgaaagtagattagcagaatctaaaccaaatgaaaaccgattggtggagacaaaatcaagtgaaaataagttagaaactaaagttgagacccaaacagaagaacttaaacagaatgagagcagaacaactgaatgcaaacaaaacgagagcaccatagttgagcctaaacaaaatgaaaatagactgtctgacacaaaaccaaatgacaacaaacaaaataatggcagatcagaaacaacaaaatcaaggcctgaaaccccaaagcaaaagggtgaaagccggcctgagactccaaaacaaaagagtgatgggcatcctgaaaccccaaaacagaagggtgatggaaggcctgaaactccaaagcaaaaaggtgagagccgccctgaaactccaaagcaaaaaaatgaagggcgacctgaaacaccaaaacacaggcatgacaataggagggattctggaaagccatctacagagaaaaaacctgaagtgtctaaacataaacaagatactaaatctgactcacctcggttaaaatcagaacgagctgaagccttaaagcagagacctgatgggcgatctgtttctgagtcactaagacgtgaccatgataataaacaaaaatcagatgacaggggtgaatcagagcgacatcgaggggatcagtctagggttcgaagaccagaaacattgagatcctctagtagaaatgaacatggcattaaatctgatagttcaaaaactgataaactagaacgaaaacacaggcatgaatcaggggactcaagggaaagaccatcttctggggaacaaaaatcaagacctgacagtcctcgtgttaaacaaggagattctaataaatcaagatctgataaacttggttttaaatcaccaactagtaaagatgacaaaaggacagagggtaacaagagtaaagtagacactaataaagcacaccctgacaataaggcagaatttccaagttatttgttggggggcaggtctggtgcgttgaaaaattttgtcattccgaaaatcaagagggataaagatggcaatgttactcaggagacaaagaaaatggaaatgaaaggagagccgaaagacaaagtagaaaaaataggattagttgaagatctaaataaaggagctaagcctgtagttgtgctacaaaaactgtctttggatgatgttcagaaacttattaaagatagagaggacaaatcaagaagttcccttaaacctatcaagaataaaccatcaaagtcaaataaaggtagtatagatcaatcagtgttaaaagaattaccccctgaactcctggcagaaattgagtccaccatgccactttgtgaacgtgtgaaaatgaacaaacgcaagcgtagcacagttaatgaaaagccaaaatatgctgaaatcagttcagatgaagataatgatagtgatgaagcttttgaatcctctaggaaacgacataaaaaagatgatgataaagcttgggaatatgaagagcgtgacagaagaagctctggggatcataggagaagtggccactctcatgaaggaagaaggagttcaggtggtggtcgttatcgaaaccgaagtccgtcagattctgacatggaagattattctcctcctcccagccttagtgaggttgctaggaaaatgaagaaaaaagaaaaacagaagaaaaggaaagcatatgaaccaaaactaacacctgaagaaatgatggactcttcaacttttaagagattcacagcctcaatagagaatattttggataatttggaagatatggattttactgcgtttggtgatgatgatgaaattcctcaggaactgctcttaggaaaacatcagcttaatgaacttggcagtgaatctgctaaaataaaagcaatgggtataatggataagctttcaactgacaaaactgtgaaagtcttaaatatcttggagaagaatattcaggatgggtcaaagctttccactttgttaaatcataataacgatactgaagaagaagaaaggttatggagagaccttattatggagagagttacaaaatcagcggatgcttgtcttacaactatcaacattatgacatcccctaacatgccaaaagctgtgtacattgaggatgtaattgaaagagttatacagtacactaaatttcatttgcagaatacactttatcctcagtatgatcctgtttacagattagatcctcatggaggaggcttattaagttcaaaagcaaaacgggctaaatgttctacccataagcagagagtaatagtaatgctttataacaaagtttgtgacattgttagcagcttatcagaattgctagagatacaacttcttacagacacaacaattcttcaggtttcatctatgggaataacaccattttttgtggaaaatgtcagtgaactacagttgtgtgccattaagttagtcactgcagtattctcaagatatgaaaaacataggcagttaattttggaagaaatttttacttcacttgcaagattaccaaccagcaagaggagtttaaggaacttcaggttaaacagtagtgatatggatggagaacctatgtatattcagatggttacagcactggttttacaacttattcagtgtgtggtacacttaccatcatcagagaaggactctaatgcagaagaagattcaaataaaaaaattgaccaggatgttgtcattactaactcttatgaaacagctatgcgaacagcccaaaacttcctctccatcttccttaaaaaatgtggtagtaagcaaggtgaagaagattacagaccactgtttgaaaattttgttcaagaccttctttcaacagtcaataagcctgaatggccagctgctgaactactccttagtttgttagggagactgttggttcatcagttcagtaacaagtcaacagagatggctttaagagtggcatctcttgattaccttggaactgttgctgcacggctaagaaaagatgctgttacaagcaaaatggatcaaggatctatagaacgcattttaaaacaggtttcaggaggggaagatgaaatccaacaattacaaaaagcattgcttgattacttggatgaaaacactgagactgatccttcactagtgttttctcgtaaattctatatagcccagtggtttcgagacacaactctggaaacagaaaaagcaatgaaatcacaaaaagatgaagaatcatctgaaggaacacatcatgcaaaggaaattgagacaactggccaaattatgcatcgagctgaaaaccgaaaaaagtttcttagaagcattatcaaaaccacaccttctcagtttagcacattaaagatgaactctgatactgtggactatgatgatgcttgcttgattgttcgatacttggcctccatgaggccgtttgcccagagctttgatatttatttgacacagatcctacgagttcttggtgaaaatgcaattgctgttcgaacaaaagccatgaagtgtttgtctgaggttgttgctgtagaccccagtattctagcaaggcttgatatgcaacgaggtgttcatggacgattgatggataattcgactagtgtccgagaagcagcagtagaattactaggtcgatttgtcctttgtcgacctcagcttgctgaacagtattatgatatgctgattgaaagaatattggatactggtatcagtgtcaggaaaagagtaataaagattctcagagacatttgtattgaacaaccaacatttccaaaaatcacagaaatgtgtgtaaaaatgattcgcagagtcaatgatgaagagggcattaagaaattagtaaatgaaacattccagaaactctggtttactccaactccacacaatgacaaagaagcaatgacaaggaaaattttaaacattaccgatgtggttgcagcatgcagagatactggatatgactggtttgagcaactgcttcaaaacttgttgaagtccgaagaggattcctcatataaacctgtgaagaaagcttgtactcaacttgttgataacctagttgagcacattcttaaatatgaggaatctctagctgactctgacaataaaggtgtgaattctggaagattggtagcttgcataaccactttgttcttattcagcaaaataagaccccagctcatggttaaacatgcaatgactatgcaaccataccttaccactaaatgtagtacgcaaaatgatttcatggttatctgcaatgttgcaaaaatcctagagctagttgtaccactgatggagcatccaagtgaaacttttcttgccactattgaggaagatctaatgaagctcatcatcaaatatggcatgactgtagtgcaacattgtgtgagctgtcttggagctgttgtaaataaagtgacacaaaattttaaatttgtgtgggcttgtttcaatagatactatggtgccatttcaaaattaaaaagtcaacaccaagaggacccaaataacacttcacttctaacaaacaaaccagcacttcttagatcccttttcaccgttggagcactatgtcggcattttgattttgatctggaagattttaaaggcaacagcaaggttaacataaaagataaagtacttgaactattgatgtattttacaaaacactcagatgaagaagtacaaacaaaagctatcattggtctaggatttgcctttattcagcatccaagtctaatgttcgagcaagaagtgaagaatctatataataatattttatctgataagaactcctcagtcaatttaaaaatacaagtgttaaaaaacctccagacctacctacaagaagaagatacacgtatgcagcaggcagatagagactggaagaaagttgcaaaacaggaagacttaaaagaaatgggtgatgtttcctcagggatgagtagttccatcatgcagctttatctcaaacaggtgcttgaggcattttttcacacccagtcaagtgtacgccactttgccctaaatgtcattgcattgactctaaatcaaggtcttattcatccagttcagtgtgtgccatatttaattgctatgggcacagacccagaacctgctatgcggaacaaggctgatcagcaacttgtggaaatagacaaaaaatatgctggattcattcatatgaaagcagtggctggtatgaagatgtcttaccaggtacaacaggcaatcaacacatgcctaaaagatcctgtaaggggtttcagacaagacgagtcctctagcgctttgtgttcacacctttactccatgatccgtggaaaccgccaacacagacgagcctttcttatttctttactcaacctctttgatgacacagcaaaaacagacgtgactatgctcttgtatatagcagacaatctagcctgttttccataccagacacaggaagagccgttgtttataatgcatcatatagacattacactctcagtttctggtagtaacctactgcagtcattcaaggagtctatggtaaaggacaaaaggaaagagagaaaatcatcacctagtaaggaaaatgagtcaagcgacagtgaagaagaagtttccaggcctcggaagtcacggaaacgtgtagattcagattcagattcagattcagaagacgatataaattcagtgatgaaatgtttgccagaaaattcagctcctttaatcgaatttgcaaatgtgtcccagggtattttattacttctcatgttaaaacaacatttgaagaatctttgtggattttctgatagtaaaattcagaagtactctccatctgaatctgcaaaagtatatgataaagcgataaaccgaaaaacaggagttcattttcatccaaaacaaacactggacttcctgcggagtgacatggctaattccaaaatcacagaagaggtgaaaaggagtatagtaaaacagtatctagatttcaaacttctcatggaacatctggaccctgatgaagaagaagaagaaggggaggtttcagctagcacaaatgctcggaacaaagcaattacctcactgcttggaggaggcagccctaaaaataatacagcagcagagacagaagatgatgaaagtgatggggaggatagaggaggaggcacttcaggggtgaggcggaggaggagtcaacgtatttcgcagcgtattacgtaaaatgatttttatgtgcttatatatgtcagtctattaaatgtacaccaagtaatgtaatacttaaaagagaaaacattttgtagatagagattctctacttacccgtttatacatccttttgtagaaagtttaacataaaagacaataaaaaaacagaaatgagattt

SEQ ID NO: 20331 - DNA, 2237 bp, Homo sapiens
  source 1..2237: mol_type = unassigned DNA
ccacgctcccattttaccgaggtggatcctgaggcccagagtgggcaaagggcttgccaaggtcgcagagcgcgcagaggattagaaccctgacttccgtccagcacctgcggagttggagacgcccacaggaaacgcccacctgaccgggtgagtgagggggcgggcgagccggaggggtggagtttattcgcgccccgcctccgccaccagggcttgggggcggggccttcctgcaacctttgcggctccaacatggctccgcggctgtgcagcatctctgtgacggcgcggcggctgctggggggcccggggcctcgcgctggggacgttgcgtctgcagctgcggcgcgtttctattccaaggacaatgaaggcagctggttccgctccctctttgttcacaaagtggatccccggaaggatgcccactccaccctgctgtccaagaaggaaaccagcaacctctataagatccagtttcacaatgtaaagcctgaatacctggatgcctacaacagcctcacggaggctgtgctgcccaagcttcacctggatgaggactacccatgctcactcgtgggcaactggaacacgtggtatggggagcaggaccaggcagtgcacctgtggcgattctcaggtggctacccagccctcatggactgcatgaacaagctcaaaaacaataaggagtacctggagttccgaagggagcggagccagatgctgctgtccaggagaaaccagctgctcctcgagttcagcttctggaatgagccacagcccagaatgggtcccaacatctatgagctgaggacatacaagctcaagccaggaaccatgatcgagtgggggaacaactgggctcgggccatcaagtaccggcaggagaaccaggaggcagtgggcggcttcttctcacagataggagagctctacgtggtgcaccatctctgggcctataaagacctgcagtctcgggaggagactcgaaacgctgcctggaggaagagaggctgggatgaaaatgtctactatacagtccccctggtgcgacacatggagtctaggatcatgatccccttgaagatctcgcctctgcagtgatgctgcctacacctccacctccttccccttctccctcaggcaaccccgacagacagtggcactcctggtcctgctgtcttggttttgtcttggctctgggaggactctgaggggcagtgctcagttcagacaagggggaactgaaggctgacaagttctgaggattacagctctgcccaggccctttctactttccctgcctgcctccctccccctgctagaagtagtttctgatttccctgaatgaaagatagtgatcttttaggccttcatttatcttctaaaattcctcatctcaaggccaccagtccccagttatcacccttggaaatcctctgtttagcttagttgcacaaaaggtagtatgtccagtggctagaggtggggtgggaagagaggaggccaggccaggccctcaggaattccctggtttccactgggccacccacttgctggacagtctgagccaagtccctcctgctggagaaaagcctggaactgccaaaacaaaaaaacaaatacaaacaaacctcgtcaccacggtcaggaggaggttcagacattctgcccagaggggctggggaaagggatgggagccaggaaagatttaggggcaggagacagacacgtaacaggaactcggaaggtagaacttagaattcagaacttgggtttcaattgtagaatttggaatctggaatacagaattgggaagaagaacagagatgacaaaagaccacttgaagagaggttcctaatactagacagatggagagtggcttggctgtttccccctgcatattggggttgaaaacttaaatgtgtagttccagtccttctatgcagagtctctcctgccctccctccttcctgcaggcaaatatacaagctagaccctgttccctcaccctgtatcctgtctcccctaattgacattctatcagcccaaccctcattctgcagggccacctggtgtgtggaggtggcgggaggggtcagtgactctgggggtctcctcagtgacccccatacctcatcatgaacccttgggtagcttgattctgcctaccatccaggaaaacttgtgctggaattgctgatggaaacaattaaatatttactataaa

SEQ ID NO: 20332 - DNA, 12158 bp, Homo sapiens
  source 1..12158: mol_type = unassigned DNA
agagcggctcttttaatgagggttgcgacgtctccctccccacacccataaaccagtcgggttggacgtcactgctaattcgtttcagtgatgataggataaaggagggacattaagaaataaattccccctcacgaccctcgctgagctcacggctcagtccctacatatttatgccgcgtttccagccgctgggtgaggagctacttagcgccgcggctcctccgaggggcggccgggcagcgagcagcggccgagcggacgggctcatgatgcctcagatctgatccgcatctaacaggctggcaatgaagatacccagagaatagttcacatctatcatgcgtcacttctagacacagccatcagacgcatctcctcccctttctgcctgaccttagggacacgtcccaccgcctctcttgacgtctgcctggtcaaccatcacttccttagagaataaggagagaggcggatgcaggaaatcatgccaccgacgggccaccagccatgagtgggtgacgctgagctgacgtcaaagacagagagggctgaagccttgtcagcacctgtcaccccggctcctgctctccgtgtagcctgaagcctggatcctcctggtgaaatcatcttggcctgatagcattgtgaggtcttcagacaggacccctcggaagctagttaccatggaggatcacatgttcggtgttcagcaaatccagcccaatgtcatttctgttcgtctcttcaagcgcaaagttgggggcctgggatttctggtgaaggagcgggtcagtaagccgcccgtgatcatctctgacctgattcgtgggggcgccgcagagcagagtggcctcatccaggccggagacatcattcttgcggtcaacggccggcccttggtggacctgagctatgacagcgccctggaggtactcagaggcattgcctctgagacccacgtggtcctcattctgaggggccctgaaggtttcaccacgcacctggagaccacctttacaggtgatgggacccccaagaccatccgggtgacacagcccctgggtccccccaccaaagccgtggatctgtcccaccagccaccggccggcaaagaacagcccctggcagtggatggggcctcgggtcccgggaatgggcctcagcatgcctacgatgatgggcaggaggctggctcactcccccatgccaacggcctggcccccaggcccccaggccaggaccccgcgaagaaagcaaccagagtcagcctccaaggcagaggggagaacaatgaactgctcaaggagatagagcctgtgctgagccttctcaccagtgggagcagaggggtcaagggaggggcacctgccaaggcagagatgaaagatatgggaatccaggtggacagagatttggacggcaagtcacacaaacctctgcccctcggcgtggagaacgaccgagtcttcaatgacctatgggggaagggcaatgtgcctgtcgtcctcaacaacccatattcagagaaggagcagccccccacctcaggaaaacagtcccccacaaagaatggcagcccctccaagtgtccacgcttcctcaaggtcaagaactgggagactgaggtggttctcactgacaccctccaccttaagagcacattggaaacgggatgcactgagtacatctgcatgggctccatcatgcatccttctcagcatgcaaggaggcctgaagacgtccgcacaaaaggacagctcttccctctcgccaaagagtttattgatcaatactattcatcaattaaaagatttggctccaaagcccacatggaaaggctggaagaggtgaacaaagagatcgacaccactagcacttaccagctcaaggacacagagctcatctatggggccaagcacgcctggcggaatgcctcgcgctgtgtgggcaggatccagtggtccaagctgcaggtattcgatgcccgtgactgcaccacggcccacgggatgttcaactacatctgtaaccatgtcaagtatgccaccaacaaagggaacctcaggtctgccatcaccatattcccccagaggacagacggcaagcacgacttccgagtctggaactcccagctcatccgctacgctggctacaagcagcctgacggctccaccctgggggacccagccaatgtgcagttcacagagatatgcatacagcagggctggaaaccgcctagaggccgcttcgatgtcctgccgctcctgcttcaggccaacggcaatgaccctgagctcttccagattcctccagagctggtgttggaagttcccatcaggcaccccaagtttgagtggttcaaggacctggggctgaagtggtacggcctccccgccgtgtccaacatgctcctagagattggcggcctggagttcagcgcctgtcccttcagtggctggtacatgggcacagagattggtgtccgcgactactgtgacaactcccgctacaatatcctggaggaagtggccaagaagatgaacttagacatgaggaagacgtcctccctgtggaaggaccaggcgctggtggagatcaatatcgcggttctctatagcttccagagtgacaaagtgaccattgttgaccatcactccgccaccgagtccttcattaagcacatggagaatgagtaccgctgccgggggggctgccctgccgactgggtgtggatcgtgccccccatgtccggaagcatcacccctgtgttccaccaggagatgctcaactaccggctcaccccctccttcgaataccagcctgatccctggaacacgcatgtctggaaaggcaccaacgggacccccacaaagcggcgagccattggcttcaagaagctagcagaagctgtcaagttctcggccaagctgatggggcaggctatggccaagagggtgaaagcgaccatcctctatgccacagagacaggcaaatcgcaagcttatgccaagaccttgtgtgagatcttcaaacacgcctttgatgccaaggtgatgtccatggaagaatatgacattgtgcacctggaacatgaaactctggtccttgtggtcaccagcacctttggcaatggagatccccctgagaatggggagaaattcggctgtgctttgatggaaatgaggcaccccaactctgtgcaggaagaaaggaagagctacaaggtccgattcaacagcgtctcctcctactctgactcccaaaaatcatcaggcgatgggcccgacctcagagacaactttgagagtgctggacccctggccaatgtgaggttctcagtttttggcctcggctcacgagcataccctcacttttgcgccttcggacacgctgtggacaccctcctggaagaactgggaggggagaggatcctgaagatgagggaaggggatgagctctgtgggcaggaagaggctttcaggacctgggccaagaaggtcttcaaggcagcctgtgatgtcttctgtgtgggagatgatgtcaacattgaaaaggccaacaattccctcatcagcaatgatcgcagctggaagagaaacaagttccgcctcacctttgtggccgaagctccagaactcacacaaggtctatccaatgtccacaaaaagcgagtctcagctgcccggctccttagccgtcaaaacctccagagccctaaatccagtcggtcaactatcttcgtgcgtctccacaccaacgggagccaggagctgcagtaccagcctggggaccacctgggtgtcttccctggcaaccacgaggacctcgtgaatgccctgatcgagcggctggaggacgcgccgcctgtcaaccagatggtgaaagtggaactgctggaggagcggaacacggctttaggtgtcatcagtaactggacagacgagctccgcctcccgccctgcaccatcttccaggccttcaagtactacctggacatcaccacgccaccaacgcctctgcagctgcagcagtttgcctccctagctaccagcgagaaggagaagcagcgtctgctggtcctcagcaagggtttgcaggagtacgaggaatggaaatggggcaagaaccccaccatcgtggaggtgctggaggagttcccatctatccagatgccggccaccctgctcctgacccagctgtccctgctgcagccccgctactattccatcagctcctccccagacatgtaccctgatgaagtgcacctcactgtggccatcgtttcctaccgcactcgagatggagaaggaccaattcaccacggcgtatgctcctcctggctcaaccggatacaggctgacgaactggtcccctgtttcgtgagaggagcacccagcttccacctgccccggaacccccaagtcccctgcatcctcgttggaccaggcaccggcattgcccctttccgaagcttctggcaacagcggcaatttgatatccaacacaaaggaatgaacccctgccccatggtcctggtcttcgggtgccggcaatccaagatagatcatatctacagggaagagaccctgcaggccaagaacaagggggtcttcagagagctgtacacggcttactcccgggagccagacaaaccaaagaagtacgtgcaggacatcctgcaggagcagctggcggagtctgtgtaccgagccctgaaggagcaagggggccacatatacgtctgtggggacgtcaccatggctgctgatgtcctcaaagccatccagcgcatcatgacccagcaggggaagctctcggcagaggacgccggcgtattcatcagccggatgagggatgacaaccgataccatgaggatatttttggagtcaccctgcgaacgtacgaagtgaccaaccgccttagatctgagtccattgccttcattgaagagagcaaaaaagacaccgatgaggttttcagctcctaactggaccctcttgcccagccggctgcaagttttgtaagcgcggacagacactgctgaacctttcctctgggaccccctgtggccctcgctctgcctcctgtccttgtcgctgtgccctggtttccctcctcgggcttctcgcccctcagtggtttcctcggccctcctgggtttactccttgagttttcctgctgcgatgcaatgcttttctaatctgcagtggctcttacaaaactctgttcccactccctctcttgccgacaagggcaactcacgggtgcatgaaaccactggaacatggccgtcgctgtgggggtttttttctctggggttcccctggaaaggctgcaggaactaggcacaagctctctgagccagtccctcagccactgaagtccccctttctccttttttatgatgacattttggttgtgcgtgcctgtgtgtgtgtgtgtgtgtgtgtgtgtgtgtgtgatgggccaggtctctgtccgtcctcttccctgcacaagtgtgtcgatcttagattgccactgctttcattgaagaccctcaatgccaagaaacgtgtccctggcccatattaatccctcgtgtgtccataattagggtccacgcccatgtacctgaaacatttggaagccccataattgttctagttagaaagggttcagggcatggggagaggagtgggaaattgattaaaggggctgtctcccaatgaaagaggcattcccagaatttgctgcatttagattttgataccagtgagcagagccctcatgtgacatgaacccatccaatggattgtgcaaatcccctccccaaacccacccataccagctagaatcacttgactttgccacatccattgactgaccccctcctccagcaatagcatccaaggggcctggaagttatgttgttcaaagaagcctggtggcaataaggatcttcccactttgccactggatgactttggatgggtcacttgtcctcagtttttcctagtcataatgtcatacgaacctaaagaatatgaatggattaaatgttaaagctttggtgcctggaaacaatatcaagtaacaatatgattattatttttttattcccccaaagcgggcttgctgcttcacccttggggatgaaataatggaagctggttaaagtggatgaggttggaaagagttgccataatgaggtcccacgtggcttcttcgataggagccacaacttggggtgggaagaacttgtccctcaggcttgttgccctctgcagttgatctccaaagttttaaacctgttaaattaattttgacaaataagttaccctcaactcagatcaaaaatgggcagccaagtcttcggtaggaattggagccggtgtaattcctccctaagaggcaacctgttgaatttactctctcagagtaaatggtgggaagggatccctttgtatacttttttaaatactacaaattagtgtcaggcagttcccagaaagagacaagaaatcctagtggcctcccagactgcagggtccccaaggatggaaagggaatgttctgctggttctaccctgtttgttgtgtcttgctatacagaaaaaccacatttcttttatatactgtacgtgggcatatcttgttgttcagtttgggtgtctgctaaagaggaagtgcactggccctctttgaaagggctttacagtgggggcaccaagaccccaaagggcccaggccaggagactgttaaagtgaaaaggcaatctatgactcaccttgctctgccatccctggcagcccccaccggtgtcctgttcctgccacatggagcttgacttcatgccagctataatctcccctgccttcctttaatcccaatttcccctgctcactcttccacagatataaagaacaaacacttagcatcccacactcaccccttctaatcctgaagggaagcccattctaaactcctttcctgcaaacccatttccagctcctagtagctttcctcccaaaggctttctttccaatcctttatagctttggagacgcctccccaattccccagggaaggaaactgttgtgtccaatccccattaaagacaaattgatcagtgcttcccactccaagtcaagctttatgcaggaatgcttttccatcagggaataaatacttagaagcgcttacaaggtgccaggcacctcctttctgcatgtgcctgcctttctagtagcagacagatggaaacattgtctcattttgtcaaggagtccaaagaaatgattataaaaccaggattcatccttcttctccagaaagatttttttttaagtaaacacctttcaatccccaacacaagctgcttcacaactccaggctagaaggcaggagagcgatctgatgtgtttctttcatttgccagaattcctgataccaaaagcctctctctctgttgagtaacctctcaaggaccagagtggagtccagattgttaggctcagatcaagggtggggaaatactgccctctcgtggtggcttttcatccaggcctcgtagccaaccgtttaagtgcaaaatagaattaagcaatgggtaagcaaaatagggttgacaagatatttgggggttattcgggttatggcccatttatttccctcttccccctgaattgaccagtagcagctccagccccatttcacaaaagtgagtttggccaggaggaatgagacgtctcctgaaataggaacaccggaacatcatgctcacctgccatcactatgcatccagttcccacagcttgtgtcgtgaaagagcagagagatgatgttaaactccttgggaggagagagggcttcttttggtttccctggagtgagacagccaggtgtctttcttttgcggggggacacttcagacccatcaatatggaattttgggagccgacctgagtgcaaatcctaattctgcccctgttggtgcagatggctgtgggcggctcacttgaccttttagagtctgcatacccacctgtataacaaggtggattgaatgagacaatgcccacgaaatgcccagttacagtacctggttcaaaacttactgcattttaatttttcacttaacttataacatgtcttgcttctccagtgtgtggaaggcaccgggcagtttgcagagataagcaaaacacagttcctctcgtgcagaaggttagaatctatttttttttttgacagagtcttgctctgtcacccaggctggcgtacagtggtacgatctcagctcactgcatcctctgcctcccccagttcaagtgattcttctgcctcggcctcctgagtaactgggactacaggcgcctaccaccacgcccagctaagttttgtatttttagtagagtcagggtttcaccatgttggccaggctggtcttgaattcctgacctcaaatgatccacgcacctcagcctcccaaagtgctggattacaggcatgagccaccacgcccagccaaaggttataatctgatggagagagacacccgtcttggaactgacataaatttctggggtttgagaaatgggcgggatttcactggtagcttctggaaggtaagagttgtccaggaattgggaagagtgagaggaaaggcacggacagggagcatgtaagataaattgaggctggctttggaaggctgaggagggtgagaaaaggtgggctgggaccagaccgtggggagaggtgagtggcattacaagaaatttaggctttattcagaaggcaacagggagtccctaagaatgtttttcaaaaagggacattaaggcgattggagttatacttggaaaagaaagttctggccacagtacagagcatggcccgttgagctgttgggggggttattgctgcaaccaaggcttgagtgagggaagaggcggatgtagtgataaagagactccaggaactgaatcagcgtacctggcaccccatccattgtagagggtgagaataaaggagaaattaaagcatcttgcaggctgggcgcggtagctcatgtctgtaatcccagcactttgggaggccgaggtgggtgtatcagttgaggtcaggagttggagaccagtcagccagttagtagaaaccctgactctactaagaaaatacaaaaattagctgggcatggtggcatgcgcctgtagtctcagctacctgggaggctgaggaaggaggatcgcttgagcccaggaggtggaggctgcagtgagccaagattgtaccactgcactccagcctgggtgacagagcaagactcttatctcaaaaaaaataaaataaaataaaataaaataaaacatcttgcccctagctgagagagaggtctctgaagagcaggctcagggaaaagatgagttttcagagctgatgtgatagtcagcttctctggagtcaacagggtgaatccttcccaagtccagccatgcccagatgcccggagggaaaactgacccccagccagtagacattggctaagaacacagaatcttctgaccaaacacgctttcagcagctgcctgctctggactttgaaagaggtcaggtcttgccctaagctcaaaacaagtgagaggtgtcctgacctagctcatagggcaaatggtcctaataggatgggcaatccagatgcctgagccccttcactccgacagcaccagcgcctaatgcagccttttcattcttgccattaggaaatctgtggacttctagcctgtgttttaaaccagccatgtttccttgtatatttccctacccgctgccccacatacccagcatgccgctgtggccaccatgtcctcaaagccttctgtctgtatcaggaatgtagtctgagactgccaggaagcaacaaggagagagaaacactaactagtcttcctttataacccattcatactctctggctgtccccaaccttcatagtctcctgcatccaaatgtcctctttggctcaaaaagtaggccaggcatggtggttcatgcctgtaatagcactttgggagactgaggtgggaggatcacttggggccaggagtttgagaccagcttgggcaacacagcgcaatctcgtctctactaaaaaaaaaaaaaaaaaaaaattagctgggcatgatggcatgctcctgtggtcccagctacttgggaggctgaggcaggaggatcacttggtcccaggagtttgaggcgacagtgagctaggatcgcaccactgcactccagcctgagtgacagagcaagaccctgtctctaaaaaaaattaaaatgaaagaccaggtgctgggattaaggaaacacaggtctgagggtctgagggaaggggcctgcctcccagggagtcaacatagatgttccccatgaacagggatttgactttggaggccaacctggcctggcctctgccctttatctcacactccctatccttggcccactgccagtccctgccttgtggcaaaggggccccaaaagaaaagctgcccttccccaaatgtaaggacccaggtacactttcacccgtggaaagcagtgtctgtcgagagtctgtttcctattaatacttatcaaagccatgtgcgagggaggtggtcagctgtcaatatgccttagtatgtttatatgagtttgttttgttctaaaatacccaaacagttctggtcaagcggggctatgcccgtctggcccaaaacacagtccgttattaacgagatggccctggcaggcgggaacaaatctgcctccatgcactgcttcctgtagtcttttagaaagtaactccaggacatcgaagtgcccagatttgactcctaagttctaggagactgtagcgcagggtctgtcaaccttagcactattggcatttggggctgggtaattctttcttgtgggggccgtcttgggtactgtaggaagctgagcagcattcctggcctccatccacaagatacctgtagcagtgtcctgccaacggtaacaatcaagtatgtcatcagacattgcccaatgtccccagggggcaacacccctctcttggacttcagggtcaagagaatctctgctggctaccccaggacttctcattatagatttcctggagcacgcagcagaaactttgcctagcccagtggttgtttccattatctgctgccaaagtgggatttgagggtgtccgggggagggggcatggggagggcagtatgctttcaaaaacccctcccaggccaggcgtggtggctcatgcctgtaatcacaggactttgggaggccgaggctggcagatcacttgaggctgggagttagagaccaacctggctaacatggcaaaacctcgtctctactaaaaatacaaaaatcagcccggcgtggtggcgggcatctgtaatcccatctactcgggaggctgaggcaggagaattacttgaacccaggaggcagaggctgcagtgagccgagatggcaccactgcactccagcttgttgacagaatgagaccctgtggaaaaaaaaaaaaaagccctcccatgccagaacagaggatggcagtctgtttcaataagacactgtgtccttggtgttggttctgattaagactcactgagatccagtgctcttgagctgggtctcagtcccctcccatgtcctgtgctctgccgccactgttttcattgttgtgttctcgttgtgattgttaagactcacactcctggctcagcagtggttttccagaaggcccaaagagcggtgccgggcaccccacgtcgcagtgtccgttccgggcttgggaagctggggaggtgggcagacctggtcgcatctcaccacacacacacacacacacacacacacacacgctgtcagaaactcggccgtcccccctacctctgagctctcaatgctgctaatctctgccaagtgtccctgtgctccagcaccttccttgaaggactgacgcccaccccacgctctttgcgaggttgtccaggctgtgtttgtcgcatgctcttcttctgtatagttctcatcttccaattttatgggattcaacaaaagcctattatgcttgtttgcattatggttacaatattaaaaagtggattcaa

SEQ ID NO: 20333 - DNA, 4462 bp, Homo sapiens
  source 1..4462: mol_type = unassigned DNA
ttaccatggaggatcacatgttcggtgttcagcaaatccagcccaatgtcatttctgttcgtctcttcaagcgcaaagttgggggcctgggatttctggtgaaggagcgggtcagtaagccgcccgtgatcatctctgacctgattcgtgggggcgccgcagagcagagtggcctcatccaggccggagacatcattcttgcggtcaacggccggcccttggtggacctgagctatgacagcgccctggaggtactcagaggcattgcctctgagacccacgtggtcctcattctgaggggccctgaaggtttcaccacgcacctggagaccacctttacaggtgatgggacccccaagaccatccgggtgacacagcccctgggtccccccaccaaagccgtggatctgtcccaccagccaccggccggcaaagaacagcccctggcagtggatggggcctcgggtcccgggaatgggcctcagcatgcctacgatgatgggcaggaggctggctcactcccccatgccaacggcctggcccccaggcccccaggccaggaccccgcgaagaaagcaaccagagtcagcctccaaggcagaggggagaacaatgaactgctcaaggagatagagcctgtgctgagccttctcaccagtgggagcagaggggtcaagggaggggcacctgccaaggcagagatgaaagatatgggaatccaggtggacagagatttggacggcaagtcacacaaacctctgcccctcggcgtggagaacgaccgagtcttcaatgacctatgggggaagggcaatgtgcctgtcgtcctcaacaacccatattcagagaaggagcagccccccacctcaggaaaacagtcccccacaaagaatggcagcccctccaagtgtccacgcttcctcaaggtcaagaactgggagactgaggtggttctcactgacaccctccaccttaagagcacattggaaacgggatgcactgagtacatctgcatgggctccatcatgcatccttctcagcatgcaaggaggcctgaagacgtccgcacaaaaggacagctcttccctctcgccaaagagtttattgatcaatactattcatcaattaaaagatttggctccaaagcccacatggaaaggctggaagaggtgaacaaagagatcgacaccactagcacttaccagctcaaggacacagagctcatctatggggccaagcacgcctggcggaatgcctcgcgctgtgtgggcaggatccagtggtccaagctgcaggtattcgatgcccgtgactgcaccacggcccacgggatgttcaactacatctgtaaccatgtcaagtatgccaccaacaaagggaacctcaggtctgccatcaccatattcccccagaggacagacggcaagcacgacttccgagtctggaactcccagctcatccgctacgctggctacaagcagcctgacggctccaccctgggggacccagccaatgtgcagttcacagagatatgcatacagcagggctggaaaccgcctagaggccgcttcgatgtcctgccgctcctgcttcaggccaacggcaatgaccctgagctcttccagattcctccagagctggtgttggaagttcccatcaggcaccccaagtttgagtggttcaaggacctggggctgaagtggtacggcctccccgccgtgtccaacatgctcctagagattggcggcctggagttcagcgcctgtcccttcagtggctggtacatgggcacagagattggtgtccgcgactactgtgacaactcccgctacaatatcctggaggaagtggccaagaagatgaacttagacatgaggaagacgtcctccctgtggaaggaccaggcgctggtggagatcaatatcgcggttctctatagcttccagagtgacaaagtgaccattgttgaccatcactccgccaccgagtccttcattaagcacatggagaatgagtaccgctgccgggggggctgccctgccgactgggtgtggatcgtgccccccatgtccggaagcatcacccctgtgttccaccaggagatgctcaactaccggctcaccccctccttcgaataccagcctgatccctggaacacgcatgtctggaaaggcaccaacgggacccccacaaagcggcgagccattggcttcaagaagctagcagaagctgtcaagttctcggccaagctgatggggcaggctatggccaagagggtgaaagcgaccatcctctatgccacagagacaggcaaatcgcaagcttatgccaagaccttgtgtgagatcttcaaacacgcctttgatgccaaggtgatgtccatggaagaatatgacattgtgcacctggaacatgaaactctggtccttgtggtcaccagcacctttggcaatggagatccccctgagaatggggagaaattcggctgtgctttgatggaaatgaggcaccccaactctgtgcaggaagaaaggaagtacccggaacccttgcgtttctttccccgtaaagggcctcccctccccaatggtgacacagaagtccacggtctggctgcagcccgtgacagccagcacaggagctacaaggtccgattcaacagcgtctcctcctactctgactcccaaaaatcatcaggcgatgggcccgacctcagagacaactttgagagtgctggacccctggccaatgtgaggttctcagtttttggcctcggctcacgagcataccctcacttttgcgccttcggacacgctgtggacaccctcctggaagaactgggaggggagaggatcctgaagatgagggaaggggatgagctctgtgggcaggaagaggctttcaggacctgggccaagaaggtcttcaaggcagcctgtgatgtcttctgtgtgggagatgatgtcaacattgaaaaggccaacaattccctcatcagcaatgatcgcagctggaagagaaacaagttccgcctcacctttgtggccgaagctccagaactcacacaaggtctatccaatgtccacaaaaagcgagtctcagctgcccggctccttagccgtcaaaacctccagagccctaaatccagtcggtcaactatcttcgtgcgtctccacaccaacgggagccaggagctgcagtaccagcctggggaccacctgggtgtcttccctggcaaccacgaggacctcgtgaatgccctgatcgagcggctggaggacgcgccgcctgtcaaccagatggtgaaagtggaactgctggaggagcggaacacggctttaggtgtcatcagtaactggacagacgagctccgcctcccgccctgcaccatcttccaggccttcaagtactacctggacatcaccacgccaccaacgcctctgcagctgcagcagtttgcctccctagctaccagcgagaaggagaagcagcgtctgctggtcctcagcaagggtttgcaggagtacgaggaatggaaatggggcaagaaccccaccatcgtggaggtgctggaggagttcccatctatccagatgccggccaccctgctcctgacccagctgtccctgctgcagccccgctactattccatcagctcctccccagacatgtaccctgatgaagtgcacctcactgtggccatcgtttcctaccgcactcgagatggagaaggaccaattcaccacggcgtatgctcctcctggctcaaccggatacaggctgacgaactggtcccctgtttcgtgagaggagcacccagcttccacctgccccggaacccccaagtcccctgcatcctcgttggaccaggcaccggcattgcccctttccgaagcttctggcaacagcggcaatttgatatccaacacaaaggaatgaacccctgccccatggtcctggtcttcgggtgccggcaatccaagatagatcatatctacagggaagagaccctgcaggccaagaacaagggggtcttcagagagctgtacacggcttactcccgggagccagacaaaccaaagaagtacgtgcaggacatcctgcaggagcagctggcggagtctgtgtaccgagccctgaaggagcaagggggccacatatacgtctgtggggacgtcaccatggctgctgatgtcctcaaagccatccagcgcatcatgacccagcaggggaagctctcggcagaggacgccggcgtattcatcagccggatgagggatgacaaccgataccatgaggatatttttggagtcaccctgcgaacgtacgaagtgaccaaccgccttagatctgagtccattgccttcattgaagagagcaaaaaagacaccgatgaggttttcagctcctaactggaccctcttgcccagccggctgcaagttttgtaagcgcggacagaca

SEQ ID NO: 20334 - DNA, 7182 bp, Homo sapiens
  source 1..7182: mol_type = unassigned DNA
agagcggctcttttaatgagggttgcgacgtctccctccccacacccataaaccagtcgggttggacgtcactgctaattcgtttcagtgatgataggataaaggagggacattaagaaataaattccccctcacgaccctcgctgagctcacggctcagtccctacatatttatgccgcgtttccagccgctgggtgaggagctacttagcgccgcggctcctccgaggggcggccgggcagcgagcagcggccgagcggacgggctcatgatgcctcagatctgatccgcatctaacaggctggcaatgaagatacccagagaatagttcacatctatcatgcgtcacttctagacacagccatcagacgcatctcctcccctttctgcctgaccttagggacacgtcccaccgcctctcttgacgtctgcctggtcaaccatcacttccttagagaataaggagagaggcggatgcaggaaatcatgccaccgacgggccaccagccatgagtgggtgacgctgagctgacgtcaaagacagagagggctgaagccttgtcagcacctgtcaccccggctcctgctctccgtgtagcctgaagcctggatcctcctggtgaaatcatcttggcctgatagcattgtgaggtcttcagacaggacccctcggaagctagttaccatggaggatcacatgttcggtgttcagcaaatccagcccaatgtcatttctgttcgtctcttcaagcgcaaagttgggggcctgggatttctggtgaaggagcgggtcagtaagccgcccgtgatcatctctgacctgattcgtgggggcgccgcagagcagagtggcctcatccaggccggagacatcattcttgcggtcaacggccggcccttggtggacctgagctatgacagcgccctggaggtactcagaggcattgcctctgagacccacgtggtcctcattctgaggggccctgaaggtttcaccacgcacctggagaccacctttacaggtgatgggacccccaagaccatccgggtgacacagcccctgggtccccccaccaaagccgtggatctgtcccaccagccaccggccggcaaagaacagcccctggcagtggatggggcctcgggtcccgggaatgggcctcagcatgcctacgatgatgggcaggaggctggctcactcccccatgccaacggcctggcccccaggcccccaggccaggaccccgcgaagaaagcaaccagagtcagcctccaaggcagaggggagaacaatgaactgctcaaggagatagagcctgtgctgagccttctcaccagtgggagcagaggggtcaagggaggggcacctgccaaggcagagatgaaagatatgggaatccaggtggacagagatttggacggcaagtcacacaaacctctgcccctcggcgtggagaacgaccgagtcttcaatgacctatgggggaagggcaatgtgcctgtcgtcctcaacaacccatattcagagaaggagcagatgaggaaactgagaatcacagagggttttggtgctcaacgagggtcacataaccaccccccacctcaggaaaacagtcccccacaaagaatggcagcccctccaagtgtccacgcttcctcaaggtcaagaactgggagactgaggtggttctcactgacaccctccaccttaagagcacattggaaacgggatgcactgagtacatctgcatgggctccatcatgcatccttctcagcatgcaaggaggcctgaagacgtccgcacaaaaggacagctcttccctctcgccaaagagtttattgatcaatactattcatcaattaaaagatttggctccaaagcccacatggaaaggctggaagaggtgaacaaagagatcgacaccactagcacttaccagctcaaggacacagagctcatctatggggccaagcacgcctggcggaatgcctcgcgctgtgtgggcaggatccagtggtccaagctgcaggtattcgatgcccgtgactgcaccacggcccacgggatgttcaactacatctgtaaccatgtcaagtatgccaccaacaaagggaacctcaggtctgccatcaccatattcccccagaggacagacggcaagcacgacttccgagtctggaactcccagctcatccgctacgctggctacaagcagcctgacggctccaccctgggggacccagccaatgtgcagttcacagagatatgcatacagcagggctggaaaccgcctagaggccgcttcgatgtcctgccgctcctgcttcaggccaacggcaatgaccctgagctcttccagattcctccagagctggtgttggaagttcccatcaggcaccccaagtttgagtggttcaaggacctggggctgaagtggtacggcctccccgccgtgtccaacatgctcctagagattggcggcctggagttcagcgcctgtcccttcagtggctggtacatgggcacagagattggtgtccgcgactactgtgacaactcccgctacaatatcctggaggaagtggccaagaagatgaacttagacatgaggaagacgtcctccctgtggaaggaccaggcgctggtggagatcaatatcgcggttctctatagcttccagagtgacaaagtgaccattgttgaccatcactccgccaccgagtccttcattaagcacatggagaatgagtaccgctgccgggggggctgccctgccgactgggtgtggatcgtgccccccatgtccggaagcatcacccctgtgttccaccaggagatgctcaactaccggctcaccccctccttcgaataccagcctgatccctggaacacgcatgtctggaaaggcaccaacgggacccccacaaagcggcgagccattggcttcaagaagctagcagaagctgtcaagttctcggccaagctgatggggcaggctatggccaagagggtgaaagcgaccatcctctatgccacagagacaggcaaatcgcaagcttatgccaagaccttgtgtgagatcttcaaacacgcctttgatgccaaggtgatgtccatggaagaatatgacattgtgcacctggaacatgaaactctggtccttgtggtcaccagcacctttggcaatggagatccccctgagaatggggagaaattcggctgtgctttgatggaaatgaggcaccccaactctgtgcaggaagaaaggaagagctacaaggtccgattcaacagcgtctcctcctactctgactcccaaaaatcatcaggcgatgggcccgacctcagagacaactttgagagtgctggacccctggccaatgtgaggttctcagtttttggcctcggctcacgagcataccctcacttttgcgccttcggacacgctgtggacaccctcctggaagaactgggaggggagaggatcctgaagatgagggaaggggatgagctctgtgggcaggaagaggctttcaggacctgggccaagaaggtcttcaaggcagcctgtgatgtcttctgtgtgggagatgatgtcaacattgaaaaggccaacaattccctcatcagcaatgatcgcagctggaagagaaacaagttccgcctcacctttgtggccgaagctccagaactcacacaaggtctatccaatgtccacaaaaagcgagtctcagctgcccggctccttagccgtcaaaacctccagagccctaaatccagtcggtcaactatcttcgtgcgtctccacaccaacgggagccaggagctgcagtaccagcctggggaccacctgggtgtcttccctggcaaccacgaggacctcgtgaatgccctgatcgagcggctggaggacgcgccgcctgtcaaccagatggtgaaagtggaactgctggaggagcggaacacggctttaggtgtcatcagtaactggacagacgagctccgcctcccgccctgcaccatcttccaggccttcaagtactacctggacatcaccacgccaccaacgcctctgcagctgcagcagtttgcctccctagctaccagcgagaaggagaagcagcgtctgctggtcctcagcaagggtttgcaggagtacgaggaatggaaatggggcaagaaccccaccatcgtggaggtgctggaggagttcccatctatccagatgccggccaccctgctcctgacccagctgtccctgctgcagccccgctactattccatcagctcctccccagacatgtaccctgatgaagtgcacctcactgtggccatcgtttcctaccgcactcgagatggagaaggaccaattcaccacggcgtatgctcctcctggctcaaccggatacaggctgacgaactggtcccctgtttcgtgagaggagcacccagcttccacctgccccggaacccccaagtcccctgcatcctcgttggaccaggcaccggcattgcccctttccgaagcttctggcaacagcggcaatttgatatccaacacaaaggaatgaacccctgccccatggtcctggtcttcgggtgccggcaatccaagatagatcatatctacagggaagagaccctgcaggccaagaacaagggggtcttcagagagctgtacacggcttactcccgggagccagacaaaccaaagaagtacgtgcaggacatcctgcaggagcagctggcggagtctgtgtaccgagccctgaaggagcaagggggccacatatacgtctgtggggacgtcaccatggctgctgatgtcctcaaagccatccagcgcatcatgacccagcaggggaagctctcggcagaggacgccggcgtattcatcagccggatgagggatgacaaccgataccatgaggatatttttggagtcaccctgcgaacgtacgaagtgaccaaccgccttagatctgagtccattgccttcattgaagagagcaaaaaagacaccgatgaggttttcagctcctaactggaccctcttgcccagccggctgcaagttttgtaagcgcggacagacactgctgaacctttcctctgggaccccctgtggccctcgctctgcctcctgtccttgtcgctgtgccctggtttccctcctcgggcttctcgcccctcagtggtttcctcggccctcctgggtttactccttgagttttcctgctgcgatgcaatgcttttctaatctgcagtggctcttacaaaactctgttcccactccctctcttgccgacaagggcaactcacgggtgcatgaaaccactggaacatggccgtcgctgtgggggtttttttctctggggttcccctggaaaggctgcaggaactaggcacaagctctctgagccagtccctcagccactgaagtccccctttctccttttttatgatgacattttggttgtgcgtgcctgtgtgtgtgtgtgtgtgtgtgtgtgtgtgtgtgatgggccaggtctctgtccgtcctcttccctgcacaagtgtgtcgatcttagattgccactgctttcattgaagaccctcaatgccaagaaacgtgtccctggcccatattaatccctcgtgtgtccataattagggtccacgcccatgtacctgaaacatttggaagccccataattgttctagttagaaagggttcagggcatggggagaggagtgggaaattgattaaaggggctgtctcccaatgaaagaggcattcccagaatttgctgcatttagattttgataccagtgagcagagccctcatgtgacatgaacccatccaatggattgtgcaaatcccctccccaaacccacccataccagctagaatcacttgactttgccacatccattgactgaccccctcctccagcaatagcatccaaggggcctggaagttatgttgttcaaagaagcctggtggcaataaggatcttcccactttgccactggatgactttggatgggtcacttgtcctcagtttttcctagtcataatgtcatacgaacctaaagaatatgaatggattaaatgttaaagctttggtgcctggaaacaatatcaagtaacaatatgattattatttttttattcccccaaagcgggcttgctgcttcacccttggggatgaaataatggaagctggttaaagtggatgaggttggaaagagttgccataatgaggtcccacgtggcttcttcgataggagccacaacttggggtgggaagaacttgtccctcaggcttgttgccctctgcagttgatctccaaagttttaaacctgttaaattaattttgacaaataagttaccctcaactcagatcaaaaatgggcagccaagtcttcggtaggaattggagccggtgtaattcctccctaagaggcaacctgttgaatttactctctcagagtaaatggtgggaagggatccctttgtatacttttttaaatactacaaattagtgtcaggcagttcccagaaagagacaagaaatcctagtggcctcccagactgcagggtccccaaggatggaaagggaatgttctgctggttctaccctgtttgttgtgtcttgctatacagaaaaaccacatttcttttatatactgtacgtgggcatatcttgttgttcagtttgggtgtctgctaaagaggaagtgcactggccctctttgaaagggctttacagtgggggcaccaagaccccaaagggcccaggccaggagactgttaaagtgaaaaggcaatctatgactcaccttgctctgccatccctggcagcccccaccggtgtcctgttcctgccacatggagcttgacttcatgccagctataatctcccctgccttcctttaatcccaatttcccctgctcactcttccacagatataaagaacaaacacttagcatcccacactcaccccttctaatcctgaagggaagcccattctaaactcctttcctgcaaacccatttccagctcctagtagctttcctcccaaaggctttctttccaatcctttatagctttggagacgcctccccaattccccagggaaggaaactgttgtgtccaatccccattaaagacaaattgatcagtgcttccc

SEQ ID NO: 20335 - DNA, 4676 bp, Homo sapiens
  source 1..4676: mol_type = unassigned DNA
agagcggctcttttaatgagggttgcgacgtctccctccccacacccataaaccagtcgggttggacgtcactgctaattcgtttcagtgatgataggataaaggagggacattaagaaataaattccccctcacgaccctcgctgagctcacggctcagtccctacatatttatgccgcgtttccagccgctgggtgaggagctacttagcgccgcggctcctccgaggggcggccgggcagcgagcagcggccgagcggacgggctcatgatgcctcagatctgatccgcatctaacaggctggcaatgaagatacccagagaatagttcacatctatcatgcgtcacttctagacacagccatcagacgcatctcctcccctttctgcctgaccttagggacacgtcccaccgcctctcttgacgtctgcctggtcaaccatcacttccttagagaataaggagagaggcggatgcaggaaatcatgccaccgacgggccaccagccatgagtgggtgacgctgagctgacgtcaaagacagagagggctgaagccttgtcagcacctgtcaccccggctcctgctctccgtgtagcctgaagcctggatcctcctggtgaaatcatcttggcctgatagcattgtgaggtcttcagacaggacccctcggaagctagttaccatggaggatcacatgttcggtgttcagcaaatccagcccaatgtcatttctgttcgtctcttcaagcgcaaagttgggggcctgggatttctggtgaaggagcgggtcagtaagccgcccgtgatcatctctgacctgattcgtgggggcgccgcagagcagagtggcctcatccaggccggagacatcattcttgcggtcaacggccggcccttggtggacctgagctatgacagcgccctggaggtactcagaggcattgcctctgagacccacgtggtcctcattctgaggggccctgaaggtttcaccacgcacctggagaccacctttacaggtgatgggacccccaagaccatccgggtgacacagcccctgggtccccccaccaaagccgtggatctgtcccaccagccaccggccggcaaagaacagcccctggcagtggatggggcctcgggtcccgggaatgggcctcagcatgcctacgatgatgggcaggaggctggctcactcccccatgccaacggcctggcccccaggcccccaggccaggaccccgcgaagaaagcaaccagagtcagcctccaaggcagaggggagaacaatgaactgctcaaggagatagagcctgtgctgagccttctcaccagtgggagcagaggggtcaagggaggggcacctgccaaggcagagatgaaagatatgggaatccaggtggacagagatttggacggcaagtcacacaaacctctgcccctcggcgtggagaacgaccgagtcttcaatgacctatgggggaagggcaatgtgcctgtcgtcctcaacaacccatattcagagaaggagcagccccccacctcaggaaaacagtcccccacaaagaatggcagcccctccaagtgtccacgcttcctcaaggtcaagaactgggagactgaggtggttctcactgacaccctccaccttaagagcacattggaaacgggatgcactgagtacatctgcatgggctccatcatgcatccttctcagcatgcaaggaggcctgaagacgtccgcacaaaaggacagctcttccctctcgccaaagagtttattgatcaatactattcatcaattaaaagatttggctccaaagcccacatggaaaggctggaagaggtgaacaaagagatcgacaccactagcacttaccagctcaaggacacagagctcatctatggggccaagcacgcctggcggaatgcctcgcgctgtgtgggcaggatccagtggtccaagctgcaggtattcgatgcccgtgactgcaccacggcccacgggatgttcaactacatctgtaaccatgtcaagtatgccaccaacaaagggaacctcaggtctgccatcaccatattcccccagaggacagacggcaagcacgacttccgagtctggaactcccagctcatccgctacgctggctacaagcagcctgacggctccaccctgggggacccagccaatgtgcagttcacagaggaagtggccaagaagatgaacttagacatgaggaagacgtcctccctgtggaaggaccaggcgctggtggagatcaatatcgcggttctctatagcttccagagtgacaaagtgaccattgttgaccatcactccgccaccgagtccttcattaagcacatggagaatgagtaccgctgccgggggggctgccctgccgactgggtgtggatcgtgccccccatgtccggaagcatcacccctgtgttccaccaggagatgctcaactaccggctcaccccctccttcgaataccagcctgatccctggaacacgcatgtctggaaaggcaccaacgggacccccacaaagcggcgagccattggcttcaagaagctagcagaagctgtcaagttctcggccaagctgatggggcaggctatggccaagagggtgaaagcgaccatcctctatgccacagagacaggcaaatcgcaagcttatgccaagaccttgtgtgagatcttcaaacacgcctttgatgccaaggtgatgtccatggaagaatatgacattgtgcacctggaacatgaaactctggtccttgtggtcaccagcacctttggcaatggagatccccctgagaatggggagaaattcggctgtgctttgatggaaatgaggcaccccaactctgtgcaggaagaaaggaagagctacaaggtccgattcaacagcgtctcctcctactctgactcccaaaaatcatcaggcgatgggcccgacctcagagacaactttgagagtgctggacccctggccaatgtgaggttctcagtttttggcctcggctcacgagcataccctcacttttgcgccttcggacacgctgtggacaccctcctggaagaactgggaggggagaggatcctgaagatgagggaaggggatgagctctgtgggcaggaagaggctttcaggacctgggccaagaaggtcttcaaggcagcctgtgatgtcttctgtgtgggagatgatgtcaacattgaaaaggccaacaattccctcatcagcaatgatcgcagctggaagagaaacaagttccgcctcacctttgtggccgaagctccagaactcacacaaggtctatccaatgtccacaaaaagcgagtctcagctgcccggctccttagccgtcaaaacctccagagccctaaatccagtcggtcaactatcttcgtgcgtctccacaccaacgggagccaggagctgcagtaccagcctggggaccacctgggtgtcttccctggcaaccacgaggacctcgtgaatgccctgatcgagcggctggaggacgcgccgcctgtcaaccagatggtgaaagtggaactgctggaggagcggaacacggctttaggtgtcatcagtaactggacagacgagctccgcctcccgccctgcaccatcttccaggccttcaagtactacctggacatcaccacgccaccaacgcctctgcagctgcagcagtttgcctccctagctaccagcgagaaggagaagcagcgtctgctggtcctcagcaagggtttgcaggagtacgaggaatggaaatggggcaagaaccccaccatcgtggaggtgctggaggagttcccatctatccagatgccggccaccctgctcctgacccagctgtccctgctgcagccccgctactattccatcagctcctccccagacatgtaccctgatgaagtgcacctcactgtggccatcgtttcctaccgcactcgagatggagaaggaccaattcaccacggcgtatgctcctcctggctcaaccggatacaggctgacgaactggtcccctgtttcgtgagaggagcacccagcttccacctgccccggaacccccaagtcccctgcatcctcgttggaccaggcaccggcattgcccctttccgaagcttctggcaacagcggcaatttgatatccaacacaaaggaatgaacccctgccccatggtcctggtcttcgggtgccggcaatccaagatagatcatatctacagggaagagaccctgcaggccaagaacaagggggtcttcagagagctgtacacggcttactcccgggagccagacaaaccaaagaagtacgtgcaggacatcctgcaggagcagctggcggagtctgtgtaccgagccctgaaggagcaagggggccacatatacgtctgtggggacgtcaccatggctgctgatgtcctcaaagccatccagcgcatcatgacccagcaggggaagctctcggcagaggacgccggcgtattcatcagccggatgagggatgacaaccgataccatgaggatatttttggagtcaccctgcgaacgtacgaagtgaccaaccgccttagatctgagtccattgccttcattgaagagagcaaaaaagacaccgatgaccaggtattcaaaacc

SEQ ID NO: 20336 - DNA, 4307 bp, Homo sapiens
  source 1..4307: mol_type = unassigned DNA
agagcggctcttttaatgagggttgcgacgtctccctccccacacccataaaccagtcgggttggacgtcactgctaattcgtttcagtgatgataggataaaggagggacattaagaaataaattccccctcacgaccctcgctgagctcacggctcagtccctacatatttatgccgcgtttccagccgctgggtgaggagctacttagcgccgcggctcctccgaggggcggccgggcagcgagcagcggccgagcggacgggctcatgatgcctcagatctgatccgcatctaacaggctggcaatgaagatacccagagaatagttcacatctatcatgcgtcacttctagacacagccatcagacgcatctcctcccctttctgcctgaccttagggacacgtcccaccgcctctcttgacgtctgcctggtcaaccatcacttccttagagaataaggagagaggcggatgcaggaaatcatgccaccgacgggccaccagccatgagtgggtgacgctgagctgacgtcaaagacagagagggctgaagccttgtcagcacctgtcaccccggctcctgctctccgtgtagcctgaagcctggatcctcctggtgaaatcatcttggcctgatagcattgtgaggtcttcagacaggacccctcggaagctagttaccatggaggatcacatgttcggtgttcagcaaatccagcccaatgtcatttctgttcgtctcttcaagcgcaaagttgggggcctgggatttctggtgaaggagcgggtcagtaagccgcccgtgatcatctctgacctgattcgtgggggcgccgcagagcagagtggcctcatccaggccggagacatcattcttgcggtcaacggccggcccttggtggacctgagctatgacagcgccctggaggtactcagaggcattgcctctgagacccacgtggtcctcattctgaggggccctgaaggtttcaccacgcacctggagaccacctttacaggtgatgggacccccaagaccatccgggtgacacagcccctgggtccccccaccaaagccgtggatctgtcccaccagccaccggccggcaaagaacagcccctggcagtggatggggcctcgggtcccgggaatgggcctcagcatgcctacgatgatgggcaggaggctggctcactcccccatgccaacggcctggcccccaggcccccaggccaggaccccgcgaagaaagcaaccagagtcagcctccaaggcagaggggagaacaatgaactgctcaaggagatagagcctgtgctgagccttctcaccagtgggagcagaggggtcaagggaggggcacctgccaaggcagagatgaaagatatgggaatccaggtggacagagatttggacggcaagtcacacaaacctctgcccctcggcgtggagaacgaccgagtcttcaatgacctatgggggaagggcaatgtgcctgtcgtcctcaacaacccatattcagagaaggagcagccccccacctcaggaaaacagtcccccacaaagaatggcagcccctccaagtgtccacgcttcctcaaggtcaagaactgggagactgaggtggttctcactgacaccctccaccttaagagcacattggaaacgggatgcactgagtacatctgcatgggctccatcatgcatccttctcagcatgcaaggaggcctgaagacgtccgcacaaaaggacagctcttccctctcgccaaagagtttattgatcaatactattcatcaattaaaagatttggctccaaagcccacatggaaaggctggaagaggtgaacaaagagatcgacaccactagcacttaccagctcaaggacacagagctcatctatggggccaagcacgcctggcggaatgcctcgcgctgtgtgggcaggatccagtggtccaagctgcaggtattcgatgcccgtgactgcaccacggcccacgggatgttcaactacatctgtaaccatgtcaagtatgccaccaacaaagggaacctcaggtctgccatcaccatattcccccagaggacagacggcaagcacgacttccgagtctggaactcccagctcatccgctacgctggctacaagcagcctgacggctccaccctgggggacccagccaatgtgcagttcacagagatatgcatacagcagggctggaaaccgcctagaggccgcttcgatgtcctgccgctcctgcttcaggccaacggcaatgaccctgagctcttccagattcctccagagctggtgttggaagttcccatcaggcaccccaagtttgagtggttcaaggacctggggctgaagtggtacggcctccccgccgtgtccaacatgctcctagagattggcggcctggagttcagcgcctgtcccttcagtggctggtacatgggcacagagattggtgtccgcgactactgtgacaactcccgctacaatatcctggaggaagtggccaagaagatgaacttagacatgaggaagacgtcctccctgtggaaggaccaggcgctggtggagatcaatatcgcggttctctatagcttccagagtgacaaagtgaccattgttgaccatcactccgccaccgagtccttcattaagcacatggagaatgagtaccgctgccgggggggctgccctgccgactgggtgtggatcgtgccccccatgtccggaagcatcacccctgtgttccaccaggagatgctcaactaccggctcaccccctccttcgaataccagcctgatccctggaacacgcatgtctggaaaggcaccaacgggacccccacaaagcggcgagccattggcttcaagaagctagcagaagctgtcaagttctcggccaagctgatggggcaggctatggccaagagggtgaaagcgaccatcctctatgccacagagacaggcaaatcgcaagcttatgccaagaccttgtgtgagatcttcaaacacgcctttgatgccaaggtgatgtccatggaagaatatgacattgtgcacctggaacatgaaactctggtccttgtggtcaccagcacctttggcaatggagatccccctgagaatggggagaaattcggctgtgctttgatggaaatgaggcaccccaactctgtgcaggaagaaaggaagagctacaaggtccgattcaacagcgtctcctcctactctgactcccaaaaatcatcaggcgatgggcccgacctcagagacaactttgagagtgctggacccctggccaatgtgaggttctcagtttttggcctcggctcacgagcataccctcacttttgcgccttcggacacgctgtggacaccctcctggaagaactgggaggggagaggatcctgaagatgagggaaggggatgagctctgtgggcaggaagaggctttcaggacctgggccaagaaggtcttcaaggcagcctgtgatgtcttctgtgtgggagatgatgtcaacattgaaaaggccaacaattccctcatcagcaatgatcgcagctggaagagaaacaagttccgcctcacctttgtggccgaagctccagaactcacacaaggtctatccaatgtccacaaaaagcgagtctcagctgcccggctccttagccgtcaaaacctccagagccctaaatccagtcggtcaactatcttcgtgcgtctccacaccaacgggagccaggagctgcagtaccagcctggggaccacctgggtgtcttccctggcaaccacgaggacctcgtgaatgccctgatcgagcggctggaggacgcgccgcctgtcaaccagatggtgaaagtggaactgctggaggagcggaacacggctttaggtgtcatcagtaactggacagacgagctccgcctcccgccctgcaccatcttccaggccttcaagtactacctggacatcaccacgccaccaacgcctctgcagctgcagcagtttgcctccctagctaccagcgagaaggagaagcagcgtctgctggtcctcagcaagggtttgcaggagtacgaggaatggaaatggggcaagaaccccaccatcgtggaggtgctggaggagttcccatctatccagatgccggccaccctgctcctgacccagctgtccctgctgcagccccgctactattccatcagctcctccccacacacacacacgctgtcagaaactcggccgtcccccctacctctgagctctcaatgctgctaa

SEQ ID NO: 20337 - DNA, 201 bp, Homo sapiens
  source 1..201: mol_type = unassigned DNA
caccccaactctgtgcaggaagaaaggaagtacccggaacccttgcgtttctttccccgtaaagggcctcccctccccaatggtgacacagaagtccacggtctggctgcagcccgtgacagccagcacaggagctacaaggtccgattcaacagcgtctcctcctactctgactcccaaaaatcatcaggcgatgggccc

SEQ ID NO: 20338 - DNA, 4931 bp, Homo sapiens
  source 1..4931: mol_type = unassigned DNA
cgtcgccttttcttcttcgtcccgggcggtgcgttccactgctctggggccggcgccgcgcccagtcccgcttcgggccgcaagccccaccgctcccctccccgggcaggggcgccgcgcagcccgctcccgccgccacctcctcccctgccgccctcctagccggcaggaattgcgcgaccacagcgccgctcgcgtcgcccgcatcagctcagcccgctgccgctcggccctcggcaccgctccgggtccggccgccgcgcggccagggctccccctgcccagcgctcccaggccccgccacgcgtcgccgcgcccagctccagtctcccctccccggggtctcgccagccccttcctgcagccgccgcctccgaaggagcgggtccgccgcgggtaaccatgcctagcaaaaccaagtacaaccttgtggacgatgggcacgacctgcggatccccttgcacaacgaggacgccttccagcacggcatctgctttgaggccaagtacgtaggaagcctggacgtgccaaggcccaacagcagggtggagatcgtggctgccatgcgccggatacggtatgagtttaaagccaagaacatcaagaagaagaaagtgagcattatggtttcagtggatggagtgaaagtgattctgaagaagaagaaaaagcttcttttattgcagaaaaaggaatggacgtgggatgagagcaagatgctggtgatgcaggaccccatctacaggatcttctatgtctctcatgattcccaagacttgaagatcttcagctatatcgctcgagatggtgccagcaatatcttcaggtgtaacgtctttaaatccaagaagaagagccaagctatgagaatcgttcggacggtggggcaggcctttgaggtctgccacaagctgagcctgcagcacacgcagcagaatgcagatggccaggaagatggagagagcgagaggaacagcaacagctcaggagacccaggccgccagctcactggagccgagagggcctccacggccactgcagaggagactgacatcgatgcggtggaggtcccacttccagggaatgatgtcctggaattcagccgaggtgtgactgatctagatgctgtagggaaggaaggaggctctcacacaggctccaaggtttcgcacccccaggagcccatgctgacagcctcacccaggatgctgctcccttcttcttcctcgaagcctccaggcctgggcacagagacaccgctgtccactcaccaccagatgcagctcctccagcagctcctccagcagcagcagcagcagacacaagtggctgtggcccaggtacacttgctgaaggaccagttggctgctgaggctgcggcgcggctggaggcccaggctcgcgtgcatcagcttttgctgcagaacaaggacatgctccagcacatctccctgctggtcaagcaggtgcaagagctggaactgaagctgtcaggacagaacgccatgggctcccaggacagcttgctggagatcaccttccgctccggagccctgcccgtgctctgtgaccccacgacccctaagccagaggacctgcattcgccgccgctgggcgcgggcttggctgactttgcccaccctgcgggcagccccttaggtaggcgcgactgcttggtgaagctggagtgctttcgctttcttccgcccgaggacaccccgcccccagcgcagggcgaggcgctcctgggcggtctggagctcatcaagttccgagagtcaggcatcgcctcggagtacgagtccaacacggacgagagcgaggagcgcgactcgtggtcccaggaggagctgccgcgcctgctgaatgtcctgcagaggcaggaactgggcgacggcctggatgatgagatcgccgtgtaggtgccgagggcgaggagatggaggcggcggcgtggctggaggggccgtgtctggctgctgcccgggtaggggatgcccagtgaatgtgcactgccgaggagaatgccagccagggcccgggagagtgtgaggtttcaggaaagtattgagattctgctttggagggtaaagtggggaagaaatcggattcccagaggtgaatcagctcctctcctacttgtgactagagggtggtggaggtaaggccttccagagcccatggcttcaggagagggtctctctccaggactgccaggctgctggaggacctgcccctacctgctgcatcgtcaggctcccacgctttgtccgtgatgcccccctaccccctcactctccccgtctccatggtcccgaccaggaagggaagccatcggtaccttctcaggtactttgtttctggatatcacgatgctgcgagttgcctaaccctccccctacctttatgagaggaattccttctccaggcccttgctgagattgtagagattgagtgctctggaccgcaaaagccaggctagtccttgtagggtgagcatggaattggaatgtgtcacagtggataagcttttagaggaactgaatccaaacattttctccagccggacattgaatgttgctacaaagggagccttgaagctttaacatggttcaggcccttggtgtgagagcccagggggaggacagcttgtctgctgctccaaatcacttagatctgattcctgttttgaaagtcctgccctgccttcctcctgcctgtagcccagcccatctaaatggaagctgggaattgcccctcacctcccctgtgtcctgtccagctgaagcttttgcagcactttacctctctgaaagccccagaggaccagagcccccagccttacctctcaacctgtcccctccactgggcagtggtggtcagtttttactgcaaaaaaaaaaaaagaaaaaagagaaagaaaaaaaagaatgaatgcaagctgatagctgagactgtgagactgtttttgtccactcttctgaatcactgccacttgggtcagggaccacagccattgccacccttggcccatctctctgcgtgcgtgccttgagcacacatataaaaagtgccatgtgcaattgtcttatcttttatgatctaggctttgcctagggatcactactccttaacgggctggctggggcaatgaggaaaagctcctttgctcctgtaaggccataagtggctgttaacagattttcaaatgcctgaagagattgctgagacctgctagagtcatatgttcggggaattaagtctttatcctagacaacaaggtacagatgcaaactgcagtgttattggagggtcaatcggcaaggatatgattatcccaaaatggagttcatcgaccctagctttcctttagattatatataaataaaagtgcagtcctcttctaatggccacagttggttttcttgtagcccagaaagtccaaattaaaggaaataaattcagttttatgttagccttccttggtgcatcagggtgtcagtggaaataggatcaggtggtgtgtgtgtgtgtgttttgtgtgtgtgtgtacacatgtgtttatatatacatgtgtgagggaaagtgtgtacatatatgtaggattgtaaccagacggaaaagaacgaggatctccagggtgtttgaatcagcaacagatttgtgttttctaacatgcatttagttggagaggcatggttctgtttgttttgttttgatctaatttgccattggaaataggtacagttacacagagaaggaagaaccaggaaagtgagatccatgaaactaaatgagcagctgtcagaatccagtgtggctgagcctacctagcttatgaaatctaacccagggttccctgagtccaagaccacttagattattaagattttgaacgtccagaggagtgaaaagtctgttttctgacgtaagccggagctgaggataaagccagaggccagtggattaggtgtatggaatgtggatggagagggcttgtgtgggatgtggccagggagtgggtgaggaaggccgcttctaaatggcctgtaaaaacttgagattggatagacgaaaggaaatggagaaattaaagaattggagaaactagttatctgtgttgctgactttgggacccatccaagactcctgcccttggggtgttccatggtggtttcttcctgcctgggcgccaccctttccccagttcaggccctccctggaggactagtttgtgtattggtatcctccccagtggacccaaaccagcgcatacttggtgtgtggagatgggagacaaaggacagatctaggagccttgaaggatcaccagccaccgaccctccatcagggccaactgggcaggaaagggaacattgcagacctgatttcccgacgatgtcaccctgtcctccctccttgcttcttgctctgctaactcaactctgccttcctctttttcattcttctactctgccctatatggaggacaaatggacaccaggggtgctaaccttattggtgcctgccccagcctaccccaggtgccagcagactctcgtgcacaggaggctcccacagttatggagccaggaaagaatttctctgcactggatggactgtatattgagattaaaaattatattccttatattcctgcttatatcaatgctctctctgtaaaacctcttcctagcctcatttctctcaactgatcttgtttaggcgttgtattccttttatttactctttgcttgactgcttcctcctaaccctctacccactagcactctacttcctaaagctgttgtgtcattaactctgttggatcaactctctgggaaaagattctgttaatgtaagtgcacttactccctggatgttgtcactagtctagtggcttttgctaaataaacctttcttatttcta

SEQ ID NO: 20339 - DNA, 5559 bp, Homo sapiens
  source 1..5559: mol_type = unassigned DNA
ctatgaccaaatgtatggggctttttcccacacaccaagcaagcaagcagttctgcagagggcacacagtgtcctctaactcagtttgattctgatactatctacctggaaacagcatcagatcccacagtttgagggctcaatcccacaagactttcccccatttcagacaccaatcacaagtaatagtttgtcacctacacctctgaccaagtggctataaattggtgttcccactaccctctccttggactcaactgatttgctagagcaactgacagaactcaggaaaacacctacatttactggtttattttaaaggatattataagggataccaatgaacaccagatggaagagatgcatagggcagggtctgtgggaagggtggcagagctcccatgccctcccaacgtgcaccaccctccaggaacctctaaatgttcagctgcccggcagctccccacacccagtccttttgagtttttaatggaggctttattatgtaggcatgattgattacatcattggccactggtgattagtttaacttttagcccctcatctcctggaggttggggcgtgggactgaaaaatcctatcctctaatcataccttggtctgtcctgtgagcagcccccatcccgaagcttccaggggttccccaaccactaatcatctaataagcatacaaaaaacactcttaccactctggagatctcaagggtttggggagctatatgtcaggaaacagggatgaagaccaaacatgtatttcactgtatcacacctgttctcacccctccccagatcttctctcaattaatatgagacaaaaaaatgagtctgacttcttgaccaaaatatcagttctgtccttagcagctttatggaggacagatttagtttaaattccttaggcattatgcccctgtggctccactcaatcagaaatagggtcaacggcaaggtcagggcctccaatctgggcaagagggaggcagccacggtatccacaagtgtaattctctgagtgctggttgctgggaggggcacaccctgggccagcaagtcacttggccaagggtggccaactgtgaggtagcactgccctttactccctaaaaaaatgtgaatctctttggagcaaactcctcttcagaaatttgagcacttgttttctgagcaagggaatcagctaatgcttttgactccccatccatcttcctgcatcctcgtcccacctctcctgcccccactcacctggctctgtctttacccacaccatggttttggtacaagaacacccttttccccataagctacattggtccaggccataaaaattcattagttccctttcttcaggggccttctgaaatgctccctggagaactctttattcacttctttgcacaagaatcacatatgtgtgaacactggtattggccttctaactcagtttcttcaaaccagggtcctggtctggttgcccctgtctcctcccactgagttttatctccacataagtattgctcaccaagaacagagctgttgacaccactgggcctcaagcatgctgaatgcattgctgccaactgctctgccttaagaaggttggaaactgatgagggtgccacaaattgttcacctcagcccttctgggctggttggaggaggccctctcatgaatcagtcagcaaatgtttgacccctaccaggtggtcctggtaatatgtggtatgaatcatggtcctagatgtctgccatagcaaataaaaaaggaagacagggaaagaagctgtcgcctacagagtggcttgatgacagctgcctcactaatttaaaaagccatgtgtagtgcttcctatttctcactatgtttgggtgagtgggagagggagaaagattatatgggcttcgttgtgacactgttcttagccagtgggtcaatagatgagttttggttttgttttttagaagacaggatgagaagagagtgcccccttccacctccaacatggcatgccatgctaggtgctgaaggagttctctaagcagggatggagcaccgtgcgtgtgtgtgtgtatatgtgcacgtgtgtgtgtacgtgtgtgtgtgtggcaggtctagagggtcgatggctctttcctgcctcttgcccttggtatgggtaccttagtgatgcatcatggccctcccttaggacacacagcttcgcagtgccagtgaacccactccttttggctcctcctctggaatgataagcccagatgcccatgctgcccgtgaagggcttcttcttgaactgaatgtggagggcatctctggtcccggccatctgccagtgactctcatgtgcattcatgtccctctcttctctctgtcctgtcttctctgccgctgcctcttctctgcaggtacacttgctgaaggaccagttggctgctgaggctgcggcgcggctggaggcccaggctcgcgtgcatcagcttttgctgcagaacaaggacatgctccagcacatctccctgctggtcaagcaggtgcaagagctggaactgaagctgtcaggacagaacgccatgggctcccaggacagcttgctggagatcaccttccgctccggagccctgcccgtgctctgtgaccccacgacccctaagccagaggacctgcattcgccgccgctgggcgcgggcttggctgactttgcccaccctgcgggcagccccttaggtaggcgcgactgcttggtgaagctggagtgctttcgctttcttccgcccgaggacaccccgcccccagcgcagggcgaggcgctcctgggcggtctggagctcatcaagttccgagagtcaggcatcgcctcggagtacgagtccaacacggacgagagcgaggagcgcgactcgtggtcccaggaggagctgccgcgcctgctgaatgtcctgcagaggcaggaactgggcgacggcctggatgatgagatcgccgtgtaggtgccgagggcgaggagatggaggcggcggcgtggctggaggggccgtgtctggctgctgcccgggtaggggatgcccagtgaatgtgcactgccgaggagaatgccagccagggcccgggagagtgtgaggtttcaggaaagtattgagattctgctttggagggtaaagtggggaagaaatcggattcccagaggtgaatcagctcctctcctacttgtgactagagggtggtggaggtaaggccttccagagcccatggcttcaggagagggtctctctccaggactgccaggctgctggaggacctgcccctacctgctgcatcgtcaggctcccacgctttgtccgtgatgcccccctaccccctcactctccccgtctccatggtcccgaccaggaagggaagccatcggtaccttctcaggtactttgtttctggatatcacgatgctgcgagttgcctaaccctccccctacctttatgagaggaattccttctccaggcccttgctgagattgtagagattgagtgctctggaccgcaaaagccaggctagtccttgtagggtgagcatggaattggaatgtgtcacagtggataagcttttagaggaactgaatccaaacattttctccagccggacattgaatgttgctacaaagggagccttgaagctttaacatggttcaggcccttggtgtgagagcccagggggaggacagcttgtctgctgctccaaatcacttagatctgattcctgttttgaaagtcctgccctgccttcctcctgcctgtagcccagcccatctaaatggaagctgggaattgcccctcacctcccctgtgtcctgtccagctgaagcttttgcagcactttacctctctgaaagccccagaggaccagagcccccagccttacctctcaacctgtcccctccactgggcagtggtggtcagtttttactgcaaaaaaaaaaaaagaaaaaagagaaagaaaaaaaagaatgaatgcaagctgatagctgagactgtgagactgtttttgtccactcttctgaatcactgccacttgggtcagggaccacagccattgccacccttggcccatctctctgcgtgcgtgccttgagcacacatataaaaagtgccatgtgcaattgtcttatcttttatgatctaggctttgcctagggatcactactccttaacgggctggctggggcaatgaggaaaagctcctttgctcctgtaaggccataagtggctgttaacagattttcaaatgcctgaagagattgctgagacctgctagagtcatatgttcggggaattaagtctttatcctagacaacaaggtacagatgcaaactgcagtgttattggagggtcaatcggcaaggatatgattatcccaaaatggagttcatcgaccctagctttcctttagattatatataaataaaagtgcagtcctcttctaatggccacagttggttttcttgtagcccagaaagtccaaattaaaggaaataaattcagttttatgttagccttccttggtgcatcagggtgtcagtggaaataggatcaggtggtgtgtgtgtgtgtgttttgtgtgtgtgtgtacacatgtgtttatatatacatgtgtgagggaaagtgtgtacatatatgtaggattgtaaccagacggaaaagaacgaggatctccagggtgtttgaatcagcaacagatttgtgttttctaacatgcatttagttggagaggcatggttctgtttgttttgttttgatctaatttgccattggaaataggtacagttacacagagaaggaagaaccaggaaagtgagatccatgaaactaaatgagcagctgtcagaatccagtgtggctgagcctacctagcttatgaaatctaacccagggttccctgagtccaagaccacttagattattaagattttgaacgtccagaggagtgaaaagtctgttttctgacgtaagccggagctgaggataaagccagaggccagtggattaggtgtatggaatgtggatggagagggcttgtgtgggatgtggccagggagtgggtgaggaaggccgcttctaaatggcctgtaaaaacttgagattggatagacgaaaggaaatggagaaattaaagaattggagaaactagttatctgtgttgctgactttgggacccatccaagactcctgcccttggggtgttccatggtggtttcttcctgcctgggcgccaccctttccccagttcaggccctccctggaggactagtttgtgtattggtatcctccccagtggacccaaaccagcgcatacttggtgtgtggagatgggagacaaaggacagatctaggagccttgaaggatcaccagccaccgaccctccatcagggccaactgggcaggaaagggaacattgcagacctgatttcccgacgatgtcaccctgtcctccctccttgcttcttgctctgctaactcaactctgccttcctctttttcattcttctactctgcc

SEQ ID NO: 20340 - DNA, 2894 bp, Homo sapiens
  source 1..2894: mol_type = unassigned DNA
accgtcgccttttcttcttcgtcccgggcggtgcgttccactgctctggggccggcgccgcgcccagtcccgcttcgggccgcaagccccaccgctcccctccccgggcaggggcgccgcgcagcccgctcccgccgccacctcctcccctgccgccctcctagccggcaggaattgcgcgaccacagcgccgctcgcgtcgcccgcatcagctcagcccgctgccgctcggccctcggcaccgctccgggtccggccgccgcgcggccagggctccccctgcccagcgctcccaggccccgccacgcgtcgccgcgcccagctccagtctcccctccccggggtctcgccagccccttcctgcagccgccgcctccgaaggagcgggtccgccgcgggtaaccatgcctagcaaaaccaagtacaaccttgtggacgatgggcacgacctgcggatccccttgcacaacgaggacgccttccagcacggcatctgctttgaggccaagtacgtaggaagcctggacgtgccaaggcccaacagcagggtggagatcgtggctgccatgcgccggatacggtatgagtttaaagccaagaacatcaagaagaagaaagtgagcattatggtttcagtggatggagtgaaagtgattctgaagaagaagaaaaagaaaaaggaatggacgtgggatgagagcaagatgctggtgatgcaggaccccatctacaggatcttctatgtctctcatgattcccaagacttgaagatcttcagctatatcgctcgagatggtgccagcaatatcttcaggtgtaacgtctttaaatccaagaagaagagccaagctatgagaatcgttcggacggtggggcaggcctttgaggtctgccacaagctgagcctgcagcacacgcagcagaatgcagatggccaggaagatggagagagcgagaggaacagcaacagctcaggagacccaggccgccagctcactggagccgagagggcctccacggccactgcagaggagactgacatcgatgcggtggaggtcccacttccagggaatgatgtcctggaattcagccgaggtgtgactgatctagatgctgtagggaaggaaggaggctctcacacaggctccaaggtttcgcacccccaggagcccatgctgacagcctcacccaggatgctgctcccttcttcttcctcgaagcctccaggcctgggcacagagacaccgctgtccactcaccaccagatgcagctcctccagcagctcctccagcagcagcagcagcagacacaagtggctgtggcccaggtacacttgctgaaggaccagttggctgctgaggctgcggcgcggctggaggcccaggctcgcgtgcatcagcttttgctgcagaacaaggacatgctccagcacatctccctgctggtcaagcaggtgcaagagctggaactgaagctgtcaggacagaacgccatgggctcccaggacagcttgctggagatcaccttccgctccggagccctgcccgtgctctgtgaccccacgacccctaagccagaggacctgcattcgccgccgctgggcgcgggcttggctgactttgcccaccctgcgggcagccccttaggtaggcgcgactgcttggtgaagctggagtgctttcgctttcttccgcccgaggacaccccgcccccagcgcagggcgaggcgctcctgggcggtctggagctcatcaagttccgagagtcaggcatcgcctcggagtacgagtccaacacggacgagagcgaggagcgcgactcgtggtcccaggaggagctgccgcgcctgctgaatgtcctgcagaggcaggaactgggcgacggcctggatgatgagatcgccgtgtaggtgccgagggcgaggagatggaggcggcggcgtggctggaggggccgtgtctggctgctgcccgggtaggggatgcccagtgaatgtgcactgccgaggagaatgccagccagggcccgggagagtgtgaggtttcaggaaagtattgagattctgctttggagggtaaagtggggaagaaatcggattcccagaggtgaatcagctcctctcctacttgtgactagagggtggtggaggtaaggccttccagagcccatggcttcaggagagggtctctctccaggactgccaggctgctggaggacctgcccctacctgctgcatcgtcaggctcccacgctttgtccgtgatgcccccctaccccctcactctccccgtctccatggtcccgaccaggaagggaagccatcggtaccttctcaggtactttgtttctggatatcacgatgctgcgagttgcctaaccctccccctacctttatgagaggaattccttctccaggcccttgctgagattgtagagattgagtgctctggaccgcaaaagccaggctagtccttgtagggtgagcatggaattggaatgtgtcacagtggataagcttttagaggaactgaatccaaacattttctccagccggacattgaatgttgctacaaagggagccttgaagctttaacatggttcaggcccttggtgtgagagcccagggggaggacagcttgtctgctgctccaaatcacttagatctgattcctgttttgaaagtcctgccctgccttcctcctgcctgtagcccagcccatctaaatggaagctgggaattgcccctcacctcccctgtgtcctgtccagctgaagcttttgcagcactttacctctctgaaagccccagaggaccagagcccccagccttacctctcaacctgtcccctccactgggcagtggtggtcagtttttactgcaaaaaaaaaaaaa

SEQ ID NO: 20341 - DNA, 2577 bp, Homo sapiens
  source 1..2577: mol_type = unassigned DNA
aactttgtagcgagtcgaaaactgaggctccggccgcagagaactcagcctcattcctgctttaaaatctctcggccacctttgatgaggggactgggcagttctagacagtcccgaagttctcaaggcacaggtctcttcctggtttgactgtccttaccccggggaggcagtgcagccagctgcaagccccacagtgaagaacatctgagctcaaatccagataagtgacataagtgacctgctttgtaaagccatagagatggcctgtccttggaaatttctgttcaagaccaaattccaccagtatgcaatgaatggggaaaaagacatcaacaacaatgtggagaaagccccctgtgccacctccagtccagtgacacaggatgaccttcagtatcacaacctcagcaagcagcagaatgagtccccgcagcccctcgtggagacgggaaagaagtctccagaatctctggtcaagctggatgcaaccccattgtcctccccacggcatgtgaggatcaaaaactggggcagcgggatgactttccaagacacacttcaccataaggccaaagggattttaacttgcaggtccaaatcttgcctggggtccattatgactcccaaaagtttgaccagaggacccagggacaagcctacccctccagatgagcttctacctcaagctatcgaatttgtcaaccaatattacggctccttcaaagaggcaaaaatagaggaacatctggccagggtggaagcggtaacaaaggagatagaaacaacaggaacctaccaactgacgggagatgagctcatcttcgccaccaagcaggcctggcgcaatgccccacgctgcattgggaggatccagtggtccaacctgcaggtcttcgatgcccgcagctgttccactgcccgggaaatgtttgaacacatctgcagacacgtgcgttactccaccaacaatggcaacatcaggtcggccatcaccgtgttcccccagcggagtgatggcaagcacgacttccgggtgtggaatgctcagctcatccgctatgctggctaccagatgccagatggcagcatcagaggggaccctgccaacgtggaattcactcagctgtgcatcgacctgggctggaagcccaagtacggccgcttcgatgtggtccccctggtcctgcaggccaatggccgtgaccctgagctcttcgaaatcccacctgaccttgtgcttgaggtggccatggaacatcccaaatacgagtggtttcgggaactggagctaaagtggtacgccctgcctgcagtggccaacatgctgcttgaggtgggcggcctggagttcccagggtgccccttcaatggctggtacatgggcacagagatcggagtccgggacttctgtgacgtccagcgctacaacatcctggaggaagtgggcaggagaatgggcctggaaacgcacaagctggcctcgctctggaaagaccaggctgtcgttgagatcaacattgctgtgctccatagtttccagaagcagaatgtgaccatcatggaccaccactcggctgcagaatccttcatgaagtacatgcagaatgaataccggtcccgtgggggctgcccggcagactggatttggctggtccctcccatgtctgggagcatcacccccgtgtttcaccaggagatgctgaactacgtcctgtcccctttctactactatcaggtagaggcctggaaaacccatgtctggcaggacgagaagcggagacccaagagaagagagattccattgaaagtcttggtcaaagctgtgctctttgcctgtatgctgatgcgcaagacaatggcgtcccgagtcagagtcaccatcctctttgcgacagagacaggaaaatcagaggcgctggcctgggacctgggggccttattcagctgtgccttcaaccccaagaaactgaagaaatcgctcttcatgctgaaagagctcaacaacaaattcaggtacgctgtgtttggcctcggctccagcatgtaccctcggttctgcgcctttgctcatgacattgatcagaagctgtcccacctgggggcctctcagctcaccccgatgggagaaggggatgagctcagtgggcaggaggacgccttccgcagctgggccgtgcaaaccttcaaggcagcctgtgagacgtttgatgtccgaggcaaacagcacattcagatccccaagctctacacctccaatgtgacctgggacccgcaccactacaggctcgtgcaggactcacagcctttgccagcggcttccacctccccgaggatccctcccatccttgcatcctcatcgggcctggcacaggcatcgcgcccttccgcagtttctggcagcaacggctccatgactcccagcacaagggagtgcggggaggccgcatgaccttggtgtttgggtgccgccgcccagatgaggaccacatctaccaggaggagatgctggagatggcccagaagggggtgctgcatgcggtgcacacagcctattcccgcctgcctggcaagccc

SEQ ID NO: 20342 - DNA, 4176 bp, Homo sapiens
  source 1..4176: mol_type = unassigned DNA
tccggccgcagagaactcagcctcattcctgctttaaaatctctcggccacctttgatgaggggactgggcagttctagacagtcccgaagttctcaaggcacaggtctcttcctggtttgactgtccttaccccggggaggcagtgcagccagctgcaagccccacagtgaagaacatctgagctcaaatccagataagtgacataagtgacctgctttgtaaagccatagagatggcctgtccttggaaatttctgttcaagaccaaattccaccagtatgcaatgaatggggaaaaagacatcaacaacaatgtggagaaagccccctgtgccacctccagtccagtgacacaggatgaccttcagtatcacaacctcagcaagcagcagaatgagtccccgcagcccctcgtggagacgggaaagaagtctccagaatctctggtcaagctggatgcaaccccattgtcctccccacggcatgtgaggatcaaaaactggggcagcgggatgactttccaagacacacttcaccataaggccaaagggattttaacttgcaggtccaaatcttgcctggggtccattatgactcccaaaagtttgaccagaggacccagggacaagcctacccctccagatgagcttctacctcaagctatcgaatttgtcaaccaatattacggctccttcaaagaggcaaaaatagaggaacatctggccagggtggaagcggtaacaaaggagatagaaacaacaggaacctaccaactgacgggagatgagctcatcttcgccaccaagcaggcctggcgcaatgccccacgctgcattgggaggatccagtggtccaacctgcaggtcttcgatgcccgcagctgttccactgcccgggaaatgtttgaacacatctgcagacacgtgcgttactccaccaacaatggcaacatcaggtcggccatcaccgtgttcccccagcggagtgatggcaagcacgacttccgggtgtggaatgctcagctcatccgctatgctggctaccagatgccagatggcagcatcagaggggaccctgccaacgtggaattcactcagctgtgcatcgacctgggctggaagcccaagtacggccgcttcgatgtggtccccctggtcctgcaggccaatggccgtgaccctgagctcttcgaaatcccacctgaccttgtgcttgaggtggccatggaacatcccaaatacgagtggtttcgggaactggagctaaagtggtacgccctgcctgcagtggccaacatgctgcttgaggtgggcggcctggagttcccagggtgccccttcaatggctggtacatgggcacagagatcggagtccgggacttctgtgacgtccagcgctacaacatcctggaggaagtgggcaggagaatgggcctggaaacgcacaagctggcctcgctctggaaagaccaggctgtcgttgagatcaacattgctgtgctccatagtttccagaagcagaatgtgaccatcatggaccaccactcggctgcagaatccttcatgaagtacatgcagaatgaataccggtcccgtgggggctgcccggcagactggatttggctggtccctcccatgtctgggagcatcacccccgtgtttcaccaggagatgctgaactacgtcctgtcccctttctactactatcaggtagaggcctggaaaacccatgtctggcaggacgagaagcggagacccaagagaagagagattccattgaaagtcttggtcaaagctgtgctctttgcctgtatgctgatgcgcaagacaatggcgtcccgagtcagagtcaccatcctctttgcgacagagacaggaaaatcagaggcgctggcctgggacctgggggccttattcagctgtgccttcaaccccaaggttgtctgcatggataagtacaggctgagctgcctggaggaggaacggctgctgttggtggtgaccagtacgtttggcaatggagactgccctggcaatggagagaaactgaagaaatcgctcttcatgctgaaagagctcaacaacaaattcaggtacgctgtgtttggcctcggctccagcatgtaccctcggttctgcgcctttgctcatgacattgatcagaagctgtcccacctgggggcctctcagctcaccccgatgggagaaggggatgagctcagtgggcaggaggacgccttccgcagctgggccgtgcaaaccttcaaggcagcctgtgagacgtttgatgtccgaggcaaacagcacattcagatccccaagctctacacctccaatgtgacctgggacccgcaccactacaggctcgtgcaggactcacagcctttggacctcagcaaagccctcagcagcatgcatgccaagaacgtgttcaccatgaggctcaaatctcggcagaatctacaaagtccgacatccagccgtgccaccatcctggtggaactctcctgtgaggatggccaaggcctgaactacctgccgggggagcaccttggggtttgcccaggcaaccagccggccctggtccaaggtatcctggagcgagtggtggatggccccacaccccaccagacagtgcgcctggaggccctggatgagagtggcagctactgggtcagtgacaagaggctgcccccctgctcactcagccaggccctcacctacttcctggacatcaccacacccccaacccagctgctgctccaaaagctggcccaggtggccacagaagagcctgagagacagaggctggaggccctgtgccagccctcagagtacagcaagtggaagttcaccaacagccccacattcctggaggtgctagaggagttcccgtccctgcgggtgtctgctggcttcctgctttcccagctccccattctgaagcccaggttctactccatcagctcctcccgggatcacacgcccacagagatccacctgactgtggccgtggtcacctaccacacccgagatggccagggtcccctgcaccacggcgtctgcagcacatggctcaacagcctgaagccccaagacccagtgccctgctttgtgcggaatgccagcggcttccacctccccgaggatccctcccatccttgcatcctcatcgggcctggcacaggcatcgcgcccttccgcagtttctggcagcaacggctccatgactcccagcacaagggagtgcggggaggccgcatgaccttggtgtttgggtgccgccgcccagatgaggaccacatctaccaggaggagatgctggagatggcccagaagggggtgctgcatgcggtgcacacagcctattcccgcctgcctggcaagcccaaggtctatgttcaggacatcctgcggcagcagctggccagcgaggtgctccgtgtgctccacaaggagccaggccacctctatgtttgcggggatgtgcgcatggcccgggacgtggcccacaccctgaagcagctggtggctgccaagctgaaattgaatgaggagcaggtcgaggactatttctttcagctcaagagccagaagcgctatcacgaagatatctttggtgctgtatttccttacgaggcgaagaaggacagggtggcggtgcagcccagcagcctggagatgtcagcgctctgagggcctacaggaggggttaaagctgccggcacagaacttaaggatggagccagctctgcattatctgaggtcacagggcctggggagatggaggaaagtgatatcccccagcctcaagtcttatttcctcaacgttgctccccatcaagccctttacttgacctcctaacaagtagcaccctggattgatcggagcctcctctctcaaactggggcctccctggtcccttggagacaaaatcttaaatgccaggcctggcaagtgggtgaaagatggaacttgctgctgagtgcaccacttcaagtgaccaccaggaggtgctatcgcaccactgtgtatttaactgccttgtgtacagttatttatgcctctgtatttaaaaaactaacacccagtctgttccccatggccacttgggtcttccctgtatgattccttgatggagatatttacatgaattgcattttactttaatcaca

SEQ ID NO: 20343 - DNA, 4089 bp, Homo sapiens
  source 1..4089: mol_type = unassigned DNA
ataactttgtagcgagtcgaaaactgaggctccggccgcagagaactcagcctcattcctgctttaaaatctctcggccacctttgatgaggggactgggcagttctagacagtcccgaagttctcaaggcacaggtctcttcctggtttgactgtccttaccccggggaggcagtgcagccagctgcaagccccacagtgaagaacatctgagctcaaatccagataagtgacataagtgacctgctttgtaaagccatagagatggcctgtccttggaaatttctgttcaagaccaaattccaccagtatgcaatgaatggggaaaaagacatcaacaacaatgtggagaaagccccctgtgccacctccagtccagtgacacaggatgaccttcagtatcacaacctcagcaagcagcagaatgagtccccgcagcccctcgtggagacgggaaagaagtctccagaatctctggtcaagctggatgcaaccccattgtcctccccacggcatgtgaggatcaaaaactggggcagcgggatgactttccaagacacacttcaccataaggccaaagggattttaacttgcaggtccaaatcttgcctggggtccattatgactcccaaaagtttgaccagaggacccagggacaagcctacccctccagatgagcttctacctcaagctatcgaatttgtcaaccaatattacggctccttcaaagaggcaaaaatagaggaacatctggccagggtggaagcggtaacaaaggagatagaaacaacaggaacctaccaactgacgggagatgagctcatcttcgccaccaagcaggcctggcgcaatgccccacgctgcattgggaggatccagtggtccaacctgcaggtcttcgatgcccgcagctgttccactgcccgggaaatgtttgaacacatctgcagacacgtgcgttactccaccaacaatggcaacatcaggtcggccatcaccgtgttcccccagcggagtgatggcaagcacgacttccgggtgtggaatgctcagctgtgcatcgacctgggctggaagcccaatggccgtgaccctgagctcttcgaaatcccacctgaccttgtgcttgaggtggccatggaacatcccaaatacgagtggtttcgggaactggagctaaagtggtacgccctgcctgcagtggccaacatgctgcttgaggtgggcggcctggagttcccagggtgccccttcaatggctggtacatgggcacagagatcggagtccgggacttctgtgacgtccagcgctacaacatcctggaggaagtgggcaggagaatgggcctggaaacgcacaagctggcctcgctctggaaagaccaggctgtcgttgagatcaacattgctgtgctccatagtttccagaagcagaatgtgaccatcatggaccaccactcggctgcagaatccttcatgaagtacatgcagaatgaataccggtcccgtgggggctgcccggcagactggatttggctggtccctcccatgtctgggagcatcacccccgtgtttcaccaggagatgctgaactacgtcctgtcccctttctactactatcaggtagaggcctggaaaacccatgtctggcaggacgagaagcggagacccaagagaagagagattccattgaaagtcttggtcaaagctgtgctctttgcctgtatgctgatgcgcaagacaatggcgtcccgagtcagagtcaccatcctctttgcgacagagacaggaaaatcagaggcgctggcctgggacctgggggccttattcagctgtgccttcaaccccaaggttgtctgcatggataagtacaggctgagctgcctggaggaggaacggctgctgttggtggtgaccagtacgtttggcaatggagactgccctggcaatggagagaaactgaagaaatcgctcttcatgctgaaagagctcaacaacaaattcaggtacgctgtgtttggcctcggctccagcatgtaccctcggttctgcgcctttgctcatgacattgatcagaagctgtcccacctgggggcctctcagctcaccccgatgggagaaggggatgagctcagtgggcaggaggacgccttccgcagctgggccgtgcaaaccttcaaggcagcctgtgagacgtttgatgtccgaggcaaacagcacattcagatccccaagctctacacctccaatgtgacctgggacccgcaccactacaggctcgtgcaggactcacagcctttggacctcagcaaagccctcagcagcatgcatgccaagaacgtgttcaccatgaggctcaaatctcggcagaatctacaaagtccgacatccagccgtgccaccatcctggtggaactctcctgtgaggatggccaaggcctgaactacctgccgggggagcaccttggggtttgcccaggcaaccagccggccctggtccaaggtatcctggagcgagtggtggatggccccacaccccaccagacagtgcgcctggaggccctggatgagagtggcagctactgggtcagtgacaagaggctgcccccctgctcactcagccaggccctcacctacttcctggacatcaccacacccccaacccagctgctgctccaaaagctggcccaggtggccacagaagagcctgagagacagaggctggaggccctgtgccagccctcagagtacagcaagtggaagttcaccaacagccccacattcctggaggtgctagaggagttcccgtccctgcgggtgtctgctggcttcctgctttcccagctccccattctgaagcccaggttctactccatcagctcctcccgggatcacacgcccacagagatccacctgactgtggccgtggtcacctaccacacccgagatggccagggtcccctgcaccacggcgtctgcagcacatggctcaacagcctgaagccccaagacccagtgccctgctttgtgcggaatgccagcggcttccacctccccgaggatccctcccatccttgcatcctcatcgggcctggcacaggcatcgcgcccttccgcagtttctggcagcaacggctccatgactcccagcacaagggagtgcggggaggccgcatgaccttggtgtttgggtgccgccgcccagatgaggaccacatctaccaggaggagatgctggagatggcccagaagggggtgctgcatgcggtgcacacagcctattcccgcctgcctggcaagcccaaggtctatgttcaggacatcctgcggcagcagctggccagcgaggtgctccgtgtgctccacaaggagccaggccacctctatgtttgcggggatgtgcgcatggcccgggacgtggcccacaccctgaagcagctggtggctgccaagctgaaattgaatgaggagcaggtcgaggactatttctttcagctcaagagccagaagcgctatcacgaagatatctttggtgctgtatttccttacgaggcgaagaaggacagggtggcggtgcagcccagcagcctggagatgtcagcgctctgagggcctacaggaggggttaaagctgccggcacagaacttaaggatggagccagctctgcattatctgaggtcacagggcctggggagatggaggaaagtgatatcccccagcctcaagtcttatttcctcaacgttgctccccatcaagccctttacttgacctcctaacaagtagcaccctggattgatcggagcctcctctctcaaactggggcctccctggtcccttggagacaaaatcttaaatgccaggcctggcaagtgggtgaaagatggaacttgctgctgagtgcaccacttcaagtgaccaccaggaggtgctatcgcaccactgtgtatttaactgccttgtgtacagttatttatgcctctgtatttaaaaaactaacacccagtctgttccccatggccacttgggtcttccctgtatgattccttgatggagatatttacatgaattgcattttactttaatcaca

SEQ ID NO: 20344 - DNA, 4388 bp, Homo sapiens
  source 1..4388: mol_type = unassigned DNA
agcaggtgaccagtggtgactcagttcggagcaggtgatagaagctaggagggggttgtttactgaaactaggggcaaggagacgaagagaacatgaaagttaaactttaagatgaagaacaaagctgaacatactgatgcattggatctttggagaggatctcagaactcattgtacttaatttacaggctaaaaccttagaagaggaatttattatatcctacacaagactccagggaagcacatggccttggactgaaggctggcatctggaagctgtcagccaccagcaccttctgcagcaggaaaaggccagggctctgctggagcaggcagcagagtggacgcacagtaacatgggcaacttgaagagcgtggcccaggagcctgggccaccctgcggcctggggctggggctgggccttgggctgtgcggcaagcagggcccagccaccccggcccctgagcccagccgggccccagcatccctactcccaccagcgccagaacacagccccccgagctccccgctaacccagcccccagaggggcccaagttccctcgtgtgaagaactgggaggtggggagcatcacctatgacaccctcagcgcccaggcgcagcaggatgggccctgcaccccaagacgctgcctgggctccctggtatttccacggaaactacagggccggccctcccccggccccccggcccctgagcagctgctgagtcaggcccgggacttcatcaaccagtactacagctccattaagaggagcggctcccaggcccacgaacagcggcttcaagaggtggaagccgaggtggcagccacaggcacctaccagcttagggagagcgagctggtgttcggggctaagcaggcctggcgcaacgctccccgctgcgtgggccggatccagtgggggaagctgcaggtgttcgatgcccgggactgcaggtctgcacaggaaatgttcacctacatctgcaaccacatcaagtatgccaccaaccggggcaaccttcgctcggccatcacagtgttcccgcagcgctgccctggccgaggagacttccgaatctggaacagccagctggtgcgctacgcgggctaccggcagcaggatggctctgtgcggggggacccagccaacgtggagatcaccgagctctgcattcagcacggctggaccccaggaaacggtcgcttcgacgtgctgcccctgctgctgcaggccccagatgatcccccagaactcttccttctgccccccgagctggtccttgaggtgcccctggagcaccccacgctggagtggtttgcagccctgggcctgcgctggtacgccctcccggcagtgtccaacatgctgctggaaattgggggcctggagttccccgcagcccccttcagtggctggtacatgagcactgagatcggcacgaggaacctgtgtgaccctcaccgctacaacatcctggaggatgtggctgtctgcatggacctggatacccggaccacctcgtccctgtggaaagacaaggcagcagtggaaatcaacgtggccgtgctgcacagttaccagctagccaaagtcaccatcgtggaccaccacgccgccacggcctctttcatgaagcacctggagaatgagcagaaggccagggggggctgccctgcagactgggcctggatcgtgccccccatctcgggcagcctcactcctgttttccatcaggagatggtcaactatttcctgtccccggccttccgctaccagccagacccctggaaggggagtgccgccaagggcaccggcatcaccaggaagaagacctttaaagaagtggccaacgccgtgaagatctccgcctcgctcatgggcacggtgatggcgaagcgagtgaaggcgacaatcctgtatggctccgagaccggccgggcccagagctacgcacagcagctggggagactcttccggaaggcttttgatccccgggtcctgtgtatggatgagtatgacgtggtgtccctcgaacacgagacgctggtgctggtggtaaccagcacatttgggaatggggatcccccggagaatggagagagctttgcagctgccctgatggagatgtccggcccctacaacagctcccctcggccggaacagcacaagagttataagatccgcttcaacagcatctcctgctcagacccactggtgtcctcttggcggcggaagaggaaggagtccagtaacacagacagtgcaggggccctgggcaccctcaggttctgtgtgttcgggctcggctcccgggcatacccccacttctgcgcctttgctcgtgccgtggacacacggctggaggaactgggcggggagcggctgctgcagctgggccagggcgacgagctgtgcggccaggaggaggccttccgaggctgggcccaggctgccttccaggccgcctgtgagaccttctgtgtgggagaggatgccaaggccgccgcccgagacatcttcagccccaaacggagctggaagcgccagaggtaccggctgagcgcccaggccgagggcctgcagttgctgccaggtctgatccacgtgcacaggcggaagatgttccaggctacaatccgctcagtggaaaacctgcaaagcagcaagtccacgagggccaccatcctggtgcgcctggacaccggaggccaggaggggctgcagtaccagccgggggaccacataggtgtctgcccgcccaaccggcccggccttgtggaggcgctgctgagccgcgtggaggacccgccggcgcccactgagcccgtggcagtagagcagctggagaagggcagccctggtggccctccccccggctgggtgcgggacccccggctgcccccgtgcacgctgcgccaggctctcaccttcttcctggacatcacctccccacccagccctcagctcttgcggctgctcagcaccttggcagaagagcccagggaacagcaggagctggaggccctcagccaggatccccgacgctacgaggagtggaagtggttccgctgccccacgctgctggaggtgctggagcagttcccgtcggtggcgctgcctgccccactgctcctcacccagctgcctctgctccagccccggtactactcagtcagctcggcacccagcacccacccaggagagatccacctcactgtagctgtgctggcatacaggactcaggatgggctgggccccctgcactatggagtctgctccacgtggctaagccagctcaagcccggagaccctgtgccctgcttcatccggggggctccctccttccggctgccacccgatcccagcttgccctgcatcctggtgggtccaggcactggcattgcccccttccggggattctggcaggagcggctgcatgacattgagagcaaagggctgcagcccactcccatgactttggtgttcggctgccgatgctcccaacttgaccatctctaccgcgacgaggtgcagaacgcccagcagcgcggggtgtttggccgagtcctcaccgccttctcccgggaacctgacaaccccaagacctacgtgcaggacatcctgaggacggagctggctgcggaggtgcaccgcgtgctgtgcctcgagcggggccacatgtttgtctgcggcgatgttaccatggcaaccaacgtcctgcagaccgtgcagcgcatcctggcgacggagggcgacatggagctggacgaggccggcgacgtcatcggcgtgctgcgggatcagcaacgctaccacgaagacattttcgggctcacgctgcgcacccaggaggtgacaagccgcatacgcacccagagcttttccttgcaggagcgtcagttgcggggcgcagtgccctgggcgttcgaccctcccggctcagacaccaacagcccctgagagccgcctggctttcccttccagttccgggagagcggctgcccgactcaggtccgcccgaccaggatcagccccgctcctcccctcttgaggtggtgccttctcacatctgtccagaggctgcaaggattcagcattattcctccaggaaggagcaaaacgcctcttttccctctctaggcctgttgcctcgggcctgggtccgccttaatctggaaggcccctcccagcagcggtaccccagggcctactgccacccgcttcctgtttcttagtcgaatgttagattcctcttgcctctctcaggagtatcttacctgtaaagtctaatctctaaatcaagtatttattattgaagatttaccataagggactgtgccagatgttaggagaactactaaagtgcctaccccagctca

SEQ ID NO: 20345 - DNA, 3644 bp, Homo sapiens
  source 1..3644: mol_type = unassigned DNA
aagatgaagaacaaagctgaacatactgatgcattggatctttggagaggatctcagaactcattgtacttaatttacaggctaaaaccttagaagaggaatttattatatcctacacaagactccagggaagcacatggccttggactgaaggctggcatctggaagctgtcagccaccagcaccttctgcagcagccccccgagctccccgctaacccagcccccagaggggcccaagttccctcgtgtgaagaactgggaggtggggagcatcacctatgacaccctcagcgcccaggcgcagcaggtgttcgatgcccgggactgcaggtctgcacaggaaatgttcacctacatctgcaaccacatcaagtatgccaccaaccggggcaaccttcgctcggccatcacagtgttcccgcagcgctgccctggccgaggagacttccgaatctggaacagccagctggtgcgctacgcgggctaccggcagcaggatggctctgtgcggggggacccagccaacgtggagatcaccgagctctgcattcagcacggctggaccccaggaaacggtcgcttcgacgtgctgcccctgctgctgcaggccccagatgatcccccagaactcttccttctgccccccgagctggtccttgaggtgcccctggagcaccccacgctggagtggtttgcagccctgggcctgcgctggtacgccctcccggcagtgtccaacatgctgctggaaattgggggcctggagttccccgcagcccccttcagtggctggtacatgagcactgagatcggcacgaggaacctgtgtgaccctcaccgctacaacatcctggaggatgtggctgtctgcatggacctggatacccggaccacctcgtccctgtggaaagacaaggcagcagtggaaatcaacgtggccgtgctgcacagttaccagctagccaaagtcaccatcgtggaccaccacgccgccacggcctctttcatgaagcacctggagaatgagcagaaggccagggggggctgccctgcagactgggcctggatcgtgccccccatctcgggcagcctcactcctgttttccatcaggagatggtcaactatttcctgtccccggccttccgctaccagccagacccctggaaggggagtgccgccaagggcaccggcatcaccaggaagaagacctttaaagaagtggccaacgccgtgaagatctccgcctcgctcatgggcacggtgatggcgaagcgagtgaaggcgacaatcctgtatggctccgagaccggccgggcccagagctacgcacagcagctggggagactcttccggaaggcttttgatccccgggtcctgtgtatggatgagtatgacgtggtgtccctcgaacacgagacgctggtgctggtggtaaccagcacatttgggaatggggatcccccggagaatggagagagctttgcagctgccctgatggagatgtccggcccctacaacagctcccctcggccggaacagcacaagagttataagatccgcttcaacagcatctcctgctcagacccactggtgtcctcttggcggcggaagaggaaggagtccagtaacacagacagtgcaggggccctgggcaccctcaggttctgtgtgttcgggctcggctcccgggcatacccccacttctgcgcctttgctcgtgccgtggacacacggctggaggaactgggcggggagcggctgctgcagctgggccagggcgacgagctgtgcggccaggaggaggccttccgaggctgggcccaggctgccttccaggccgcctgtgagaccttctgtgtgggagaggatgccaaggccgccgcccgagacatcttcagccccaaacggagctggaagcgccagaggtaccggctgagcgcccaggccgagggcctgcagttgctgccaggtctgatccacgtgcacaggcggaagatgttccaggctacaatccgctcagtggaaaacctgcaaagcagcaagtccacgagggccaccatcctggtgcgcctggacaccggaggccaggaggggctgcagtaccagccgggggaccacataggtgtctgcccgcccaaccggcccggccttgtggaggcgctgctgagccgcgtggaggacccgccggcgcccactgagcccgtggcagtagagcagctggagaagggcagccctggtggccctccccccggctgggtgcgggacccccggctgcccccgtgcacgctgcgccaggctctcaccttcttcctggacatcacctccccacccagccctcagctcttgcggctgctcagcaccttggcagaagagcccagggaacagcaggagctggaggccctcagccaggatccccgacgctacgaggagtggaagtggttccgctgccccacgctgctggaggtgctggagcagttcccgtcggtggcgctgcctgccccactgctcctcacccagctgcctctgctccagccccggtactactcagtcagctcggcacccagcacccacccaggagagatccacctcactgtagctgtgctggcatacaggactcaggatgggctgggccccctgcactatggagtctgctccacgtggctaagccagctcaagcccggagaccctgtgccctgcttcatccggggggctccctccttccggctgccacccgatcccagcttgccctgcatcctggtgggtccaggcactggcattgcccccttccggggattctggcaggagcggctgcatgacattgagagcaaagggctgcagcccactcccatgactttggtgttcggctgccgatgctcccaacttgaccatctctaccgcgacgaggtgcagaacgcccagcagcgcggggtgtttggccgagtcctcaccgccttctcccgggaacctgacaaccccaagacctacgtgcaggacatcctgaggacggagctggctgcggaggtgcaccgcgtgctgtgcctcgagcggggccacatgtttgtctgcggcgatgttaccatggcaaccaacgtcctgcagaccgtgcagcgcatcctggcgacggagggcgacatggagctggacgaggccggcgacgtcatcggcgtgctgcgggatcagcaacgctaccacgaagacattttcgggctcacgctgcgcacccaggaggtgacaagccgcatacgcacccagagcttttccttgcaggagcgtcagttgcggggcgcagtgccctgggcgttcgaccctcccggctcagacaccaacagcccctgagagccgcctggctttcccttccagttccgggagagcggctgcccgactcaggtccgcccgaccaggatcagccccgctcctcccctcttgaggtggtgccttctcacatctgtccagaggctgcaaggattcagcattattcctccaggaaggagcaaaacgcctcttttccctctctaggcctgttgcctcgggcctgggtccgccttaatctggaaggcccctcccagcagcggtaccccagggcctactgccacccgcttcctgtttcttagtcgaatgttagattcctcttgcctctctca

SEQ ID NO: 20346 - DNA, 2294 bp, Homo sapiens
  source 1..2294: mol_type = unassigned DNA
attctcactatctcacactggccgtcttgacccagagcagttctttactttctcgggacacaaacgggatgaaagtccagggctgggacttcctccttggaatgtttgacaaggactgacgtactctaggccctttgaatcccggaagtccaggacacacccaaccttgattacagtgtccagaatgctggagcgtaggtgaaaggacaaaagccagacacatttcaacatgagggacccactgacagattgtccgtataataaagtatacaagaacctaaaggagttttctcaaaatggagagaatttctgcaaacaggtcacatctgttcttcagcaaagggcaaacctggaaattagctatgccaaaggacttcagaaactggcaagcaagctgagcaaagcattacagaacacgagaaaaagttgtgttagcagtgcctgggcctgggcctcagagggaatgaaatccacagcggacctgcatcaaaaacttggcaaagcaattgaattggaagcaataaaaccgacttatcaagtcctaaatgtacaagagaagaagagaaaatcacttgacaatgaagttgaaaagacagcaaatcttgtcattagcaactggaatcagcaaattaaggccaagaagaaattaatggttagtaccaagaaacatgaagcacttttccagcttgtagaaagctccaagcaatctatgactgagaaggagaagcggaagctcctcaataaactgacaaaatcaactgaaaagttggaaaaggaagatgaaaattactaccaaaaaaacatggcgggttattctaccagactgaaatgggaaaacacactagagaactgctaccagagcattctggagctggagaaggaaagaattcaacttttatgcaataacttaaaccagtacagccaacatatttctctttttggccaaaccctgaccacatgccacacgcagattcactgtgccatcagcaagattgacattgaaaaagatatccaggctgtaatggaagaaactgcaattttatctacagaaaacaaatctgagttcctgttaacggattactttgaagaagatcctaacagtgcaatggataaagagagacgaaagtctttactaaaaccaaaattattgagactgcagagagacattgaaaaagcctcaaaagacaaggaaggcctggaacgaatgcttaaaacgtactccagcacctcctccttctctgatgcaaagagccagaaagacacagcagcgttaatggatgagaacaatttgaaactagaccttttggaagcgaactcctacaaactgtcatcaatgttagcagaacttgagcaaagacctcaacccagccatccttgtagtaattccatcttcaggtggagggaaaaggagcatactcatagctatgtgaaaatatctcggccttttttaatgaagagattagagaatattgtgagcaaggcatcttctggtgggcagagcaatccaggttcttcaactccagcccctggtgcagcccagctcagcagcagactttgcaaggccttgtattcttttcaagccaggcaagatgatgagttgaatttggaaaagggtgacattgtgattatacacgagaaaaaagaaggaggatggtggtttggatctttgaatgggaaaaaaggccattttcctgccgcttatgtggaggagttaccttcaaatgctggcaacacagctacaaaggcataaaacaagactctgaacatactaccttcacactcggtaatcaacaatacagtgtggttcaaataagaataaagtgctcttacctttacatgtttttcttttgaaatggatggagttctacctgcatgtcacagcactttgcattcatgattattagcttgaaacagtcagaaaaaagatggatgggtggagacagacaaggaagaggctccttggttcctagaggagtttccaaattctaggagaccctagagatgatccagtataacccctggtgtcacagaaacagacggagtccaaggtgggttcagctgcttgcctgaagtcagagttatctggtagacaacagcagtgggacttagatgtctttttcctctggatttgggtggcaacagaacacagcaggcctatgagggggtcaagcagagcctgggagatgaggaacacagatcaattccaagaagagagacaggcaatcaagacaccaatgagatcaacccaaattaggggatggtaggatatctctgacaaacccacagccaatatc

SEQ ID NO: 20347 - DNA, 1446 bp, Homo sapiens
  source 1..1446: mol_type = unassigned DNA
cacatttcaacatgagggacccactgacagattgtccgggcaaacctggaaattagctatgccaaaggacttcagaaactggcaagcaagctgagcaaagcattacagaacacgagaaaaagttgtgttagcagtgcctgggcctgggcctcagagggaatgaaatccacagcggacctgcatcaaaaacttggcaaagcaattgaattggaagcaataaaaccgacttatcaagtcctaaatgtacaagagaagaagagaaaatcacttgacaatgaagttgaaaagacagcaaatcttgtcattagcaactggaatcagcaaattaaggccaagaagaaattaatggttagtaccaagaaacatgaagcacttttccagcttgtagaaagctccaagcaatctatgactgagaaggagaagcggaagctcctcaataaactgacaaaatcaactgaaaagttggaaaaggaagatgaaaattactaccaaaaaaacatggcgggttattctaccagactgaaatgggaaaacacactagagaactgctaccagagcattctggagctggagaaggaaagaattcaacttttatgcaataacttaaaccagtacagccaacatatttctctttttggccaaaccctgaccacatgccacacgcagattcactgtgccatcagcaagattgacattgaaaaagatatccaggctgtaatggaagaaactgcaattttatctacagaaaacaaatctgagttcctgttaacggattactttgaagaagatcctaacagtgcaatggataaagagagacgaaagtctttactaaaaccaaaattattgagactgcagagagacattgaaaaagcctcaaaagacaaggaaggcctggaacgaatgcttaaaacgtactccagcacctcctccttctctgatgcaaagagccagaaagacacagcagcgttaatggatgagaacaatttgaaactagaccttttggaagcgaactcctacaaactgtcatcaatgttagcagaacttgagcaaagacctcaacccagccatccttgtagtaattccatcttcaggtggagggaaaaggagcatactcatagctatgtgaaaatatctcggccttttttaatgaagagattagagaatattgtgagcaaggcatcttctggtgggcagagcaatccaggttcttcaactccagcccctggtgcagcccagctcagcagcagactttgcaaggccttgtattcttttcaagccaggcaagatgatgagttgaatttggaaaagggtgacattgtgattatacacgagaaaaaagaaggaggatggtggtttggatctttgaatgggaaaaaaggccattttcctgccgcttatgtggaggagttaccttcaaatgctggcaacacagctacaaaggcataa

SEQ ID NO: 20348 - DNA, 2537 bp, Homo sapiens
  source 1..2537: mol_type = unassigned DNA
acagatgcagaacccagggatatggagagccaattgtatttgtaaaacacttagaatggtgcctgacacgtgagttgctttgtctaattctagccctgtggtagctacccaagattgttgtaacctccagtgatcaagttctttggataagcaaagagggagggcattaagtgtgtggaaaagacccctcctctccactcttgttgcaaggactcaggatcctgccctctgagggtttacagaagtcattctcactatctcacactggccgtcttgacccagagcagttctttactttctcgggacacaaacgggatgaaagtccagggctgggacttcctccttggaatgtttgacaaggactgacgtactctaggccctttgaatcccggaagtccaggacacacccaaccttgattacagtgtccagaatgctggagcgtaggtgaaaggacaaaagccagacacatttcaacatgagggacccactgacagattgtccgtataataaagtatacaagaacctaaaggagttttctcaaaatggagagaatttctgcaaacaggtcacatctgttcttcagcaaagggcaaacctggaaattagctatgccaaaggacttcagaaactggcaagcaagctgagcaaagcattacagaacacgagaaaaagttgtgttagcagtgcctgggcctgggcctcagagggaatgaaatccacagcggacctgcatcaaaaacttggcaaagcaattgaattggaagcaataaaaccgacttatcaagtcctaaatgtacaagagaagaagagaaaatcacttgacaatgaagttgaaaagacagcaaatcttgtcattagcaactggaatcagcaaattaaggccaagaagaaattaatggttagtaccaagaaacatgaagcacttttccagcttgtagaaagctccaagcaatctatgactgagaaggagaagcggaagctcctcaataaactgacaaaatcaactgaaaagttggaaaaggaagatgaaaattactaccaaaaaaacatggcgggttattctaccagactgaaatgggaaaacacactagagaactgctaccaggtaacccacagcatctgcctatatgccttttgggtcaaaagagcctggggaaagtgtgtgagtgatttaagataccaagacacattccttcctggaaatctccctccactatggtttggatatgacatagtcaagaggctaatcatgagactttgttcagtctgtcttcagagcattctggagctggagaaggaaagaattcaacttttatgcaataacttaaaccagtacagccaacatatttctctttttggccaaaccctgaccacatgccacacgcagattcactgtgccatcagcaagattgacattgaaaaagatatccaggctgtaatggaagaaactgcaattttatctacagaaaacaaatctgagttcctgttaacggattactttgaagaagatcctaacagtgcaatggataaagagagacgaaagtctttactaaaaccaaaattattgagactgcagagagacattgaaaaagcctcaaaagacaaggaaggcctggaacgaatgcttaaaacgtactccagcacctcctccttctctgatgcaaagagccagaaagacacagcagcgttaatggatgagaacaatttgaaactagaccttttggaagcgaactcctacaaactgtcatcaatgttagcagaacttgagcaaagacctcaacccagccatccttgtagtaattccatcttcaggtggagggaaaaggagcatactcatagctatgtgaaaatatctcggccttttttaatgaagagattagagaatattgtgagcaaggcatcttctggtgggcagagcaatccaggttcttcaactccagcccctggtgcagcccagctcagcagcagactttgcaaggccttgtattcttttcaagccaggcaagatgatgagttgaatttggaaaagggtgacattgtgattatacacgagaaaaaagaaggaggatggtggtttggatctttgaatgggaaaaaaggccattttcctgccgcttatgtggaggagttaccttcaaatgctggcaacacagctacaaaggcataaaacaagactctgaacatactaccttcacactcggtaatcaacaatacagtgtggttcaaataagaataaagtgctcttacctttacatgtttttcttttgaaatggatggagttctacctgcatgtcacagcactttgcattcatgattattagcttgaaacagtcagaaaaaagatggatgggtggagacagacaaggaagaggctccttggttcctagaggagtttccaaattctaggagaccctagagatgatccagtataacccctggtgtcacagaaacagacggagtccaaggtgggttcagctgcttgcctgaagtcagagttatctggtagacaacagcagtgggacttagatgtcttttt

SEQ ID NO: 20349 - DNA, 2535 bp, Homo sapiens
  source 1..2535: mol_type = unassigned DNA
gcgcatgcagcccttcccaagcactggtagggcactgggcatgcagacagcccaccagaagggaagaatcaggagaaaagggatgcaagatcccagagataaactgaagcacaagagggtaaaaactttgtccttggtcttacagccagaaagtggtgatgcaaagaacttagtccaagctttgatctgttctgcactgcctgccaaagcagaaccttgagaaatacccatgtttgggggatgagaagaagaagataaatcagcaaagaaaatagtgataagaaagatgcagaacccagggatatggagagccaattgtatttgtaaaacacttagaatggtgcctgacacgtgagttgctttgtctaattctagccctgtggtagctacccaagattgttgtaacctccagtgatcaagttctttggataagcaaagagggagggcattaagtgtgtggaaaagacccctcctctccactcttgttgcaaggactcaggatcctgccctctgagggtttacagaagtcattctcactatctcacactggccgtcttgacccagagcagttctttactttctcgggacacaaacgggatgaaagtccagggctgggacttcctccttggaatgtttgacaaggactgacgtactctaggccctttgaatcccggaagtccaggacacacccaaccttgattacagtgtccagaatgctggagcgtaggtgaaaggacaaaagccagacacatttcaacatgagggacccactgacagattgtccgtataataaagtatacaagaacctaaaggagttttctcaaaatggagagaatttctgcaaacaggtcacatctgttcttcagcaaagggcaaacctggaaattagctatgccaaaggacttcagaaactggcaagcaagctgagcaaagcattacagaacacgagaaaaagttgtgttagcagtgcctgggcctgggcctcagagggaatgaaatccacagcggacctgcatcaaaaacttggcaaagcaattgaattggaagcaataaaaccgacttatcaagtcctaaatgtacaagagaagaagagaaaatcacttgacaatgaagttgaaaagacagcaaatcttgtcattagcaactggaatcagcaaattaaggccaagaagaaattaatggttagtaccaagaaacatgaagcacttttccagcttgtagaaagctccaagcaatctatgactgagaaggagaagcggaagctcctcaataaactgacaaaatcaactgaaaagttggaaaaggaagatgaaaattactaccaaaaaaacatggcgggttattctaccagactgaaatgggaaaacacactagagaactgctaccaggtaacccacagcatctgcctatatgccttttgggtcaaaagagcctggggaaagtgtgtgagtgatttaagataccaagacacattccttcctggaaatctccctccactatggtttggatatgacatagtcaagaggctaatcatgagactttgttcagtctgtcttcagagcattctggagctggagaaggaaagaattcaacttttatgcaataacttaaaccagtacagccaacatatttctctttttggccaaaccctgaccacatgccacacgcagattcactgtgccatcagcaagattgacattgaaaaagatatccaggctgtaatggaagaaactgcaattttatctacagaaaacaaatctgagttcctgttaacggattactttgaagaagatcctaacagtgcaatggataaagagagacgaaagtctttactaaaaccaaaattattgagactgcagagagacattgaaaaagcctcaaaagacaaggaaggcctggaacgaatgcttaaaacgtactccagcacctcctccttctctgatgcaaagagccagaaagacacagcagcgttaatggatgagaacaatttgaaactagaccttttggaagcgaactcctacaaactgtcatcaatgttagcagaacttgagcaaagacctcaacccagccatccttgtagtaattccatcttcaggtggagggaaaaggagcatactcatagctatgtgaaaatatctcggccttttttaatgaagagattagagaatattgtgagcaaggcatcttctggtgggcagagcaatccaggttcttcaactccagcccctggtgcagcccagctcagcagcagactttgcaaggccttgtattcttttcaagccaggcaagatgatgagttgaatttggaaaagggtgacattgtgattatacacgagaaaaaagaaggaggatggtggtttggatctttgaatgggaaaaaaggccattttcctgccgcttatgtggaggagttaccttcaaatgctggcaacacagctacaaaggcataaaacaagactctgaacatactaccttcacactcggtaatcaacaatacagtgtggttcaaataagaataaagtgctcttaccttta

SEQ ID NO: 20350 - DNA, 1749 bp, Homo sapiens
  source 1..1749: mol_type = unassigned DNA
gcttctggctccagaccgccctccggatcggaccctgcgaatggttttggctatatcttcatgtaggacctactccctatcccgtcggccgcggtgaatcccacctgcggtgctttaacttgtgtaacagagatgctgcctctgggagaggcggggagggacgggccaactggagcgggcggcgggagggtggagggcggggcgcggcttggggcctgggttcctttgccccttgcccaccagggaggggtgggagacgagagagggtgaactttcccctgcgagattctggtgaaaggggaaatatgcttcgagtcagtaaagctgcgcaagtgcacagtcaaggagagagtcttgggaaaaccaaggatagttcccggagatgacttttggactgcggaaacgtttgtcagaggaaagaggcttcagtttaatgcccagagccatggctatctcctcttcctcctgcgaactgcccctggtggctgtgtgccaggtaacatcgacgccagacaagcaacagaactttaaaacatgtgctgagctggttcgagaggctgccagactgggtgcctgcctggctttcctgcctgaggcatttgacttcattgcacgggaccctgcagagacgctacacctgtctgaaccactgggtgggaaacttttggaagaatacacccagcttgccagggaatgtggactctggctgtccttgggtggtttccatgagcgtggccaagactgggagcagactcagaaaatctacaattgtcacgtgctgctgaacagcaaaggggcagtagtggccacttacaggaagacacatctgtgtgacgtagagattccagggcaggggcctatgtgtgaaagcaactctaccatgcctgggcccagtcttgagtcacctgtcagcacaccagcaggcaagattggtctagctgtctgctatgacatgcggttccctgaactctctctggcattggctcaagctggagcagagatacttacctatccttcagcttttggatccattacaggcccagcccactgggaggtgttgctgcgggcccgtgctatcgaaacccagtgctatgtagtggcagcagcacagtgtggacgccaccatgagaagagagcaagttatggccacagcatggtggtagacccctggggaacagtggtggcccgctgctctgaggggccaggcctctgccttgcccgaatagacctcaactatctgcgacagttgcgccgacacctgcctgtgttccagcaccgcaggcctgacctctatggcaatctgggtcacccactgtcttaagacttgacttctgtgagtttagacctgcccctcccacccccaccctgccactatgagctagtgctcatgtgacttggaggcaggatccaggcacagctcccctcacttggagaaccttgactctcttgatggaacacagatgggctgcttgggaaagaaactttcacctgagcttcacctgaggtcagactgcagtttcagaaaggtggaattttatatagtcattgtttatttcatggaaactgaagttctgctgagggctgagcagcactggcattgaaaaatataataatcataaagtctgtgtctggacatcgcctttgggaactagaaggggagttggtattgtaccagctggactaagctccagttctagacctcctggctcattcaacatgcctccctacctaaataaaagtgcaacactc

SEQ ID NO: 20351 - DNA, 2081 bp, Homo sapiens
  source 1..2081: mol_type = unassigned DNA
cttctggctccagaccgccctccggatcggaccctgcgaatggttttggctatatcttcatgctgggcttcatcaccaggcctcctcacagattcctgtcccttctgtgtcctggactccggatacctcaactctcagtactttgtgctcagcccaggcccagagccatggctatctcctcttcctcctgcgaactgcccctggtggctgtgtgccaggtaacatcgacgccagacaagcaacagaactttaaaacatgtgctgagctggttcgagaggctgccagactgggtgcctgcctggctttcctgcctgaggcatttgacttcattgcacgggaccctgcagagacgctacacctgtctgaaccactgggtgggaaacttttggaagaatacacccagcttgccagggaatgtggactctggctgtccttgggtggtttccatgagcgtggccaagactgggagcagactcagaaaatctacaattgtcacgtgctgctgaacagcaaaggggcagtagtggccacttacaggaagacacatctgtgtgacgtagagattccagggcaggggcctatgtgtgaaagcaactctaccatgcctgggcccagtcttgagtcacctgtcagcacaccagcaggcaagattggtctagctgtctgctatgacatgcggttccctgaactctctctggcattggctcaagctggagcagagatacttacctatccttcagcttttggatccattacaggcccagcccactgggagcccgtctcctcttgagggtgacgtagggcagcaggtcgtggcgagtgatgatgcgcagcagctgcagcacctggcgaaagttactttcatcacagcggccctggcgctccagtgccaataagaagtcacgtccatttcggatgagtccacgctcgtggtcatcaatgacatcaacaaagaggaaagaaagcacgcgcacatctctgtgtgtcagatgagtgcccacgatgtcaaacatgcggtgcaggctgtacagcccatgttcctgctcaccatgctcttctggccacacctggcttgcccgccgctttaggcccgccatgctgggggctcaggtacgcaatgctttccagaatccctgctcagcagctgcaatccccaccgtactgaaagggcagggaaagaaccgatgagacactcaagggcaggaactagtctcatgcattcccatattcccagttgctaacaatgcctggcacagtatagtgctttatacatgtttattaaatttttgaagtgtttgtttaaaaataaacactggccaggcacaggggctcacacctgtaatcccagcattttgggaggccaaggcaggaggatcacttgagcccaggcgtttaagaccagcctgggcaacatagggagacccgtttctacaaaaaaagaaaaaattagctgggcttggtggtacacgcctgtagtcccagctgcacaggaggctgaggtgggaggaaggcttgaggccaggagttcaagatcagcctggtcaacatagcaagaccccatctctacaaaaaagaaaaaaattagcaaggcatggtggcatgtgcctgtagtccctgctactcaggaggctgaggcaggaggatcacttgagcccaggagttcaaggctgcagtgagccataatcctgcactgtagcctgggtgacagagtgagtcccccatctcggaaaaaaaagaactagtttaaattctgactgtatcactgaaaggctgtgtagctgtgtgaccgtaagcaagtcacttaactccagattctcagtgctgtcatctataaacagggatgaatgaatatacacctcagagttgttaagaatccaatgagaaaatcacgggtaacccttatataaatggttgtgaaacatttcaaagatacaagcatccttggcctttgcagcccagaatcatccctccacatttttcctacaatccaaccacatcaagaaatgataactgctcagaaagtttatcaatatttaccaaaactcatggatttaaaataaacattaagtttctacaataa

SEQ ID NO: 20352 - DNA, 1362 bp, Homo sapiens
  source 1..1362: mol_type = unassigned DNA
gcccactcgctgcggcgcttctggctccagaccgccctccggatcggaccctgcgaatggttttggctatatcttcatgctgggcttcatcaccaggcctcctcacagattcctgtcccttctgtgtcctggactccggatacctcaactctcagtactttgtgctcagcccaggcccagagccatggctatctcctcttcctcctgcgaactgcccctggtggctgtgtgccaggtaacatcgacgccagacaagcaacagaactttaaaacatgtgctgagctggttcgagaggctgccagactgggtgcctgcctggctttcctgcctgaggcatttgacttcattgcacgggaccctgcagagacgctacacctgtctgaaccactgggtgggaaacttttggaagaatacacccagcttgccagggaatgtggactctggctgtccttgggtggtttccatgagcgtggccaagactgggagcagactcagaaaatctacaattgtcacgtgctgctgaacagcaaaggggcagtagtggccacttacaggaagacacatctgtgtgacgtagagattccagggcaggggcctatgtgtgaaagcaactctaccatgcctgggcccagtcttgagtcacctgtcagcacaccagcaggcaagattggtctagctgtctgctatgacatgcggttccctgaactctctctggcattggctcaagctggagcagagatacttacctatccttcagcttttggatccattacaggcccagcccactgggaggtgttgctgcgggcccgtgctatcgaaacccagtgctatgtagtggcagcagcacagtgtggacgccaccatgagaagagagcaagttatggccacagcatggtggtagacccctggggaacagtggtggcccgctgctctgaggggccaggcctctgccttgcccgaatagacctcaactatctgcgacagttgcgccgacacctgcctgtgttccagcaccgcaggcctgacctctatggcaatctgggtcacccactgtcttaagacttgacttctgtgagtttagacctgcccctcccacccccaccctgccactatgagctagtgctcatgtgacttggaggcaggatccaggcacagctcccctcacttggagaaccttgactctcttgatggaacacagatgggctgcttgggaaagaaactttcacctgagcttcacctgaggtcagactgcagtttcagaaaggtggaattttatatagtcattgtttatttcatggaaactgaagttctgctgagggctgagcagcactggcattgaaaaatataataatcataaagtc

SEQ ID NO: 20353 - DNA, 1518 bp, Homo sapiens
  source 1..1518: mol_type = unassigned DNA
cttctggctccagaccgccctccggatcggaccctgcgaatggttttggctatatcttcatgtaggacctactccctatcccgtcggccgcggtgaatcccacctgcggctgggcttcatcaccaggcctcctcacagattcctgtcccttctgtgtcctggactccggatacctcaactctcagtactttgtgctcagcccaggcccagagccatggctatctcctcttcctcctgcgaactgcccctggtggctgtgtgccaggtaacatcgacgccagacaagcaacagaactttaaaacatgtgctgagctggttcgagaggctgccagactgggtgcctgcctggctttcctgcctgaggcatttgacttcattgcacgggaccctgcagagacgctacacctgtctgaaccactgggtgggaaacttttggaagaatacacccagcttgccagggaatgtggactctggctgtccttgggtggtttccatgagcgtggccaagactgggagcagactcagaaaatctacaattgtcacgtgctgctgaacagcaaaggggcagtagtggccacttacaggaagacacatctgtgtgacgtagagattccagggcaggggcctatgtgtgaaagcaactctaccatgcctgggcccagtcttgagtcacctgtcagcacaccagcaggcaagattggtctagctgtctgctatgacatgcggttccctgaactctctctggcattggctcaagctggagcagagatacttacctatccttcagcttttggatccattacaggcccagcccactgggaggtgttgctgcgggcccgtgctatcgaaacccagtgctatgtagtggcagcagcacagtgtggacgccaccatgagaagagagcaagttatggccacagcatggtggtagacccctggggaacagtggtggcccgctgctctgaggggccaggcctctgccttgcccgaatagacctcaactatctgcgacagttgcgccgacacctgcctgtgttccagcaccgcaggcctgacctctatggcaatctgggtcacccactgtcttaagacttgacttctgtgagtttagacctgcccctcccacccccaccctgccactatgagctagtgctcatgtgacttggaggcaggatccaggcacagctcccctcacttggagaaccttgactctcttgatggaacacagatgggctgcttgggaaagaaactttcacctgagcttcacctgaggtcagactgcagtttcagaaaggtggaattttatatagtcattgtttatttcatggaaactgaagttctgctgagggctgagcagcactggcattgaaaaatataataatcataaagtctgtgtctggacatcgcctttgggaactagaaggggagttggtattgtaccagctggactaagctccagttctagacctcctggctcattcaacatgcctccctacctaaataaaagtgcaacactc

SEQ ID NO: 20354 - DNA, 2092 bp, Homo sapiens
  source 1..2092: mol_type = unassigned DNA
gcggccgccggagcccgagctgacgccgccttggcacccctcctggagttagaaactaaggccggggcccgcggcgctcggcgcgcaggccgcccggcttcctgcgtccatttccgcgtgctttcaaagaagacagagagaggcactgggttgggcttcatttttttcctccccatccccagtttctttctctttttaaaaataataattatcccaataattaaagccaattcccccctcccctcccccagtccctccccccaactcccccctcccccgcccgccggggcaggggagcgccacgaattgaccaagtgaagctacaactttgcgacataaattttggggtctcgaaccatgtcgctgaccaacacaaagacggggttttcggtcaaggacatcttagacctgccggacaccaacgatgaggagggctctgtggccgaaggtccggaggaagagaacgaggggcccgagccagccaagagggccgggccgctggggcagggcgccctggacgcggtgcagagcctgcccctgaagaaccccttctacgacagcagcgacaacccgtacacgcgctggctggccagcaccgagggccttcagtactccctgcacggtctggctgccggggcgccccctcaggactcaagctccaagtccccggagccctcggccgacgagtcaccggacaatgacaaggagaccccgggcggcgggggggacgccggcaagaagcgaaagcggcgagtgcttttctccaaggcgcagacctacgagctggagcggcgctttcggcagcagcggtacctgtcggcgcccgagcgcgaacacctggccagcctcatccgcctcacgcccacgcaggtcaagatctggttccagaaccaccgctacaagatgaagcgcgcccgggccgagaaaggtatggaggtgacgcccctgccctcgccgcgccgggtggccgtgcccgtcttggtcagggacggcaaaccatgtcacgcgctcaaagcccaggacctggcagccgccaccttccaggcgggcattcccttttctgcctacagcgcgcagtcgctgcagcacatgcagtacaacgcccagtacagctcggccagcaccccccagtacccgacagcacaccccctggtccaggcccagcagtggacttggtgagcgccgccccaacgagactcgcggccccaggcccaggccccaccccggcggcggtggcggcgaggaggcctcggtccttatggtggttattattattattataattattattatggagtcgagttgactctcggctccactagggaggcgccgggaggttgcctgcgtctccttggagtggcagattccacccacccagctctgcccatgcctctccttctgaaccttgggagagggctgaactctacgccgtgtttacagaatgtttgcgcagcttcgcttctttgcctctccccggggggaccaaaccgtcccagcgttaatgtcgtcacttgaaaacgagaaaaagaccgaccccccacccctgctttcgtgcattttgtaaaatatgtttgtgtgagtagcgatattgtcagccgtcttctaaagcaagtggagaacactttaaaaatacagagaatttcttcctttttttaaaaaaaaataagaaaatgctaaatatttatggccatgtaaacgttctgacaactggtggcagatttcgcttttcgttgtaaatatcggtggtgattgttgccaaaatgaccttcaggaccggcctgtttcccgtctgggtccaactcctttctttgtggcttgtttgggtttgttttttgttttgtttttgtttttgcgttttcccctgctttcttcctttctctttttattttattgtgcaaacatttctcaaatatggaaaagaaaaccctgtaggcagggagccctctgccctgtcctccgggccttcagccccgaacttggagctcagctattcggcgcggttccccaacagcgccgggcgcagaaagctttcgattttttaaataagaattttaataaaaatcctgtgtttaaaaaagaaaaaaagaaaaaa

SEQ ID NO: 20355 - DNA, 2238 bp, Homo sapiens
  source 1..2238: mol_type = unassigned DNA
tttaacactttaggtgatggagcgaatgaggggctgataactggagaggacgaagcaagcccccgcaacaccctccccccaaacttagcagcacgttccccattccgcaattataccggactttggtgcgaagtcactttagaaaactgggatctggaaggggccaggcgcggagtccatgtctagcctcgacgccagcctccgagtttctatttctggtgctcgagggctggggtaacggccgcggatggaggagcgaaggatgggaaaagcaaaggatgggaaaagcaaagatgggaaaagcaacggggagtgatctttccaagaaacacccaactgccccttttacctttttttgcctccattatggggcgggggttgggggggcgagagaaaaagatgtcaatgaccattgtttgctcgtttgggatgttgctccgccccccgagtctgtcgtaaacctggcgccggactaaaataaaccccagatcccgcagcccggggggctcgccgagccgccgactcctcgtcacaggctcagctgccgcggccgaggtggcggcgacgagcggccgccgcgtcctgccggcgcgcgccccaggcccccctacctggctgcccgccgagccatgtcgttgagcccaaagcacacgacgcccttctccgtgtccgacatcctgagccccatcgaggagacctacaagaagttcagcggcgccatggacggcgcgccacccggcctgggggcgcccctgggggccgcggccgcctaccgcgcgccgccacctgggccctcctcgcaggcggcgaccgtggcgggcatgcagccttctcacgccatggcgggtcacaacgcggcggccgcggcggcggcggcagcagctgcggcggcggcggccgccacctaccacatgccgcccggcgtctcgcagttcccgcacggcgccatgggcagctactgcaacggcggcctgggcaacatgggcgagctgcccgcctacacggacggcatgcggggcggcgcggccaccggctggtacggcgccaacccggacccacgctactcgtcaatctccaggttcatggggccgtcggcgggcgtgaatgtggccggcatggggtcgctgaccggcatcgcggacgccgccaagtcgctgggcccgctgcacgcggcggcggcggcagccgctccgcgaaggaagcgccgcgtgctcttctcgcaggcgcaggtctacgagctggagcggcgcttcaagcagcagaagtacctgtcggcgcccgagcgcgagcacctggccagcatgatccacctgacgcccacgcaggtcaagatctggttccagaaccaccggtacaagatgaaacggcaggccaaggacaaggcggcgcagcagctgcagcaggagggcggcctgggcccgccgccgcctccgccgccgtccccgcgccgcgtggcggtgcctgtgctggtcaaggacggcaagccgtgccagaacggcgccagcacgcccacccccggccaggccggtccgcagccgccggccccgacgccagcacctgagctggaggagctgtcgcccagcccacccgcgctgcacggcccggggggcggcctggcggccctggacgcggccgccggggagtacagcggcggcgtcctgggcgccaacctgctctatggcaggacgtggtgacagcgagggcgccccggggctaggtcctggtgcacccgaagggtctgcaagaaactgctagaacggatgggggaggcatgcgaaaaccgactcgcgcgtgtaaactgcgattcaaaacgaaccggtctcagagaggagcaggctgtgaacctcttgctgggggcgggggacagcgacagcccggaaaccgagtagtgtaacattatgccacgaggctttgaggtggtgattttctcctcctagaagttcttaaatgacgcgaaaaggtggagaagttcacacggcattcttaactacagctctcaaagttggaaactttgttggcgtttgtaactataaaaatcaacccagctttaacaatcagtcctttttgaagtggaatttatcttgggagattaattttcgaagggccccctaagtgcaatttcattaatgtttgattgaaagtaaattgaagtgtagctcaaggtggatcatacacatagcaacattattgcagaggaattattgccatttaggtaatagagcaatggaatcaaaataa

SEQ ID NO: 20356 - DNA, 1709 bp, Homo sapiens
  source 1..1709: mol_type = unassigned DNA
tttttttgccgtatgactatattaggtgacacgaaactgctcatcgctcctgtcatcgaggcccctggcccaatggcaggctgagtccccctcctctggcctggtcccgcctctcctgccccttgtgctcagcgctacctgctgcccggacacatccagagctggccgacgggtgcgcgggcgggcggcggcaccatgcagggaagctgccaggggccgtgggcagcgccgctttctgccgcccacctggcgctgtgagactggcgctgccaccatgttccccagccctgctctcacgcccacgcccttctcagtcaaagacatcctaaacctggaacagcagcagcgcagcctggctgccgccggagagctctctgcccgcctggaggcgaccctggcgccctcctcctgcatgctggccgccttcaagccagaggcctacgctgggcccgaggcggctgcgccgggcctcccagagctgcgcgcagagctgggccgcgcgccttcaccggccaagtgtgcgtctgcctttcccgccgcccccgccttctatccacgtgcctacagcgaccccgacccagccaaggaccctagagccgaaaagaaagagctgtgcgcgctgcagaaggcggtggagctggagaagacagaggcggacaacgcggagcggccccgggcgcgacggcggaggaagccgcgcgtgctcttctcgcaggcgcaggtctatgagctggagcggcgcttcaagcagcagcggtacctgtcggcccccgaacgcgaccagctggccagcgtgctgaaactcacgtccacgcaggtcaagatctggttccagaaccggcgctacaagtgcaagcggcagcggcaggaccagactctggagctggtggggctgcccccgccgccgccgccgcctgcccgcaggatcgcggtgccagtgctggtgcgcgatggcaagccatgcctaggggactcggcgccctacgcgcctgcctacggcgtgggcctcaatccctacggttataacgcctaccccgcctatccgggttacggcggcgcggcctgcagccctggctacagctgcactgccgcttaccccgccgggccttccccagcgcagccggccactgccgccgccaacaacaacttcgtgaacttcggcgtcggggacttgaatgcggttcagagccccgggattccgcagagcaactcgggagtgtccacgctgcatggtatccgagcctggtagggaagggacccgcgtggcgcgaccctgaccgatcccacctcaacagctccctgactctcggggggagaaggggctcccaacatgaccctgagtcccctggattttgcattcactcctgcggagacctaggaactttttctgtcccacgcgcgtttgttcttgcgcacgggagagtttgtggcggcgattatgcagcgtgcaatgagtgatcctgcagcctggtgtcttagctgtccccccaggagtgccctccgagagtccatgggcacccccggttggaactgggactgagctcgggcacgcagggcctgagatctggccgcccattccgcgagccagggccgggcgcccgggcctttgctatctcgccgtcgcccgcccacgcacccacccgtatttatgtttttacctattgctgtaagaaatgacgatccccttcccattaaagagagtgcgttga

SEQ ID NO: 20357 - DNA, 1124 bp, Homo sapiens
  source 1..1124: mol_type = unassigned DNA
ctctggcctggtcccgcctctcctgccccttgtgctcagcgctacctgctgcccggacacatccagagctggccgacgggtgcgcgggcgggcggcggcaccatgcagggaagctgccaggggccgtgggcagcgccgctttctgccgcccacctggcgctgtgagactggcgctgccaccatgttccccagccctgctctcacgcccacgcccttctcagtcaaagacatcctaaacctggaacagcagcagcgcagcctggctgccgccggagagctctctgcccgcctggaggcgaccctggcgccctcctcctgcatgctggccgccttcaagccagaggcctacgctgggcccgaggcggctgcgccgggcctcccagagctgcgcgcagagctgggccgcgcgccttcaccggccaagtgtgcgtctgcctttcccgccgcccccgccttctatccacgtgcctacagcgaccccgacccagccaaggaccctagagccgaaaagaaagcctgaaattttaagtcaccgtctgtctccctcaccagggtgtgaactgccccgagggcagagacctcccgttttgttctccagcgccttgagccagcctgactttctacaaatgctgagtgagacgtgtcggtggctcccagtgcacttggcagagtgagccgcagccagctgggcgctccaggcaggacacagtggcctccacgaggatcccttaccattactgtgcggccgcgctccgtaggtcaagccgctcttaccaagcgtctctctgcctctctgttccccctcagagctgtgcgcgctgcagaaggcggtggagctggagaagacagaggcggacaacgcggagcggccccgggcgcgacggcggaggaagccgcgcgtgctcttctcgcaggcgcaggtctatgagctggagcggcgcttcaagcagcagcggtacctgtcggcccccgaacgcgaccagctggccagcgtgctgaaactcacgtccacgcaggtcaagatctggttccagaaccggcgctacaagtgcaagcggcagcggcaggaccagactctggagctggtggggctgcccccgccgccgccgccgcctgcccgcagg

SEQ ID NO: 20358 - DNA, 1027 bp, Homo sapiens
  source 1..1027: mol_type = unassigned DNA
acatccagagctggccgacgggtgcgcgggcgggcggcggcaccatgcagggaagctgccaggggccgtgggcagcgccgctttctgccgcccacctggcgctgtgagactggcgctgccaccatgttccccagccctgctctcacgcccacgcccttctcagtcaaagacatcctaaacctggaacagcagcagcgcagcctggctgccgccggagagctctctgcccgcctggaggcgaccctggcgccctcctcctgcatgctggccgccttcaagccagaggcctacgctgggcccgaggcggctgcgccgggcctcccagagctgcgcgcagagctgggccgcgcgccttcaccggccaagtgtgcgtctgcctttcccgccgcccccgccttctatccacgtgcctacagcgaccccgacccagccaaggaccctagagccgaaaagaaagggtgtgaactgccccgagggcagagacctcccgttttgttctccagcgccttgagccagcctgactttctacaaatgctgagtgagacgtgtcggtggctcccagtgcacttggcagagtgagccgcagccagctgggcgctccaggcaggacacagtggcctccacgaggatcccttaccattactgtgcggccgcgctccgtaggtcaagccgctcttaccaagcgtctctctgcctctctgttccccctcagagctgtgcgcgctgcagaaggcggtggagctggagaagacagaggcggacaacgcggagcggccccgggcgcgacggcggaggaagccgcgcgtgctcttctcgcaggcgcaggtctatgagctggagcggcgcttcaagcagcagcggtacctgtcggcccccgaacgcgaccagctggccagcgtgctgaaactcacgtccacgcaggtcaagatctggttccagaaccggcgctacaagtgcaagcggcagcggcaggaccagactctggagctggtggggctgcccccgccgccgccgccgcctgcccgca

SEQ ID NO: 20359 - DNA, 906 bp, Homo sapiens
  source 1..906: mol_type = unassigned DNA
atgctgctgagccccgtcacctccacccccttctcggtcaaggacatcctgcgactggagcgcgagcggagctgccccgcggcttcgccacatccgcgggtgcggaagagcccggaaaactttcagtacctgagaatggacgcagagccgcgagggtcagaggttcacaacgctggtggcggcggcggtgacagaaagctggatggttcggagcctcctgggggtccctgtgaggcagtcttggagatggacgcggaacggatgggggagccacagcccggcctgaacgcggcctcgcccctcggcggcgggaccagggtgccagagcgcggcgttggcaacagcggcgacagcgtgcggggtggccgctcggagcagcccaaggcgcggcaacgacggaagccgcgcgtgctcttttcgcaggcgcaggtgctggccctggagcggcgcttcaagcagcagcggtacctgtcagcgcccgagcgcgagcacctggccagcgcgctgcagctcacgtccacgcaggtcaagatctggttccagaaccgacgctacaaatgcaagagacagcgccaggacaagtcgctggaactggctggccaccctctaacgccgcgccgagtagctgtgcccgtcctggtgcgcgatggcaagccctgcctgggccccgggcccggcgcacctgccttccccagcccctacagtgcagcagtgtcgccctactcttgctacggaggctacagcggagcaccctacggcgcaggctacggcacctgctacgcgggcgcgccctcgggtcctgcgccacacacaccactggccagcgcgggcttcggacacggtggccagaatgccaccccgcagggccatctggcagccacgctgcagggtgtcagggcctggtga

SEQ ID NO: 20360 - DNA, 717 bp, Homo sapiens
  source 1..717: mol_type = unassigned DNA
gacagaaagctggatggttcggagcctcctgggggtccctgtgaggcagtcttggagatggacgcggaacggatgggggagccacagcccggcctgaacgcggcctcgcccctcggcggcgggaccagggtgccagagcgcggcgttggcaacagcggcgacagcgtgcggggtggccgctcggagcagcccaaggcgcggcaacgacggaagccgcgcgtgctcttttcgcaggcgcaggtgctggccctggagcggcgcttcaagcagcagcggtacctgtcagcgcccgagcgcgagcacctggccagcgcgctgcagctcacgtccacgcaggtcaagatctggttccagaaccgacgctacaaatgcaagagacagcgccaggacaagtcgctggaactggctggccaccctctaacgccgcgccgagtagctgtgcccgtcctggtgcgcgatggcaagccctgcctgggccccgggcccggcgcacctgccttccccagcccctacagtgcagcagtgtcgccctactcttgctacggaggctacagcggagcaccctacggcgcaggctacggcacctgctacgcgggcgcgccctcgggtcctgcgccacacacaccactggccagcgcgggcttcggacacggtggccagaatgccaccccgcagggccatctggcagccacgctgcagggtgtcagggcctggtga

SEQ ID NO: 20361 - DNA, 1829 bp, Homo sapiens
  source 1..1829: mol_type = unassigned DNA
attcaggtacttaacaccctggagacccggacctcggctttcaaagcggcctgggtgggaagagctgtttatataaacagagattccgctgtaaatgcgctaatatcccggctgccagcgcatggcgagcgcctcccacgcccatccgtaggagcggcgtcccggccgcccctccgttcccagcctgccctgcccccgcctccttcccctcctcggccatggccacctctggacgcctgagcttcaccgtgcgcagccttctagatttacccgagcaggacgcgcaacacctgccgaggcgggagccagaaccacgcgccccccagcccgacccctgcgccgcctggctggattcggagcgcggccactacccttcctcggacgagagcagcctggagaccagcccgccagactcgtcgcagcggccgtccgctaggcccgcgtctccgggctcggacgccgagaaaaggaagaagcggcgggtgctattctccaaggcgcagacgctggagttggagcggcgcttccggcagcagcggtacctgtctgcgcccgagcgcgagcagctggcgagcctgcttcgcctcacgcccacgcaggtcaagatctggttccagaatcatcgctacaagctgaagcgcgctcgcgctccaggggcggcggagtcgcctgacctggcagcatccgccgagctgcacgccgcgcccggcctgctgcgtcgcgtggtggtgccggtgcttgttcgcgacgggcagccgtgcggcggcggcggcggtggcgaggtgggaaccgccgcggcccaggagaagtgcggcgcccctccagccgccgcctgccctctgccgggctaccctgccttcggtcccggctcggcgcttggcctcttccccgcctaccagcacttagcatcccccgccctggtctcctggaactggtgaggccgcagggcggcacctggggctaccctcgactttggagcgcgctctgcgattggagcagggccggagccgaacgcctggaacgctctccgtccgcctccctgcagccccatctccttgggcgccagggtccctggcgcgccctcatcagccgtcgcgcaagcacacacgagggacgtgtgccagagccccctccctcaccttccctccaccgccagccccagagttagattttatgcttgggccttatttgtatatttttaaatagcgatttgtataggaagcaagttatttttttaaaaaatagagtatttttcctcgtagttcgagaataaaatgtgtggggttgggtcccctgcgcgcctgcggggaacgtaggcgggagtcgtgccccccagaccggtgttcgcatcgctggctcgccccttgactggctaagtggggcccggccccagctggatcgaagggcgggttgcagtcccgacacggctttaggaagatacctgggggatggaggggtggtgatgtcagggttgggcgcgggaagaaaaggagaggaggaagctgaggcaactttgggattcttgtcagcgggaggcgtcactggccccagagtgactccgactctccgctgggctcccagagctgctggcgtttcgaataccgaaaagtcaaccctgtggaccacgacagggcagaaggagtttctccggagatgagccggcgaggccaggtgcggggcgcgctgcaccggagcagcccaggccgggccgcaagctgtttccagagtgcaggagccaagtgctcggggaccctttgaaaagtgcctggggacctgaagagcaccggggaatttgtaacccctatttaagcctgcaagtgcctaagtta

SEQ ID NO: 20362 - DNA, 2801 bp, Homo sapiens
  source 1..2801: mol_type = unassigned DNA
cgggaggggggtggtacagtggaacgcaagggaaggaaagagaaaagaaacagataaaaccagggcagggggtaaaaaagttccccgcgcctctcggaatccagcggccgcggccgcggctaccgccgccgccgccgggggtgggctccggaagagcctgcccagcagggaaggggaggacgggccaggagcgaaatcctgcaggcgaggaagggacagacgcgcaaagaaaaagtgactcgggctgtgcgccccggcggcgctcgggaggggactgctgccacggaggggcccccgccaatcctccttcacgtcccccgagggggcagaccccagcccgcccctaagggcgagaagcgatgagataatccagctgagctgcgaaaggagagcgtctggctctggattcggggggagggggtctccgggcggggtgggcctctaaggtgggggcgagggtcggcgctgatcctgggacggagtggggcgggagctgctgggccgcgcagcagtgggcggcggcggcctcgcacacccagctcactcgcgctgcggccgccggcgctctctgtcccgctcggagctgctcggcgccccagctgcccgccccgccggccgctcctgcccgcggcgcagatggctgtgcgcggcgccaacaccttgacgtccttctccatccaggcgatcctcaacaagaaagaggagcgcggcgggctggccgcgccagaggggcgcccggcgcccgggggcacagcggcatcggtggccgcggctcccgctgtctgctgttggcggctctttggggagagggacgcgggcgcgttggggggcgccgaggactctctgctggcgtctcctgccggtaccagaacagctgcggggcggactgcggagagcccggaaggctgggactcggactccgcgctcagcgaggagaacgagagcaggcggcgctgcgcggacgcgcggggggccagcggggccggccttgcggggggatccttgagcctcggccagccggtctgtgagctggccgcttccaaagacctagaggaggaagccgcgggccggagcgacagcgagatgtccgccagcgtctcaggcgaccgcagcccaaggaccgaggacgacggtgttggccccagaggtgcacacgtgtccgcgctgtgcagcggggccggcggcgggggcggcagcgggccggcaggcgtcgcggaggaggaggaggagccggcggcgcccaagccacgcaagaagcgctcgcgggccgctttctcccacgcgcaggtcttcgagctggagcgccgctttaaccaccagcgctacctgtccgggcccgagcgcgcagacctggccgcgtcgctgaagctcaccgagacgcaggtgaaaatctggttccagaaccgtcgctacaagacaaagcgccggcagatggcagccgacctgctggcctcggcgcccgccgccaagaaggtggccgtaaaggtgctggtgcgcgacgaccagagacaatacctgcccggcgaagtgctgcggccaccctcgcttctgccactgcagccctcctactattacccgtactactgcctcccaggctgggcgctctccacctgcgcagctgccgcaggcacccagtgaacccgcttgggctgaggcagcgagtgattcccgcgctccggctccggaccggcgctgacagctgtaggctgtagcctgcacggggcgccccgccaaggaggcacctggaggtgaaacccagctccagctcccgttagccaggacttgtcccctggcagctgggctgagtctgccctgagggggcgcctttttctaatttgaacagaggcaccctatggcctaggggccctgatcgcccacctgcctggaagcccctgggctctatttattatcatgacaatgttggaattaaattttgattcgaatatgtctgcctgggggtggggttttccctgagcggcaactcctggagaccacatagcctgaatcctcagaatttcaggcctgctgggagctttctgcactaggccacactagttcatggtatccatgctaccaatctatgtgtatctacatatcttttatttttggaaattgcatttgtaaccaaggggtgcgaaaccctggcagtcccaggcagcaccaggccaggggttgatttgaaacgtgaaggattgggttttcaggccctctgctccacccctcctgtgtgtcagagctagggtgggggtgcccgattcgggtgctgaatgtaaggaggggagcctccaagtgtggtgcaagccgggggtctccacatcttccttctctgaagtccaggtacctgcacaagcaggaagcgcctgggagtcccggaaggaggagagcgcacacccaggcagccctctgcggaaactttccttggtttctttttatttgtgtaaaggaggttaagacgtgtcgcacttttcagttgtttgtattcaaatgacgattatttttctactcaatgtgaatatccctggccagcctttccacggcgcccaccgcagtgccgctgcctggccctcagtgtctaccttctgccctctgcgactccagtgctctggcccgggactcccctatccgcccctcacttacccttaaacaggtgatcccacctgtcttgtcaacctcgccgcttttcgcctccttaatggcactgtgcactcaactagagtattaactgtaaaaagatttgtgaagtttggaagctctattcgctgtattttttctttaatttataaacttttagtttaacatgc

SEQ ID NO: 20363 - DNA, 937 bp, Homo sapiens
  source 1..937: mol_type = unassigned DNA
atggagtccaacctgcaggggacgttcctgctgaacaacacgccgctggctcagtttccggagatgaaggccccggtgtgccagtactctgtgcagaactccttctacaagctcagccccccagggctgggcccccagctggccgccggaaccccccacgggatcacggacatcctgagcaggcccgtggctgcgccgaacaacagcctcctctccggctacccccacgtggcaggctttggggggctcagctcgcagggggtctactacagcccccaggtagggaatttttccaaggctgggaacgagtacccgacccggacccggaactgctgggcggacacgggccaagactggcgaggcgggcggcagtgcagcaacaccccagaccccctgagtgacagcatacacaagaagaagcacacccggcccaccttcacggggcaccagatctttgccctggagaaaacctttgagcagaccaagtacttggctggccccgagagggcacggctggcatactcactgggcatgaccgagtcgcaggtcaaggtgtggttccagaaccgcaggaccaagtggcggaagaagagcgccctggagccctcgtcctccacgccccgggccccgggcggcgcgggtgcaggcgcaggcggggaccgcgcaccctcggagaacgaggacgacgagtacaacaagccgctggaccccgactcggacgacgagaagatccgcctgctgctgcgcaagcaccgcgccgccttctcggtgctcagcctgggagcgcacagcgtctgacgcccgccgtccaggcccgggatcctggctgcagcctgcggggggacgccgaggagcctaccttcccctccccttccccacgctcctgggggcgcagggactgagtctttctttggatgaggggcgcgtggaggaggag

SEQ ID NO: 20364 - DNA, 1683 bp, Homo sapiens
  source 1..1683: mol_type = unassigned DNA
aaggatgcagcaggggcagctggcacctgggtctaggctttgctcagggccctggggcctccccgagctccaacccgctgcgccctcctcatcagccgctcagctgccctggggcgagagctggggggaagaagcagacactcctgcatgtctttctgcttctggggtgtggttccagaaccgcaggaccaagtggcggaagaagagcgccctggagccctcgtcctccacgccccgggccccgggcggcgcgggtgcaggcgcaggcggggaccgcgcaccctcggagaacgaggacgacgagtacaacaagccgctggaccccgactcggacgacgagaagatccgcctgctgctgcgcaagcaccgcgccgccttctcggtgctcagcctgggagcgcacagcgtctgacgcccgccgtccaggcccgggatcctggctgcagcctgcggggggacgccgaggagcctaccttcccctccccttccccacgctcctgggggcgcagggactgagtctttctttggatgaggggcgcgtggaggaggagcagcaggtgcaggggaggaggaggggaggcgggggaggaggaggaaaaggagggaaaggggacaggcatcctagctaagggaggaggaggccaggagggaggcacagcactcctgagacctggaagccgctgccccttgcacctcctcgggcctcgcctgccagttctgcagattcacaagtggacagaggactaaaatgaccaggctctgcagccaagaaactggctgtggggtcccagacatgccactgtgatccagctgttggggcggggggagtgggcaggacttcccagggagggaggcagctggctggggagtcagaagtccagagtcttgggccccaagccagctgctggctgcagaagaaaagacaggtgagtggccaggtgcactcctcagacctgtgcacaggaagggtcccactggaggggccagagctgagcacctaacccaggctgcaggaaatctgcctccaggaggggaagtgggacatcccagtggagaaaaaatgcccctgacactgcaggatgacggcccctgagctgcggaaatccccctggcctcctttctccgatttaccctcagggtcaatacctctgagaccgctgtgccctcctcatcctgacagccggggaaaaggggagggtgcagggagaggggaggcggggacggtgtgcccaagggccacccacctgggcatcatttggtgctgatataaggacaggcccacccagagagaaaaagcatcccacctggggaggaaaggaagggctgggaaagaccccagaacggcacccctccaacaaggcaggaagggagaaggacagcccctccggctgggtggaggatgccaggaaggggctgaaccacggcctgctgggaatcacggcccttcctttcctcagatcgccttgcggcctggcactggagctggtgctgacagggacgctggccaacagggtggtatttttcacccgggtgatctgagctgctggcaggtagggggtgggctgggggaggcgggtgagggctggtcttagataggaatgcagcccagaagggaccaagcacttgcccatcctcactggctttcaaaaaataaacagtaaaaataaaagtcccatgaacctt

SEQ ID NO: 20365 - DNA, 3744 bp, Homo sapiens
  source 1..3744: mol_type = unassigned DNA
cccgcggggatggaggcagggaggggggacgatggcgggacgggtggcgccggggttccagccctgcgcctgctccggagcaccgggcccctctcgctgaccccctcgtcccaggaccccgcaggcccgagtgcctgggctcgtcctctttcgcgcccgctgccaggtgccagggccgcgcaggcgggcggaggacagaagtcggtcctaggccccccaggctctgaccttctttcccaggatgaggtggggccaccatttgcccagggcctcttggggctctggttttagaagagcactccagcgaccagatgatcgtatccccttcctgatccactggagttggccccttcaaggggagcgtccctttgggccccctagggcctttatacgccaccacggaagctcggtagatagcgctcccccacccgggaggcatggacggctgttccccagcgcctctgcaactgaagctatacagcggcaccgccggaacctggctgagtggttcagccggctgcccagggaggagcgccagtttggcccaacctttgccctagacacggtccacgttgaccctgtgatccgcgagagtacccctgatgagctacttcgcccacccgcggagctggccctggagcatcagccaccccaggccgggctccccccactggccttgtctcagctctttaacccggatgcctgtgggcgccgggtgcagacagtggtgctgtatgggacagtgggcacaggcaagagcacgctggtgcgcaagatggttctggactggtgttatgggcggctgccggccttcgagctgctcatccccttctcctgtgaggacctgtcatccctgggccctgccccagcctccctgtgccaacttgtggcccagcgctacacgcccctgaaggaggttctgcccctgatggctgctgctgggtcccacctcctctttgtgctccatggcttagagcatctcaacctcgacttccggctggcaggcacgggactttgtagtgacccggaggaaccgcaggaaccagctgctatcatcgtcaacctgctgcgcaaatacatgctgcctcaggccagcattctggtgaccactcggccctctgccattggccgtatccccagcaagtacgtgggccgctatggtgagatctgcggtttctctgataccaacctgcagaagctctacttccagctccgcctcaaccagccgtactgcgggtatgccgttggcggttcaggtgtctctgccacaccagctcagcgtgaccacctggtgcagatgctctcccggaacctggaggggcaccaccagatagccgctgcctgcttcctgccgtcctattgctggctcgtttgtgccaccttgcacttcctgcatgcccccacgcctgctgggcagacccttacaagcatctataccagcttcctgcgcctcaacttcagcggggaaaccctggacagcactgacccctccaatttgtccctgatggcctatgcagcccgaaccatgggcaagttggcctatgagggggtgtcctcccgcaagacctacttctctgaagaggatgtctgtggctgcctggaggctggcatcaggacggaggaggagtttcagctgctgcacatcttccgtcgggatgccctgaggtttttcctggccccatgtgtggagccagggcgtgcaggcaccttcgtgttcaccgtgcccgccatgcaggaatacctggctgccctctacattgtgctgggtttgcgcaagacgaccctgcaaaaggtgggcaaggaagtggctgagctcgtgggccgtgttggggaggacgtcagcctggtactgggcatcatggccaagctgctgcctctgcgggctctgcctctgctcttcaacctgatcaaggtggttccacgagtgtttgggcgcatggtgggtaaaagccgggaggcggtggctcaggccatggtgctggagatgtttcgagaggaggactactacaacgatgatgttctggaccagatgggcgccagtatcctgggcgtggagggcccccggcgccacccagatgagccccctgaggatgaagtcttcgagctcttccccatgttcatgggggggcttctctctgcccacaaccgagctgtgctagctcagcttggctgccccatcaagaacctggatgccctggagaatgcccaggccatcaagaagaagctgggcaagctgggccggcaggtgctgcccccatcagagctccttgaccacctcttcttccactatgagttccagaaccagcgcttctccgctgaggtgctcagctccctgcgtcagctcaacctggcaggtgtgcgcatgacaccagtcaagtgcacagtggtggcagctgtgctgggcagcggaaggcatgccctggatgaggtgaacttggcctcctgccagctagatcctgctgggctgcgcacactcctgcctgtcttcctgcgtgcccggaagctgggcttgcaactcaacagcctgggccctgaggcctgcaaggacctccgagacctgttgctgcatgaccagtgccaaattaccacactgcggctgtccaacaacccgctgacggcggcaggtgttgccgtgctaatggaggggctggcaggaaacacctcagtgacgcacctgtccctgctgcacacgggccttggggacgaaggcctggagctgctggctgcccagctggaccgcaaccggcagctgcaggagctgaacgtggcgtacaacggtgctggtgacacagcggccctggccctggccagagctgcccgggagcacccttccctggaactgctacacctctacttcaatgagctgagctcagagggccgccaggtcttgcgagacttggggggtgctgctgaaggtggtgcccgggtggtggtgtcactgacagaggggacggcggtgtcagaatactggtcagtgatcctcagtgaagtccagcggaacctcaatagctgggatcgggcccgggttcagcgacaccttgagctcctactgcgggatctggaagatagccggggtgccacccttaatccttggcgcaaggcccagctgctgcgagtggagggcgaggtcagggccctcctggagcagctgggaagctctggaagctgagacactggcggcaggcacctagctatgtgaccactggccctaaaccttttccctctgtggcctcctggcttgcactgctccctctagaaagattccttcaggtctggaggcagaggaatgggcatagctgagccagttgccctcctagggcatgtttgaccaggactgagtctggaatctccaagttaaagatggtgaatcaatgcttcgggcttggagatggaacatgcctcctctccattcagctagaaggaccaaagcatgtggcatttggatggccagagtgccctgaagcaccactaccaaccttgcctccccctcctctcaaagagcctctgactgtgtcaccaaggggctcacatcttatgtctgccatgccaggggtgtcgccatccagatgtgttggaagcttcccctcctgccttatgctcacctgtggacaccgaggatgccctcacattggtgctttctcctcatcctcatgccccctttgccacaatggtatgatggcttggtagcccctcgaggcagatgcacctgacttgctgctattaaaaagccgtgtgccttctacc

SEQ ID NO: 20366 - DNA, 2942 bp, Homo sapiens
  source 1..2942: mol_type = unassigned DNA
gtctgggctctgaagaggaccggatacataaggcagaacccaaggaagccttaggctcaggtctctgcctgaaggacagaagtcggtcctaggccccccaggctctgaccttctttcccaggatgaggtggggccaccatttgcccagggcctcttggggctctggttttagaagagcatctcaacctcgacttccggctggcaggcacgggactttgtagtgacccggaggaaccgcaggaaccagctgctatcatcgtcaacctgctgcgcaaatacatgctgcctcaggccagcattctggtgaccactcggccctctgccattggccgtatccccagcaagtacgtgggccgctatggtgagatctgcggtttctctgataccaacctgcagaagctctacttccagctccgcctcaaccagccgtactgcgggtatgccgttggcggttcaggtgtctctgccacaccagctcagcgtgaccacctggtgcagatgctctcccggaacctggaggggcaccaccagatagccgctgcctgcttcctgccgtcctattgctggctcgtttgtgccaccttgcacttcctgcatgcccccacgcctgctgggcagacccttacaagcatctataccagcttcctgcgcctcaacttcagcggggaaaccctggacagcactgacccctccaatttgtccctgatggcctatgcagcccgaaccatgggcaagttggcctatgagggggtgtcctcccgcaagacctacttctctgaagaggatgtctgtggctgcctggaggctggcatcaggacggaggaggagtttcagctgctgcacatcttccgtcgggatgccctgaggtttttcctggccccatgtgtggagccagggcgtgcaggcaccttcgtgttcaccgtgcccgccatgcaggaatacctggctgccctctacattgtgctgggtttgcgcaagacgaccctgcaaaaggtgggcaaggaagtggctgagctcgtgggccgtgttggggaggacgtcagcctggtactgggcatcatggccaagctgctgcctctgcgggctctgcctctgctcttcaacctgatcaaggtggttccacgagtgtttgggcgcatggtgggtaaaagccgggaggcggtggctcaggccatggtgctggagatgtttcgagaggaggactactacaacgatgatgttctggaccagatgggcgccagtatcctgggcgtggagggcccccggcgccacccagatgagccccctgaggatgaagtcttcgagctcttccccatgttcatgggggggcttctctctgcccacaaccgagctgtgctagctcagcttggctgccccatcaagaacctggatgccctggagaatgcccaggccatcaagaagaagctgggcaagctgggccggcaggtgctgcccccatcagagctccttgaccacctcttcttccactatgagttccagaaccagcgcttctccgctgaggtgctcagctccctgcgtcagctcaacctggcaggtgtgcgcatgacaccagtcaagtgcacagtggtggcagctgtgctgggcagcggaaggcatgccctggatgaggtgaacttggcctcctgccagctagatcctgctgggctgcgcacactcctgcctgtcttcctgcgtgcccggaagctgggcttgcaactcaacagcctgggccctgaggcctgcaaggacctccgagacctgttgctgcatgaccagtgccaaattaccacactgcggctgtccaacaacccgctgacggcggcaggtgttgccgtgctaatggaggggctggcaggaaacacctcagtgacgcacctgtccctgctgcacacgggccttggggacgaaggcctggagctgctggctgcccagctggaccgcaaccggcagctgcaggagctgaacgtggcgtacaacggtgctggtgacacagcggccctggccctggccagagctgcccgggagcacccttccctggaactgctacacctctacttcaatgagctgagctcagagggccgccaggtcttgcgagacttggggggtgctgctgaaggtggtgcccgggtggtggtgtcactgacagaggggacggcggtgtcagaatactggtcagtgatcctcagtgaagtccagcggaacctcaatagctgggatcgggcccgggttcagcgacaccttgagctcctactgcgggatctggaagatagccggggtgccacccttaatccttggcgcaaggcccagctgctgcgagtggagggcgaggtcagggccctcctggagcagctgggaagctctggaagctgagacactggcggcaggcacctagctatgtgaccactggccctaaaccttttccctctgtggcctcctggcttgcactgctccctctagaaagattccttcaggtctggaggcagaggaatgggcatagctgagccagttgccctcctagggcatgtttgaccaggactgagtctggaatctccaagttaaagatggtgaatcaatgcttcgggcttggagatggaacatgcctcctctccattcagctagaaggaccaaagcatgtggcatttggatggccagagtgccctgaagcaccactaccaaccttgcctccccctcctctcaaagagcctctgactgtgtcaccaaggggctcacatcttatgtctgccatgccaggggtgtcgccatccagatgtgttggaagcttcccctcctgccttatgctcacctgtggacaccgaggatgccctcacattggtgctttctcctcatcctcatgccccctttgccacaatggtatgatggcttggtagcccctcgaggcagatgcacctgacttgctgctattaaaaagccgtgtgccttct

SEQ ID NO: 20367 - DNA, 4092 bp, Homo sapiens
  source 1..4092: mol_type = unassigned DNA
cgggacgggtggcgccggggttccagccctgcgcctgctccggagcaccgggcccctctcgctgaccccctcgtcccaggaccccgcaggcccgagtgcctgggctcgtcctctttcgcgcccgctgccaggtgccagggccgcgcaggcgggcggaggtgggcaggaagcgccacgccgaggagccggggactctgggagctagcgggagacgccggcgtccgcccagccgacccctctgggccgcggccgacggctcccggaactgggcagccgcgggtaaaggcctagcgggcttgataacccctgcgccctggctgggaggccgcgctgagcggggggcagggcgggccgggggaggaggctgtgcaagggccgcggggagatcccggccgagaacgagagggacggagctgggcgctgaatggcgggcgttctggcaagtctccccctgcgttcccgaggccacccgaaagtaggagagctgtttgggacccagtttggtggaggagctctggacctgtaggaacaccgcccctgacagaagtcggtcctaggccccccaggctctgaccttctttcccaggatgaggtggggccaccatttgcccagggcctcttggggctctggttttagaagagcactccagcgaccagatgatcgtatccccttcctgatccactggagttggccccttcaaggggagcgtccctttgggccccctagggcctttatacgccaccacggaagctcggtagatagcgctcccccacccgggaggcatggacggctgttccccagcgcctctgcaactgaagctatacagcggcaccgccggaacctggctgagtggttcagccggctgcccagggaggagcgccagtttggcccaacctttgccctagacacggtccacgttgaccctgtgatccgcgagagtacccctgatgagctacttcgcccacccgcggagctggccctggagcatcagccaccccaggccgggctccccccactggccttgtctcagctctttaacccggatgcctgtgggcgccgggtgcagacagtggtgctgtatgggacagtgggcacaggcaagagcacgctggtgcgcaagatggttctggactggtgttatgggcggctgccggccttcgagctgctcatccccttctcctgtgaggacctgtcatccctgggccctgccccagcctccctgtgccaacttgtggcccagcgctacacgcccctgaaggaggttctgcccctgatggctgctgctgggtcccacctcctctttgtgctccatggcttagagcatctcaacctcgacttccggctggcaggcacgggactttgtagtgacccggaggaaccgcaggaaccagctgctatcatcgtcaacctgctgcgcaaatacatgctgcctcaggccagcattctggtgaccactcggccctctgccattggccgtatccccagcaagtacgtgggccgctatggtgagatctgcggtttctctgataccaacctgcagaagctctacttccagctccgcctcaaccagccgtactgcgggtatgccgttggcggttcaggtgtctctgccacaccagctcagcgtgaccacctggtgcagatgctctcccggaacctggaggggcaccaccagatagccgctgcctgcttcctgccgtcctattgctggctcgtttgtgccaccttgcacttcctgcatgcccccacgcctgctgggcagacccttacaagcatctataccagcttcctgcgcctcaacttcagcggggaaaccctggacagcactgacccctccaatttgtccctgatggcctatgcagcccgaaccatgggcaagttggcctatgagggggtgtcctcccgcaagacctacttctctgaagaggatgtctgtggctgcctggaggctggcatcaggacggaggaggagtttcagctgctgcacatcttccgtcgggatgccctgaggtttttcctggccccatgtgtggagccagggcgtgcaggcaccttcgtgttcaccgtgcccgccatgcaggaatacctggctgccctctacattgtgctgggtttgcgcaagacgaccctgcaaaaggtgggcaaggaagtggctgagctcgtgggccgtgttggggaggacgtcagcctggtactgggcatcatggccaagctgctgcctctgcgggctctgcctctgctcttcaacctgatcaaggtggttccacgagtgtttgggcgcatggtgggtaaaagccgggaggcggtggctcaggccatggtgctggagatgtttcgagaggaggactactacaacgatgatgttctggaccagatgggcgccagtatcctgggcgtggagggcccccggcgccacccagatgagccccctgaggatgaagtcttcgagctcttccccatgttcatgggggggcttctctctgcccacaaccgagctgtgctagctcagcttggctgccccatcaagaacctggatgccctggagaatgcccaggccatcaagaagaagctgggcaagctgggccggcaggtgctgcccccatcagagctccttgaccacctcttcttccactatgagttccagaaccagcgcttctccgctgaggtgctcagctccctgcgtcagctcaacctggcaggtgtgcgcatgacaccagtcaagtgcacagtggtggcagctgtgctgggcagcggaaggcatgccctggatgaggtgaacttggcctcctgccagctagatcctgctgggctgcgcacactcctgcctgtcttcctgcgtgcccggaagctgggcttgcaactcaacagcctgggccctgaggcctgcaaggacctccgagacctgttgctgcatgaccagtgccaaattaccacactgcggctgtccaacaacccgctgacggcggcaggtgttgccgtgctaatggaggggctggcaggaaacacctcagtgacgcacctgtccctgctgcacacgggccttggggacgaaggcctggagctgctggctgcccagctggaccgcaaccggcagctgcaggagctgaacgtggcgtacaacggtgctggtgacacagcggccctggccctggccagagctgcccgggagcacccttccctggaactgctacacctctacttcaatgagctgagctcagagggccgccaggtcttgcgagacttggggggtgctgctgaaggtggtgcccgggtggtggtgtcactgacagaggggacggcggtgtcagaatactggtcagtgatcctcagtgaagtccagcggaacctcaatagctgggatcgggcccgggttcagcgacaccttgagctcctactgcgggatctggaagatagccggggtgccacccttaatccttggcgcaaggcccagctgctgcgagtggagggcgaggtcagggccctcctggagcagctgggaagctctggaagctgagacactggcggcaggcacctagctatgtgaccactggccctaaaccttttccctctgtggcctcctggcttgcactgctccctctagaaagattccttcaggtctggaggcagaggaatgggcatagctgagccagttgccctcctagggcatgtttgaccaggactgagtctggaatctccaagttaaagatggtgaatcaatgcttcgggcttggagatggaacatgcctcctctccattcagctagaaggaccaaagcatgtggcatttggatggccagagtgccctgaagcaccactaccaaccttgcctccccctcctctcaaagagcctctgactgtgtcaccaaggggctcacatcttatgtctgccatgccaggggtgtcgccatccagatgtgttggaagcttcccctcctgccttatgctcacctgtggacaccgaggatgccctcacattggtgctttctcctcatcctcatgccccctttgccacaatggtatgatggcttggtagcccctcgaggcagatgcacctgacttgctgctattaaaaagccgtgtgccttctaccaa

SEQ ID NO: 20368 - DNA, 3039 bp, Homo sapiens
  source 1..3039: mol_type = unassigned DNA
cgcggggatggaggcagggaggggggacgatggcgggacgggtggcgccggggttccagccctgcgcctgctccggagcaccgggcccctctcgctgaccccctcgtcccaggaccccgcaggcccgagtgcctgggctcgtcctctttcgcgcccgctgccaggtgccagggccgcgcaggcgggcggaggacagaagtcggtcctaggccccccaggctctgaccttctttcccaggatgaggtggggccaccatttgcccagggcctcttggggctctggttttagaagagcactccagcgaccagatgatcgtatccccttcctgatccactggagttggccccttcaaggggagcgtccctttgggccccctagggcctttatacgccaccacggaagctcggtagatagcgctcccccacccgggaggcatggacggctgttccccagcgcctctgcaactgaagctatacagcggcaccgccggaacctggctgagtggttcagccggctgcccagggaggagcgccagtttggcccaacctttgccctagacacggtccacgttgaccctgtgatccgcgagagtacccctgatgagctacttcgcccacccgcggagctggccctggagcatcagccaccccaggccgggctccccccactggccttgtctcagctctttaacccggatgcctgtgggcgccgggtgcagacagtggtgctgtatgggacagtgggcacaggcaagagcacgctggtgcgcaagatggttctggactggtgttatgggcggctgccggccttcgagctgctcatccccttctcctgtgaggacctgtcatccctgggccctgccccagcctccctgtgccaacttgtggcccagcgctacacgcccctgaaggaggttctgcccctgatggctgctgctgggtcccacctcctctttgtgctccatggcttagagcatctcaacctcgacttccggctggcaggcacgggactttgtagtgacccggaggaaccgcaggaaccagctgctatcatcgtcaacctgctgcgcaaatacatgctgcctcaggccagcattctggtgaccactcggccctctgccattggccgtatccccagcaagtacgtgggccgctatggtgagatctgcggtttctctgataccaacctgcagaagctctacttccagctccgcctcaaccagccgtactgcgggtatgccgttggcggttcaggtgtctctgccacaccagctcagcgtgaccacctggtgcagatgctctcccggaacctggaggggcaccaccagatagccgctgcctgcttcctgccgtcctattgctggctcgtttgtgccaccttgcacttcctgcatgcccccacgcctgctgggcagacccttacaagcatctataccagcttcctgcgcctcaacttcagcggggaaaccctggacagcactgacccctccaatttgtccctgatggcctatgcagcccgaaccatgggcaagttggcctatgagggggtgtcctcccgcaagacctacttctctgaagaggatgtctgtggctgcctggaggctggcatcaggacggaggaggagtttcagctgctgcacatcttccgtcgggatgccctgaggtttttcctggccccatgtgtggagccagggcgtgcaggcaccttcgtgttcaccgtgcccgccatgcaggaatacctggctgccctctacattgtgctgggtttgcgcaagacgaccctgcaaaaggtgggcaaggaagtggctgagctcgtgggccgtgttggggaggacgtcagcctggtactgggcatcatggccaagctgctgcctctgcgggctctgcctctgctcttcaacctgatcaaggtggttccacgagtgtttgggcgcatggtgggtaaaagccgggaggcggtggctcaggccatggtgctggagatgtttcgagaggaggactactacaacgatgatgttctggaccagatgggcgccagtatcctgggcgtggagggcccccggcgccacccagatgagccccctgaggatgaagtcttcgagctcttccccatgttcatgggggggcttctctctgcccacaaccgagctgtgctagctcagcttggctgccccatcaagaacctggatgccctggagaatgcccaggccatcaagaagaagctgggcaagctgggccggcaggtgctgcccccatcagagctccttgaccacctcttcttccactatgagttccagaaccagcgcttctccgctgaggtgctcagctccctgcgtcagctcaacctggcaggtgtgcgcatgacaccagtcaagtgcacagtggtggcagctgtgctgggcagcggaaggcatgccctggatgaggtgaacttggcctcctgccagctagatcctgctgggctgcgcacactcctgcctgtcttcctgcgtgcccggaagctgggcttgcaactcaacagcctgggccctgaggcctgcaaggacctccgagacctgttgctgcatgaccagtgccaaattaccacactgcggctgtccaacaacccgctgacggcggcaggtgttgccgtgctaatggaggggctggcaggaaacacctcagtgacgcacctgtccctgctgcacacgggccttggggacgaaggcctggagctgctggctgcccagctggaccgcaaccggcagctgcaggagctgaacgtggcgtacaacggtgctggtgacacagcggccctggccctggccagagctgcccgggagcacccttccctggaactgctacagggtgtcgccatccagatgtgttggaagcttcccctcctgccttatgctcacctgtggacaccgaggatgccctcacattggtgctttctcctcatcctcatgccccctttgccacaatggtatgatggcttggtagcccctcgaggcagatgcacctgacttgctgctattaaaaagccgtgtgccttctacc

SEQ ID NO: 20369 - DNA, 3716 bp, Homo sapiens
  source 1..3716: mol_type = unassigned DNA
gcccgcggggatggaggcagggaggggggacgatggcgggacgggtggcgccggggttccagccctgcgcctgctccggagcaccgggcccctctcgctgaccccctcgtcccaggaccccgcaggcccgagtgcctgggctcgtcctctttcgcgcccgctgccaggacagaagtcggtcctaggccccccaggctctgaccttctttcccaggatgaggtggggccaccatttgcccagggcctcttggggctctggttttagaagagcactccagcgaccagatgatcgtatccccttcctgatccactggagttggccccttcaaggggagcgtccctttgggccccctagggcctttatacgccaccacggaagctcggtagatagcgctcccccacccgggaggcatggacggctgttccccagcgcctctgcaactgaagctatacagcggcaccgccggaacctggctgagtggttcagccggctgcccagggaggagcgccagtttggcccaacctttgccctagacacggtccacgttgaccctgtgatccgcgagagtacccctgatgagctacttcgcccacccgcggagctggccctggagcatcagccaccccaggccgggctccccccactggccttgtctcagctctttaacccggatgcctgtgggcgccgggtgcagacagtggtgctgtatgggacagtgggcacaggcaagagcacgctggtgcgcaagatggttctggactggtgttatgggcggctgccggccttcgagctgctcatccccttctcctgtgaggacctgtcatccctgggccctgccccagcctccctgtgccaacttgtggcccagcgctacacgcccctgaaggaggttctgcccctgatggctgctgctgggtcccacctcctctttgtgctccatggcttagagcatctcaacctcgacttccggctggcaggcacgggactttgtagtgacccggaggaaccgcaggaaccagctgctatcatcgtcaacctgctgcgcaaatacatgctgcctcaggccagcattctggtgaccactcggccctctgccattggccgtatccccagcaagtacgtgggccgctatggtgagatctgcggtttctctgataccaacctgcagaagctctacttccagctccgcctcaaccagccgtactgcgggtatgccgttggcggttcaggtgtctctgccacaccagctcagcgtgaccacctggtgcagatgctctcccggaacctggaggggcaccaccagatagccgctgcctgcttcctgccgtcctattgctggctcgtttgtgccaccttgcacttcctgcatgcccccacgcctgctgggcagacccttacaagcatctataccagcttcctgcgcctcaacttcagcggggaaaccctggacagcactgacccctccaatttgtccctgatggcctatgcagcccgaaccatgggcaagttggcctatgagggggtgtcctcccgcaagacctacttctctgaagaggatgtctgtggctgcctggaggctggcatcaggacggaggaggagtttcagctgctgcacatcttccgtcgggatgccctgaggtttttcctggccccatgtgtggagccagggcgtgcaggcaccttcgtgttcaccgtgcccgccatgcaggaatacctggctgccctctacattgtgctgggtttgcgcaagacgaccctgcaaaaggtgggcaaggaagtggctgagctcgtgggccgtgttggggaggacgtcagcctggtactgggcatcatggccaagctgctgcctctgcgggctctgcctctgctcttcaacctgatcaaggtggttccacgagtgtttgggcgcatggtgggtaaaagccgggaggcggtggctcaggccatggtgctggagatgtttcgagaggaggactactacaacgatgatgttctggaccagatgggcgccagtatcctgggcgtggagggcccccggcgccacccagatgagccccctgaggatgaagtcttcgagctcttccccatgttcatgggggggcttctctctgcccacaaccgagctgtgctagctcagcttggctgccccatcaagaacctggatgccctggagaatgcccaggccatcaagaagaagctgggcaagctgggccggcaggtgctgcccccatcagagctccttgaccacctcttcttccactatgagttccagaaccagcgcttctccgctgaggtgctcagctccctgcgtcagctcaacctggcaggtgtgcgcatgacaccagtcaagtgcacagtggtggcagctgtgctgggcagcggaaggcatgccctggatgaggtgaacttggcctcctgccagctagatcctgctgggctgcgcacactcctgcctgtcttcctgcgtgcccggaagctgggcttgcaactcaacagcctgggccctgaggcctgcaaggacctccgagacctgttgctgcatgaccagtgccaaattaccacactgcggctgtccaacaacccgctgacggcggcaggtgttgccgtgctaatggaggggctggcaggaaacacctcagtgacgcacctgtccctgctgcacacgggccttggggacgaaggcctggagctgctggctgcccagctggaccgcaaccggcagctgcaggagctgaacgtggcgtacaacggtgctggtgacacagcggccctggccctggccagagctgcccgggagcacccttccctggaactgctacacctctacttcaatgagctgagctcagagggccgccaggtcttgcgagacttggggggtgctgctgaaggtggtgcccgggtggtggtgtcactgacagaggggacggcggtgtcagaatactggtcagtgatcctcagtgaagtccagcggaacctcaatagctgggatcgggcccgggttcagcgacaccttgagctcctactgcgggatctggaagatagccggggtgccacccttaatccttggcgcaaggcccagctgctgcgagtggagggcgaggtcagggccctcctggagcagctgggaagctctggaagctgagacactggcggcaggcacctagctatgtgaccactggccctaaaccttttccctctgtggcctcctggcttgcactgctccctctagaaagattccttcaggtctggaggcagaggaatgggcatagctgagccagttgccctcctagggcatgtttgaccaggactgagtctggaatctccaagttaaagatggtgaatcaatgcttcgggcttggagatggaacatgcctcctctccattcagctagaaggaccaaagcatgtggcatttggatggccagagtgccctgaagcaccactaccaaccttgcctccccctcctctcaaagagcctctgactgtgtcaccaaggggctcacatcttatgtctgccatgccaggggtgtcgccatccagatgtgttggaagcttcccctcctgccttatgctcacctgtggacaccgaggatgccctcacattggtgctttctcctcatcctcatgccccctttgccacaatggtatgatggcttggtagcccctcgaggcagatgcacctgacttgctgctattaaaaagccgtgtgccttcta

SEQ ID NO: 20370 - DNA, 2850 bp, Homo sapiens
  source 1..2850: mol_type = unassigned DNA
gacagaagtcggtcctaggccccccaggctctgaccttctttcccaggatgaggtggggccaccatttgcccagggcctcttggggctctggttttagaagagcactccagcgaccagatgatcgtatccccttcctgatccactggagttggccccttcaaggggagcgtccctttgggccccctagggcctttatacgccaccacggaagctcggtagatagcgctcccccacccgggaggcatggacggctgttccccagcgcctctgcaactgaagctatacagcggcaccgccggaacctggctgagtggttcagccggctgcccagggaggagcgccagtttggcccaacctttgccctagacacggtccacgttgaccctgtgatccgcgagagtacccctgatgagctacttcgcccacccgcggagctggccctggagcatcagccaccccaggccgggctccccccactggccttgtctcagctctttaacccggatgcctgtgggcgccgggtgcagacagtggtgctgtatgggacagtgggcacaggcaagagcacgctggtgcgcaagatggttctggactggtgttatgggcggctgccggccttcgagctgctcatccccttctcctgtgaggacctgtcatccctgggccctgccccagcctccctgtgccaacttgtggcccagcgctacacgcccctgaaggaggttctgcccctgatggctgctgctgggtcccacctcctctttgtgctccatggcttagagcatctcaacctcgacttccggctggcaggcacgggactttgtagtgacccggaggaaccgcaggaaccagctgctatcatcgtcaacctgctgcgcaaatacatgctgcctcaggccagcattctggtgaccactcggccctctgccattggccgtatccccagcaagtacgtgggccgctatggtgagatctgcggtttctctgataccaacctgcagaagctctacttccagctccgcctcaaccagccgtactgcgggtatgccgttggcggttcaggtgtctctgccacaccagctcagcgtgaccacctggtgcagatgctctcccggaacctggaggggcaccaccagatagccgctgcctgcttcctgccgtcctattgctggctcgtttgtgccaccttgcacttcctgcatgcccccacgcctgctgggcagacccttacaagcatctataccagcttcctgcgcctcaacttcagcggggaaaccctggacagcactgacccctccaatttgtccctgatggcctatgcagcccgaaccatgggcaagttggcctatgagggggtgtcctcccgcaagacctacttctctgaagaggatgtctgtggctgcctggaggctggcatcaggacggaggaggagtttcagctgctgcacatcttccgtcgggatgccctgaggtttttcctggccccatgtgtggagccagggcgtgcaggcaccttcgtgttcaccgtgcccgccatgcaggaatacctggctgccctctacattgtgctgggtttgcgcaagacgaccctgcaaaaggtgggcaaggaagtggctgagctcgtgggccgtgttggggaggacgtcagcctggtactgggcatcatggccaagctgctgcctctgcgggctctgcctctgctcttcaacctgatcaaggtggttccacgagtgtttgggcgcatggtgggtaaaagccgggaggcggtggctcaggccatggtgctggagatgtttcgagaggaggactactacaacgatgatgttctggaccagatgggcgccagtatcctgggcgtggagggcccccggcgccacccagatgagccccctgaggatgaagtcttcgagctcttccccatgttcatgggggggcttctctctgcccacaaccgagctgtgctagctcagcttggctgccccatcaagaacctggatgccctggagaatgcccaggccatcaagaagaagctgggcaagctgggccggcaggtgctgcccccatcagagctccttgaccacctcttcttccactatgagttccagaaccagcgcttctccgctgaggtgctcagctccctgcgtcagctcaacctggcaggtgtgcgcatgacaccagtcaagtgcacagtggtggcagctgtgctgggcagcggaaggcatgccctggatgaggtgaacttggcctcctgccagctagatcctgctgggctgcgcacactcctgcctgtcttcctgcgtgcccggaagctgggcttgcaactcaacagcctgggccctgaggcctgcaaggacctccgagacctgttgctgcatgaccagtgccaaattaccacactgcggctgtccaacaacccgctgacggcggcaggtgttgccgtgctaatggaggggctggcaggaaacacctcagtgacgcacctgtccctgctgcacacgggccttggggacgaaggcctggagctgctggctgcccagctggaccgcaaccggcagctgcaggagctgaacgtggcgtacaacggtgctggtgacacagcggccctggccctggccagagctgcccgggagcacccttccctggaactgctacagggtgtcgccatccagatgtgttggaagcttcccctcctgccttatgctcacctgtggacaccgaggatgccctcacattggtgctttctcctcatcctcatgccccctttgccacaatggtatgatggcttggtagcccctcgaggcagatgcacctgacttgctgctattaaaaagccgtgtgccttctaccaa

SEQ ID NO: 20371 - DNA, 4170 bp, Homo sapiens
  source 1..4170: mol_type = unassigned DNA
gtagatgaggaaactgaagttgaggaatagtgaagagtttgtccaatgtcatagccccgtaatcaacgggacaaaaattttcttgctgatgggtcaagatggcatcgtgaagtggttgttcaccgtaaactgtaatacaatcctgtttatggatttgtttgcatatttttccctccatagggaaacctttcttccatggctcaggacacactcctggatcgagccaacaggagaactttctggtaagcatttggctaacttttttttttttgagatggagtcttgctgtgtcgcctaggctggagtgcagtggcgtgatcttggctcactgcagcctccacttcccgggttcaatcaattctcctacctcaacttcctgagtagctgggattacaggcgcccgccaccacacccggctcatttttgtacttttagtagagacacagttttgccatgttggccaggctggtcttgaattcctcagctcaggtgatctgcctgccttggcctctcaaagtgctgggattacaggcgtgagccactgtgcccggccttggctaacttttcaaaattaaagattttgacttgttacagtcatgtgacatttttttctttctgtttgctgagtttttgataatttatatctctcaaagtggagactttaaaaaagactcatccgtgtgccgtgttcactgcctggtatcttagtgtggaccgaagcctaaggaccctgaaaacagctgcagatgaagatggcaagcacccgctgcaagctggccaggtacctggaggacctggaggatgtggacttgaagaaatttaagatgcacttagaggactatcctccccagaagggctgcatccccctcccgaggggtcagacagagaaggcagaccatgtggatctagccacgctaatgatcgacttcaatggggaggagaaggcgtgggccatggccgtgtggatcttcgctgcgatcaacaggagagacctttatgagaaagcaaaaagagatgagccgaagtggggttcagataatgcacgtgtttcgaatcccactgtgatatgccaggaagacagcattgaagaggagtggatgggtttactggagtacctttcgagaatctctatttgtaaaatgaagaaagattaccgtaagaagtacagaaagtacgtgagaagcagattccagtgcattgaagacaggaatgcccgtctgggtgagagtgtgagcctcaacaaacgctacacacgactgcgtctcatcaaggagcaccggagccagcaggagagggagcaggagcttctggccatcggcaagaccaagacgtgtgagagccccgtgagtcccattaagatggagttgctgtttgaccccgatgatgagcattctgagcctgtgcacaccgtggtgttccagggggcggcagggattgggaaaacaatcctggccaggaagatgatgttggactgggcgtcggggacactctaccaagacaggtttgactatctgttctatatccactgtcgagaggtgagccttgtgacacagaggagcctgggggacctgatcatgagctgctgccccgacccaaacccacccatccacaagatcgtgagaaaaccctccagaatcctcttcctcatggacggcttcgatgagctgcaaggtgcctttgacgagcacataggaccgctctgcactgactggcagaaggccgagcggggagacattctcctgagcagcctcatcagaaagaagctgcttcccgaggcctctctgctcatcaccacgagacctgtggccctggagaaactgcagcacttgctggaccatcctcggcatgtggagatcctgggtttctccgaggccaaaaggaaagagtacttcttcaagtacttctctgatgaggcccaagccagggcagccttcagtctgattcaggagaacgaggtcctcttcaccatgtgcttcatccccctggtctgctggatcgtgtgcactggactgaaacagcagatggagagtggcaagagccttgcccagacatccaagaccaccaccgcggtgtacgtcttcttcctttccagtttgctgcagccccggggagggagccaggagcacggcctctgcgcccacctctgggggctctgctctttggctgcagatggaatctggaaccagaaaatcctgtttgaggagtccgacctcaggaatcatggactgcagaaggcggatgtgtctgctttcctgaggatgaacctgttccaaaaggaagtggactgcgagaagttctacagcttcatccacatgactttccaggagttctttgccgccatgtactacctgctggaagaggaaaaggaaggaaggacgaacgttccagggagtcgtttgaagcttcccagccgagacgtgacagtccttctggaaaactatggcaaattcgaaaaggggtatttgatttttgttgtacgtttcctctttggcctggtaaaccaggagaggacctcctacttggagaagaaattaagttgcaagatctctcagcaaatcaggctggagctgctgaaatggattgaagtgaaagccaaagctaaaaagctgcagatccagcccagccagctggaattgttctactgtttgtacgagatgcaggaggaggacttcgtgcaaagggccatggactatttccccaagattgagatcaatctctccaccagaatggaccacatggtttcttccttttgcattgagaactgtcatcgggtggagtcactgtccctggggtttctccataacatgcccaaggaggaagaggaggaggaaaaggaaggccgacaccttgatatggtgcagtgtgtcctcccaagctcctctcatgctgcctgttctcatggattggtgaacagccacctcacttccagtttttgccggggcctcttttcagttctgagcaccagccagagtctaactgaattggacctcagtgacaattctctgggggacccagggatgagagtgttgtgtgaaacgctccagcatcctggctgtaacattcggagattgtggttggggcgctgtggcctctcgcatgagtgctgcttcgacatctccttggtcctcagcagcaaccagaagctggtggagctggacctgagtgacaacgccctcggtgacttcggaatcagacttctgtgtgtgggactgaagcacctgttgtgcaatctgaagaagctctggttggtcagctgctgcctcacatcagcatgttgtcaggatcttgcatcagtattgagcaccagccattccctgaccagactctatgtgggggagaatgccttgggagactcaggagtcgcaattttatgtgaaaaagccaagaatccacagtgtaacctgcagaaactggggttggtgaattctggccttacgtcagtctgttgttcagctttgtcctcggtactcagcactaatcagaatctcacgcacctttacctgcgaggcaacactctcggagacaaggggatcaaactactctgtgagggactcttgcaccccgactgcaagcttcaggtgttggaattagacaactgcaacctcacgtcacactgctgctgggatctttccacacttctgacctccagccagagcctgcgaaagctgagcctgggcaacaatgacctgggcgacctgggggtcatgatgttctgtgaagtgctgaaacagcagagctgcctcctgcagaacctggggttgtctgaaatgtatttcaattatgagacaaaaagtgcgttagaaacacttcaagaagaaaagcctgagctgaccgtcgtctttgagccttcttggtaggagtggaaacggggctgccagacgccagtgttctccggtccctccagctgggggccctcaggtggagagagctgcgatccatccaggccaagaccacagctctgtgatccttccggtggagtgtcggagaagagagcttgccgacgatgccttcctgtgcagagcttgggcatctcctttacgccagggtgaggaagacaccaggacaatgacagcatcgggtgttgttgtcatcacagcgcctcagttagaggatgttcctcttggtgacctcatgtaattagctcattcaataaagcactttctttatttt

SEQ ID NO: 20372 - DNA, 3828 bp, Homo sapiens
  source 1..3828: mol_type = unassigned DNA
gtagatgaggaaactgaagttgaggaatagtgaagagtttgtccaatgtcatagccccgtaatcaacgggacaaaaattttcttgctgatgggtcaagatggcatcgtgaagtggttgttcaccgtaaactgtaatacaatcctgtttatggatttgtttgcatatttttccctccatagggaaacctttcttccatggctcaggacacactcctggatcgagccaacaggagaactttctggtaagcatttggctaacttttttttttttgagatggagtcttgctgtgtcgcctaggctggagtgcagtggcgtgatcttggctcactgcagcctccacttcccgggttcaatcaattctcctacctcaacttcctgagtagctgggattacaggcgcccgccaccacacccggctcatttttgtacttttagtagagacacagttttgccatgttggccaggctggtcttgaattcctcagctcaggtgatctgcctgccttggcctctcaaagtgctgggattacaggcgtgagccactgtgcccggccttggctaacttttcaaaattaaagattttgacttgttacagtcatgtgacatttttttctttctgtttgctgagtttttgataatttatatctctcaaagtggagactttaaaaaagactcatccgtgtgccgtgttcactgcctggtatcttagtgtggaccgaagcctaaggaccctgaaaacagctgcagatgaagatggcaagcacccgctgcaagctggccaggtacctggaggacctggaggatgtggacttgaagaaatttaagatgcacttagaggactatcctccccagaagggctgcatccccctcccgaggggtcagacagagaaggcagaccatgtggatctagccacgctaatgatcgacttcaatggggaggagaaggcgtgggccatggccgtgtggatcttcgctgcgatcaacaggagagacctttatgagaaagcaaaaagagatgagccgaagtggggttcagataatgcacgtgtttcgaatcccactgtgatatgccaggaagacagcattgaagaggagtggatgggtttactggagtacctttcgagaatctctatttgtaaaatgaagaaagattaccgtaagaagtacagaaagtacgtgagaagcagattccagtgcattgaagacaggaatgcccgtctgggtgagagtgtgagcctcaacaaacgctacacacgactgcgtctcatcaaggagcaccggagccagcaggagagggagcaggagcttctggccatcggcaagaccaagacgtgtgagagccccgtgagtcccattaagatggagttgctgtttgaccccgatgatgagcattctgagcctgtgcacaccgtggtgttccagggggcggcagggattgggaaaacaatcctggccaggaagatgatgttggactgggcgtcggggacactctaccaagacaggtttgactatctgttctatatccactgtcgagaggtgagccttgtgacacagaggagcctgggggacctgatcatgagctgctgccccgacccaaacccacccatccacaagatcgtgagaaaaccctccagaatcctcttcctcatggacggcttcgatgagctgcaaggtgcctttgacgagcacataggaccgctctgcactgactggcagaaggccgagcggggagacattctcctgagcagcctcatcagaaagaagctgcttcccgaggcctctctgctcatcaccacgagacctgtggccctggagaaactgcagcacttgctggaccatcctcggcatgtggagatcctgggtttctccgaggccaaaaggaaagagtacttcttcaagtacttctctgatgaggcccaagccagggcagccttcagtctgattcaggagaacgaggtcctcttcaccatgtgcttcatccccctggtctgctggatcgtgtgcactggactgaaacagcagatggagagtggcaagagccttgcccagacatccaagaccaccaccgcggtgtacgtcttcttcctttccagtttgctgcagccccggggagggagccaggagcacggcctctgcgcccacctctgggggctctgctctttggctgcagatggaatctggaaccagaaaatcctgtttgaggagtccgacctcaggaatcatggactgcagaaggcggatgtgtctgctttcctgaggatgaacctgttccaaaaggaagtggactgcgagaagttctacagcttcatccacatgactttccaggagttctttgccgccatgtactacctgctggaagaggaaaaggaaggaaggacgaacgttccagggagtcgtttgaagcttcccagccgagacgtgacagtccttctggaaaactatggcaaattcgaaaaggggtatttgatttttgttgtacgtttcctctttggcctggtaaaccaggagaggacctcctacttggagaagaaattaagttgcaagatctctcagcaaatcaggctggagctgctgaaatggattgaagtgaaagccaaagctaaaaagctgcagatccagcccagccagctggaattgttctactgtttgtacgagatgcaggaggaggacttcgtgcaaagggccatggactatttccccaagattgagatcaatctctccaccagaatggaccacatggtttcttccttttgcattgagaactgtcatcgggtggagtcactgtccctggggtttctccataacatgcccaaggaggaagaggaggaggaaaaggaaggccgacaccttgatatggtgcagtgtgtcctcccaagctcctctcatgctgcctgttctcatgggttggggcgctgtggcctctcgcatgagtgctgcttcgacatctccttggtcctcagcagcaaccagaagctggtggagctggacctgagtgacaacgccctcggtgacttcggaatcagacttctgtgtgtgggactgaagcacctgttgtgcaatctgaagaagctctggttggtgaattctggccttacgtcagtctgttgttcagctttgtcctcggtactcagcactaatcagaatctcacgcacctttacctgcgaggcaacactctcggagacaaggggatcaaactactctgtgagggactcttgcaccccgactgcaagcttcaggtgttggaattagacaactgcaacctcacgtcacactgctgctgggatctttccacacttctgacctccagccagagcctgcgaaagctgagcctgggcaacaatgacctgggcgacctgggggtcatgatgttctgtgaagtgctgaaacagcagagctgcctcctgcagaacctggggttgtctgaaatgtatttcaattatgagacaaaaagtgcgttagaaacacttcaagaagaaaagcctgagctgaccgtcgtctttgagccttcttggtaggagtggaaacggggctgccagacgccagtgttctccggtccctccagctgggggccctcaggtggagagagctgcgatccatccaggccaagaccacagctctgtgatccttccggtggagtgtcggagaagagagcttgccgacgatgccttcctgtgcagagcttgggcatctcctttacgccagggtgaggaagacaccaggacaatgacagcatcgggtgttgttgtcatcacagcgcctcagttagaggatgttcctcttggtgacctcatgtaattagctcattcaataaagcactttctttatttt

SEQ ID NO: 20373 - DNA, 3996 bp, Homo sapiens
  source 1..3996: mol_type = unassigned DNA
gatgaggaaactgaagttgaggaatagtgaagagtttgtccaatgtcatagccccgtaatcaacgggacaaaaattttcttgctgatgggtcaagatggcatcgtgaagtggttgttcaccgtaaactgtaatacaatcctgtttatggatttgtttgcatatttttccctccatagggaaacctttcttccatggctcaggacacactcctggatcgagccaacaggagaactttctggtaagcatttggctaacttttttttttttgagatggagtcttgctgtgtcgcctaggctggagtgcagtggcgtgatcttggctcactgcagcctccacttcccgggttcaatcaattctcctacctcaacttcctgagtagctgggattacaggcgcccgccaccacacccggctcatttttgtacttttagtagagacacagttttgccatgttggccaggctggtcttgaattcctcagctcaggtgatctgcctgccttggcctctcaaagtgctgggattacaggcgtgagccactgtgcccggccttggctaacttttcaaaattaaagattttgacttgttacagtcatgtgacatttttttctttctgtttgctgagtttttgataatttatatctctcaaagtggagactttaaaaaagactcatccgtgtgccgtgttcactgcctggtatcttagtgtggaccgaagcctaaggaccctgaaaacagctgcagatgaagatggcaagcacccgctgcaagctggccaggtacctggaggacctggaggatgtggacttgaagaaatttaagatgcacttagaggactatcctccccagaagggctgcatccccctcccgaggggtcagacagagaaggcagaccatgtggatctagccacgctaatgatcgacttcaatggggaggagaaggcgtgggccatggccgtgtggatcttcgctgcgatcaacaggagagacctttatgagaaagcaaaaagagatgagccgaagtggggttcagataatgcacgtgtttcgaatcccactgtgatatgccaggaagacagcattgaagaggagtggatgggtttactggagtacctttcgagaatctctatttgtaaaatgaagaaagattaccgtaagaagtacagaaagtacgtgagaagcagattccagtgcattgaagacaggaatgcccgtctgggtgagagtgtgagcctcaacaaacgctacacacgactgcgtctcatcaaggagcaccggagccagcaggagagggagcaggagcttctggccatcggcaagaccaagacgtgtgagagccccgtgagtcccattaagatggagttgctgtttgaccccgatgatgagcattctgagcctgtgcacaccgtggtgttccagggggcggcagggattgggaaaacaatcctggccaggaagatgatgttggactgggcgtcggggacactctaccaagacaggtttgactatctgttctatatccactgtcgagaggtgagccttgtgacacagaggagcctgggggacctgatcatgagctgctgccccgacccaaacccacccatccacaagatcgtgagaaaaccctccagaatcctcttcctcatggacggcttcgatgagctgcaaggtgcctttgacgagcacataggaccgctctgcactgactggcagaaggccgagcggggagacattctcctgagcagcctcatcagaaagaagctgcttcccgaggcctctctgctcatcaccacgagacctgtggccctggagaaactgcagcacttgctggaccatcctcggcatgtggagatcctgggtttctccgaggccaaaaggaaagagtacttcttcaagtacttctctgatgaggcccaagccagggcagccttcagtctgattcaggagaacgaggtcctcttcaccatgtgcttcatccccctggtctgctggatcgtgtgcactggactgaaacagcagatggagagtggcaagagccttgcccagacatccaagaccaccaccgcggtgtacgtcttcttcctttccagtttgctgcagccccggggagggagccaggagcacggcctctgcgcccacctctgggggctctgctctttggctgcagatggaatctggaaccagaaaatcctgtttgaggagtccgacctcaggaatcatggactgcagaaggcggatgtgtctgctttcctgaggatgaacctgttccaaaaggaagtggactgcgagaagttctacagcttcatccacatgactttccaggagttctttgccgccatgtactacctgctggaagaggaaaaggaaggaaggacgaacgttccagggagtcgtttgaagcttcccagccgagacgtgacagtccttctggaaaactatggcaaattcgaaaaggggtatttgatttttgttgtacgtttcctctttggcctggtaaaccaggagaggacctcctacttggagaagaaattaagttgcaagatctctcagcaaatcaggctggagctgctgaaatggattgaagtgaaagccaaagctaaaaagctgcagatccagcccagccagctggaattgttctactgtttgtacgagatgcaggaggaggacttcgtgcaaagggccatggactatttccccaagattgagatcaatctctccaccagaatggaccacatggtttcttccttttgcattgagaactgtcatcgggtggagtcactgtccctggggtttctccataacatgcccaaggaggaagaggaggaggaaaaggaaggccgacaccttgatatggtgcagtgtgtcctcccaagctcctctcatgctgcctgttctcatggattggtgaacagccacctcacttccagtttttgccggggcctcttttcagttctgagcaccagccagagtctaactgaattggacctcagtgacaattctctgggggacccagggatgagagtgttgtgtgaaacgctccagcatcctggctgtaacattcggagattgtggttggggcgctgtggcctctcgcatgagtgctgcttcgacatctccttggtcctcagcagcaaccagaagctggtggagctggacctgagtgacaacgccctcggtgacttcggaatcagacttctgtgtgtgggactgaagcacctgttgtgcaatctgaagaagctctggttggtgaattctggccttacgtcagtctgttgttcagctttgtcctcggtactcagcactaatcagaatctcacgcacctttacctgcgaggcaacactctcggagacaaggggatcaaactactctgtgagggactcttgcaccccgactgcaagcttcaggtgttggaattagacaactgcaacctcacgtcacactgctgctgggatctttccacacttctgacctccagccagagcctgcgaaagctgagcctgggcaacaatgacctgggcgacctgggggtcatgatgttctgtgaagtgctgaaacagcagagctgcctcctgcagaacctggggttgtctgaaatgtatttcaattatgagacaaaaagtgcgttagaaacacttcaagaagaaaagcctgagctgaccgtcgtctttgagccttcttggtaggagtggaaacggggctgccagacgccagtgttctccggtccctccagctgggggccctcaggtggagagagctgcgatccatccaggccaagaccacagctctgtgatccttccggtggagtgtcggagaagagagcttgccgacgatgccttcctgtgcagagcttgggcatctcctttacgccagggtgaggaagacaccaggacaatgacagcatcgggtgttgttgtcatcacagcgcctcagttagaggatgttcctcttggtgacctcatgtaattagctcattcaataaagcactttctttatttt

SEQ ID NO: 20374 - DNA, 4318 bp, Homo sapiens
  source 1..4318: mol_type = unassigned DNA
gcatttcctctctagctgttcctgaggctggcatctggatgaggaaactgaagttgaggaatagtgaagagtttgtccaatgtcatagccccgtaatcaacgggacaaaaattttcttgctgatgggtcaagatggcatcgtgaagtggttgttcaccgtaaactgtaatacaatcctgtttatggatttgtttgcatatttttccctccatagggaaacctttcttccatggctcaggacacactcctggatcgagccaacaggagaactttctggtaagcatttggctaacttttttttttttgagatggagtcttgctgtgtcgcctaggctggagtgcagtggcgtgatcttggctcactgcagcctccacttcccgggttcaatcaattctcctacctcaacttcctgagtagctgggattacaggcgcccgccaccacacccggctcatttttgtacttttagtagagacacagttttgccatgttggccaggctggtcttgaattcctcagctcaggtgatctgcctgccttggcctctcaaagtgctgggattacaggcgtgagccactgtgcccggccttggctaacttttcaaaattaaagattttgacttgttacagtcatgtgacatttttttctttctgtttgctgagtttttgataatttatatctctcaaagtggagactttaaaaaagactcatccgtgtgccgtgttcactgcctggtatcttagtgtggaccgaagcctaaggaccctgaaaacagctgcagatgaagatggcaagcacccgctgcaagctggccaggtacctggaggacctggaggatgtggacttgaagaaatttaagatgcacttagaggactatcctccccagaagggctgcatccccctcccgaggggtcagacagagaaggcagaccatgtggatctagccacgctaatgatcgacttcaatggggaggagaaggcgtgggccatggccgtgtggatcttcgctgcgatcaacaggagagacctttatgagaaagcaaaaagagatgagccgaagtggggttcagataatgcacgtgtttcgaatcccactgtgatatgccaggaagacagcattgaagaggagtggatgggtttactggagtacctttcgagaatctctatttgtaaaatgaagaaagattaccgtaagaagtacagaaagtacgtgagaagcagattccagtgcattgaagacaggaatgcccgtctgggtgagagtgtgagcctcaacaaacgctacacacgactgcgtctcatcaaggagcaccggagccagcaggagagggagcaggagcttctggccatcggcaagaccaagacgtgtgagagccccgtgagtcccattaagatggagttgctgtttgaccccgatgatgagcattctgagcctgtgcacaccgtggtgttccagggggcggcagggattgggaaaacaatcctggccaggaagatgatgttggactgggcgtcggggacactctaccaagacaggtttgactatctgttctatatccactgtcgagaggtgagccttgtgacacagaggagcctgggggacctgatcatgagctgctgccccgacccaaacccacccatccacaagatcgtgagaaaaccctccagaatcctcttcctcatggacggcttcgatgagctgcaaggtgcctttgacgagcacataggaccgctctgcactgactggcagaaggccgagcggggagacattctcctgagcagcctcatcagaaagaagctgcttcccgaggcctctctgctcatcaccacgagacctgtggccctggagaaactgcagcacttgctggaccatcctcggcatgtggagatcctgggtttctccgaggccaaaaggaaagagtacttcttcaagtacttctctgatgaggcccaagccagggcagccttcagtctgattcaggagaacgaggtcctcttcaccatgtgcttcatccccctggtctgctggatcgtgtgcactggactgaaacagcagatggagagtggcaagagccttgcccagacatccaagaccaccaccgcggtgtacgtcttcttcctttccagtttgctgcagccccggggagggagccaggagcacggcctctgcgcccacctctgggggctctgctctttggctgcagatggaatctggaaccagaaaatcctgtttgaggagtccgacctcaggaatcatggactgcagaaggcggatgtgtctgctttcctgaggatgaacctgttccaaaaggaagtggactgcgagaagttctacagcttcatccacatgactttccaggagttctttgccgccatgtactacctgctggaagaggaaaaggaaggaaggacgaacgttccagggagtcgtttgaagcttcccagccgagacgtgacagtccttctggaaaactatggcaaattcgaaaaggggtatttgatttttgttgtacgtttcctctttggcctggtaaaccaggagaggacctcctacttggagaagaaattaagttgcaagatctctcagcaaatcaggctggagctgctgaaatggattgaagtgaaagccaaagctaaaaagctgcagatccagcccagccagctggaattgttctactgtttgtacgagatgcaggaggaggacttcgtgcaaagggccatggactatttccccaagattgagatcaatctctccaccagaatggaccacatggtttcttccttttgcattgagaactgtcatcgggtggagtcactgtccctggggtttctccataacatgcccaaggaggaagaggaggaggaaaaggaaggccgacaccttgatatggtgcagtgtgtcctcccaagctcctctcatgctgcctgttctcatggattggtgaacagccacctcacttccagtttttgccggggcctcttttcagttctgagcaccagccagagtctaactgaattggacctcagtgacaattctctgggggacccagggatgagagtgttgtgtgaaacgctccagcatcctggctgtaacattcggagattgtggttggggcgctgtggcctctcgcatgagtgctgcttcgacatctccttggtcctcagcagcaaccagaagctggtggagctggacctgagtgacaacgccctcggtgacttcggaatcagacttctgtgtgtgggactgaagcacctgttgtgcaatctgaagaagctctggttggtgaattctggccttacgtcagtctgttgttcagctttgtcctcggtactcagcactaatcagaatctcacgcacctttacctgcgaggcaacactctcggagacaaggggatcaaactactctgtgagggactcttgcaccccgactgcaagcttcaggtgttggaattagacaactgcaacctcacgtcacactgctgctgggatctttccacacttctgacctccagccagagcctgcgaaagctgagcctgggcaacaatgacctgggcgacctgggggtcatgatgttctgtgaagtgctgaaacagcagagctgcctcctgcagaacctggggttgtctgaaatgtatttcaattatgagacaaaaagtgcgttagaaacacttcaagaagaaaagcctgagctgaccgtcgtctttgagccttcttggtaggagtggaaacggggctgccagacgccagtgttctccggtccctccagctgggggccctcaggtggagagagctgcgatccatccaggccaagaccacagctctgtgatccttccggtggagtgtcggagaagagagcttgccgacgatgccttcctgtgcagagcttgggcatctcctttacgccagggtgaggaagacaccaggacaatgacagcatcgggtgttgttgtcatcacagcgcctcagttagaggatgttcctcttggtgacctcatgtaattagctcattcaataaagcactttctttatttttctcttctctgtctaactttctttttcctatcttttttcttctttgttctgtttacttttgctcatatcatcattcccgctatctttctattaactgaccataacacagaactagttgactatatattatgttgaaattttatggcagctatttatttatttaaattttttgtaacagttttgttttctaataagaaaaatccatgctttttgtagctggttgaaaattcaggaatatgtaaaactttttggtatttaattaaattgattccttttcttaatttt

SEQ ID NO: 20375 - DNA, 2940 bp, Homo sapiens
  source 1..2940: mol_type = unassigned DNA
atgaagatggcaagcacccgctgcaagctggccaggtacctggaggacctggaggatgtggacttgaagaaatttaagatgcacttagaggactatcctccccagaagggctgcatccccctcccgaggggtcagacagagaaggcagaccatgtggatctagccacgctaatgatcgacttcaatggggaggagaaggcgtgggccatggccgtgtggatcttcgctgcgatcaacaggagagacctttatgagaaagcaaaaagagatgagccgaagtggggttcagataatgcacgtgtttcgaatcccactgtgatatgccaggaagacagcattgaagaggagtggatgggtttactggagtacctttcgagaatctctatttgtaaaatgaagaaagattaccgtaagaagtacagaaagtacgtgagaagcagattccagtgcattgaagacaggaatgcccgtctgggtgagagtgtgagcctcaacaaacgctacacacgactgcgtctcatcaaggagcaccggagccagcaggagagggagcaggagcttctggccatcggcaagaccaagacgtgtgagagccccgtgagtcccattaagatggagttgctgtttgaccccgatgatgagcattctgagcctgtgcacaccgtggtgttccagggggcggcagggattgggaaaacaatcctggccaggaagatgatgttggactgggcgtcggggacactctaccaagacaggtttgactatctgttctatatccactgtcgagaggtgagccttgtgacacagaggagcctgggggacctgatcatgagctgctgccccgacccaaacccacccatccacaagatcgtgagaaaaccctccagaatcctcttcctcatggacggcttcgatgagctgcaaggtgcctttgacgagcacataggaccgctctgcactgactggcagaaggccgagcggggagacattctcctgagcagcctcatcagaaagaagctgcttcccgaggcctctctgctcatcaccacgagacctgtggccctggagaaactgcagcacttgctggaccatcctcggcatgtggagatcctgggtttctccgaggccaaaaggaaagagtacttcttcaagtacttctctgatgaggcccaagccagggcagccttcagtctgattcaggagaacgaggtcctcttcaccatgtgcttcatccccctggtctgctggatcgtgtgcactggactgaaacagcagatggagagtggcaagagccttgcccagacatccaagaccaccaccgcggtgtacgtcttcttcctttccagtttgctgcagccccggggagggagccaggagcacggcctctgcgcccacctctgggggctctgctctttggctgcagatggaatctggaaccagaaaatcctgtttgaggagtccgacctcaggaatcatggactgcagaaggcggatgtgtctgctttcctgaggatgaacctgttccaaaaggaagtggactgcgagaagttctacagcttcatccacatgactttccaggagttctttgccgccatgtactacctgctggaagaggaaaaggaaggaaggacgaacgttccagggagtcgtttgaagcttcccagccgagacgtgacagtccttctggaaaactatggcaaattcgaaaaggggtatttgatttttgttgtacgtttcctctttggcctggtaaaccaggagaggacctcctacttggagaagaaattaagttgcaagatctctcagcaaatcaggctggagctgctgaaatggattgaagtgaaagccaaagctaaaaagctgcagatccagcccagccagctggaattgttctactgtttgtacgagatgcaggaggaggacttcgtgcaaagggccatggactatttccccaagattgagatcaatctctccaccagaatggaccacatggtttcttccttttgcattgagaactgtcatcgggtggagtcactgtccctggggtttctccataacatgcccaaggaggaagaggaggaggaaaaggaaggccgacaccttgatatggtgcagtgtgtcctcccaagctcctctcatgctgcctgttctcatgggttggggcgctgtggcctctcgcatgagtgctgcttcgacatctccttggtcctcagcagcaaccagaagctggtggagctggacctgagtgacaacgccctcggtgacttcggaatcagacttctgtgtgtgggactgaagcacctgttgtgcaatctgaagaagctctggttggtcagctgctgcctcacatcagcatgttgtcaggatcttgcatcagtattgagcaccagccattccctgaccagactctatgtgggggagaatgccttgggagactcaggagtcgcaattttatgtgaaaaagccaagaatccacagtgtaacctgcagaaactggggttggtgaattctggccttacgtcagtctgttgttcagctttgtcctcggtactcagcactaatcagaatctcacgcacctttacctgcgaggcaacactctcggagacaaggggatcaaactactctgtgagggactcttgcaccccgactgcaagcttcaggtgttggaattagacaactgcaacctcacgtcacactgctgctgggatctttccacacttctgacctccagccagagcctgcgaaagctgagcctgggcaacaatgacctgggcgacctgggggtcatgatgttctgtgaagtgctgaaacagcagagctgcctcctgcagaacctggggttgtctgaaatgtatttcaattatgagacaaaaagtgcgttagaaacacttcaagaagaaaagcctgagctgaccgtcgtctttgagccttcttggtag

SEQ ID NO: 20376 - DNA, 3853 bp, Homo sapiens
  source 1..3853: mol_type = unassigned DNA
gcatttcctctctagctgttcctgaggctggcatctggggaaacctttcttccatggctcaggacacactcctggatcgagccaacaggagaactttctgtgtggaccgaagcctaaggaccctgaaaacagctgcagatgaagatggcaagcacccgctgcaagctggccaggtacctggaggacctggaggatgtggacttgaagaaatttaagatgcacttagaggactatcctccccagaagggctgcatccccctcccgaggggtcagacagagaaggcagaccatgtggatctagccacgctaatgatcgacttcaatggggaggagaaggcgtgggccatggccgtgtggatcttcgctgcgatcaacaggagagacctttatgagaaagcaaaaagagatgagccgaagtggggttcagataatgcacgtgtttcgaatcccactgtgatatgccaggaagacagcattgaagaggagtggatgggtttactggagtacctttcgagaatctctatttgtaaaatgaagaaagattaccgtaagaagtacagaaagtacgtgagaagcagattccagtgcattgaagacaggaatgcccgtctgggtgagagtgtgagcctcaacaaacgctacacacgactgcgtctcatcaaggagcaccggagccagcaggagagggagcaggagcttctggccatcggcaagaccaagacgtgtgagagccccgtgagtcccattaagatggagttgctgtttgaccccgatgatgagcattctgagcctgtgcacaccgtggtgttccagggggcggcagggattgggaaaacaatcctggccaggaagatgatgttggactgggcgtcggggacactctaccaagacaggtttgactatctgttctatatccactgtcgagaggtgagccttgtgacacagaggagcctgggggacctgatcatgagctgctgccccgacccaaacccacccatccacaagatcgtgagaaaaccctccagaatcctcttcctcatggacggcttcgatgagctgcaaggtgcctttgacgagcacataggaccgctctgcactgactggcagaaggccgagcggggagacattctcctgagcagcctcatcagaaagaagctgcttcccgaggcctctctgctcatcaccacgagacctgtggccctggagaaactgcagcacttgctggaccatcctcggcatgtggagatcctgggtttctccgaggccaaaaggaaagagtacttcttcaagtacttctctgatgaggcccaagccagggcagccttcagtctgattcaggagaacgaggtcctcttcaccatgtgcttcatccccctggtctgctggatcgtgtgcactggactgaaacagcagatggagagtggcaagagccttgcccagacatccaagaccaccaccgcggtgtacgtcttcttcctttccagtttgctgcagccccggggagggagccaggagcacggcctctgcgcccacctctgggggctctgctctttggctgcagatggaatctggaaccagaaaatcctgtttgaggagtccgacctcaggaatcatggactgcagaaggcggatgtgtctgctttcctgaggatgaacctgttccaaaaggaagtggactgcgagaagttctacagcttcatccacatgactttccaggagttctttgccgccatgtactacctgctggaagaggaaaaggaaggaaggacgaacgttccagggagtcgtttgaagcttcccagccgagacgtgacagtccttctggaaaactatggcaaattcgaaaaggggtatttgatttttgttgtacgtttcctctttggcctggtaaaccaggagaggacctcctacttggagaagaaattaagttgcaagatctctcagcaaatcaggctggagctgctgaaatggattgaagtgaaagccaaagctaaaaagctgcagatccagcccagccagctggaattgttctactgtttgtacgagatgcaggaggaggacttcgtgcaaagggccatggactatttccccaagattgagatcaatctctccaccagaatggaccacatggtttcttccttttgcattgagaactgtcatcgggtggagtcactgtccctggggtttctccataacatgcccaaggaggaagaggaggaggaaaaggaaggccgacaccttgatatggtgcagtgtgtcctcccaagctcctctcatgctgcctgttctcatggattggtgaacagccacctcacttccagtttttgccggggcctcttttcagttctgagcaccagccagagtctaactgaattggacctcagtgacaattctctgggggacccagggatgagagtgttgtgtgaaacgctccagcatcctggctgtaacattcggagattgtggttggggcgctgtggcctctcgcatgagtgctgcttcgacatctccttggtcctcagcagcaaccagaagctggtggagctggacctgagtgacaacgccctcggtgacttcggaatcagacttctgtgtgtgggactgaagcacctgttgtgcaatctgaagaagctctggttggtcagctgctgcctcacatcagcatgttgtcaggatcttgcatcagtattgagcaccagccattccctgaccagactctatgtgggggagaatgccttgggagactcaggagtcgcaattttatgtgaaaaagccaagaatccacagtgtaacctgcagaaactggggttggtgaattctggccttacgtcagtctgttgttcagctttgtcctcggtactcagcactaatcagaatctcacgcacctttacctgcgaggcaacactctcggagacaaggggatcaaactactctgtgagggactcttgcaccccgactgcaagcttcaggtgttggaattagacaactgcaacctcacgtcacactgctgctgggatctttccacacttctgacctccagccagagcctgcgaaagctgagcctgggcaacaatgacctgggcgacctgggggtcatgatgttctgtgaagtgctgaaacagcagagctgcctcctgcagaacctggggttgtctgaaatgtatttcaattatgagacaaaaagtgcgttagaaacacttcaagaagaaaagcctgagctgaccgtcgtctttgagccttcttggtaggagtggaaacggggctgccagacgccagtgttctccggtccctccagctgggggccctcaggtggagagagctgcgatccatccaggccaagaccacagctctgtgatccttccggtggagtgtcggagaagagagcttgccgacgatgccttcctgtgcagagcttgggcatctcctttacgccagggtgaggaagacaccaggacaatgacagcatcgggtgttgttgtcatcacagcgcctcagttagaggatgttcctcttggtgacctcatgtaattagctcattcaataaagcactttctttatttttctcttctctgtctaactttctttttcctatcttttttcttctttgttctgtttacttttgctcatatcatcattcccgctatctttctattaactgaccataacacagaactagttgactatatattatgttgaaattttatggcagctatttatttatttaaattttttgtaacagttttgttttctaataagaaaaatccatgctttttgtagctggttgaaaattcaggaatatgtaaaactttttggtatttaattaaattgattccttttcttaattttaaaaaa

SEQ ID NO: 20377 - DNA, 3049 bp, Homo sapiens
  source 1..3049: mol_type = unassigned DNA
gcatttcgctcgcgagatcttctctgtggcggagacagccaggttggcagctgacgggacagccggggtctattttgttgcgggttttcagcaaatccagggctggtctggaggcgcgaaaacttaaggcatacagaacgatggagtatatggcagaatccaccgaccgcagccctggacacatcttgtgctgtgagtgtggtgttccgataagtccaaatcctgccaatatttgtgtggcctgtttgcgaagtaaagtggacatcagccaaggtattccgaaacaagtctcgatttcgttctgcaaacaatgtcaaaggtattttcaaccaccaggaacttggatacagtgtgctttagaatccagggaacttcttgctttgtgcttgaaaaaaatcaaagcccctctgagtaaggtacggcttgtagatgcaggctttgtttggactgagcctcattctaagagacttaaagttaaactgactattcagaaagaggtgatgaatggtgctatccttcaacaagtgtttgtggtggattatgttgttcagtcccaaatgtgtggagattgccatagagtagaagctaaggatttctggaaggctgtgattcaagtgaggcaaaagactttgcataaaaaaactttctactatctggaacagttaattctgaaatatggaatgcatcagaatacacttcgtatcaaagagattcatgatggtctggatttttattattcctcaaaacaacatgctcagaagatggtcgaatttcttcagtgtacagttccctgtagatacaaagcatcacaaagactgatctctcaagatatccatagtaacacatacaattacaaaagcactttttctgtggaaattgttccaatatgcaaggataatgttgtctgtctgtctccaaaactggcacaaagcctgggaaatatgaaccagatttgtgtgtgtattcgagtaaccagtgccattcacctcattgatccaaacaccctacaagtggcagatattgatgggagcactttctggagtcaccctttcaatagtttatgtcatcccaaacagctagaggagtttattgtgatggaatgcagcatagtccaagatataaaacgtgctgcaggtgctggaatgatatcaaaaaagcataccctcggggaagtctgggtacagaagacatctgaaatgaatacagataaacagtatttttgtcgtactcatttgggacatcttctaaatcccggagacctggtgttagggtttgatttggccaactgtaacttaaatgatgagcatgtcaacaaaatgaactcagatagagttccagatgtggtattaatcaagaagagctatgaccggaccaaacgtcagcgtcgtagaaactggaaattgaaagagcttgcaagagagagagaaaacatggatacagatgatgaaaggcaataccaagattttcttgaagatcttgaagaagatgaggcaattcgaaaaaatgtcaacatttacagagattcagccatccctgtggaaagtgacaccgatgatgaaggagcacctcgaattagtctggctgagatgcttgaagaccttcatatttcccaagatgccactggtgaagaaggtgcatcaatgctgacataatgagatgttgtagactgtttccatacatgggcttaagaagttggacagagttaccttaagtgtctctactatctttgcctccagatttcaagaggagaaatttagttttaaacctgaataaacatgtttgttttcagtgctcactcaaaccactaaaacagatggatagctttgaggttttagataaggaaagattatggagaatgtagttgttattgatttttggcaattttacatttggaattttatcactgtgcttttttatatgaggcactgtagtattttcacatagtatagtactctggatgtaaaagctcaaaaattgtgattccttgaacgttcactaaatcttcaagcaaaaacacatttttacattatttttacgttgattattttagtgaaagaccatatgaagaagcatttttaatattaacttgttacatactttgatccactttacatcatttttatgttgttgaggtagggaaattagggttcagtttatcactggacattcaggaggcaagtcaatcttttttatttccttataaaattaactcttcaaaagccgttaaacagagagttatcttaatttttattgcagtaggaggaaatatatttaaaatatttgtagatttatagcaaatagagactcgttatttaaaggttaaataacaatttgttcttttgttgtttttgccagtttagggcagtagctgcttttgtcataaatatcttcctaccacatcaaaaatgctgcttttaaaatttttgtttataaattgagaaggaattttctctctataagtttctgtcattgaacagatcaccattaaaaagaatattagaatccagcatgaagataatggctaataaaaatgaggtacatactttataaaaccattaatcagatttgaatgaggaatgcttcccacatccttgaaagaaaaactgtggcttacgttttgaagtattctgagaatgaagtattaagatccaatttctataagcaagatcagacttgttaagtatgccgcaagtaagagctaattcattcattccatgtgtgccactaaataaagagattgagcaagtgccactgtgtggaacatttttcttttttttaatattggactttccaattttgaaattatggataaagtcctaaattttctatagtggcttcttttctgtctgcatattttgttaaaattgtggatctaaaagccatatcctgtctttggtggtggcctggtaggaatggcttgtcctagttcttcaaaggtaagattgaccaaagcaagttctcattggtggtctgtgtttacatcttccgtgtcaagatattttaaagcatgaaaataaagccattcttgccctttttcgtgtgtttgaaa

SEQ ID NO: 20378 - DNA, 3061 bp, Homo sapiens
  source 1..3061: mol_type = unassigned DNA
ggcgtgggtggccctcgggcgccgggacgccgtccggagactcctgtggcgtgggtctgaggcgcggtggtccggtgcggtccctgggctggtggagagcgggagggcccgggcgtccacaatcccgagctgacctcgcccttggtcgtccagggttggagcccaggtgagatggaggtcagcggcagagctgggtggcccgagggtcttgcagctgggaagctcaggaaatcccatggtcctcatcttaaagttctttttaacgaacttacccagtggagttgggtttccttctttcctgctttttcgaagttctgtgaatatattaattattcagagagactggaggaagacgtaaaaagaggagactaggtaaagtgatttaaatcccaacattctcttttttttttttttttttttttttttttttaaaagaacttaaggcatacagaacgatggagtatatggcagaatccaccgaccgcagccctggacacatcttgtgctgtgagtgtggtgttccgataagtccaaatcctgccaatatttgtgtggcctgtttgcgaagtaaagtggacatcagccaaggtattccgaaacaagtctcgatttcgttctgcaaacaatgtcaaaggtattttcaaccaccaggaacttggatacagtgtgctttagaatccagggaacttcttgctttgtgcttgaaaaaaatcaaagcccctctgagtaaggtacggcttgtagatgcaggctttgtttggactgagcctcattctaagagacttaaagttaaactgactattcagaaagaggtgatgaatggtgctatccttcaacaagtgtttgtggtggattatgttgttcagtcccaaatgtgtggagattgccatagagtagaagctaaggatttctggaaggctgtgattcaagtgaggcaaaagactttgcataaaaaaactttctactatctggaacagttaattctgaaatatggaatgcatcagaatacacttcgtatcaaagagattcatgatggtctggatttttattattcctcaaaacaacatgctcagaagatggtcgaatttcttcagtgtacagttccctgtagatacaaagcatcacaaagactgatctctcaagatatccatagtaacacatacaattacaaaagcactttttctgtggaaattgttccaatatgcaaggataatgttgtctgtctgtctccaaaactggcacaaagcctgggaaatatgaaccagatttgtgtgtgtattcgagtaaccagtgccattcacctcattgatccaaacaccctacaagtggcagatattgatgggagcactttctggagtcaccctttcaatagtttatgtcatcccaaacagctagaggagtttattgtgatggaatgcagcatagtccaagatataaaacgtgctgcaggtgctggaatgatatcaaaaaagcataccctcggggaagtctgggtacagaagacatctgaaatgaatacagataaacagtatttttgtcgtactcatttgggacatcttctaaatcccggagacctggtgttagggtttgatttggccaactgtaacttaaatgatgagcatgtcaacaaaatgaactcagatagagttccagatgtggtattaatcaagaagagctatgaccggaccaaacgtcagcgtcgtagaaactggaaattgaaagagcttgcaagagagagagaaaacatggatacagatgatgaaaggcaataccaagattttcttgaagatcttgaagaagatgaggcaattcgaaaaaatgtcaacatttacagagattcagccatccctgtggaaagtgacaccgatgatgaaggagcacctcgaattagtctggctgagatgcttgaagaccttcatatttcccaagatgccactggtgaagaaggtgcatcaatgctgacataatgagatgttgtagactgtttccatacatgggcttaagaagttggacagagttaccttaagtgtctctactatctttgcctccagatttcaagaggagaaatttagttttaaacctgaataaacatgtttgttttcagtgctcactcaaaccactaaaacagatggatagctttgaggttttagataaggaaagattatggagaatgtagttgttattgatttttggcaattttacatttggaattttatcactgtgcttttttatatgaggcactgtagtattttcacatagtatagtactctggatgtaaaagctcaaaaattgtgattccttgaacgttcactaaatcttcaagcaaaaacacatttttacattatttttacgttgattattttagtgaaagaccatatgaagaagcatttttaatattaacttgttacatactttgatccactttacatcatttttatgttgttgaggtagggaaattagggttcagtttatcactggacattcaggaggcaagtcaatcttttttatttccttataaaattaactcttcaaaagccgttaaacagagagttatcttaatttttattgcagtaggaggaaatatatttaaaatatttgtagatttatagcaaatagagactcgttatttaaaggttaaataacaatttgttcttttgttgtttttgccagtttagggcagtagctgcttttgtcataaatatcttcctaccacatcaaaaatgctgcttttaaaatttttgtttataaattgagaaggaattttctctctataagtttctgtcattgaacagatcaccattaaaaagaatattagaatccagcatgaagataatggctaataaaaatgaggtacatactttataaaaccattaatcagatttgaatgaggaatgcttcccacatccttgaaagaaaaactgtggcttacgttttgaagtattctgagaatgaagtattaagatccaatttctataagcaagatcagacttgttaagtatgccgcaagtaagagctaattcattcattccatgtgtgccactaaataaagagattgagcaag

SEQ ID NO: 20379 - DNA, 547 bp, Homo sapiens
  source 1..547: mol_type = unassigned DNA
caaacgccccgggtcgctacccggatttgacggtggctggagcggcacgggcgacgcaagaacttaaggcatacagaacgatggagtatatggcagaatccaccgaccgcagccctggacacatcttgtgctgtgagtgtggtgttccgataagtccaaatcctgccaatatttgtgtggcctgtttgcgaagtaaagtggacatcagccaaggtattccgaaacaagtctcgatttcgttctgcaaacaatgtcaaaggtattttcaaccaccaggaacttggatacagtgtgctttagaatccagggaacttcttgctttgtgcttgaaaaaaatcaaagcccctctgagtaaggtacggcttgtagatgcaggctttgtttggactgagcctcattctaagagacttaaagttaaactgactattcagaaagaggtgatgaatggtgctatccttcaacaagtgtttgtggtggattatgttgttcagtcccaaatgtgtggagattgccatagagtagaagctaaggatttctggaaggctgt

SEQ ID NO: 20380 - DNA, 1077 bp, Homo sapiens
  source 1..1077: mol_type = unassigned DNA
acagccaggttggcagctgacgggacagccggggtctattttgttgcgggttttcagcaaatccagggctggtctggaggcgcgaagtaggttccggagtccgagacctgggctgtcggccgcgggcccctgagtagcggatggggcgggctccccggcctcggggccgtgctcagtctgcgtgagcgccgcgtgcccggaacccgtgtgcggtcgcgccccggggttgggggtcggcgtgggtggccctcgggcgccgggacgccgtccggagactcctgtggcgtgggtctgaggcgcggtggtccggtgcggtccctgggctggtggagagcgggagggcccgggcgtccacaatcccgagctgacctcgcccttggtcgtccagggttggagcccagaacttaaggcatacagaacgatggagtatatggcagaatccaccgaccgcagccctggacacatcttgtgctgtgagtgtggtgttccgataagtccaaatcctgccaatatttgtgtggcctgtttgcgaagtaaagtggacatcagccaaggtattccgaaacaagtctcgatttcgttctgcaaacaatgtcaaaggtattttcaaccaccaggaacttggatacagtgtgctttagaatccagggaacttcttgctttgtgcttgaaaaaaatcaaagcccctctgagtaaggtacggcttgtagatgcaggctttgtttggactgagcctcattctaagagacttaaagttaaactgactattcagaaagaggtgatgaatggtgctatccttcaacaagtgtttgtggtggattatgttgttcagtcccaaatgtgtggagattgccatagagtagaagctaaggatttctggaaggctgtgattcaagtgaggcaaaagactttgcataaaaaaactttctactatctggaacagttaattctgaaatatggaatgcatcagaatacacttcgtatcaaagagattcatgatggtctggatttttattattcctcaaaacaacatgctcagaagatggtcgaatttcttcagtgtacagttccctgtag

SEQ ID NO: 20381 - DNA, 589 bp, Homo sapiens
  source 1..589: mol_type = unassigned DNA
cccaatccctccgacatccctgcgccggggcccttccctagcgctccgggaaagcgttcgccgcaggcctgttaggggcccaccaataccgtaacaccgttcccgtcctcttcctcggcaccgctgcaaacgccccgggtcgctacccggatttgacggtggctggagcggcacgggcgacgcaaggcagatgcggactgaattacaccgctggctttccttgttctccagcttgcaggcagcatactgtgggacttctgggcctccataattgtaacttaaggcatacagaacgatggagtatatggcagaatccaccgaccgcagccctggacacatcttgtgctgtgagtgtggtgttccgataagtccaaatcctgccaatatttgtgtggcctgtttgcgaagtaaagtggacatcagccaaggtattccgaaacaagtctcgatttcgttctgcaaacaatgtcaaaggtattttcaaccaccaggaacttggatacagtgtgctttagaatccagggaacttcttgctttgtgcttgaaaaaaatcaaagcccctctgagtaaggtacggcttgtagatgca

SEQ ID NO: 20382 - DNA, 685 bp, Homo sapiens
  source 1..685: mol_type = unassigned DNA
tcggcgtgggtggccctcgggcgccgggacgccgtccggagactcctgtggcgtgggtctgaggcgcggtggtccggtgcggtccctgggctggtggagagcgggagggcccgggcgtccacaatcccgagctgacctcgcccttggtcgtccagggttggagcccaggtgagatggagaacttaaggcatacagaacgatggagtatatggcagaatccaccgaccgcagccctggacacatcttgtgctgtgagtgtggtgttccgataagtccaaatcctgccaatatttgtgtggcctgtttgcgaagtaaagtggacatcagccaaggtattccgaaacaagtctcgatttcgttctgcaaacaatgtcaaaggtattttcaaccaccaggaacttggatacagtgtgctttagaatccagggaacttcttgctttgtgcttgaaaaaaatcaaagcccctctgagtaaggtacggcttgtagatgcaggctttgtttggactgagcctcattctaagagacttaaagttaaactgactattcagaaagaggtgatgaatggtgctatccttcaacaagtgtttgtggtggattatgttgttcagtcccaaatgtgtggagattgccatagagtagaagctaaggatttctggaaggctgtgattcaagtgaggcaaaag

SEQ ID NO: 20383 - DNA, 746 bp, Homo sapiens
  source 1..746: mol_type = unassigned DNA
atacgtcactcgggccgcgggatttcgagcatttcgctcgcgagatcttctctgtggcggagacagccagaacttaaggcatacagaacgatggagtatatggcagaatccaccgaccgcagccctggacacatcttgtgctgtgagtgtggtgttccgataagtccaaatcctgccaatatttgtgtggcctgtttgcgaagtaaagtggacatcagccaaggtattccgaaacaagtctcgatttcgttctgcaaacaatgtcaaaggtattttcaaccaccaggaacttggatacagtgtgctttagaatccagggaacttcttgctttgtgcttgaaaaaaatcaaagcccctctgagtaaggtacggcttgtagatgcaggctttgtttggactgagcctcattctaagagacttaaagttaaactgactattcagaaagaggtgatgaatggtgctatccttcaacaagtgtttgtggtggattatgttgttcagtcccaaatgtgtggagattgccatagagtagaagctaaggatttctggaaggctgtgattcaagtgaggcaaaagactttgcataaaaaaactttctactatctggaacagttaattctgaaatatggaatgcatcagaatacacttcgtatcaaagagattcatgatggtctggatttttattattcctcaaaacaacatgctcagaagatggtcgaatttcttcagtgtacagttccctgtag

SEQ ID NO: 20384 - DNA, 2048 bp, Homo sapiens
  source 1..2048: mol_type = unassigned DNA
aaaaaaatcaaagcccctctgagtaaggtacggcttgtagatgcaggctttgtttggactgagcctcattctaagagacttaaagttaaactgactattcagaaagaggtgatgaatggtgctatccttcaacaagtgtttgtggtggattatgttgttcagtcccaaatgtgtggagattgccatagagtagaagctaaggatttctggaaggctgtgattcaagtgaggcaaaagactttgcataaaaaaactttctactatctggaacagttaattctgaaatatggaatgcatcagaatacacttcgtatcaaagagattcatgatggtctggatttttattattcctcaaaacaacatgctcagaagatggtcgaatttcttcagtgtacagttccctgtagatacaaagcatcacaaagactgatctctcaagatatccatagtaacacatacaattacaaaagcactttttctgtggaaattgttccaatatgcaaggataatgttgtctgtctgtctccaaaactggcacaaagcctgggaaatatgaaccagatttgtgtgtgtattcgagtaaccagtgccattcacctcattgatccaaacaccctacaagtggcagatattgatgggagcactttctggagtcaccctttcaatagtttatgtcatcccaaacagctagaggagtttattgtgatggaatgcagcatagtccaagatataaaacgtgctgcaggtgctggaatgatatcaaaaaagcataccctcggggaagtctgggtacagaagacatctgaaatgaatacagataaacagtatttttgtcgtactcatttgggacatcttctaaatcccggagacctggtgttagggtttgatttggccaactgtaacttaaatgatgagcatgtcaacaaaatgaactcagatagagttccagatgtggtattaatcaagaagagctatgaccggaccaaacgtcagcgtcgtagaaactggaaattgaaagagcttgcaagagagagagaaaacatggatacagatgatgaaaggcaataccaagattttcttgaagatcttgaagaagatgaggcaattcgaaaaaatgtcaacatttacagagattcagccatccctgtggaaagtgacaccgatgatgaaggagcacctcgaattagtctggctgagatgcttgaagaccttcatatttcccaagatgccactggtgaagaaggtgcatcaatgctgacataatgagatgttgtagactgtttccatacatgggcttaagaagttggacagagttaccttaagtgtctctactatctttgcctccagatttcaagaggagaaatttagttttaaacctgaataaacatgtttgttttcagtgctcactcaaaccactaaaacagatggatagctttgaggttttagataaggaaagattatggagaatgtagttgttattgatttttggcaattttacatttggaattttatcactgtgcttttttatatgaggcactgtagtattttcacatagtatagtactctggatgtaaaagctcaaaaattgtgattccttgaacgttcactaaatcttcaagcaaaaacacatttttacattatttttacgttgattattttagtgaaagaccatatgaagaagcatttttaatattaacttgttacatactttgatccactttacatcatttttatgttgttgaggtagggaaattagggttcagttcattgaacagatcaccattaaaaagaatattagaatccagcatgaagataatggctaataaaaatgaggtacatactttataaaaccattaatcagatttgaatgaggaatgcttcccacatccttgaaagaaaaactgtggcttacgttttgaagtattctgagaatgaagtattaagatccaatttctataagcaagatcagacttgttaagtatgccgcaagtaagagctaattcattcattccatgtgtgccactaaataaagagattgagcaagtgcc

SEQ ID NO: 20385 - DNA, 7209 bp, Homo sapiens
  source 1..7209: mol_type = unassigned DNA
gacgtcatcacgcagggccgagtcggcgcggccacatcctttaaatatggtcttttttgggcgcgcgcgacaatgtgaggagtggggtggagcgtgtgtggtgtgtggctgcggcctgggcaagagccgccgcggaccatgagctgagtaagttctggagggatcctgcctcttggagccttcgcagccaggcagctgtgaactgtgagctagagtgaagcagaaatctaggaagatgagctccaagatggtcataagtgaaccaggactgaattgggatatttcccccaaaaatggccttaagacatttttctctcgagaaaattataaagatcattccatggctccaagtttaaaagaactacgtgttttatccaacagacgtataggagaaaatttgaatgcctcagcaagttctgtagaaaatgagccggcagttagttcagcaactcaagcaaaggaaaaagttaaaaccacaattggaatggttcttcttccaaaaccaagagttccttatcctcgtttctctcgtttctcacagagagagcagaggagttatgtggacttgttggttaaatacgcaaagattcctgcaaattccaaagctgttggaataaataaaaatgactacttgcagtacttggatatgaaaaaacatgtgaacgaagaagttactgagttcctaaagtttttgcagaattctgcaaagaaatgtgcgcaggattataatatgctttctgatgatgcccgtctcttcacagagaaaattttaagagcttgcattgaacaagtgaaaaagtattcagaattctatactctccacgaggtcaccagcttaatgggattcttcccattcagagtagagatgggattaaagttagaaaaaactcttctcgcattgggcagtgtaaaatatgtgaaaacagtatttccctcaatgcctataaagttgcagctgtcaaaggacgatatagctaccattgaaacgtcagaacaaacagctgaagctatgcattatgatattagtaaagatccaaatgcagagaagcttgtttccagatatcaccctcagatagctctaactagtcagtcattatttaccttattaaataatcatggaccaacgtacaaggaacagtgggaaattccagtgtgtattcaagtaatacctgttgcaggttcaaaaccagttaaagtaatatatattaattcaccacttccccaaaagaaaatgactatgagagagagaaatcaaatctttcatgaagttccattaaaatttatgatgtccaaaaacacatctgttccagtctctgcagtctttatggacaaacctgaagagtttatatctgaaatggacatgtcctgtgaagtcaacgagtgccgaaaaattgagagtcttgaaaacttgtatttggattttgatgatgatgtcacagaacttgaaacttttggagtaaccaccaccaaagtatcaaaatcaccaagtccagcaagtacttccacagtacctaacatgacagatgctcctacagcccccaaagcaggaactacaactgtggcaccaagtgcaccagacatttctgctaattctagaagtttatctcagattctgatggaacaattgcaaaaggagaaacagctggtcactggtatggatggtggccctgaggaatgcaaaaataaagatgatcagggatttgaatcatgtgaaaaggtatcaaattctgacaagcctttgatacaagatagtgacttgaaaacatctgatgccttacagttagaaaattctcaggaaattgaaacttctaataaaaatgatatgactatagatatattacatgctgatggtgaaagacctaatgttctagaaaacctagacaactcaaaggaaaagactgttggatcagaagcagcaaaaactgaagatacagttctctgcagcagtgatacagatgaggagtgtttaatcattgatacagaatgtaaaaataatagtgatggaaagacagctgttgtgggttctaacttaagttccagaccagctagtccaaattcttcctcaggacaggcttctgtaggaaaccagactaatactgcttgtagtcctgaagagtcatgtgttttaaaaaaacctatcaaacgagtatataaaaaatttgatccagttggagagattttaaaaatgcaggatgagctcttaaagccaatttccagaaaagtaccagaattgcccttaatgaatttagaaaattctaaacagccttctgtttctgagcaattgtctggtccttcagactcctctagttggccgaaatctggatggccttctgcatttcagaagccaaaaggacgattgccatatgaacttcaggactatgttgaagatacatcggaatacctagctcctcaggaaggaaattttgtttataagttatttagcctgcaagacctgttgttactcgtacgctgcagtgtccagaggatagagacaagaccacgttctaaaaaacggaagaaaatcagaagacaatttccagtttatgtactaccaaaagtagagtatcaagcttgttatggagttgaagctctgactgaaagtgaactttgtcgcttatggactgaaagtttattgcattccaacagctcattttatgttgggcatatcgatgcatttacttcaaaactttttctactggaagaaattacctcagaagaattaaaagaaaagctttcagcactcaagatttccaatttatttaacatcctccaacacattctaaagaaactaagtagcttgcaggagggttcctacttgttatctcatgcagcagaagattcttcactcctgatttataaggcctctgatggaaaagttactaggacagcatacaatttgtataaaacacattgcggccttcctggtgtaccttccagtctctcagttccctgggtcccattagatcccagcctgttattaccatatcatatccatcatggaagaataccttgtacttttccaccgaaatcactggataccacaacacaacaaaagattggtggaacgagaatgcctacacgcagccacaggaatccagtttccatggaaaccaaaagcagttgcttgcctgctcagcaagttgaaactgaaggagtggctccacataaaagaaaaataacttgaggactgtaccatggaaaactaaatttaaaaaaacagttataacagtgtttaatttagataagtttgagggaaaataatcagtaggcaagaggaacatttttcctgtagtagctagagtgccttgaaaaaatgtgttggctatgtgaaggaatatttcaactaaaatggaatggtatgcttttcacccttgaagtttgaggaggatcttgatatgttttaacattatcatggcagggaaatatataaagaagaaaaatatttttacattaaaccttttctaaaaattgtaaatagaaaaataatttggttttttatcaagaacaacacttatcgttatgtattgtgttagttatattgccagtctgttgcgactgactcaaaaagttaaatgttgccactgctgaagatgattatgagcatcgcaaactttgtttctgacccattttgacagtttttatatactcctttaaaatgatgaatgttacaggttaataaagttaatacctttaaaaacttggtgaaattccattacagaagccaaaaataaaaactccctgcctctgaaaagtcagattactgacttcttgtttggcaaccatcagtttgtttaataaaagaaaaaatttggtggtataacatgtttgatgacagatgcctctatctctagattcaagctgagtgttgaaatacactgctgaaagcaaagagataggtatgttttccagaaaaaaagtcagtgtcattgctccagatgacaaggttaatgtggtaaagcataagcttttttttttttttgagatggagtctcgctctgttgcccaggctggagtgcagtggcatgatctcagctcaccacaacatccacctcctggattaaagcgattctcctgcctcatcctcccgagtagctgggactacaggcacctaccaccaggcttggctaatttttttttgtatttttagtagagacagggtgttaccatgttggccgggctggtctcaaactcctgaccttgtgatccgcctgccttggcctcccaaagtgctgggattacaggggtaagccaccgtgcctggccagcataagctatttttatcctcatctatactgattgatttaaattttccgggcctgcagatgaatttggaaaagggcataatcaactgatgttgctgtagcaaatttggacttaagaaactacagacagggccgggcgtggtggctcacacctgtaattccagcacttcgcaaggccgaggcgggagaatcacttgagtccaggggttggagaccagtctgggcaacacagacctcatctctacaaataaaaaagttagccgggtgtggtggggtgtgcctgtagtcccagctactcaaaaggctgaggcagaagaattgcttgagcccaagaagtcaaggctacagtgagttgtgatcgcaccacagaactcagcttgagtatcagagtgtgaccctgtctcaaagaaaaaaaaaaacaggacaggcttgtttaatctttagaacccttacactaaaattttcagaaattatgtatgtcatttgtaaaatataagttttgtaatcctagataattgcttcacattgaaattttttagctattctgtgtaaagaatagctattcttttggcctaatttctgagaaattagaccgaaaaatctcctcaagtattgtaacagttgaaaatacttatattcaactaccaagttttgtttcattttgattttttgttataaaacatttttaagttatttgagaagtaattattagtaaaattgtatcttgataaatcatttcctcatcctgccattcccttttataaaacactgagtttttttattccttaagtcacatatcccagaaatgttttggttgtgaatcatttgccagcgagccaagggagaggcagggattcccttgaaatgtactcttacacttttttattttatttttaatgtacatttgtgtgcaccagaatggaatgtgctctttttaaagagctggacagtggttgcttcagacttctgaataccagaaagacttgccttttaatttttaaatattactttttacatcataaaatgtgttatcttatccatgtatttgaataacatcatatataaaggtagttttttgcttgtgcttagtgaagcctccttttttaacatacatttgatatgctttatgttctttttcttgatttttagtactgagaatttataagccaagaagtaactgacaatatgtttagcaggatgtaatcccagctacttgggaagctgaggtgggaggatcgcttgagtctaggagtttgaggctgcagtgagctatgatggtgccactgcactccatcctgggtgagagatcaagaccctatctcaaaaaatgagcaagttttttttttttttttaaatcagacttagggctagcaaggatgtgatcaccctggcccatttatacctcagcagtgaaggtgtaatttatacacacctctttgaaaacagtttaattcagtaagtgagtgcaactatgtgccatgcactccaaagtaggtccccacagttattctctcatagccttgttttttcagatctcaccatatttatttgtttctttgattttcttttcttatagattacaagctctgcaaggacaggggcatatttgttttgttcaccattaagtaataaacacctaatacagtgcctgtcatgtagttgcttagcagatattagttagatgcatgaatgtgtaggtatcaaagattttttttttcaggagatcacattctagtggaagacactatactgctttatgtgataagtgctttgataaagtaagcaagtcatctaaccagatcttggtagttaaggttttctgagatagaacttgagctgagtcttttaaaaatagtaggatttataagggaaaattaaaggtcttccacaaagaaactaagtgaaactaagcagcctatgaaaaggtgaaagttggagagattataggctatgaacatgggagatgagagagaaaactgcaggatagggacagaaacactgtgctaagacatttgaactttgtcctgtgcaatgtgggaaccagtagtgaaggttaattaactgacatgatcagatatgtatttgaaaagggctcttgttggcattagtctagagaatgcgatggagctgggaagcgaaagaagaaatgttgggagcctgtgttgtagtaactgaaaaatggcaatggcccagaattaaagcagcaagaataggagtgggctcaagtgatgtataaggaaaaaaaaaaaaatgacaactcagttttgttgttggtaaggagagtaaagtatggcttctgggtttctcatttgagatactgagtaaatgatggtgttaacccattgagaaaatagtgtggttagagtgggaagaaagttaatttaaaatgttcatttttttttttagtcatttctacttttggattctaggtttgtgtgctatattggttataaccaatttgctgaataataaattatcccaaaacttagctacttaaaacaacaaacattatctcacagtttctgtaagtcaaaagtccaggtctctcatgaagttgcagtcaggctcttggctagggctgcagtcatctgaaggattagtaagtcgctaagcccacacttaagctccacccttgaagggagaagtttggaaagaatttgtgaacatatttttaaatcacatatgctatgaacaggtttaggggagggagaggaaagaaaactttaacttttcattagcatactgcatctgtagttcctaatgggcatgttgtaaagatgttaagacgttttctatgcattataggtatatagtagtattttgttttgttctgtttttttgtttggtatgtagtagtttttaatcaaaccttaacgtatttgatattaagatttattgagtttcttgttgagatgtagaaataaaggggatccatttcatttatcca

SEQ ID NO: 20386 - DNA, 7049 bp, Homo sapiens
  source 1..7049: mol_type = unassigned DNA
gacgtcatcacgcagggccgagtcggcgcggccacatcctttaaatatggtcttttttgggcgcgcgcgacaatgtgaggagtggggtggagcgtgtgtggtgtgtggctgcggcctgggcaagagccgccgcggaccatgagctgagtaagttctggagggatcctgcctcttggagccttcgcagccaggcagctgtgaactgtgagctagagtgaagcagaaatctaggaagatgagctccaagatggtcataagtgaaccaggactgaattgggatatttcccccaaaaatggccttaagacatttttctctcgagaaaattataaagatcattccatggctccaagtttaaaagaactacgtgttttatccaacagagagagcagaggagttatgtggacttgttggttaaatacgcaaagattcctgcaaattccaaagctgttggaataaataaaaatgactacttgcagtacttggatatgaaaaaacatgtgaacgaagaagttactgagttcctaaagtttttgcagaattctgcaaagaaatgtgcgcaggattataatatgctttctgatgatgcccgtctcttcacagagaaaattttaagagcttgcattgaacaagtgaaaaagtattcagaattctatactctccacgaggtcaccagcttaatgggattcttcccattcagagtagagatgggattaaagttagaaaaaactcttctcgcattgggcagtgtaaaatatgtgaaaacagtatttccctcaatgcctataaagttgcagctgtcaaaggacgatatagctaccattgaaacgtcagaacaaacagctgaagctatgcattatgatattagtaaagatccaaatgcagagaagcttgtttccagatatcaccctcagatagctctaactagtcagtcattatttaccttattaaataatcatggaccaacgtacaaggaacagtgggaaattccagtgtgtattcaagtaatacctgttgcaggttcaaaaccagttaaagtaatatatattaattcaccacttccccaaaagaaaatgactatgagagagagaaatcaaatctttcatgaagttccattaaaatttatgatgtccaaaaacacatctgttccagtctctgcagtctttatggacaaacctgaagagtttatatctgaaatggacatgtcctgtgaagtcaacgagtgccgaaaaattgagagtcttgaaaacttgtatttggattttgatgatgatgtcacagaacttgaaacttttggagtaaccaccaccaaagtatcaaaatcaccaagtccagcaagtacttccacagtacctaacatgacagatgctcctacagcccccaaagcaggaactacaactgtggcaccaagtgcaccagacatttctgctaattctagaagtttatctcagattctgatggaacaattgcaaaaggagaaacagctggtcactggtatggatggtggccctgaggaatgcaaaaataaagatgatcagggatttgaatcatgtgaaaaggtatcaaattctgacaagcctttgatacaagatagtgacttgaaaacatctgatgccttacagttagaaaattctcaggaaattgaaacttctaataaaaatgatatgactatagatatattacatgctgatggtgaaagacctaatgttctagaaaacctagacaactcaaaggaaaagactgttggatcagaagcagcaaaaactgaagatacagttctctgcagcagtgatacagatgaggagtgtttaatcattgatacagaatgtaaaaataatagtgatggaaagacagctgttgtgggttctaacttaagttccagaccagctagtccaaattcttcctcaggacaggcttctgtaggaaaccagactaatactgcttgtagtcctgaagagtcatgtgttttaaaaaaacctatcaaacgagtatataaaaaatttgatccagttggagagattttaaaaatgcaggatgagctcttaaagccaatttccagaaaagtaccagaattgcccttaatgaatttagaaaattctaaacagccttctgtttctgagcaattgtctggtccttcagactcctctagttggccgaaatctggatggccttctgcatttcagaagccaaaaggacgattgccatatgaacttcaggactatgttgaagatacatcggaatacctagctcctcaggaaggaaattttgtttataagttatttagcctgcaagacctgttgttactcgtacgctgcagtgtccagaggatagagacaagaccacgttctaaaaaacggaagaaaatcagaagacaatttccagtttatgtactaccaaaagtagagtatcaagcttgttatggagttgaagctctgactgaaagtgaactttgtcgcttatggactgaaagtttattgcattccaacagctcattttatgttgggcatatcgatgcatttacttcaaaactttttctactggaagaaattacctcagaagaattaaaagaaaagctttcagcactcaagatttccaatttatttaacatcctccaacacattctaaagaaactaagtagcttgcaggagggttcctacttgttatctcatgcagcagaagattcttcactcctgatttataaggcctctgatggaaaagttactaggacagcatacaatttgtataaaacacattgcggccttcctggtgtaccttccagtctctcagttccctgggtcccattagatcccagcctgttattaccatatcatatccatcatggaagaataccttgtacttttccaccgaaatcactggataccacaacacaacaaaagattggtggaacgagaatgcctacacgcagccacaggaatccagtttccatggaaaccaaaagcagttgcttgcctgctcagcaagttgaaactgaaggagtggctccacataaaagaaaaataacttgaggactgtaccatggaaaactaaatttaaaaaaacagttataacagtgtttaatttagataagtttgagggaaaataatcagtaggcaagaggaacatttttcctgtagtagctagagtgccttgaaaaaatgtgttggctatgtgaaggaatatttcaactaaaatggaatggtatgcttttcacccttgaagtttgaggaggatcttgatatgttttaacattatcatggcagggaaatatataaagaagaaaaatatttttacattaaaccttttctaaaaattgtaaatagaaaaataatttggttttttatcaagaacaacacttatcgttatgtattgtgttagttatattgccagtctgttgcgactgactcaaaaagttaaatgttgccactgctgaagatgattatgagcatcgcaaactttgtttctgacccattttgacagtttttatatactcctttaaaatgatgaatgttacaggttaataaagttaatacctttaaaaacttggtgaaattccattacagaagccaaaaataaaaactccctgcctctgaaaagtcagattactgacttcttgtttggcaaccatcagtttgtttaataaaagaaaaaatttggtggtataacatgtttgatgacagatgcctctatctctagattcaagctgagtgttgaaatacactgctgaaagcaaagagataggtatgttttccagaaaaaaagtcagtgtcattgctccagatgacaaggttaatgtggtaaagcataagcttttttttttttttgagatggagtctcgctctgttgcccaggctggagtgcagtggcatgatctcagctcaccacaacatccacctcctggattaaagcgattctcctgcctcatcctcccgagtagctgggactacaggcacctaccaccaggcttggctaatttttttttgtatttttagtagagacagggtgttaccatgttggccgggctggtctcaaactcctgaccttgtgatccgcctgccttggcctcccaaagtgctgggattacaggggtaagccaccgtgcctggccagcataagctatttttatcctcatctatactgattgatttaaattttccgggcctgcagatgaatttggaaaagggcataatcaactgatgttgctgtagcaaatttggacttaagaaactacagacagggccgggcgtggtggctcacacctgtaattccagcacttcgcaaggccgaggcgggagaatcacttgagtccaggggttggagaccagtctgggcaacacagacctcatctctacaaataaaaaagttagccgggtgtggtggggtgtgcctgtagtcccagctactcaaaaggctgaggcagaagaattgcttgagcccaagaagtcaaggctacagtgagttgtgatcgcaccacagaactcagcttgagtatcagagtgtgaccctgtctcaaagaaaaaaaaaaacaggacaggcttgtttaatctttagaacccttacactaaaattttcagaaattatgtatgtcatttgtaaaatataagttttgtaatcctagataattgcttcacattgaaattttttagctattctgtgtaaagaatagctattcttttggcctaatttctgagaaattagaccgaaaaatctcctcaagtattgtaacagttgaaaatacttatattcaactaccaagttttgtttcattttgattttttgttataaaacatttttaagttatttgagaagtaattattagtaaaattgtatcttgataaatcatttcctcatcctgccattcccttttataaaacactgagtttttttattccttaagtcacatatcccagaaatgttttggttgtgaatcatttgccagcgagccaagggagaggcagggattcccttgaaatgtactcttacacttttttattttatttttaatgtacatttgtgtgcaccagaatggaatgtgctctttttaaagagctggacagtggttgcttcagacttctgaataccagaaagacttgccttttaatttttaaatattactttttacatcataaaatgtgttatcttatccatgtatttgaataacatcatatataaaggtagttttttgcttgtgcttagtgaagcctccttttttaacatacatttgatatgctttatgttctttttcttgatttttagtactgagaatttataagccaagaagtaactgacaatatgtttagcaggatgtaatcccagctacttgggaagctgaggtgggaggatcgcttgagtctaggagtttgaggctgcagtgagctatgatggtgccactgcactccatcctgggtgagagatcaagaccctatctcaaaaaatgagcaagttttttttttttttttaaatcagacttagggctagcaaggatgtgatcaccctggcccatttatacctcagcagtgaaggtgtaatttatacacacctctttgaaaacagtttaattcagtaagtgagtgcaactatgtgccatgcactccaaagtaggtccccacagttattctctcatagccttgttttttcagatctcaccatatttatttgtttctttgattttcttttcttatagattacaagctctgcaaggacaggggcatatttgttttgttcaccattaagtaataaacacctaatacagtgcctgtcatgtagttgcttagcagatattagttagatgcatgaatgtgtaggtatcaaagattttttttttcaggagatcacattctagtggaagacactatactgctttatgtgataagtgctttgataaagtaagcaagtcatctaaccagatcttggtagttaaggttttctgagatagaacttgagctgagtcttttaaaaatagtaggatttataagggaaaattaaaggtcttccacaaagaaactaagtgaaactaagcagcctatgaaaaggtgaaagttggagagattataggctatgaacatgggagatgagagagaaaactgcaggatagggacagaaacactgtgctaagacatttgaactttgtcctgtgcaatgtgggaaccagtagtgaaggttaattaactgacatgatcagatatgtatttgaaaagggctcttgttggcattagtctagagaatgcgatggagctgggaagcgaaagaagaaatgttgggagcctgtgttgtagtaactgaaaaatggcaatggcccagaattaaagcagcaagaataggagtgggctcaagtgatgtataaggaaaaaaaaaaaaatgacaactcagttttgttgttggtaaggagagtaaagtatggcttctgggtttctcatttgagatactgagtaaatgatggtgttaacccattgagaaaatagtgtggttagagtgggaagaaagttaatttaaaatgttcatttttttttttagtcatttctacttttggattctaggtttgtgtgctatattggttataaccaatttgctgaataataaattatcccaaaacttagctacttaaaacaacaaacattatctcacagtttctgtaagtcaaaagtccaggtctctcatgaagttgcagtcaggctcttggctagggctgcagtcatctgaaggattagtaagtcgctaagcccacacttaagctccacccttgaagggagaagtttggaaagaatttgtgaacatatttttaaatcacatatgctatgaacaggtttaggggagggagaggaaagaaaactttaacttttcattagcatactgcatctgtagttcctaatgggcatgttgtaaagatgttaagacgttttctatgcattataggtatatagtagtattttgttttgttctgtttttttgtttggtatgtagtagtttttaatcaaaccttaacgtatttgatattaagatttattgagtttcttgttgagatgtagaaataaaggggatccatttcatttatcca

SEQ ID NO: 20387 - DNA, 1470 bp, Homo sapiens
  source 1..1470: mol_type = unassigned DNA
aggggcgggaggagggaacatggcggccgggccaggaccctttgctcctggctctgcgcggctcctacccctgctttgcttgcccttttacctgcttttctggaaccttgtttcccctctctttgcgtcccctttccctcagccgtttcttttgccttcctcgactattcccccccagctccacactgggtcgaagtgtgagaggtagattaagtgggagccggtcgggcccgttcggtgtcgagagaccgactcctaaatttgattaggttctcgcaggtcactttatcagtctgcctggggtcacaggagaagtactgaacatgagagatcaagcctgatttgtagtcctgatgatgtctctgagtaagttctggagggatcctgcctcttggagccttcgcagccaggcagctgtgaactgtgagctagagtgaagcagaaatctaggaagatgagctccaagatggtcataagtgaaccaggactgaattgggatatttcccccaaaaatggccttaagacatttttctctcgagaaaattataaagatcattccatggctccaagtttaaaagaactacgtgttttatccaacagacgtataggagaaaatttgaatgcctcagcaagttctgtagaaaatgagccggcagttagttcagcaactcaagcaaaggaaaaagttaaaaccacaattggaatggttcttcttccaaaaccaagagttccttatcctcgtttctctcgtttctcacagagagagcagaggagttatgtggacttgttggttaaatacgcaaagattcctgcaaattccaaagctgttggaataaataaaaatgactacttgcagtacttggatatgaaaaaacatgtgaacgaagaagttactgagttcctaaagtttttgcagaattctgcaaagaaatgtgcgcaggattataatatgctttctgatgatgcccgtctcttcacagagaaaattttaagagcttgcattgaacaagtgaaaaagtattcagaattctatactctccacgaggtcaccagcttaatgggattcttcccattcagagtagagatgggattaaagttagaaaaaactcttctcgcattgggcagtgtaaaatatgtgaaaacagtatttccctcaatgcctataaagttgcagctgtcaaaggacgatatagctaccattgaaacgtcagaacaaacagctgaagctatgcattatgatattagtaaagatccaaatgcagagaagcttgtttccagatatcaccctcagatagctctaactagtcagtcattatttaccttattaaataatcatggaccaacgtacaaggaacagtgggaaattccagtgtgtattcaagtaatacctgttgcaggttcaaaaccagttaaagtaatatatattaattcaccacttccccaaaagaaaatgactatgagagagagaaa

SEQ ID NO: 20388 - DNA, 559 bp, Homo sapiens
  source 1..559: mol_type = unassigned DNA
aaatatggtcttttttgggcgcgcgcgacaatctgagtaagttctggagggatcctgcctcttggagccttcgcagccaggcagctgtgaactgtgagctagagtgaagcagaaatctaggaagatgagctccaagatggtcataagtgaaccaggactgaattgggatatttcccccaaaaatggccttaagacatttttctctcgagaaaattataaagatcattccatggctccaagtttaaaagaactacgtgttttatccaacagacgtataggagaaaatttgaatgcctcagcaagttctgtagaaaatgagccggcagttagttcagcaactcaagcaaaggaaaaagttaaaaccacaattggaatggttcttcttccaaaaccaagagttccttatcctcgtttctctcgtttctcacagagagagcagaggagttatgtggacttgttggttaaatacgcaaagattcctgcaaattccaaagctgttggaataaataaaaatgactacttgcagtacttggatatgaaaaaacatgtgaacgaagaa

SEQ ID NO: 20389 - DNA, 584 bp, Homo sapiens
  source 1..584: mol_type = unassigned DNA
aaatatggtcttttttgggcgcgcgcgacaatgtgaggagtggggtggagcgtgtgtggtgtgtggctgcggcctgggcaagagccgccgcggaccatgaggttctcgcaggtcactttatcagtctgcctggggtcacaggagaagtactgaacatgagagatcaagcctgatttgtagtcctgatgatgtctctgagtaagttctggagggatcctgcctcttggagccttcgcagccaggcagctgtgaactgtgagctagagtgaagcagaaatctaggaagatgagctccaagatggtcataagtgaaccaggactgaattgggatatttcccccaaaaatggccttaagacatttttctctcgagaaaattataaagatcattccatggctccaagtttaaaagaactacgtgttttatccaacagacgtataggagaaaatttgaatgcctcagcaagttctgtagaaaatgagccggcagttagttcagcaactcaagcaaaggaaaaagttaaaaccacaattggaatggttcttcttccaaaaccaagagttccttatcctcgtttctctcgtt

SEQ ID NO: 20390 - DNA, 568 bp, Homo sapiens
  source 1..568: mol_type = unassigned DNA
cacatcctttaaatatggtcttttttgggcgcgcgcgacaatgtgaggagtggggtggagcgtgtgtggtgtgtggctgcggcctgggcaagagccgccgcggaccatgaggtcactttatcagtctgcctggggtcacaggagaagtactgaacatgagagatcaagcctgatttgtagtcctgatgatgtctctgagtaagttctggagggatcctgcctcttggagccttcgcagccaggcagctgtgaactgtgagctagagtgaagcagaaatctaggaagatgagctccaagatggtcataagtgaaccaggactgaattgggatatttcccccaaaaatggccttaagacatttttctctcgagaaaattataaagatcattccatggctccaagtttaaaagaactacgtgttttatccaacagacgtataggagaaaatttgaatgcctcagcaagttctgtagaaaatgagccggcagttagttcagcaactcaagcaaaggaaaaagttaaaaccacaattggaatggttcttcttccaaaaccaagagttccttat

SEQ ID NO: 20391 - DNA, 1028 bp, Homo sapiens
  source 1..1028: mol_type = unassigned DNA
gtcacactcatctgagggctccagacacatggcctgtgcgtctgtcctgcccagcgtctcccacctgacgcggccaggtgcccagttgctcttcaaggccttttcagttttgccgacggatggggcaaaagaagcagcgaccagctagagcagggcagccacacagctcgtccgacgcagcccaggcacctgcagagcagccacacagctcgtccgatgcagcccaggcaccttgccccagggagcgctgcttgggaccgcccaccactccgggcccataccgcagcatctatttctcaagcccaaagggccaccttacccgactggggttggagttcttcgaccagccggcagtccccctggcccgggcatttctgggacaggtcctagtccggcgacttcctaatggcacagaactccgaggccgcatcgtggagaccgaggcatacctggggccagaggatgaagccgcccactcaaggggtggccggcagaccccccgcaaccgaggcatgttcatgaagccggggaccctgtacgtgtacatcatttacggcatgtacttctgcatgaacatctccagccagggggacggggcttgcgtcttgctgcgagcactggagcccctggaaggtctggagaccatgcgtcagcttcgcagcaccctccggaaaggcaccgccagccgtgtcctcaaggaccgcgagctctgcagtggcccctccaagctgtgccaggccctggccatcaacaagagctttgaccagagggacctggcacaggatgaagctgtatggctggagcgtggtcccctggagcccagtgagccggctgtagtggcagcagcccgggtgggcgtcggccatgcaggggagtgggcccggaaacccctccgcttctatgtccggggcagcccctgggtcagtgtggtcgacagagtggctgagcaggacacacaggcctgagcaaagggcctgcccagacaagattttttaattgtttaaaaaccgaataaatgttttatttct

SEQ ID NO: 20392 - DNA, 1623 bp, Homo sapiens
  source 1..1623: mol_type = unassigned DNA
taccttataaaatacatgcaaaaaactggttttagaaagcgttccctaaaattagtgtgtacggaaacttcaggtatacttctgctttcctccgcaaaaccacccctttttaaaaatcgaaagtgaaattagtttttttttctgttagtgactaatcattggagacaaccatgtttagtatttgagcattggttaaatgctaaagaaaaatcgccgttaaagcagttttctttttcactgtctttttcttttcgcggggaacccagctgttcctgcgagggccacctcctcaggaagaccccgcagctctcccgcggcgcttctgcaggaggcagcgacagtttcgagaacccgggccttcccctcccagtgcctcccggggttccggcgtttcaggcgctgctgttttccgggaagggcaggcgcgctgggccttggggagctgcgctcggcgggcggacgcgggggatcatggaagctgataaagatgacacacaacaaattcttaaggagcattcgccagatgaatttataaaagatgaacaaaataagggactaattgatgaaattacaaagaaaaatattcaactaaagaaggagatccaaaagcttgaaacggagttacaagaggctaccaaagaattccagattaaagaggatattcctgaaacaaagatgaaattcttatcagttgaaactcctgagaatgacagccagttgtcaaatatctcctgttcgtttcaagtgagctcgaaagttccttatgagatacaaaaaggacaagcacttatcacctttgaaaaagaagaagttgctcaaaatgtggtaagcatgagtaaacatcatgtacagataaaagatgtaaatctggaggttacggccaagccagttccattaaattcaggagtcagattccaggtttatgtagaagtttctaaaatgaaaatcaatgttactgaaattcctgacacattgcgtgaagatcaaatgagagacaaactagagctgagcttttcaaagtcccgaaatggaggcggagaggtggaccgcgtggactatgacagacagtccgggagtgcagtcatcacgtttgtggagattggagtggctgacaagattttgaaaaagaaagaataccctctttatataaatcaaacctgccatagagttactgtttctccatacacagaaatacacttgaaaaagtatcagatattttcaggaacatctaagaggacagtgcttctgacaggaatggaaggcattcaaatggatgaagaaattgtggaggatttaattaacattcactttcaacgggcaaagaatggaggtggagaagtagatgtggtcaagtgttctctaggtcaacctcacatagcatactttgaagaatagacttaacagaatcatgaaaactatagctttttaacccggattactgtaaatgtttgacaaaaatgaatatgcttttccttaaaaaatgaaaactttaatttttaccatccatttatgtttagatacaaaacttatttccatgtttctgaatcttctttgtttcaaatggtgctgcatgttttcaactacaataagtgcactgtaataaaaagttttgtttatagatta

SEQ ID NO: 20393 - DNA, 581 bp, Homo sapiens
  source 1..581: mol_type = unassigned DNA
gacaaccatgtttagtatttgagcattggttaaatgctaaagaaaaatcgccgttaaagcagttttctttttcactgtctttttcttttcgcggggaacccagctgttcctgcgagggccacctcctcaggaagaccccgcagctctcccgcggcgcttctgcaggaggcagcgacagtttcgagaacccgggccttcccctcccagtgcctcccggggttccggcgtttcaggcgctgctgttttccgggaagggcaggcgcgctgggccttggggagctgcgctcggcgggcggacgcggtagagacggggtttcaccgtgttaaccaggatggatacgatctcctgacctcgtgatccgcacgcctcggcctcccaaagtgctgggattacaggcgtgagccaccgcgcccggccctcgctgttttctccgagtgtctctggagatagtccttaggaaaacggatttcttaagaaaacgattcttggggatcatggaagctgataaagatgacacacaacaaattcttaaggagcattcgccagatgaatttataaaagatgaacaaaataagggact

SEQ ID NO: 20394 - DNA, 3014 bp, Homo sapiens
  source 1..3014: mol_type = unassigned DNA
cccagctggtgctgaagctcgtcagttcaccatccgccctcggcttccgcggggcgctgggccgccagcctcggcaccgtcctttcctttctccctcgcgttaggcaggtgacagcagggacatgtctcgggagatgcaggatgtagacctcgctgaggtgaagcctttggtggagaaaggggagaccatcaccggcctcctgcaagagtttgatgtccaggagcaggacatcgagactttacatggctctgttcacgtcacgctgtgtgggactcccaagggaaaccggcctgtcatcctcacctaccatgacatcggcatgaaccacaaaacctgctacaaccccctcttcaactacgaggacatgcaggagatcacccagcactttgccgtctgccacgtggacgcccctggccagcaggacggcgcagcctccttccccgcagggtacatgtacccctccatggatcagctggctgaaatgcttcctggagtccttcaacagtttgggctgaaaagcattattggcatgggaacaggagcaggcgcctacatcctaactcgatttgctctaaacaaccctgagatggtggagggccttgtccttatcaacgtgaacccttgtgcggaaggctggatggactgggccgcctccaagatctcaggatggacccaagctctgccggacatggtggtgtcccacctttttgggaaggaagaaatgcagagtaacgtggaagtggtccacacctaccgccagcacattgtgaatgacatgaaccccggcaacctgcacctgttcatcaatgcctacaacagccggcgcgacctggagattgagcgaccaatgccgggaacccacacagtcaccctgcagtgccctgctctgttggtggttggggacagctcgcctgcagtggatgccgtggtggagtgcaactcaaaattggacccaacaaagaccactctcctcaagatggcggactgtggcggcctcccgcagatctcccagccggccaagctcgctgaggccttcaagtacttcgtgcagggcatgggatacatgccctcggctagcatgacccgcctgatgcggtcccgcacagcctctggttccagcgtcacttctctggatggcacccgcagccgctcccacaccagcgagggcacccgaagccgctcccacaccagcgagggcacccgcagccgctcgcacaccagcgagggggcccacctggacatcacccccaactcgggtgctgctgggaacagcgccgggcccaagtccatggaggtctcctgctaggcggcctgcccagctgccgcccccggactctgatctctgtagtggccccctcctccccggccccttttcgccccctgcctgccatactgcgcctaactcggtattaatccaaagcttattttgtaagagtgagctctggtggagacaaatgaggtctattacgtgggtgccctctccaaaggcggggtggcggtggaccaaaggaaggaagcaagcatctccgcatcgcatcctcttccattaaccagtggccggttgccactctcctcccctccctcagagacaccaaactgccaaaaacaagacgcgtagcagcacacacttcacaaagccaagcctaggccgccctgagcatcctggttcaaacgggtgcctggtcagaaggccagccgcccacttcccgtttcctctttaactgaggagaagctgatccagtttccggaaacaaaatccttttctcatttggggaggggggtaatagtgacatgcaggcacctcttttaaacaggcaaaacaggaagggggaaaaggtgggattcatgtcgaggctagaggcatttggaacaacaaatctacgtagttaacttgaagaaaccgatttttaaagttggtgcatctagaaagctttgaatgcagaagcaaacaagcttgatttttctagcatcctcttaatgtgcagcaaaagcaggcgacaaaatctcctggctttacagacaaaaatatttcagcaaacgttgggcatcatggtttttgaaggctttagttctgctttctgcctctcctccacagccccaacctcccacccctgatacatgagccagtgattattcttgttcagggagaagatcatttagatttgttttgcattccttagaatggagggcaacattccacagctgccctggctgtgatgagtgtccttgcaggggccggagtaggagcactggggtgggggtggaattggggttactcgatgtaagggattccttgttgttgtgttgagatccagtgcagttgtgatttctgtggatcccagcttggttccaggaattttgtgtgattggcttaaatccagttttcaatcttcgacagctgggctggaacgtgaactcagtagctgaacctgtctgacccggtcacgttcttggatcctcagaactctttgctcttgtcggggtgggggtgggaactcacgtggggagcggtggctgagaaaatgtaaggattctggaatacatattccatgggactttccttccctctcctgcttcctcttttcctgctccctaacctttcgccgaatggggcagcaccactgacgtttctgggcggccagtgcggctgccaggttcctgtactactgccttgtacttttcattttggctcaccgtggattttctcataggaagtttggtcagagtgaattgaatattgtaagtcagccactgggacccgaggatttctgggaccccgcagttgggaggaggaagtagtccagccttccaggtggcgtgagaggcaatgactcgttacctgccgcccatcaccttggaggccttccctggccttgagtagaaaagtcggggatcggggcaagagaggctgagtacggatgggaaactattgtgcacaagtctttccagaggagtttcttaatgagatatttgtatttatttccagaccaataaatttgtaactttgcagcgg

SEQ ID NO: 20395 - DNA, 2818 bp, Homo sapiens
  source 1..2818: mol_type = unassigned DNA
aaacctcgcctggctcccagctggtgctgaagctcgtcagttcaccatccgccctcggcttccgcggggcgctgggccgccagcctcggcaccgtcctttcctttctccctcgcgttaggcaggtgacagcagggacatgtctcgggagatgcaggatgtagacctcgctgaggtgaagcctttggtggagaaaggggagaccatcaccggcctcctgcaagagtttgatgtccaggagcaggacatcgagactttacatggctctgttcacgtcacgctgtgtgggactcccaagggaaaccggcctgtcatcctcacctaccatgacatcggcatgaaccacaaaacctgcgcctacatcctaactcgatttgctctaaacaaccctgagatggtggagggccttgtccttatcaacgtgaacccttgtgcggaaggctggatggactgggccgcctccaagatctcaggatggacccaagctctgccggacatggtggtgtcccacctttttgggaaggaagaaatgcagagtaacgtggaagtggtccacacctaccgccagcacattgtgaatgacatgaaccccggcaacctgcacctgttcatcaatgcctacaacagccggcgcgacctggagattgagcgaccaatgccgggaacccacacagtcaccctgcagtgccctgctctgttggtggttggggacagctcgcctgcagtggatgccgtggtggagtgcaactcaaaattggacccaacaaagaccactctcctcaagatggcggactgtggcggcctcccgcagatctcccagccggccaagctcgctgaggccttcaagtacttcgtgcagggcatgggatacatgccctcggctagcatgacccgcctgatgcggtcccgcacagcctctggttccagcgtcacttctctggatggcacccgcagccgctcccacaccagcgagggcacccgaagccgctcccacaccagcgagggcacccgcagccgctcgcacaccagcgagggggcccacctggacatcacccccaactcgggtgctgctgggaacagcgccgggcccaagtccatggaggtctcctgctaggcggcctgcccagctgccgcccccggactctgatctctgtagtggccccctcctccccggccccttttcgccccctgcctgccatactgcgcctaactcggtattaatccaaagcttattttgtaagagtgagctctggtggagacaaatgaggtctattacgtgggtgccctctccaaaggcggggtggcggtggaccaaaggaaggaagcaagcatctccgcatcgcatcctcttccattaaccagtggccggttgccactctcctcccctccctcagagacaccaaactgccaaaaacaagacgcgtagcagcacacacttcacaaagccaagcctaggccgccctgagcatcctggttcaaacgggtgcctggtcagaaggccagccgcccacttcccgtttcctctttaactgaggagaagctgatccagtttccggaaacaaaatccttttctcatttggggaggggggtaatagtgacatgcaggcacctcttttaaacaggcaaaacaggaagggggaaaaggtgggattcatgtcgaggctagaggcatttggaacaacaaatctacgtagttaacttgaagaaaccgatttttaaagttggtgcatctagaaagctttgaatgcagaagcaaacaagcttgatttttctagcatcctcttaatgtgcagcaaaagcaggcgacaaaatctcctggctttacagacaaaaatatttcagcaaacgttgggcatcatggtttttgaaggctttagttctgctttctgcctctcctccacagccccaacctcccacccctgatacatgagccagtgattattcttgttcagggagaagatcatttagatttgttttgcattccttagaatggagggcaacattccacagctgccctggctgtgatgagtgtccttgcaggggccggagtaggagcactggggtgggggtggaattggggttactcgatgtaagggattccttgttgttgtgttgagatccagtgcagttgtgatttctgtggatcccagcttggttccaggaattttgtgtgattggcttaaatccagttttcaatcttcgacagctgggctggaacgtgaactcagtagctgaacctgtctgacccggtcacgttcttggatcctcagaactctttgctcttgtcggggtgggggtgggaactcacgtggggagcggtggctgagaaaatgtaaggattctggaatacatattccatgggactttccttccctctcctgcttcctcttttcctgctccctaacctttcgccgaatggggcagcaccactgacgtttctgggcggccagtgcggctgccaggttcctgtactactgccttgtacttttcattttggctcaccgtggattttctcataggaagtttggtcagagtgaattgaatattgtaagtcagccactgggacccgaggatttctgggaccccgcagttgggaggaggaagtagtccagccttccaggtggcgtgagaggcaatgactcgttacctgccgcccatcaccttggaggccttccctggccttgagtagaaaagtcggggatcggggcaagagaggctgagtacggatgggaaactattgtgcacaagtctttccagaggagtttcttaatgagatatttgtatttatttccagaccaataaatttgtaactttgcagcg

SEQ ID NO: 20396 - DNA, 3755 bp, Homo sapiens
  source 1..3755: mol_type = unassigned DNA
acacaaacgcctcctccgggcagggcacacgcgcccgctgcacaggccgaggccctggactcggaggggactgcagagccgacccacaacccgggccccgatgcccctcccggccgcgcccctacgactgcttgcgcaacaggcggcggctccagtgggcgcccgccgcgcgctgccggagcccagcccagcccggcgcgcccgggaggagggagcagggagcggggaaggggtgtgtcccggctgcgtgctgggactgcgagggtctgggaggggcgaggcgcgggggcggggccgcggcgcctataaagtcgccctccgcccggacgtaaacaaacctcgcctggctcccagctggtgctgaagctcgtcagttcaccatccgccctcggcttccgcggggcgctgggccgccagcctcggcaccgtcctttcctttctccctcgcgttaggtaagcccgcgccctcttctcccaggcgcgacgcggagcagaaaggggccgcccgtgcggtgccgctggagcgccaggaccgccctttgtagccccgcgtactccaggagtaagcgccccggagctgcaagtgcgcggtcaccccggggcgcgggcgcgagggggctttgggtgcagacaccgctgaagtggggggttcaattacggaaagggaggaaaaaaagacagggtcccattcatctcccccctagctggggattggggttctggaggtcgggaagggggcgatgagacggtccgaaaaaataccaggatagcgtttcctggcgtcgtctccgaatcccagctggcgccgctggcaggggtgcgcgctggacgtgggtgcagaagggactaggcaggtgacagcagggacatgtctcgggagatgcaggatgtagacctcgctgaggtgaagcctttggtggagaaaggggagaccatcaccggcctcctgcaagagtttgatgtccaggagcaggacatcgagactttacatggctctgttcacgtcacgctgtgtgggactcccaagggaaaccggcctgtcatcctcacctaccatgacatcggcatgaaccacaaaacctgctacaaccccctcttcaactacgaggacatgcaggagatcacccagcactttgccgtctgccacgtggacgcccctggccagcaggacggcgcagcctccttccccgcagggtacatgtacccctccatggatcagctggctgaaatgcttcctggagtccttcaacagtttgggctgaaaagcattattggcatgggaacaggagcaggcgcctacatcctaactcgatttgctctaaacaaccctgagatggtggagggccttgtccttatcaacgtgaacccttgtgcggaaggctggatggactgggccgcctccaagatctcaggatggacccaagctctgccggacatggtggtgtcccacctttttgggaaggaagaaatgcagagtaacgtggaagtggtccacacctaccgccagcacattgtgaatgacatgaaccccggcaacctgcacctgttcatcaatgcctacaacagccggcgcgacctggagattgagcgaccaatgccgggaacccacacagtcaccctgcagtgccctgctctgttggtggttggggacagctcgcctgcagtggatgccgtggtggagtgcaactcaaaattggacccaacaaagaccactctcctcaagatggcggactgtggcggcctcccgcagatctcccagccggccaagctcgctgaggccttcaagtacttcgtgcagggcatgggatacatgccctcggctagcatgacccgcctgatgcggtcccgcacagcctctggttccagcgtcacttctctggatggcacccgcagccgctcccacaccagcgagggcacccgaagccgctcccacaccagcgagggcacccgcagccgctcgcacaccagcgagggggcccacctggacatcacccccaactcgggtgctgctgggaacagcgccgggcccaagtccatggaggtctcctgctaggcggcctgcccagctgccgcccccggactctgatctctgtagtggccccctcctccccggccccttttcgccccctgcctgccatactgcgcctaactcggtattaatccaaagcttattttgtaagagtgagctctggtggagacaaatgaggtctattacgtgggtgccctctccaaaggcggggtggcggtggaccaaaggaaggaagcaagcatctccgcatcgcatcctcttccattaaccagtggccggttgccactctcctcccctccctcagagacaccaaactgccaaaaacaagacgcgtagcagcacacacttcacaaagccaagcctaggccgccctgagcatcctggttcaaacgggtgcctggtcagaaggccagccgcccacttcccgtttcctctttaactgaggagaagctgatccagtttccggaaacaaaatccttttctcatttggggaggggggtaatagtgacatgcaggcacctcttttaaacaggcaaaacaggaagggggaaaaggtgggattcatgtcgaggctagaggcatttggaacaacaaatctacgtagttaacttgaagaaaccgatttttaaagttggtgcatctagaaagctttgaatgcagaagcaaacaagcttgatttttctagcatcctcttaatgtgcagcaaaagcaggcgacaaaatctcctggctttacagacaaaaatatttcagcaaacgttgggcatcatggtttttgaaggctttagttctgctttctgcctctcctccacagccccaacctcccacccctgatacatgagccagtgattattcttgttcagggagaagatcatttagatttgttttgcattccttagaatggagggcaacattccacagctgccctggctgtgatgagtgtccttgcaggggccggagtaggagcactggggtgggggtggaattggggttactcgatgtaagggattccttgttgttgtgttgagatccagtgcagttgtgatttctgtggatcccagcttggttccaggaattttgtgtgattggcttaaatccagttttcaatcttcgacagctgggctggaacgtgaactcagtagctgaacctgtctgacccggtcacgttcttggatcctcagaactctttgctcttgtcggggtgggggtgggaactcacgtggggagcggtggctgagaaaatgtaaggattctggaatacatattccatgggactttccttccctctcctgcttcctcttttcctgctccctaacctttcgccgaatggggcagcaccactgacgtttctgggcggccagtgcggctgccaggttcctgtactactgccttgtacttttcattttggctcaccgtggattttctcataggaagtttggtcagagtgaattgaatattgtaagtcagccactgggacccgaggatttctgggaccccgcagttgggaggaggaagtagtccagccttccaggtggcgtgagaggcaatgactcgttacctgccgcccatcaccttggaggccttccctggccttgagtagaaaagtcggggatcggggcaagagaggctgagtacggatgggaaactattgtgcacaagtctttccagaggagtttcttaatgagatatttgtatttatttccagaccaataaatttgtaactttgc

SEQ ID NO: 20397 - DNA, 729 bp, Homo sapiens
  source 1..729: mol_type = unassigned DNA
agtgggcaaggtccagtgagtgtgcttagaactgggaagatgaggggaagggtaagcgctgggcggcggtgggcaagatggacgagattaaacgggagcgaggatttcagcgagagctttggcgacacggaaggctgagaatcggagggagcctgtcgggcgaaagcgaaggcggctgctgggcaggcagccgaatccggctggagagccgagctggcaggtgacagcagggacatgtctcgggagatgcaggatgtagacctcgctgaggtgaagcctttggtggagaaaggggagaccatcaccggcctcctgcaagagtttgatgtccaggagcaggacatcgagactttacatggctctgttcacgtcacgctgtgtgggactcccaagggaaaccggcctgtcatcctcacctaccatgacatcggcatgaaccacaaaacctgctacaaccccctcttcaactacgaggacatgcaggagatcacccagcactttgccgtctgccacgtggacgcccctggccagcaggacggcgcagcctccttccccgcagggtacatgtacccctccatggatcagctggctgaaatgcttcctggagtccttcaacagtttgggctgaaaagcattattggcatgggaacaggagcaggcgcctacatcctaactcgatttgctctaaacaaccctgagatggtggagggccttgtccttatcaacgtg

SEQ ID NO: 20398 - DNA, 550 bp, Homo sapiens
  source 1..550: mol_type = unassigned DNA
gagaggctggtggcgcttcagtcccgtagcacacacagggcggtgtgcatgtgtgagtgcaggtgacagcagggacatgtctcgggagatgcaggatgtagacctcgctgaggtgaagcctttggtggagaaaggggagaccatcaccggcctcctgcaagagtttgatgtccaggagcaggacatcgagactttacatggctctgttcacgtcacgctgtgtgggactcccaagggaaaccggcctgtcatcctcacctaccatgacatcggcatgaaccacaaaacctgctacaaccccctcttcaactacgaggacatgcaggagatcacccagcactttgccgtctgccacgtggacgcccctggccagcaggacggcgcagcctccttccccgcagggtacatgtacccctccatggatcagctggctgaaatgcttcctggagtccttcaacagtttgggctgaaaagcattattggcatgggaacaggagcaggcgcctacatcctaactcgatttgctctaaacaaccctgagatggtggag

SEQ ID NO: 20399 - DNA, 709 bp, Homo sapiens
  source 1..709: mol_type = unassigned DNA
aaacctcgcctggctcccagctggtgctgaagctcgtcagttcaccatccgccctcggcttccgcggggcgctgggccgccagcctcggcaccgtcctttcctttctccctcgcgttagaaggagatcacagacaccagaagacagcagcttctgccagaactgggtccttccatgattctcaggtggtgactttgaatcccagaaaaagtgttttggggagagtggagtgaaggaagagtgtgaacattggatctgactccactccagcccctgtgctgcagccagcagggcaggtgacagcagggacatgtctcgggagatgcaggatgtagacctcgctgaggtgaagcctttggtggagaaaggggagaccatcaccggcctcctgcaagagtttgatgtccaggagcaggacatcgagactttacatggctctgttcacgtcacgctgtgtgggactcccaagggaaaccggcctgtcatcctcacctaccatgacatcggcatgaaccacaaaacctgctacaaccccctcttcaactacgaggacatgcaggagatcacccagcactttgccgtctgccacgtggacgcccctggccagcaggacggcgcagcctccttccccgcagggtacatgtacccctccatggatcagctggctgaaatgcttcctggagtccttcaacagtttgggctgaaaagca

SEQ ID NO: 20400 - DNA, 581 bp, Homo sapiens
  source 1..581: mol_type = unassigned DNA
aaaggggccgcccgtgcggtgccgctggagcgccaggaccgccctttgtagccccgcgtactccaggagtaagcgccccggagctgcaagcaggtgacagcagggacatgtctcgggagatgcaggatgtagacctcgctgaggtgaagcctttggtggagaaaggggagaccatcaccggcctcctgcaagagtttgatgtccaggagcaggacatcgagactttacatggctctgttcacgtcacgctgtgtgggactcccaagggaaaccggcctgtcatcctcacctaccatgacatcggcatgaaccacaaaacctgctacaaccccctcttcaactacgaggacatgcaggagatcacccagcactttgccgtctgccacgtggacgcccctggccagcaggacggcgcagcctccttccccgcagggtacatgtacccctccatggatcagctggctgaaatgcttcctggagtccttcaacagtttgggctgaaaagcattattggcatgggaacaggagcaggcgcctacatcctaactcgatttgctctaaacaaccctgagatggtggag

SEQ ID NO: 20401 - DNA, 1442 bp, Homo sapiens
  source 1..1442: mol_type = unassigned DNA
acaaacctcgcctggctcccagctggtgctgaagctcgtcagttcaccatccgccctcggcttccgcggggcgctgggccgccagcctcggcaccgtcctttcctttctccctcgcgttaggcaggtgacagcagggacatgtctcgggagatgcaggatgtagacctcgctgaggtgaagcctttggtggagaaaggggagaccatcaccggcctcctgcaagagtttgatgtccaggagcaggacatcgagactttacatggctctgttcacgtcacgctgtgtgggactcccaagggaaaccggcctgtcatcctcacctaccatgacatcggcatgaaccacaaaacctgctacaaccccctcttcaactacgaggacatgcaggagatcacccagcactttgccgtctgccacgtggacgcccctggccagcaggacggcgcagcctccttccccgcagggccttgtccttatcaacgtgaacccttgtgcggaaggctggatggactgggccgcctccaagatctcaggatggacccaagctctgccggacatggtggtgtcccacctttttgggaaggaagaaatgcagagtaacgtggaagtggtccacacctaccgccagcacattgtgaatgacatgaaccccggcaacctgcacctgttcatcaatgcctacaacagccggcgcgacctggagattgagcgaccaatgccgggaacccacacagtcaccctgcagtgccctgctctgttggtggttggggacagctcgcctgcagtggatgccgtggtggagtgcaactcaaaattggacccaacaaagaccactctcctcaagatggcggactgtggcggcctcccgcagatctcccagccggccaagctcgctgaggccttcaagtacttcgtgcagggcatgggatacatgccctcggctagcatgacccgcctgatgcggtcccgcacagcctctggttccagcgtcacttctctggatggcacccgcagccgctcccacaccagcgagggcacccgaagccgctcccacaccagcgagggcacccgcagccgctcgcacaccagcgagggggcccacctggacatcacccccaactcgggtgctgctgggaacagcgccgggcccaagtccatggaggtctcctgctaggcggcctgcccagctgccgcccccggactctgatctctgtagtggccccctcctccccggccccttttcgccccctgcctgccatactgcgcctaactcggtattaatccaaagcttattttgtaagagtgagctctggtggagacaaatgaggtctattacgtgggtgccctctccaaaggcggggtggcggtggaccaaaggaaggaagcaagcatctccgcatcgcatcctcttccattaaccagtggccggttgccactctcc

SEQ ID NO: 20402 - DNA, 2346 bp, Homo sapiens
  source 1..2346: mol_type = unassigned DNA
gcgggggcggggccgcggcgcctataaagtcgccctccgcccggacgtaaacaaacctcgcctggctcccagctggtgctgaagctcgtcagttcaccatccgccctcggcttccgcggggcgctgggccgccagcctcggcaccgtcctttcctttctccctcgcgttaggcaggtgacagcagggacatgtctcgggagatgcaggatgtagacctcgctgaggtgaagcctttggtggagaaaggggagaccatcaccggcctcctgcaagagtttgatgtccaggagcaggacatcgagactttacatggctctgttcacgtcacgctgtgtgggactcccccggccaagctcgctgaggccttcaagtacttcgtgcagggcatgggatacatgccctcggctagcatgacccgcctgatgcggtcccgcacagcctctggttccagcgtcacttctctggatggcacccgcagccgctcccacaccagcgagggcacccgaagccgctcccacaccagcgagggcacccgcagccgctcgcacaccagcgagggggcccacctggacatcacccccaactcgggtgctgctgggaacagcgccgggcccaagtccatggaggtctcctgctaggcggcctgcccagctgccgcccccggactctgatctctgtagtggccccctcctccccggccccttttcgccccctgcctgccatactgcgcctaactcggtattaatccaaagcttattttgtaagagtgagctctggtggagacaaatgaggtctattacgtgggtgccctctccaaaggcggggtggcggtggaccaaaggaaggaagcaagcatctccgcatcgcatcctcttccattaaccagtggccggttgccactctcctcccctccctcagagacaccaaactgccaaaaacaagacgcgtagcagcacacacttcacaaagccaagcctaggccgccctgagcatcctggttcaaacgggtgcctggtcagaaggccagccgcccacttcccgtttcctctttaactgaggagaagctgatccagtttccggaaacaaaatccttttctcatttggggaggggggtaatagtgacatgcaggcacctcttttaaacaggcaaaacaggaagggggaaaaggtgggattcatgtcgaggctagaggcatttggaacaacaaatctacgtagttaacttgaagaaaccgatttttaaagttggtgcatctagaaagctttgaatgcagaagcaaacaagcttgatttttctagcatcctcttaatgtgcagcaaaagcaggcgacaaaatctcctggctttacagacaaaaatatttcagcaaacgttgggcatcatggtttttgaaggctttagttctgctttctgcctctcctccacagccccaacctcccacccctgatacatgagccagtgattattcttgttcagggagaagatcatttagatttgttttgcattccttagaatggagggcaacattccacagctgccctggctgtgatgagtgtccttgcaggggccggagtaggagcactggggtgggggtggaattggggttactcgatgtaagggattccttgttgttgtgttgagatccagtgcagttgtgatttctgtggatcccagcttggttccaggaattttgtgtgattggcttaaatccagttttcaatcttcgacagctgggctggaacgtgaactcagtagctgaacctgtctgacccggtcacgttcttggatcctcagaactctttgctcttgtcggggtgggggtgggaactcacgtggggagcggtggctgagaaaatgtaaggattctggaatacatattccatgggactttccttccctctcctgcttcctcttttcctgctccctaacctttcgccgaatggggcagcaccactgacgtttctgggcggccagtgcggctgccaggttcctgtactactgccttgtacttttcattttggctcaccgtggattttctcataggaagtttggtcagagtgaattgaatattgtaagtcagccactgggacccgaggatttctgggaccccgcagttgggaggaggaagtagtccagccttccaggtggcgtgagaggcaatgactcgttacctgccgcccatcaccttggaggccttccctggccttgagtagaaaagtcggggatcggggcaagagaggctgagtacggatgggaaactattgtgcacaagtctttccagaggagtttcttaatgagatatttgtatttatttccagaccaataaatttgtaactttgcagcgg

SEQ ID NO: 20403 - DNA, 2918 bp, Homo sapiens
  source 1..2918: mol_type = unassigned DNA
aaacctcgcctggctcccagctggtgctgaagctcgtcagttcaccatccgccctcggcttccgcggggcgctgggccgccagcctcggcaccgtcctttcctttctccctcgcgttaggcaggtgacagcagggacatgtctcgggagatgcaggatgtagacctcgctgaggtgaagcctttggtggagaaaggggagaccatcaccggcctcctgcaagagtttgatgtccagacaaaacctgctacaaccccctcttcaactacgaggacatgcaggagatcacccagcactttgccgtctgccacgtggacgcccctggccagcaggacggcgcagcctccttccccgcagggtacatgtacccctccatggatcagctggctgaaatgcttcctggagtccttcaacagtttgggctgaaaagcattattggcatgggaacaggagcaggcgcctacatcctaactcgatttgctctaaacaaccctgagatggtggagggccttgtccttatcaacgtgaacccttgtgcggaaggctggatggactgggccgcctccaagatctcaggatggacccaagctctgccggacatggtggtgtcccacctttttgggaaggaagaaatgcagagtaacgtggaagtggtccacacctaccgccagcacattgtgaatgacatgaaccccggcaacctgcacctgttcatcaatgcctacaacagccggcgcgacctggagattgagcgaccaatgccgggaacccacacagtcaccctgcagtgccctgctctgttggtggttggggacagctcgcctgcagtggatgccgtggtggagtgcaactcaaaattggacccaacaaagaccactctcctcaagatggcggactgtggcggcctcccgcagatctcccagccggccaagctcgctgaggccttcaagtacttcgtgcagggcatgggatacatgccctcggctagcatgacccgcctgatgcggtcccgcacagcctctggttccagcgtcacttctctggatggcacccgcagccgctcccacaccagcgagggcacccgaagccgctcccacaccagcgagggcacccgcagccgctcgcacaccagcgagggggcccacctggacatcacccccaactcgggtgctgctgggaacagcgccgggcccaagtccatggaggtctcctgctaggcggcctgcccagctgccgcccccggactctgatctctgtagtggccccctcctccccggccccttttcgccccctgcctgccatactgcgcctaactcggtattaatccaaagcttattttgtaagagtgagctctggtggagacaaatgaggtctattacgtgggtgccctctccaaaggcggggtggcggtggaccaaaggaaggaagcaagcatctccgcatcgcatcctcttccattaaccagtggccggttgccactctcctcccctccctcagagacaccaaactgccaaaaacaagacgcgtagcagcacacacttcacaaagccaagcctaggccgccctgagcatcctggttcaaacgggtgcctggtcagaaggccagccgcccacttcccgtttcctctttaactgaggagaagctgatccagtttccggaaacaaaatccttttctcatttggggaggggggtaatagtgacatgcaggcacctcttttaaacaggcaaaacaggaagggggaaaaggtgggattcatgtcgaggctagaggcatttggaacaacaaatctacgtagttaacttgaagaaaccgatttttaaagttggtgcatctagaaagctttgaatgcagaagcaaacaagcttgatttttctagcatcctcttaatgtgcagcaaaagcaggcgacaaaatctcctggctttacagacaaaaatatttcagcaaacgttgggcatcatggtttttgaaggctttagttctgctttctgcctctcctccacagccccaacctcccacccctgatacatgagccagtgattattcttgttcagggagaagatcatttagatttgttttgcattccttagaatggagggcaacattccacagctgccctggctgtgatgagtgtccttgcaggggccggagtaggagcactggggtgggggtggaattggggttactcgatgtaagggattccttgttgttgtgttgagatccagtgcagttgtgatttctgtggatcccagcttggttccaggaattttgtgtgattggcttaaatccagttttcaatcttcgacagctgggctggaacgtgaactcagtagctgaacctgtctgacccggtcacgttcttggatcctcagaactctttgctcttgtcggggtgggggtgggaactcacgtggggagcggtggctgagaaaatgtaaggattctggaatacatattccatgggactttccttccctctcctgcttcctcttttcctgctccctaacctttcgccgaatggggcagcaccactgacgtttctgggcggccagtgcggctgccaggttcctgtactactgccttgtacttttcattttggctcaccgtggattttctcataggaagtttggtcagagtgaattgaatattgtaagtcagccactgggacccgaggatttctgggaccccgcagttgggaggaggaagtagtccagccttccaggtggcgtgagaggcaatgactcgttacctgccgcccatcaccttggaggccttccctggccttgagtagaaaagtcggggatcggggcaagagaggctgagtacggatgggaaactattgtgcacaagtctttccagaggagtttcttaatgagatatttgtatttatttccagaccaataaatttgtaactttgc

SEQ ID NO: 20404 - DNA, 2918 bp, Homo sapiens; identical to SEQ ID NO: 20403
  source 1..2918: mol_type = unassigned DNA

SEQ ID NO: 20405 - DNA, 4879 bp, Homo sapiens
  source 1..4879: mol_type = unassigned DNA
ctgctctcgcaactcaagatggcggacgagagtgagacagcagtgaagccgccggcacctccgctgccgcagatgatggaagggaacgggaacggccatgagcactgcagcgattgcgagaatgaggaggacaacagctacaaccggggtggtttgagtccagccaatgacactggagccaaaaagaagaaaaagaaacaaaaaaagaagaaagaaaaaggcagtgagacagattcagcccaggatcagcctgtgaagatgaactctttgccagcagagaggatccaggaaatacagaaggccattgagctgttctcagtgggtcagggacctgccaaaaccatggaggaggctagcaagcgaagctaccagttctgggatacgcagcccgtccccaagctgggcgaagtggtgaacacccatggccccgtggagcctgacaaggacaatatccgccaggagccctacaccctgccccagggcttcacctgggatgctttggacctgggcgatcgtggtgtgctaaaagaactgtacaccctcctgaatgagaactatgtggaagatgatgacaacatgttccgatttgattattccccggagtttcttttgtgggctctccggccacccggctggctcccccagtggcactgtggggttcgagtggtctcaagtcggaaattggttgggttcattagcgccatcccagcaaacatccatatctatgacacagagaagaagatggtagagatcaacttcctgtgtgtccacaagaagctgcgttccaagagggttgctccagttctgatccgagagatcaccaggcgggttcacctggagggcatcttccaagcagtttacactgccggggtggtactaccaaagcccgttggcacctgcaggtattggcatcggtccctaaacccacggaagctgattgaagtgaagttctcccacctgagcagaaatatgaccatgcagcgcaccatgaagctctaccgactgccagagactcccaagacagctgggctgcgaccaatggaaacaaaggacattccagtagtgcaccagctcctcaccaggtacttgaagcaatttcaccttacgcccgtcatgagccaggaggaggtggagcactggttctacccccaggagaatatcatcgacactttcgtggtggagaacgcaaacggagaggtgacagatttcctgagcttttatacgctgccctccaccatcatgaaccatccaacccacaagagtctcaaagctgcttattctttctacaacgttcacacccagacccctcttctagacctcatgagcgacgcccttgtcctcgccaaaatgaaagggtttgatgtgttcaatgcactggatctcatggagaacaaaaccttcctggagaagctcaagtttggcataggggacggcaacctgcagtattacctttacaattggaaatgccccagcatgggggcagagaaggttggactggtgctacaataaccagtcaccagtgcgattctggataaagccactgaaaattcgaaccaggaaatggaaccccaccactgttggtccaattttcacacacgtgagaatccctggcaaagggagcagaactgaaccggctttaccaaaccgccagcgaacttgacaattgtattgcgatggcgtgggctgcgtgacgtcacctccggtcgtgtctctggtctccgtgttttccagttaattacatcctcatgcagccgtgatcaagggaatgtaactgctgaaaactagctcgtgattggcatataatggagttaacgggtgaataataaaagtatatatatatattatatatatataaatattttaaatatctttcatgttccaaatgtacaaggatgtttggtctttaatgaaaagctgaatccagatcattcctcagaatgaggacccgaggacagtggcagacagacgcgttggcacagttcatggtttcctccagaggagacattggcttatcatggggaaaaagaggatctggagaacctcatccagctccccttctgaatcagctgggatgactggctttgagaaggaagggaagatggaacaggctcagatctcatgggatagcacgtggagctcttggctggggctgaccctgggcagggactttcctgcagggccagacctgcctgcattctgagacaaagcaatggacggtccgcagaagcagacctcattgattgagtcctttcttccatccccttggcctgctccctgtaggaagtcatcctgccaactgatttaaaagggctctttagccagttgttgccaaccttatagggatgagtcccctgtgagattttgcttttccactgcctgggatgatgcagtttgaagaggcccttggacctccttgtaacatcagggacctttggagaccattatcagtgtaagccctgcttagctcatcttagagcaaagagccagcaccctgatgtccctggggtggctaggcaggagtggcgtggggccaatacccagaccccttcagccaccagcccctggcctgtgccttccaacccattagccatttcttgttgtgcccctttccaagatacagcctgcaagtggtagcaagaagtgattagaggcagatctggacttggcaacagaagtggtttcccatctccattgtctgagtctgattttcgctgatgctgttttgtggatttttgtggtagtgatggttgtcagtgctgccagtttcccaaaacgtaatcaagcctctggtcacatggctgtcgatgtaggcattctggagtggtgttcagccaagtgaccgggcaaaattgggctgtgaaattgtacttccaggcttggatgtaatttttgctctagagagaagcaagtggtgggaaggaggtagcatgacgtgtggtgtgcgggtttccttgctgccgtcacctctccgctcatacaggaatgaagccttagccaggaggccaggctcagccctgtgccactcaccgaagccactttctacaggccagcaggggcttgttgcaggctgtgggttttggtgtggtttgtcagaggctaattctgcagagtttccaaaaccagaagacatcgtatgcttgggatgggggccgtgccacccgtgggaatgctgcccgctctgcagactgctgctagagccagcaactccactaaggtggattttcatcaggggcctgcagggccctcccttttcccattgttcctgcgctgcaaattgcaggccccagcaatcgtgactgacgtttgctccttgactccaagaaactgagaccaaagaagctgctgttcttagcaagatgcgcactgcattccacaggtgggaggagtcggagaggcaggggcttgctttgcagccccacagacaacagttgcacagtgcctcaagccccagagtggctcaccctgtccagacctttgaggatatcaaaggacaaagtgcccaagtctttcctaccttgggggaacctggaacttggaaaggctccctgtcctagtcttgatctgttctgggccaggtcccagcttgagctgcctctgagatttgggctgtgcggatctctggagtgagctctgtttcggttgacccaggtcatggaatggaaacggtgaggccccagtggctgttctggaagaaacagatctcctggcaaaggccccagcatctccctcactgaaaccaggtggccggctcctcggactctgctttatgttgcggtgagaactctgcccaggtgtgcagggtttggcttgtgggctgcttgctgctcatctgatttttgtcccagtagtccctgcgttcttcattcaaccccttctgggacttcagctcagagagcaccatcccgggggtcagggcctccccacaggagccctgcagtgtggtagcgccatggctgtctcaaaccaagcaaaggaaggaccctgaggccttcacgctaaccgtcctcgagcaactgctgttggaaggcctccctgggcctggcccccaccctctgccacccagtcctcccagctgccatgtttcaaagacgacctttacctcctgcctttggattgactctgcatttgaccacggactccagtctgtgtgtagggagagagctgagtaggaggcctccactccggatcgaggcctgtatagggctcgtttccccacacatgcctatttctgaagaggcttctgtcttatttgaaggccagcccacacccagctactttaacaccaggtttatggaaaatgtcaggccttccccacaactcctgtctaactgctgtcgcccccctacttgctggctctcagaagcctaggggagtccctgtggtcctgaattctttccccaaagacgaccagcatttaaccaacctaagggcccaaaggccttggacaactgcatggagctgcactctaggagaaggaggggaaccagatgttagatcaggggagggagcaggagtgtccctcccgtcagtgcctacccacctgtgaggcagccttctgatggcctggcccaccttccccagaaccaggggaggcctgaggcttcagttttactctgctgcaaaatgaaggcgggcctgcaagccgactacacctacggaggctgttgaggacaatttcattccattaaattaaaaaatactgactggctggcaggcaggtgccatgtctgggaacagggacgggggagcttcacctttttgtcttggcttttctttgggctgtgggggggcatccatttccagggtcggggaggaaataccaaatgcattgttgttctgctcaatacatctcacttgtttctaataaagaaagcagctg

SEQ ID NO: 20406 - DNA, 1066 bp, Homo sapiens
  source 1..1066: mol_type = unassigned DNA
gcaactcaagatggcggacgagagtgagacagcagtgaagccgccggcacctccgctgccgcagatgatggaagggaacgggaacggccatgagcactgcagcgattgcgagaatgaggaggacaacagctacaaccggggtggtttgagtccagccaatgacactggagccaaaaagaagaaaaagaaacaaaaaaagaagaaagaaaaaggcagtgagacagattcagcccaggatcagcctgtgaagatgaactctttgccagcagagaggatccaggaaatacagaaggccattgagctgttctcagtgggtcagggacctgccaaaaccatggaggaggctagcaagcgaagctaccagttctgggatacgcagcccgtccccaagctggctaaaagaactgtacaccctcctgaatgagaactatgtggaagatgatgacaacatgttccgatttgattattccccggagtttcttttgtgggctctccggccacccggctggctcccccagtggcactgtggggttcgagtggtctcaagtcggaaattggttgggttcattagcgccatcccagcaaacatccatatctatgacacagagaagaagatggtagagatcaacttcctgtgtgtccacaagaagctgcgttccaagagggttgctccagttctgatccgagagatcaccaggcgggttcacctggagggcatcttccaagcagtttacactgccggggtggtactaccaaagcccgttggcacctgcaggtaaaactgtcttcctgtaaggccccaaaaatgcgggtgtctgcactgtagttgaggagcatgtgccactgtgagtcacagctccgcccttagcatcccacctctggcgtatctggtaaggcgggcacttggtgcctgcaggagccagatggggagcatggagagggcgggagggttgtagggatggcagattggcaagtccctgccttgtctggagggctcttggtgtctgctggctgctgccatttggagatggtggggggcggtactggtggtttgtttttgttttta

SEQ ID NO: 20407 - DNA, 4999 bp, Homo sapiens
  source 1..4999: mol_type = unassigned DNA
caggccggctcagcgggcgaggcgggacctcgggagcgcgcgcctgcagaccggacgtccggccagcaggcggggccgggagaggaaccccccatgtagtggggcgcggagccctgctctcgcaactcaagatggcggacgagagtgagacagcagtgaagccgccggcacctccgctgccgcagatgatggaagggaacgggaacggccatgagcactgcagcgattgcgagaatgaggaggacaacagctacaaccggggtggtttgagtccagccaatgacactggagccaaaaagaagaaaaagaaacaaaaaaagaagaaagaaaaaggcagtgagacagattcagcccaggatcagcctgtgaagatgaactctttgccagcagagaggatccaggaaatacagaaggccattgagctgttctcagtgggtcagggacctgccaaaaccatggaggaggctagcaagcgaagctaccagttctgggatacgcagcccgtccccaagctgggcgaagtggtgaacacccatggccccgtggagcctgacaaggacaatatccgccaggagccctacaccctgccccagggcttcacctgggatgctttggacctgggcgatcgtggtgtgctaaaagaactgtacaccctcctgaatgagaactatgtggaagatgatgacaacatgttccgatttgattattccccggagtttcttttgtgggctctccggccacccggctggctcccccagtggcactgtggggttcgagtggtctcaagtcggaaattggttgggttcattagcgccatcccagcaaacatccatatctatgacacagagaagaagatggtagagatcaacttcctgtgtgtccacaagaagctgcgttccaagagggttgctccagttctgatccgagagatcaccaggcgggttcacctggagggcatcttccaagcagtttacactgccggggtggtactaccaaagcccgttggcacctgcaggtattggcatcggtccctaaacccacggaagctgattgaagtgaagttctcccacctgagcagaaatatgaccatgcagcgcaccatgaagctctaccgactgccagagactcccaagacagctgggctgcgaccaatggaaacaaaggacattccagtagtgcaccagctcctcaccaggtacttgaagcaatttcaccttacgcccgtcatgagccaggaggaggtggagcactggttctacccccaggagaatatcatcgacactttcgtggtggagaacgcaaacggagaggtgacagatttcctgagcttttatacgctgccctccaccatcatgaaccatccaacccacaagagtctcaaagctgcttattctttctacaacgttcacacccagacccctcttctagacctcatgagcgacgcccttgtcctcgccaaaatgaaagggtttgatgtgttcaatgcactggatctcatggagaacaaaaccttcctggagaagctcaagtttggcataggggacggcaacctgcagtattacctttacaattggaaatgccccagcatgggggcagagaaggttggactggtgctacaataaccagtcaccagtgcgattctggataaagccactgaaaattcgaaccaggaaatggaaccccaccactgttggtccaattttcacacacgtgagaatccctggcaaagggagcagaactgaaccggctttaccaaaccgccagcgaacttgacaattgtattgcgatggcgtgggctgcgtgacgtcacctccggtcgtgtctctggtctccgtgttttccagttaattacatcctcatgcagccgtgatcaagggaatgtaactgctgaaaactagctcgtgattggcatataatggagttaacgggtgaataataaaagtatatatatatattatatatatataaatattttaaatatctttcatgttccaaatgtacaaggatgtttggtctttaatgaaaagctgaatccagatcattcctcagaatgaggacccgaggacagtggcagacagacgcgttggcacagttcatggtttcctccagaggagacattggcttatcatggggaaaaagaggatctggagaacctcatccagctccccttctgaatcagctgggatgactggctttgagaaggaagggaagatggaacaggctcagatctcatgggatagcacgtggagctcttggctggggctgaccctgggcagggactttcctgcagggccagacctgcctgcattctgagacaaagcaatggacggtccgcagaagcagacctcattgattgagtcctttcttccatccccttggcctgctccctgtaggaagtcatcctgccaactgatttaaaagggctctttagccagttgttgccaaccttatagggatgagtcccctgtgagattttgcttttccactgcctgggatgatgcagtttgaagaggcccttggacctccttgtaacatcagggacctttggagaccattatcagtgtaagccctgcttagctcatcttagagcaaagagccagcaccctgatgtccctggggtggctaggcaggagtggcgtggggccaatacccagaccccttcagccaccagcccctggcctgtgccttccaacccattagccatttcttgttgtgcccctttccaagatacagcctgcaagtggtagcaagaagtgattagaggcagatctggacttggcaacagaagtggtttcccatctccattgtctgagtctgattttcgctgatgctgttttgtggatttttgtggtagtgatggttgtcagtgctgccagtttcccaaaacgtaatcaagcctctggtcacatggctgtcgatgtaggcattctggagtggtgttcagccaagtgaccgggcaaaattgggctgtgaaattgtacttccaggcttggatgtaatttttgctctagagagaagcaagtggtgggaaggaggtagcatgacgtgtggtgtgcgggtttccttgctgccgtcacctctccgctcatacaggaatgaagccttagccaggaggccaggctcagccctgtgccactcaccgaagccactttctacaggccagcaggggcttgttgcaggctgtgggttttggtgtggtttgtcagaggctaattctgcagagtttccaaaaccagaagacatcgtatgcttgggatgggggccgtgccacccgtgggaatgctgcccgctctgcagactgctgctagagccagcaactccactaaggtggattttcatcaggggcctgcagggccctcccttttcccattgttcctgcgctgcaaattgcaggccccagcaatcgtgactgacgtttgctccttgactccaagaaactgagaccaaagaagctgctgttcttagcaagatgcgcactgcattccacaggtgggaggagtcggagaggcaggggcttgctttgcagccccacagacaacagttgcacagtgcctcaagccccagagtggctcaccctgtccagacctttgaggatatcaaaggacaaagtgcccaagtctttcctaccttgggggaacctggaacttggaaaggctccctgtcctagtcttgatctgttctgggccaggtcccagcttgagctgcctctgagatttgggctgtgcggatctctggagtgagctctgtttcggttgacccaggtcatggaatggaaacggtgaggccccagtggctgttctggaagaaacagatctcctggcaaaggccccagcatctccctcactgaaaccaggtggccggctcctcggactctgctttatgttgcggtgagaactctgcccaggtgtgcagggtttggcttgtgggctgcttgctgctcatctgatttttgtcccagtagtccctgcgttcttcattcaaccccttctgggacttcagctcagagagcaccatcccgggggtcagggcctccccacaggagccctgcagtgtggtagcgccatggctgtctcaaaccaagcaaaggaaggaccctgaggccttcacgctaaccgtcctcgagcaactgctgttggaaggcctccctgggcctggcccccaccctctgccacccagtcctcccagctgccatgtttcaaagacgacctttacctcctgcctttggattgactctgcatttgaccacggactccagtctgtgtgtagggagagagctgagtaggaggcctccactccggatcgaggcctgtatagggctcgtttccccacacatgcctatttctgaagaggcttctgtcttatttgaaggccagcccacacccagctactttaacaccaggtttatggaaaatgtcaggccttccccacaactcctgtctaactgctgtcgcccccctacttgctggctctcagaagcctaggggagtccctgtggtcctgaattctttccccaaagacgaccagcatttaaccaacctaagggcccaaaggccttggacaactgcatggagctgcactctaggagaaggaggggaaccagatgttagatcaggggagggagcaggagtgtccctcccgtcagtgcctacccacctgtgaggcagccttctgatggcctggcccaccttccccagaaccaggggaggcctgaggcttcagttttactctgctgcaaaatgaaggcgggcctgcaagccgactacacctacggaggctgttgaggacaatttcattccattaaattaaaaaatactgactggctggcaggcaggtgccatgtctgggaacagggacgggggagcttcacctttttgtcttggcttttctttgggctgtgggggggcatccatttccagggtcggggaggaaataccaaatgcattgttgttctgctcaatacatctcacttgtttctaataaagaaagcagctgaacaaaa

SEQ ID NO: 20408 - DNA, 1844 bp, Homo sapiens
  source 1..1844: mol_type = unassigned DNA
agccagcgccgccgcgatggcggaggacagcgagtctgcggccagccagcagagcctggaactggacgaccaggacacgtgcgggatagacggggacaatgaggaggagacggagcacgccaaaggaagtcctggagggtatttgggagccaaaaagaaaaagaagaaacagaagagaaaaaaggagaaaccaaattccggaggcaccaagtcagactcggcatctgattcccaggagattaaaattcagcagccttcgaaacacaacaccatctggcagcagatttcagcgggagcagccatgggtagtgctactatggaaggtgaatggacaggcatgagaaatgatcataagaatcccagtgttccaatgcagaagttgcaggatatccagagagcaatggagctgctatccgcatgccagggcccagccaggaacattgatgaggctgcaaagcacagataccagttttgggacacacaaccggtaccaaaactagatgaagtcataacatctcatggtgcaattgaaccagataaagacaacgtacgccaagaaccgtattctttgccacagggttttatgtgggacactttagacttgagtgatgccgaagtgctcaaggagttatacacgttgttaaatgagaattacgtagaagatgatgacaatatgttccgatttgactattcacccgagttcctgttgtgggctctgcgtccaccaggctggctcctgcagtggcactgtggggtcagagtgtcttcaaataaaaaactggtcgggttcataagtgccatcccagcaaacattcggatttatgacagtgtgaagaagatggtagaaatcaactttctttgtgttcataagaagttgagatcgaaacgggtagccccagtgctaatccgagagatcactagaagagtgaacctggaagggatcttccaggctgtgtacaccgcgggagtggttcttcctaagcccatagccacatgcagatactggcatcgatcactaaaccccagaaaattggtagaagtgaaattttctcacttgagtagaaatatgactttacagagaacaatgaagctatacagacttccagatgttacaaagacttcaggtttgagaccaatggaaccaaaagatatcaaatcagttcgagaattaatcaacacttacctgaagcagtttcatctggctccagtgatggatgaagaggaagtagcccactggttcctcccccgggagcacattattgacacgtttgtagtggagagccccaacggtaaactgactgatttcctgagcttctatacgctcccctccacggtgatgcaccaccctgctcacaagagcctcaaagccgcctactcattctacaacatccacacagagacgcccctgctggacctcatgagcgacgcgctcatcctggctaaatcgaaaggatttgatgtattcaatgcactggatttgatggaaaataagacattcttggaaaaactcaagtttggtataggagatggcaatttgcagtattacctgtacaattggaggtgtccaggtacagattctgaaaaggttggactagtactacaatagatggatatttttatttctagaactctgacatcatcatttgttaatatttaatgatttctggaactgccattccaaagaagaataaaagcacaactcaagtgaaattgaagtagtcgataatcagaaaagatgacaaaagtccacatgtgacatttgtacgtttctagctagaatgttaaacttcatcctttttttactgttgacctatttgtgggagggatgaaaggctacaaagagc

SEQ ID NO: 20409 - DNA, 2457 bp, Homo sapiens
  source 1..2457: mol_type = unassigned DNA
agccagcgccgccgcgatggcggaggacagcgagtctgcggccagccagcagagcctggaactggacgaccaggacacgtgcgggatagacggggacaatgaggaggagacggagcacgccaaaggaagtcctggagggtatttgggagccaaaaagaaaaagaagaaacagaagagaaaaaaggagaaaccaaattccggaggcaccaagtcagactcggcatctgattcccaggagattaaaattcagcagccttcgaaacacaacaccatctggcagcagatttcagcgggagcagccatggaatcccagtgttccaatgcagaagttgcaggatatccagagagcaatggagctgctatccgcatgccagggcccagccaggaacattgatgaggctgcaaagcacagataccagttttgggacacacaaccggtaccaaaactagatgaagtcataacatctcatggtgcaattgaaccagataaagacaacgtacgccaagaaccgtattctttgccacagggttttatgtgggacactttagacttgagtgatgccgaagtgctcaaggagttatacacgttgttaaatgagaattacgtagaagatgatgacaatatgttccgatttgactattcacccgagttcctgttgtgggctctgcgtccaccaggctggctcctgcagtggcactgtggggtcagagtgtcttcaaataaaaaactggtcgggttcataagtgccatcccagcaaacattcggatttatgacagtgtgaagaagatggtagaaatcaactttctttgtgttcataagaagttgagatcgaaacgggtagccccagtgctaatccgagagatcactagaagagtgaacctggaagggatcttccaggctgtgtacaccgcgggagtggttcttcctaagcccatagccacatgcagatactggcatcgatcactaaaccccagaaaattggtagaagtgaaattttctcacttgagtagaaatatgactttacagagaacaatgaagctatacagacttccagatgttacaaagacttcaggtttgagaccaatggaaccaaaagatatcaaatcagttcgagaattaatcaacacttacctgaagcagtttcatctggctccagtgatggatgaagaggaagtagcccactggttcctcccccgggagcacattattgacacgtttgtagtggagagccccaacggtaaactgactgatttcctgagcttctatacgctcccctccacggtgatgcaccaccctgctcacaagagcctcaaagccgcctactcattctacaacatccacacagagacgcccctgctggacctcatgagcgacgcgctcatcctggctaaatcgaaaggatttgatgtattcaatgcactggatttgatggaaaataagacattcttggaaaaactcaagtttggtataggagatggcaatttgcagtattacctgtacaattggaggtgtccaggtacagattctgaaaaggttggactagtactacaatagatggatatttttatttctagaactctgacatcatcatttgttaatatttaatgatttctggaactgccattccaaagaagaataaaagcacaactcaagtgaaattgaagtagtcgataatcagaaaagatgacaaaagtccacatgtgacatttgtacgtttctagctagaatgttaaacttcatcctttttttactgttgacctatttgtgggagggatgaaaggctacaaagagcacattcttgtaattttcaaatttttgcctgtctcttgaagaggtattttttcacccttagaaaagggactgtttttctatggactaagtagaagttacagagtcatgtaagaaaatctttgctattgtgtggagagaaattgctgcatttctgtttcttaagtgatggtacatttgtccatgtaacagaacaaaagatccatttggaaattttttttactggtatcaccttacatggtatcactgggaacatttatggaatcaacacttctgtagctcagtgacaggtggtggttgtttaagtgcagagcaatattaaaatgtactggtgactagtacatgtatttctccataagcagagttgccgaatcaataaacatgcaagtttgtactttgatctttaccaggtcagtggattgcttcaaaagcagagttttgtgcaagcactcactgtgctctctgaaagagcctgaggccgggcgtggtggctcacgcctgtaatcccagcactttgggaggccaaggtgggcagatcatgaggtcaggagatcgagaccattctggccaacatagtgaaaccccatctctactaaaaatacaaaaattagccgggcgtggtggcgtgtgcctgtagtcccagctgcttgggaggctgaggcaggag

SEQ ID NO: 20410 - DNA, 2869 bp, Homo sapiens
  source 1..2869: mol_type = unassigned DNA
agtacggcgggaggcactagagggagctgcggccgctccggcccggccccgagcaccgcctccccagccagcgccgccgcgatggcggaggacagcgagtctgcggccagccagcagagcctggaactggacgaccaggacacgtgcgggatagacggggacaatgaggaggagacggagcacgccaaaggaagtcctggagggtatttgggagccaaaaagaaaaagaagaaacagaagagaaaaaaggagaaaccaaattccggaggcaccaagtcagactcggcatctgattcccaggagattaaaattcagcagccttcgaaaaatcccagtgttccaatgcagaagttgcaggatatccagagagcaatggagctgctatccgcatgccagggcccagccaggaacattgatgaggctgcaaagcacagataccagttttgggacacacaaccggtaccaaaactagatgaagtcataacatctcatggtgcaattgaaccagataaagacaacgtacgccaagaaccgtattctttgccacagggttttatgtgggacactttagacttgagtgatgccgaagtgctcaaggagttatacacgttgttaaatgagaattacgtagaagatgatgacaatatgttccgatttgactattcacccgagttcctgttgtgggctctgcgtccaccaggctggctcctgcagtggcactgtggggtcagagtgtcttcaaataaaaaactggtcgggttcataagtgccatcccagcaaacattcggatttatgacagtgtgaagaagatggtagaaatcaactttctttgtgttcataagaagttgagatcgaaacgggtagccccagtgctaatccgagagatcactagaagagtgaacctggaagggatcttccaggctgtgtacaccgcgggagtggttcttcctaagcccatagccacatgcagatactggcatcgatcactaaaccccagaaaattggtagaagtgaaattttctcacttgagtagaaatatgactttacagagaacaatgaagctatacagacttccagatgttacaaagacttcaggtttgagaccaatggaaccaaaagatatcaaatcagttcgagaattaatcaacacttacctgaagcagtttcatctggctccagtgatggatgaagaggaagtagcccactggttcctcccccgggagcacattattgacacgtttgtagtggagagccccaacggtaaactgactgatttcctgagcttctatacgctcccctccacggtgatgcaccaccctgctcacaagagcctcaaagccgcctactcattctacaacatccacacagagacgcccctgctggacctcatgagcgacgcgctcatcctggctaaatcgaaaggatttgatgtattcaatgcactggatttgatggaaaataagacattcttggaaaaactcaagtttggtataggagatggcaatttgcagtattacctgtacaattggaggtgtccaggtacagattctgaaaaggttggactagtactacaatagatggatatttttatttctagaactctgacatcatcatttgttaatatttaatgatttctggaactgccattccaaagaagaataaaagcacaactcaagtgaaattgaagtagtcgataatcagaaaagatgacaaaagtccacatgtgacatttgtacgtttctagctagaatgttaaacttcatcctttttttactgttgacctatttgtgggagggatgaaaggctacaaagagcacattcttgtaattttcaaatttttgcctgtctcttgaagaggtattttttcacccttagaaaagggactgtttttctatggactaagtagaagttacagagtcatgtaagaaaatctttgctattgtgtggagagaaattgctgcatttctgtttcttaagtgatggtacatttgtccatgtaacagaacaaaagatccatttggaaattttttttactggtatcaccttacatggtatcactgggaacatttatggaatcaacacttctgtagctcagtgacaggtggtggttgtttaagtgcagagcaatattaaaatgtactggtgactagtacatgtatttctccataagcagagttgccgaatcaataaacatgcaagtttgtactttgatctttaccaggtcagtggattgcttcaaaagcagagttttgtgcaagcactcactgtgctctctgaaagagcctgaggccgggcgtggtggctcacgcctgtaatcccagcactttgggaggccaaggtgggcagatcatgaggtcaggagatcgagaccattctggccaacatagtgaaaccccatctctactaaaaatacaaaaattagccgggcgtggtggcgtgtgcctgtagtcccagctgcttgggaggctgaggcaggagaatcgcttgaacctgagaggtgaggttgcagtgagccgagatcgagccactgcactccagcctgggtgacagagcgtgagactccgtctcaaaaaaaaaaaaaaagaaagagcctgtacccgcgactaactagacttttctgctgttgtgcaaagttcagtttcttctcagcaacatcaaggatatatgaagaaaaggaaataaaaaactgtaaagtcaaaagagatgcctggtggaacttattcgtgctatcagggcattgatagtttgaatgtttttattacttatgcaaaattgcacatactcctctatgctgattttatcatgaaaactgtcatgtgtcatgctaatggaaaatgtcttatttgtaaataagtattcataattttg

SEQ ID NO: 20411 - DNA, 1554 bp, Homo sapiens
  source 1..1554: mol_type = unassigned DNA
agcgccgccgcgatggcggaggacagcgagtctgcggccagccagcagagcctggaactggacgaccaggacacgtgcgggatagacggggacaatgaggaggagacggagcacgccaaaggaagtcctggagggtatttgggagccaaaaagaaaaagaagaaacagaagagaaaaaaggagaaaccaaattccggaggcaccaagtcagactcggcatctgattcccaggagattaaaattcagcagccttcgaaaaatcccagtgttccaatgcagaagttgcaggatatccagagagcaatggagctgctatccgcatgccagggcccagccaggaacattgatgaggctgcaaagcacagataccagttttgggacacacaaccggtaccaaaactagatgaagtcataacatctcatggtgcaattgaaccagataaagacaacgtacgccaagaaccgtattctttgccacagggttttatgtgggacactttagacttgagtgatgccgaagtgctcaaggagttatacacgttgttaaatgagaattacgtagaagatgatgacaatatgttccgatttgactattcacccgagttcctgttgtgggctctgcgtccaccaggctggctcctgcagtggcactgtggggtcagagtgtcttcaaataaaaaactggtcgggttcataagtgccatcccagcaaacattcggatttatgacagtgtgaagaagatggtagaaatcaactttctttgtgttcataagaagttgagatcgaaacgggtagccccagtgctaatccgagagatcactagaagagtgaacctggaagggatcttccaggctgtgtacaccgcgggagtggttcttcctaagcccatagccacatgcagatactggcatcgatcactaaaccccagaaaattggtagaagtgaaattttctcacttgagtagaaatatgactttacagagaacaatgaagctatacagacttccagatgttacaaagacttcaggtttgagaccaatggaaccaaaagatatcaaatcagttcgagaattaatcaacacttacctgaagcagtttcatctggctccagtgatggatgaagaggaagtagcccactggttcctcccccgggagcacattattgacacgtttgtagtggagagccccaacggtaaactgactgatttcctgagcttctatacgctcccctccacggtgatgcaccaccctgctcacaagagcctcaaagccgcctactcattctacaacatccacacagagacgcccctgctggacctcatgagcgacgcgctcatcctggctaaatcgaaaggatttgatgtattcaatgcactggatttgatggaaaataagacattcttggaaaaactcaagtttggtataggagatggcaatttgcagtattacctgtacaattggaggtgtccaggtacagattctgaaaagggctctggtaacttcgttaacgccaatggcaagctgcttcctgacgtgtgcaggcgtccaccctga

SEQ ID NO: 20412 - DNA, 1613 bp, Homo sapiens
  source 1..1613: mol_type = unassigned DNA
ggtctcccgttcgggggtggctcccaggactgggggttcttcggccgctccgccccgcgatggcttctccgtggcgcggagcccatgaagtcctggagggtatttgggagccaaaaagaaaaagaagaaacagaagagaaaaaaggagaaaccaaattccggaggcaccaagtcagactcggcatctgattcccaggagattaaaattcagcagccttcgaaacacaacaccatctggcagcagatttcagcgggagcagccatggaatcccagtgttccaatgcagaagttgcaggatatccagagagcaatggagctgctatccgcatgccagggcccagccaggaacattgatgaggctgcaaagcacagataccagttttgggacacacaaccggtaccaaaactagatgaagtcataacatctcatggtgcaattgaaccagataaagacaacgtacgccaagaaccgtattctttgccacagggttttatgtgggacactttagacttgagtgatgccgaagtgctcaaggagttatacacgttgttaaatgagaattacgtagaagatgatgacaatatgttccgatttgactattcacccgagttcctgttgtgggctctgcgtccaccaggctggctcctgcagtggcactgtggggtcagagtgtcttcaaataaaaaactggtcgggttcataagtgccatcccagcaaacattcggatttatgacagtgtgaagaagatggtagaaatcaactttctttgtgttcataagaagttgagatcgaaacgggtagccccagtgctaatccgagagatcactagaagagtgaacctggaagggatcttccaggctgtgtacaccgcgggagtggttcttcctaagcccatagccacatgcagatactggcatcgatcactaaaccccagaaaattggtagaagtgaaattttctcacttgagtagaaatatgactttacagagaacaatgaagctatacagacttccagatgttacaaagacttcaggtttgagaccaatggaaccaaaagatatcaaatcagttcgagaattaatcaacacttacctgaagcagtttcatctggctccagtgatggatgaagaggaagtagcccactggttcctcccccgggagcacattattgacacgtttgtagtggagagccccaacggtaaactgactgatttcctgagcttctatacgctcccctccacggtgatgcaccaccctgctcacaagagcctcaaagccgcctactcattctacaacatccacacagagacgcccctgctggacctcatgagcgacgcgctcatcctggctaaatcgaaaggatttgatgtattcaatgcactggatttgatggaaaataagacattcttggaaaaactcaagtttggtataggagatggcaatttgcagtattacctgtacaattggaggtgtccaggtacagattctgaaaaggttggactagtactacaatagatggatatttttatttctagaactctgacatcatcatttgttaatatttaatgatttctggaactgccattccaaagaagaataaaagcacaactc

SEQ ID NO: 20413 - DNA, 1832 bp, Homo sapiens
  source 1..1832: mol_type = unassigned DNA
gaatttgttactgctcacgcctttctgtgggtcatggcttcctctgcttctgagagtgtctcctgatctttcttctcctcttctctaagttcaagttgctctcacctcatctccccagccctctgctcgggaagaccctcattctcctgccccaagctgtggctcctagagaagtcctggagggtatttgggagccaaaaagaaaaagaagaaacagaagagaaaaaaggagaaaccaaattccggaggcaccaagtcagactcggcatctgattcccaggagattaaaattcagcagccttcgaaaaatcccagtgttccaatgcagaagttgcaggatatccagagagcaatggagctgctatccgcatgccagggcccagccaggaacattgatgaggctgcaaagcacagataccagttttgggacacacaaccggtaccaaaactagatgaagtcataacatctcatggtgcaattgaaccagataaagacaacgtacgccaagaaccgtattctttgccacagggttttatgtgggacactttagacttgagtgatgccgaagtggtgagtgagtaaaaacctcttaaattcaactcctgcattcacacattgcttctaagttgattctgagcaccatggataggacacttgttttatcttatagctcaaggagttatacacgttgttaaatgagaattacgtagaagatgatgacaatatgttccgatttgactattcacccgagttcctgttgtgggctctgcgtccaccaggctggctcctgcagtggcactgtggggtcagagtgtcttcaaataaaaaactggtcgggttcataagtgccatcccagcaaacattcggatttatgacagtgtgaagaagatggtagaaatcaactttctttgtgttcataagaagttgagatcgaaacgggtagccccagtgctaatccgagagatcactagaagagtgaacctggaagggatcttccaggctgtgtacaccgcgggagtggttcttcctaagcccatagccacatgcagatactggcatcgatcactaaaccccagaaaattggtagaagtgaaattttctcacttgagtagaaatatgactttacagagaacaatgaagctatacagacttccagatgttacaaagacttcaggtttgagaccaatggaaccaaaagatatcaaatcagttcgagaattaatcaacacttacctgaagcagtttcatctggctccagtgatggatgaagaggaagtagcccactggttcctcccccgggagcacattattgacacgtttgtagtggagagccccaacggtaaactgactgatttcctgagcttctatacgctcccctccacggtgatgcaccaccctgctcacaagagcctcaaagccgcctactcattctacaacatccacacagagacgcccctgctggacctcatgagcgacgcgctcatcctggctaaatcgaaaggatttgatgtattcaatgcactggatttgatggaaaataagacattcttggaaaaactcaagtttggtataggagatggcaatttgcagtattacctgtacaattggaggtgtccaggtacagattctgaaaaggttggactagtactacaatagatggatatttttatttctagaactctgacatcatcatttgttaatatttaatgatttctggaactgccattccaaagaagaataaaagcacaactcaagtgaaattgaagtagtcgataatcagaaaagatgacaaaagtccacatgtgacatttgtacgtttctagctagaat

SEQ ID NO: 20414 - DNA, 1725 bp, Homo sapiens
  source 1..1725: mol_type = unassigned DNA
atggaacccacagagaatccctgccagggaccgctgggccagaaagctggagagaagcccctggctgcaggacccggggaggaggaactgctccggggctcagcccctcatgctcaggacactcagagtgaggaactgccaccctcctgcaccatctcaggagagaagaagccgccagcagtctctggagaagccaccggggctgatgctgggagactgtgcccgcccccccgctccagggctccccacaaagacagaactctagcccgctccaggccccagactcagggggaagattgttccctcccagtgggagaggtgaagataggaaagaggtcctattctccagcccccgggaagcagaaaaagcctaatgccatgggtctggccccaacatcatctccgggtgcccctaactcagcccgtgccacacacaacccagtgccctgtgggtcaggccgggggccctgccacctggccaatctcctcagtacattggcgcagagcaaccaaaacagagaccacaagcaggggcccccggaagtgacctgccaaattaggaaaaagacacgaaccctataccgctcagatcagctggaggagctagagaagatattccaagaagaccactatcctgacagtgataaacgccgagagattgcccagacggtgggggtgaccccccagcgcatcatggtgtggttccagaatcgccgggccaagtggcgaaaaatggagaaactgaatgggaaagaaagcaaggacaatcctgcagcccctggccctgccagcagtcaatgcagctctgcagctgagatcctacctgctgtgcccatggagccaaagcctgaccctttccctcaggagtcccctctggatacctttccagagccccccatgctgctgacttctgaccagactttggcccccacccaacccagtgagggtgctcagagggtggtgacccccccactcttcagccccccacctgtgcgaagggccgatcttcctttcccccttggccctgtccacaccccccaactgatgccactgctgatggatgttgctggcagtgacagcagccacaaggacggcccctgtgggtcctgggggacaagcatcaccctgccacccccctgttcatatttggaggagctggagccccaggattaccaacagagcaaccagccaggacccttccagttctcccaggctccacagcccccgcttttccagtcccctcagcccaagttgccctacctccccactttccccttctccatgcccagttcactgacgcttccaccgcccgaagactctctctttatgtttccctgtggccccagcgggggcacatcgcagggctattgcccaggtgcctcctcaggacagatcctgatgcaaccacctgctgggaatataggtacagcctcctggagtgacccctgtttgccagagctgcccttccctggtccgttctgcccacaagctctggggcatcccccaggaggggatggctactttcctgatctatttccaactccctgcccccaggctctgggcaggcagccttcgtcagctctctcatggatgcctgaaggggccagaccagggactgggcccttactcagcaaggcaaaagaggaaccaccagctgcttccctggatcagccctcagcactggaggaggccagaggggatgacaagaatagccatgtcccctag

SEQ ID NO: 20415 - DNA, 2076 bp, Homo sapiens
  source 1..2076: mol_type = unassigned DNA
atggctctccttttgacactaacatcaccagacctggagggtacctgggacaccagagacaaggatggcttcaaagcccaggaggggccgcccctggctgtacctgaatttcctgtgtgtggactgtaccggatctacggagtctgtggctctttcagctccttcttcatcatccggtgcagcctttgtgctctggagaccctcaaatcaccccaacatgatcccttagagatacctgaacagtccctcaaactcatacccctggtgtctgggaaaagggaactcacaaggggccagaaagctggagagaagcccctggctgcaggacccggggaggaggaactgctccggggctcagcccctcatgctcaggacactcagagtgaggaactgccaccctcctgcaccatctcaggagagaagaagccgccagcagtctctggagaagccaccggggctgatgctgggagactgtgcccgcccccccgctccagggctccccacaaagacagaactctagcccgctccaggccccagactcagggggaagattgttccctcccagtgggagaggtgaagataggaaagaggtcctattctccagcccccgggaagcagaaaaagcctaatgccatgggtctggccccaacatcatctccgggtgcccctaactcagcccgtgccacacacaacccagtgccctgtgggtcaggccgggggccctgccacctggccaatctcctcagtacattggcgcagagcaaccaaaacagagaccacaagcaggggcccccggaagtgacctgccaaattaggaaaaagacacgaaccctataccgctcagatcagctggaggagctagagaagatattccaagaagaccactatcctgacagtgataaacgccgagagattgcccagacggtgggggtgaccccccagcgcatcatggtaaagggggccggctcactggtggcagggtggagtggcggagggcccaccattgaaacactcgaattgcagagtgagcgctcagcggtagcctgggtgtggttccagaatcgccgggccaagtggcgaaaaatggagaaactgaatgggaaagaaagcaaggacaatcctgcagcccctggccctgccagcagtcaatgcagctctgcagctgagatcctacctgctgtgcccatggagccaaagcctgaccctttccctcaggagtcccctctggatacctttccagagccccccatgctgctgacttctgaccagactttggcccccacccaacccagtgagggtgctcagagggtggtgacccccccactcttcagccccccacctgtgcgaagggccgatcttcctttcccccttggccctgtccacaccccccaactgatgccactgctgatggatgttgctggcagtgacagcagccacaaggacggcccctgtgggtcctgggggacaagcatcaccctgccacccccctgttcatatttggaggagctggagccccaggattaccaacagagcaaccagccaggacccttccagttctcccaggctccacagcccccgcttttccagtcccctcagcccaagttgccctacctccccactttccccttctccatgcccagttcactgacgcttccaccgcccgaagactctctctttatgtttccctgtggccccagcgggggcacatcgcagggctattgcccaggtgcctcctcaggacagatcctgatgcaaccacctgctgggaatataggtacagcctcctggagtgacccctgtttgccagagctgcccttccctggtccgttctgcccacaagctctggggcatcccccaggaggggatggctactttcctgatctatttccaactccctgcccccaggctctgggcaggcagccttcgtcagctctctcatggatgcctgaaggggccagaccagggactgggcccttactcagcaaggcaaaagaggaaccaccagctgcttccctggatcagccctcagcactggaggaggccagaggggatgacaagaatagccatgtcccctag

SEQ ID NO: 20416 - DNA, 1892 bp, Homo sapiens
  source 1..1892: mol_type = unassigned DNA
aaaccggtgccaacgtgcgcggacgccgccgccgccgccgccgctggagtccgccgggcagagccggccgcggagcccggagcaggcggagggaagtgcccctagaaccagctcagccagcggcgcttgcacagagcggccggacgaagagcagcgagaggaggaggggagagcggctcgtccacgcgccctgcgccgccgccggcccgggaaggcagcgaggagccggcgcctcccgcgccccgcggtcgccctggagtaatttcggatgcccagccgcggccgccttccccagtagacccgggagaggagttgcggccaacttgtgtgcctttcttccgccccggtgggagccggcgctgcgcgaagggctctcccggcggctcatgctgccggccctgcgcctgcccagcctcgggtgagccgcctccggagagacgggggagcgcggcggcgccgcgggctcggcgtgctctcctccggggacgcgggacgaagcagcagccccgggcgcgcgccagaggcatggagcgctgccccagcctaggggtcaccctctacgccctggtggtggtcctggggctgcgggcgacaccggccggcggccagcactatctccacatccgcccggcacccagcgacaacctgcccctggtggacctcatcgaacacccagaccctatctttgaccccaaggaaaaggatctgaacgagacgctgctgcgctcgctgctcgggggccactacgacccaggcttcatggccacctcgccccccgaggaccggcccggcgggggcgggggtgcagctgggggcgcggaggacctggcggagctggaccagctgctgcggcagcggccgtcgggggccatgccgagcgagatcaaagggctagagttctccgagggcttggcccagggcaagaagcagcgcctaagcaagaagctgcggaggaagttacagatgtggctgtggtcgcagacattctgccccgtgctgtacgcgtggaacgacctgggcagccgcttttggccgcgctacgtgaaggtgggcagctgcttcagtaagcgctcgtgctccgtgcccgagggcatggtgtgcaagccgtccaagtccgtgcacctcacggtgctgcggtggcgctgtcagcggcgcgggggccagcgctgcggctggattcccatccagtaccccatcatttccgagtgcaagtgctcgtgctagaactcgggggccccctgcccgcacccggacacttgatcgatccccaccgacgccccctgcaccgcctccaaccagttccaccaccctctagcgagggttttcaatgaacttttttttttttttttttttttttttctgggctacagagacctagctttctggttcctgtaatgcactgtttaactgtgtaggaatgtatatgtgtgtgtatatacggtcccagttttaatttacttattaaaaggtcagtattatacgttaaaagttaccggcttctactgtatttttaaaaaaaagtaagcaaaagaaaaaaaaaagaacagagaaaagagagacttattctggttgttgctaataatgttaacctgctatttatattccagtgcccttcgcatggcgaagcaggggggaaaagttatttttttcttgaagtacaaagagacgggggaacttttgtagaggactttttaaaagctattttccattcttcggaaagtgttttggttttccttggacctcgaagaagctatagagttcaatgttattttacagttattgtaaatatagagaacaaatggaatgactaatcattgtaaattaagagtatctgctatttattctttataatatcccgtgtagtaaatgagaaagaagtgcagagcaggatt

SEQ ID NO: 20417 - DNA, 6567 bp, Homo sapiens
  source 1..6567: mol_type = unassigned DNA
ggctcggagggcgggcgcgggcggaatggggactgcagctgcggcagcggcggcggcggcggcggcggcggccggggagggggcgcgtagcccgagccccgccgccgtgtcgctcggcctgggcgtggccgtcgtgtcgagcctggtgaacgggtccacgttcgtgctacagaagaagggcatcgtgcgtgccaagcggcgaggtacttcctatttaacagacattgtgtggtgggctggcacaatcgcaatggctgttggccagattggaaacttcctggcttacacggcggtccccacggtcctggtaacccccctgggcgcccttggagtaccgttcgggtccattttagcttcctatctcctgaaggaaaagctcaacatcttgggcaagttggggtgcctgctaagctgtgcaggctccgtcgtgctgattatccactccccaaagtctgagagtgtgacaactcaggctgagctggaggaaaagctgaccaatccagtgtttgtgggctacctgtgcatcgtgctgctcatgctgctgctgctcatcttctggatcgcgccggcccatgggcccaccaacatcatggtctacatcagcatctgctccttgctgggcagtttcaccgtgccttccaccaagggcatcgggctggcggcccaagacatcttgcataacaacccgtccagtcagagagccctctgcctgtgcctggtactcctggccgtgctcggctgcagcatcatcgtccagttcaggtacatcaacaaggcgctggagtgcttcgactcctcggtgttcggggccatctactacgtcgtgtttaccacgctggtcctgctggcctcagccatcctcttccgggagtggagcaacgtgggcctggtggacttcttggggatggcctgtggattcacgaccgtctccgtggggattgtccttatacaggtgttcaaagagttcaatttcaaccttggggagatgaacaaatctaatatgaaaacagactagattgcaataggagcttggatggttcgaggaataggcattggaggtggtttctggccgtgattggatgtgaagtagaagaggtcctcgatcatggtgttagaattgactggatagtaacaggtggtctggtggatagcggggagcatggctcagcaccagagcagaggcccagccagccctctgcagcccaaacgtccccaacggttgcctggcaccatctctctctgatgagacgaatctcattttcatttccattaacctggaagctttcatgaatattctcttcttttaaaacattttaacattatttaaacagaaaaagatgggctctttctggttagttgttacatgatagcagagatatttttacttagattactttgggaatgagagattgttgtcttgaactctggcactgtacagtgaatgtgtctgtagttgtgttagtttgcattaagcatgtataacattcaagtatgtcatccaaataagaggcatatacattgaattgtttttaatcctctgacaagttgactcttcgacccccacccccacccaagacattttaatagtaaatagagagagagagaagagttaatgaacatgaggtagtgttccactggcaggatgacttttcaatagctcaaatcaatttcagtgcctttatcacttgaattattaacttaatttgactcttaatgtgtatatgttcttagattagaataatgcaacttcgagtatgctttaatatttcaatattcaagttacaaatgtataaggcagttagaaataatacagtcacatgtcacttaatgatagggaaacattctgagaaatgcattgtaaggtgactttattgtgtgaacatcatggagtgcacttatacaaacctagatgggacacctatgacccacccaggccagatggtacagcctgttgctcctgggccacacacctgtacagcatgtgaccgcactgaataccgcaggcaattgtaacacagtggtgagtatttgtgtttacaaacataggaaaggtacagtaaaactatggtattacaatgttatgggaccaccgtcatgtaagtggtatgtctttgacagaaacatggttacgtggttcatgactgtatattcactggaagatagtcaagactaaagacacattagagcaaattgacccctttaacatgtgattattgtccaattaaagacagttgatttaagtagcatgaggtattattttatttgtattcgatctgtgttacctgggatccagtatcaaatatatccacattctttatcagcaagcattcatggccattcagaagaaataaattaggtaacttgataataaggctaagtgggagagtacctgttcaatagctcatatatcgagtaccctgtcatacaggaacaagttaaaggacacaattgaggttaggctagcttctacaaattgcaatatgcagtttttgaaagattttctaacaaaaagccaataaatgtagccatctccttgttgtttgcaatggcagagcatcctagagttcctcagctaacctctcattatgtgtcttaaatgcaaaagagccattaattatgccagtatttgaatcaaagaggtcattctctgtctatagtgttcccatccatgtgttccaaatgggagcatagcatgaagtgatgcacatatttcaccacggtatcatgtacttcatggccagtgttttatctcagcagggaactacgccaagttgaaagatggggttgggtaaagtagattaggtgaagtagaacataaaattgaatagtacccaattaaagttcctcagtaagaaaaaaaatgtgtttttgtaggcaaaaagaacatttctaaagtctcaaggaatagcttcctaaagtgttgagtaaagaggctaaataaaatgagactagtttaatatagagagaaaaatacctttatggagtaaacgtgtacatgatgatcatgggttgtcagtgatttgtgaactgagagcagcaacaacattattttttaaaaatcttaaatcctctcaatggatggttaacaaatgctcaaagtccattactctttttattggctcttgcaggttttgtgttttatcatcagtgcttttagaaatgcaggccttaacttactgaactgaactttctgaaaacgtaatgtagcagtatcaatatacttttgggcataaaaatagtttcctaggtaaggggtgtgagatattcaaagaatacatgtggctaacaagtgtaatgagaaagttcatgtgtcacatgaaaatgatcatgtttgtgttgctacagcttttgtgggaaatttagtttaaaggcagctcttggtgtaccttagtatattttaatccacaattataccattgatactgagaggtgatacccgatgatcttctctataatattcttagagtaaaacaaaatctcaaaagtattaatagctcttctacccttgaaggtgactggtcctgggacagttagaatctttcaggtttacctctgttcagcagatacttcagtaggatacatagcttttcttccagtgaaacaaagttcatatcatccattgtttttcaagcacgtgacaccagcctcaaagtaaatgacatgaccagtggttgaacagtctaattttcaaatttaatatagagcatataacttctgatttgatagtatttattttaaaaaattatgttttcatcattcatttgaaaatgaaaaagccccaaagtgagaactttgggggagggcctagaacatggatagatctcttagtggtctttccaaaagtacatgtacttgaaatattttcattatcatactattctttgaaaaaaaagatgcttactgtatacttgttttcaagcatcctctaaaatcaaaggttttgatcacaatatgcagatttctcttgatagatacttaaataggctatttctctcctcttcttgggcaatgccttgttttctcctctgaatatttgcatttgaaaggattgcttcctgttctgctcattgatcaaaggtagggccaattaaggattctaaccctaacccagcaccacaaagcccccctggagcatcttcccggctggcaggaccatgccatctctgtggagaaggtgctggggagggaagtccttccagtgccacatggagtgaggccctgcccatgctggggactttggggaggaatttggtattctggtggccttgctcagctctcattgagatcttttcctatcagaatgttagtgaatatacttcgcagctctttgttcagcaataaggaatattctttcaattcctgctcttcaagccaatttactacacccagttgtctttccagaagttcatcccagcggtaatatgttggtgtttgttcttctttggatttcacatctgttttctggtagaagtgagcactgttcacttgtgcagtcgtcttattttccttcttcctagatgactcagctctttgtaaatgttgtgctcaacttctaggggccagttctagactttggagatgcagtgtctcccaggtgtgcacggacacctggtccgtggaaacaggtgtgatgggcacaggctgctgcccttctgtctggtcgggggattcctcttcttcaagctgctcagctaacccagaagaggggagagagtactccggtggttcccagagcccctcccgttgtgccgcttcgacctgacacctgctcgatgctgacttaggcttcctgccaccaagcaggaaactagaaagagaacatttcagtgtaaggtctgttcccgacagcatggattagcttccgtgttctgaagttgttcttttcatggtgtctgacaccgagggcgttgttcgtccatcaggcgggattggatggagtcttggtgttttgccttctcagggaccaaaaatgtatcattgactccttaacagtgaccttcctcccaaggacatatccgtgttcatttttcataggttttactcatattcataggtagattctgttaatgtgagttggaaagaaaagaccaatttgtacaccagtcacaccacaagacagtttatcatataaaatacctcaattttttgtattcctcatttccacctcacaattgtactggtgatgaattttaagggtctgtcctttagcttataggtgatgtttcacatctggccagattcttatacctccattgtatacttgaaaaggttcagaattacaggaacagcagtgagaatttggcccactaccacgactcatttgtttcattcacattcctcacgtgcaacaacataattatattttaagaaaatgtaactttgttacatcaaaatatgttgtctagtaaaaagttgatattcagtagaacaaggatcatgtaaataaacatctatttcacatgtacccaaaagcatttaaaaagcagaatccagggcccagagcatgagccagggaggaggatgtttttcttcttttctctatttttccctaaattgtgcaaacataggtgagtctcttaacctttctgtgcctcagtttttctacctctaaaggggtgggatggttcttcaaattgtttctaaaacaccggcactttcagcagtgttctggtggcctgagatgagagcaccgtgttcagaagtgcctgggagtggcacagtggaaactccgcttgcacggaccatggagtctgctcaggaccatgctgtaggacacacagcctcatgcgctgagaaagcaaaggaagtgctgggtgtaaagtttgcatgattccatgaagctttagttttcctttttttgttttaaaagaaagggttttatatgttctattgtaaaatatggaaattaaacagggacttcagaaagccgcacagaaagatcaccttccgatggtgtgatgtgctcctgacattcggccgaggtctgtattctgaaaaagatttaatggcctgtgaaacacgtggattctgttgcactggatttgtaataaatgacgctgaacttcctgcttccaagcagctcaaccctgatgctgaactgacaccaggcgaatgtcagggctcccaaaccactagtgccaaagggtcatgttgaaaagttcagaatatttatttgtcagaatataataattgccccccaccttagtatttttgcactttacagaaatttagatactgtttttcagtggcttgagcgttttgccttttcaaaggataactattattttcttgaaaatggaatataatcatgagaggaagaagatgtaaaaaatgtcaaatgttgattggttgtgtaaaagttttgtcatagacatgtattggggagcttccaattagcatacatagacacatgtgtcagtggccaagacctgcttatattttgctttatagatgtagtcatagcatgttgttattgcctcatgtaaataaaaaggctattaagttttccagtaatatttattaatctgtatgtgttttaaaataaaataacttatttctagctgaaca

SEQ ID NO: 20418 - DNA, 7613 bp, Homo sapiens
  source 1..7613: mol_type = unassigned DNA
gcaaagtgccaggaatgatgcaggcagcctgccagatccttggaatcttctggaatgagagaggttgagctgcagcccaaaggcctgtgaaagtgccaggttgaagggtgacggggtgcccagattcccaccttcaaatttcctggcagcatcctggctgtcatggagcgctgtctccagttcagttttctgacacataaggattcgtatggtatgatcctgggcctttgggagacaagaaaagcaagtgctgaaagagaagcaaagaaaccttctccagaggacaggagggaacttcacaccctccactcacctctagctgcctccttagggcttgctgatgttggtggcttgccttcttttcctatagaaaagaagaggaagacagagctcttactagagggaggcagagatggcacagcaagagacatgcccccagcatggcaccactgtcccaggacaggcccacccatgggaccaggttatcagggaccctgtggggatggggtggaagctgggaggtgagccttcctccccaggctgggagtaggcgagacgagactggggcctctacatctgagtgccccccaaacccagcggtcatgtcgtgagcaaagaaagaaaccatgttacctctttcagctgagctccgttctgttgtttctgtggggagagtcaaaggaaggtgactgagggtggcccctcgactctattgcccaggccaggaagcggtacgcaggggtcaggaatggattttaagggcaaagttctcagacccaatgggaacacaaactggtcaacttgccttaacgcccaaagaaaaaggatttgggtctttgttggtttttgcccacagccacagaactgaaagtctgaaactagattctctggaaaagacagtaacataaaccttccgacataagagtgtgagaaaagcccacccttctgccagcttgtgatggagaaagatgtgttcattcaacaagcattgagcaagcacataggggccggggacagttcttcacagctgggatataggacggaaaaggcagacaggagcccttggccccaaggtttccattctagtgaatctttaaatctcagactctcagagcaaacagaaccctctgatactctaactctacctcctcaggaaacggaagcccaaagaggaggggagcttacagcaggccctggactagggattaacacaaaaacaacagcaacaaatctgatttaagcttcacacatgtacttcctatttaacagacattgtgtggtgggctggcacaatcgcaatggctgttggccagattggaaacttcctggcttacacggcggtccccacggtcctggtaacccccctgggcgcccttggagtaccgttcgggtccattttagcttcctatctcctgaaggaaaagctcaacatcttgggcaagttggggtgcctgctaagctgtgcaggctccgtcgtgctgattatccactccccaaagtctgagagtgtgacaactcaggctgagctggaggaaaagctgaccaatccagtgtttgtgggctacctgtgcatcgtgctgctcatgctgctgctgctcatcttctggatcgcgccggcccatgggcccaccaacatcatggtctacatcagcatctgctccttgctgggcagtttcaccgtgccttccaccaagggcatcgggctggcggcccaagacatcttgcataacaacccgtccagtcagagagccctctgcctgtgcctggtactcctggccgtgctcggctgcagcatcatcgtccagttcaggtacatcaacaaggcgctggagtgcttcgactcctcggtgttcggggccatctactacgtcgtgtttaccacgctggtcctgctggcctcagccatcctcttccgggagtggagcaacgtgggcctggtggacttcttggggatggcctgtggattcacgaccgtctccgtggggattgtccttatacaggtgttcaaagagttcaatttcaaccttggggagatgaacaaatctaatatgaaaacagactagattgcaataggagcttggatggttcgaggaataggcattggaggtggtttctggccgtgattggatgtgaagtagaagaggtcctcgatcatggtgttagaattgactggatagtaacaggtggtctggtggatagcggggagcatggctcagcaccagagcagaggcccagccagccctctgcagcccaaacgtccccaacggttgcctggcaccatctctctctgatgagacgaatctcattttcatttccattaacctggaagctttcatgaatattctcttcttttaaaacattttaacattatttaaacagaaaaagatgggctctttctggttagttgttacatgatagcagagatatttttacttagattactttgggaatgagagattgttgtcttgaactctggcactgtacagtgaatgtgtctgtagttgtgttagtttgcattaagcatgtataacattcaagtatgtcatccaaataagaggcatatacattgaattgtttttaatcctctgacaagttgactcttcgacccccacccccacccaagacattttaatagtaaatagagagagagagaagagttaatgaacatgaggtagtgttccactggcaggatgacttttcaatagctcaaatcaatttcagtgcctttatcacttgaattattaacttaatttgactcttaatgtgtatatgttcttagattagaataatgcaacttcgagtatgctttaatatttcaatattcaagttacaaatgtataaggcagttagaaataatacagtcacatgtcacttaatgatagggaaacattctgagaaatgcattgtaaggtgactttattgtgtgaacatcatggagtgcacttatacaaacctagatgggacacctatgacccacccaggccagatggtacagcctgttgctcctgggccacacacctgtacagcatgtgaccgcactgaataccgcaggcaattgtaacacagtggtgagtatttgtgtttacaaacataggaaaggtacagtaaaactatggtattacaatgttatgggaccaccgtcatgtaagtggtatgtctttgacagaaacatggttacgtggttcatgactgtatattcactggaagatagtcaagactaaagacacattagagcaaattgacccctttaacatgtgattattgtccaattaaagacagttgatttaagtagcatgaggtattattttatttgtattcgatctgtgttacctgggatccagtatcaaatatatccacattctttatcagcaagcattcatggccattcagaagaaataaattaggtaacttgataataaggctaagtgggagagtacctgttcaatagctcatatatcgagtaccctgtcatacaggaacaagttaaaggacacaattgaggttaggctagcttctacaaattgcaatatgcagtttttgaaagattttctaacaaaaagccaataaatgtagccatctccttgttgtttgcaatggcagagcatcctagagttcctcagctaacctctcattatgtgtcttaaatgcaaaagagccattaattatgccagtatttgaatcaaagaggtcattctctgtctatagtgttcccatccatgtgttccaaatgggagcatagcatgaagtgatgcacatatttcaccacggtatcatgtacttcatggccagtgttttatctcagcagggaactacgccaagttgaaagatggggttgggtaaagtagattaggtgaagtagaacataaaattgaatagtacccaattaaagttcctcagtaagaaaaaaaatgtgtttttgtaggcaaaaagaacatttctaaagtctcaaggaatagcttcctaaagtgttgagtaaagaggctaaataaaatgagactagtttaatatagagagaaaaatacctttatggagtaaacgtgtacatgatgatcatgggttgtcagtgatttgtgaactgagagcagcaacaacattattttttaaaaatcttaaatcctctcaatggatggttaacaaatgctcaaagtccattactctttttattggctcttgcaggttttgtgttttatcatcagtgcttttagaaatgcaggccttaacttactgaactgaactttctgaaaacgtaatgtagcagtatcaatatacttttgggcataaaaatagtttcctaggtaaggggtgtgagatattcaaagaatacatgtggctaacaagtgtaatgagaaagttcatgtgtcacatgaaaatgatcatgtttgtgttgctacagcttttgtgggaaatttagtttaaaggcagctcttggtgtaccttagtatattttaatccacaattataccattgatactgagaggtgatacccgatgatcttctctataatattcttagagtaaaacaaaatctcaaaagtattaatagctcttctacccttgaaggtgactggtcctgggacagttagaatctttcaggtttacctctgttcagcagatacttcagtaggatacatagcttttcttccagtgaaacaaagttcatatcatccattgtttttcaagcacgtgacaccagcctcaaagtaaatgacatgaccagtggttgaacagtctaattttcaaatttaatatagagcatataacttctgatttgatagtatttattttaaaaaattatgttttcatcattcatttgaaaatgaaaaagccccaaagtgagaactttgggggagggcctagaacatggatagatctcttagtggtctttccaaaagtacatgtacttgaaatattttcattatcatactattctttgaaaaaaaagatgcttactgtatacttgttttcaagcatcctctaaaatcaaaggttttgatcacaatatgcagatttctcttgatagatacttaaataggctatttctctcctcttcttgggcaatgccttgttttctcctctgaatatttgcatttgaaaggattgcttcctgttctgctcattgatcaaaggtagggccaattaaggattctaaccctaacccagcaccacaaagcccccctggagcatcttcccggctggcaggaccatgccatctctgtggagaaggtgctggggagggaagtccttccagtgccacatggagtgaggccctgcccatgctggggactttggggaggaatttggtattctggtggccttgctcagctctcattgagatcttttcctatcagaatgttagtgaatatacttcgcagctctttgttcagcaataaggaatattctttcaattcctgctcttcaagccaatttactacacccagttgtctttccagaagttcatcccagcggtaatatgttggtgtttgttcttctttggatttcacatctgttttctggtagaagtgagcactgttcacttgtgcagtcgtcttattttccttcttcctagatgactcagctctttgtaaatgttgtgctcaacttctaggggccagttctagactttggagatgcagtgtctcccaggtgtgcacggacacctggtccgtggaaacaggtgtgatgggcacaggctgctgcccttctgtctggtcgggggattcctcttcttcaagctgctcagctaacccagaagaggggagagagtactccggtggttcccagagcccctcccgttgtgccgcttcgacctgacacctgctcgatgctgacttaggcttcctgccaccaagcaggaaactagaaagagaacatttcagtgtaaggtctgttcccgacagcatggattagcttccgtgttctgaagttgttcttttcatggtgtctgacaccgagggcgttgttcgtccatcaggcgggattggatggagtcttggtgttttgccttctcagggaccaaaaatgtatcattgactccttaacagtgaccttcctcccaaggacatatccgtgttcatttttcataggttttactcatattcataggtagattctgttaatgtgagttggaaagaaaagaccaatttgtacaccagtcacaccacaagacagtttatcatataaaatacctcaattttttgtattcctcatttccacctcacaattgtactggtgatgaattttaagggtctgtcctttagcttataggtgatgtttcacatctggccagattcttatacctccattgtatacttgaaaaggttcagaattacaggaacagcagtgagaatttggcccactaccacgactcatttgtttcattcacattcctcacgtgcaacaacataattatattttaagaaaatgtaactttgttacatcaaaatatgttgtctagtaaaaagttgatattcagtagaacaaggatcatgtaaataaacatctatttcacatgtacccaaaagcatttaaaaagcagaatccagggcccagagcatgagccagggaggaggatgtttttcttcttttctctatttttccctaaattgtgcaaacataggtgagtctcttaacctttctgtgcctcagtttttctacctctaaaggggtgggatggttcttcaaattgtttctaaaacaccggcactttcagcagtgttctggtggcctgagatgagagcaccgtgttcagaagtgcctgggagtggcacagtggaaactccgcttgcacggaccatggagtctgctcaggaccatgctgtaggacacacagcctcatgcgctgagaaagcaaaggaagtgctgggtgtaaagtttgcatgattccatgaagctttagttttcctttttttgttttaaaagaaagggttttatatgttctattgtaaaatatggaaattaaacagggacttcagaaagccgcacagaaagatcaccttccgatggtgtgatgtgctcctgacattcggccgaggtctgtattctgaaaaagatttaatggcctgtgaaacacgtggattctgttgcactggatttgtaataaatgacgctgaacttcctgcttccaagcagctcaaccctgatgctgaactgacaccaggcgaatgtcagggctcccaaaccactagtgccaaagggtcatgttgaaaagttcagaatatttatttgtcagaatataataattgccccccaccttagtatttttgcactttacagaaatttagatactgtttttcagtggcttgagcgttttgccttttcaaaggataactattattttcttgaaaatggaatataatcatgagaggaagaagatgtaaaaaatgtcaaatgttgattggttgtgtaaaagttttgtcatagacatgtattggggagcttccaattagcatacatagacacatgtgtcagtggccaagacctgcttatattttgctttatagatgtagtcatagcatgttgttattgcctcatgtaaataaaaaggctattaagttttccagtaatatttattaatctgtatgtgttttaaaataaaataacttatttctagctgaa

SEQ ID NO: 20419 - DNA, 2797 bp, Homo sapiens
  source 1..2797: mol_type = unassigned DNA
gtcgagcctggtgaacgggtccacgttcgtgctacagaagaagggcatcgtgcgtgccaagcggcgaggtacttcctatttaacagacattgtgtggtgggctggcacaatcgcaatggctgttggccagattggaaacttcctggcttacacggcggtccccacggtcctggtaacccccctgggcgcccttggagtaccgttcggacagatgcccaaatccttgcagagaagtgtgtccatgatgggtgtattgaagtttacaccttagagtcacgtaggcattaaggtccattttagcttcctatctcctgaaggaaaagctcaacatcttgggcaagttggggtgcctgctaagctgtgcaggctccgtcgtgctgattatccactccccaaagtctgagagtgtgacaactcaggctgagctggaggaaaagctgaccaatccagtgtttgtgggctacctgtgcatcgtgctgctcatgctgctgctgctcatcttctggatcgcgccggcccatgggcccaccaacatcatggtctacatcagcatctgctccttgctgggcagtttcaccgtgccttccaccaagggcatcgggctggcggcccaagacatcttgcataacaacccgtccagtcagagagccctctgcctgtgcctggtactcctggccgtgctcggctgcagcatcatcgtccagttcaggtacatcaacaaggcgctggagtgcttcgactcctcggtgttcggggccatctactacgtcgtgtttaccacgctggtcctgctggcctcagccatcctcttccgggagtggagcaacgtgggcctggtggacttcttggggatggcctgtggattcacgaccgtctccgtggggattgtccttatacaggtgttcaaagagttcaatttcaaccttggggagatgaacaaatctaatatgaaaacagactagattgcaataggagcttggatggttcgaggaataggcattggaggtggtttctggccgtgattggatgtgaagtagaagaggtcctcgatcatggtgttagaattgactggatagtaacaggtggtctggtggatagcggggagcatggctcagcaccagagcagaggcccagccagccctctgcagcccaaacgtccccaacggttgcctggcaccatctctctctgatgagacgaatctcattttcatttccattaacctggaagctttcatgaatattctcttcttttaaaacattttaacattatttaaacagaaaaagatgggctctttctggttagttgttacatgatagcagagatatttttacttagattactttgggaatgagagattgttgtcttgaactctggcactgtacagtgaatgtgtctgtagttgtgttagtttgcattaagcatgtataacattcaagtatgtcatccaaataagaggcatatacattgaattgtttttaatcctctgacaagttgactcttcgacccccacccccacccaagacattttaatagtaaatagagagagagagaagagttaatgaacatgaggtagtgttccactggcaggatgacttttcaatagctcaaatcaatttcagtgcctttatcacttgaattattaacttaatttgactcttaatgtgtatatgttcttagattagaataatgcaacttcgagtatgctttaatatttcaatattcaagttacaaatgtataaggcagttagaaataatacagtcacatgtcacttaatgatagggaaacattctgagaaatgcattgtaaggtgactttattgtgtgaacatcatggagtgcacttatacaaacctagatgggacacctatgacccacccaggccagatggtacagcctgttgctcctgggccacacacctgtacagcatgtgaccgcactgaataccgcaggcaattgtaacacagtggtgagtatttgtgtttacaaacataggaaaggtacagtaaaactatggtattacaatgttatgggaccaccgtcatgtaagtggtatgtctttgacagaaacatggttacgtggttcatgactgtatattcactggaagatagtcaagactaaagacacattagagcaaattgacccctttaacatgtgattattgtccaattaaagacagttgatttaagtagcatgaggtattattttatttgtattcgatctgtgttacctgggatccagtatcaaatatatccacattctttatcagcaagcattcatggccattcagaagaaataaattaggtaacttgataataaggctaagtgggagagtacctgttcaatagctcatatatcgagtaccctgtcatacaggaacaagttaaaggacacaattgaggttaggctagcttctacaaattgcaatatgcagtttttgaaagattttctaacaaaaagccaataaatgtagccatctccttgttgtttgcaatggcagagcatcctagagttcctcagctaacctctcattatgtgtcttaaatgcaaaagagccattaattatgccagtatttgaatcaaagaggtcattctctgtctatagtgttcccatccatgtgttccaaatgggagcatagcatgaagtgatgcacatatttcaccacggtatcatgtacttcatggccagtgttttatctcagcagggaactacgccaagttgaaagatggggttgggtaaagtagattaggtgaagtagaacataaaattgaatagtacccaattaaagttcctcagt

SEQ ID NO: 20420 - DNA, 1675 bp, Homo sapiens
  source 1..1675: mol_type = unassigned DNA
acccttctcctggctcagcctcccgagtagctgggactacaggcctccgccacgacgcccagctaattttttgtatttttagtagagacggggtttcactgtgttagccaggatggtctcgatctcctgaccttgtgatccacccgcctcggcctcccgaagtgctgggattacaggcgtgagccaccgcgcccggcttgttgtagtttattaaaacgaggaaactagactatgggatcacaagcccagagccccatgtagctgactctagcgccaagggcggaagagaaacgcccagcgccagggctctccttcgatctctgcagcggcgcgccgggcttcgcgctccggtacttcctatttaacagacattgtgtggtgggctggcacaatcgcaatggctgttggccagattggaaacttcctggcttacacggcggtccccacggtcctggtaacccccctgggcgcccttggagtaccgttcgggtccattttagcttcctatctcctgaaggaaaagctcaacatcttgggcaagttggggtgcctgctaagctgtgcaggctccgtcgtgctgattatccactccccaaagtctgagagtgtgacaactcaggctgagctggaggaaaagctgaccaatccagtgtttgtgggctacctgtgcatcgtgctgctcatgctgctgctgctcatcttctggatcgcgccggcccatgggcccaccaacatcatggtctacatcagcatctgctccttgctgggcagtttcaccgtgccttccaccaagggcatcgggctggcggcccaagacatcttgcataacaacccgtccagtcagagagccctctgcctgtgcctggtactcctggccgtgctcggctgcagcatcatcgtccagttcaggtacatcaacaaggcgctggagtgcttcgactcctcggtgttcggggccatctactacgtcgtgtttaccacgctggtcctgctggcctcagccatcctcttccgggagtggagcaacgtgggcctggtggacttcttggggatggcctgtggattcacgaccgtctccgtggggattgtccttatacaggtgttcaaagagttcaatttcaaccttggggagatgaacaaatctaatatgaaaacagactagattgcaataggagcttggatggttcgaggaataggcattggaggtggtttctggccgtgattggatgtgaagtagaagaggtcctcgatcatggtgttagaattgactggatagtaacaggtggtctggtggatagcggggagcatggctcagcaccagagcagaggcccagccagccctctgcagcccaaacgtccccaacggttgcctggcaccatctctctctgatgagacgaatctcattttcatttccattaacctggaagctttcatgaatattctcttcttttaaaacattttaacattatttaaacagaaaaagatgggctctttctggttagttgttacatgatagcagagatatttttacttagattactttgggaatgagagattgttgtcttgaactctggcactgtacagtgaatgtgtctgtagttgtgttagtttgcattaagcatgtataacattcaagtatgtcatccaaataagaggcatatacattgaattgtt

SEQ ID NO: 20421 - DNA, 3233 bp, Homo sapiens
  source 1..3233: mol_type = unassigned DNA
gttttccggcgccggccctaggtcccggcagcggtggtgacggcggtgccggaggttgtccttggcaggttttcctcggcgcttctccatggaggaggcggtgcgaacggcttcagccccgaatgctcgcatctcccactggacggcgacgaaggcggtggccgtgcgagcgcaggactgggcggcctgtgtgggggtgtgagccgcggtgcccaaggctgcgccggcgaggggaagccgcgcggccggccggccgactagggctggagctactcggccagggtttaagactttaaatgagaataaagggtggtatttacgaggaaatgagagtgaataagtcatctctaacctctcccagcctttttttcataagagagaccatattaaacttacatgctctcccggctgtgatagaccttcagttacagagagagggagcagagtgggaccaggtctgagaatagtgaagcaactcattcctttcaggacattccctctgatgtcctattttcaaactgtttgaagactgcttcattctgcctctagtaccagcggtttctctgttctgtgatcaatgtgattcacaggaactccttaagtaacaaacgaaatgagccaggggcgtggaaaatatgacttctatattggtctgggattggctatgagctccagcattttcattggaggaagtttcattttgaaaaaaaagggcctccttcgacttgccaggaaaggctctatgagagcaggtcaaggtggccatgcatatcttaaggaatggttgtggtgggctggactgctgtcaatgggagctggtgaggtggccaacttcgctgcgtatgcgtttgcaccagccactctagtgactccactaggagctctcagcgtgctagtaagtgccattctttcttcatactttctcaatgaaagacttaatcttcatgggaaaattgggtgtttgctaagtattctaggatctacagttatggtcattcatgctccaaaggaagaggagattgagactttaaatgaaatgtctcacaagctaggtgatccaggttttgtggtctttgcaacccttgtggtcattgtggccttgatattaatcttcgtggtgggtcctcgccatggacagacaaacattcttgtgtacataacaatctgctctgtaatcggcgcgttttcagtctcctgtgtgaagggcctgggcattgctatcaaggagctgtttgcagggaagcctgtgctgcggcatcccctggcttggattctgctgctgagcctcatcgtctgtgtgagcacacagattaattacctaaatagggccctggatatattcaacacttccattgtgactccaatatattatgtattctttacaacatcagttttaacttgttcagctattctttttaaggagtggcaagatatgcctgttgacgatgtcattggtactttgagtggcttctttacaatcattgtggggatattcttgttgcatgcctttaaagacgtcagctttagtctagcaagtctgcctgtgtcttttcgaaaagacgagaaagcaatgaatggcaatctctctaatatgtatgaagttcttaataataatgaagaaagcttaacctgtggaatcgaacaacacactggtgaaaatgtctcccgaagaaatggaaatctgacagctttttaagaaaggtgtaattaaaggttaatctgtgattgttatgaagtgaatttgaatatcatcagaatgtgtctgaaaaaacattgtcctcaaataatgttctttaaaggcaatctttttaaagatttcactaatttggaccaagaaattacttttcttgtatttaaacaaacaatggtagctcactaaaatgacctcagcacatgacgatttctattaacattttattgttgtagaagtattttacattttcatcccttctccaaaagccgaatgcactaatgacagttttaagtctatgaaaatgctttattttttcattggtgatgaaagtctgaaatgtgcatttgtcatccccactccatcaatccctgaccatgtaaggcttttttattttaaaaaaacagagttatcccaatacattatcctgtgatttaccttacctacaaaagtggctcctgtttgtttgatgatgattggttttatttttgaaatatttattaagggaaaactaagttactgaatgaaggaacctctttcttacaaaacaaaaaaaagggcagaaatcaccccaaggaacgatttctcaggttgagatgatcaccgtgaatccggcttcctctgagcattcgatggccttagcacctcatcaagccagcacatcctgcctgctgttgcagcctggctgggtttattcttcagttaccctaatcccatgatgcctggaaccttgattaccgttttacatcagctcttgtacttttcagtatattttcataatgagttatattgtcatttagactttgaacagctctgggaaatagaagactagggttgtttcttaaatttagctcatgttataataaaaagttgaaatgaagttcttattctaaaagtctgaatgcttagaacaaacttaacatgtttatagaatatggtctctttgtaccaagtactttgcttaagagctcctttgggccactacatattttggtttctagaaaatgtttgtttatgaagaagtcgatggaaaactgcaaacatatgcagaaaaggtagaataataaaaaaggtctaatgaactccattcagctttgaacctatccactcataaccattgactggcctttaaaaaaaagtattggcagaattaatttccacctaggtgatgggaagaaagtgttcgcctgttccagcctgtggctcctgcctggaggttacccagtggtgcgccagcgccaagccatcactccccgagggcctcccctgccaatggtgctggtatcccatgcagctcaccactggctgcgtggaaactcccttttttccaactttattattggccttctaaggagctgttttagatgttttttctaactgcctcctcccatgccattttaatactacagatgtactacgtatctgtttatatactgtacctacatctgtgctttgtacataaaagaaccagttttctcccccttgaggacagagactcatttgaacatgcataggttaataaataataaattcttatttaaca

SEQ ID NO: 20422 - DNA, 1531 bp, Homo sapiens
  source 1..1531: mol_type = unassigned DNA
aggttttccggcgccggccctaggtcccggcagcggtggtgacggcggtgccggaggttgtccttggcaggttttcctcggcgcttctccatggaggaggcggtgcgaacggcttcagccccgaatgctcgcatctcccactggacggcgacgaaggcggtggccgtgcgagcgcaggactgggcggcctgtgtgggggtgtgagccgcggtgcccaaggctgcgccggcgaggggaagccgcgcggccggccggccgactagggtgaggtcgccactccttcctttcaggctctcccggctgtgatagaccttcagttacagagagagggagcagagtgggaccaggtctgagaatagtgaagcaactcattcctttcaggacattccctctgatgtcctattttcaaactgtttgaagactgcttcattctgcctctagtaccagcggtttctctgttctgtgatcaatgtgattcacaggaactccttaagtaacaaacgaaatgagccaggggcgtggaaaatatgacttctatattggtctgggattggctatgagctccagcattttcattggaggaagtttcattttgaaaaaaaagggcctccttcgacttgccaggaaaggctctatgagagcagtgggagctggtgaggtggccaacttcgctgcgtatgcgtttgcaccagccactctagtgactccactaggagctctcagcgtgctagtaagtgccattctttcttcatactttctcaatgaaagacttaatcttcatgggaaaattgggtgtttgctaagtattctaggatctacagttatggtcattcatgctccaaaggaagaggagattgagactttaaatgaaatgtctcacaagctaggtgatccaggttttgtggtctttgcaacccttgtggtcattgtggccttgatattaatcttcgtggtgggtcctcgccatggacagacaaacattcttgtgtacataacaatctgctctgtaatcggcgcgttttcagtctcctgtgtgaagggcctgggcattgctatcaaggagctgtttgcagggaagcctgtgctgcggcatcccctggcttggattctgctgctgagcctcatcgtctgtgtgagcacacagattaattacctaaatagggccctggatatattcaacacttccattgtgactccaatatattatgtattctttacaacatcagttttaacttgttcagctattctttttaaggagtggcaagatatgcctgttgacgatgtcattggtactttgagtggcttctttacaatcattgtggggatattcttgttgcatgcctttaaagacgtcagctttagtctagcaagtctgcctgtgtcttttcgaaaagacgagaaagcaatgaatggcaatctctctaatatgtatgaagttcttaataataatgaagaaagcttaacctgtggaatcgaacaacacactggtgaaaatgtctcccgaagaaatggaaatctgacagctttttaa

SEQ ID NO: 20423 - DNA, 2280 bp, Homo sapiens
  source 1..2280: mol_type = unassigned DNA
gcagcggtggtgacggcggtgccggaggttgtccttggcaggttttcctcggcgcttctccatggaggaggcggtgcgaacggcttcagccccgaatgctcgcatctcccactggacggcgacgaaggcggtggccgtgcgagcgcaggactgggcggcctgtgtgggggtgtgagccgcggtgcccaaggctgcgccggcgaggggaagccgcgcggccggccggccgactagggtttgaagactgcttcattctgcctctagtaccagcggtttctctgttctgtgatcaatgtgattcacaggaactccttaagtaacaaacgaaatgagccaggggcgtggaaaatatgacttctatattggtctgggattggctatgagctccagcattttcattggaggaagtttcattttgaaaaaaaagggcctccttcgacttgccaggaaaggctctatgagagcaggtcaaggtggccatgcatatcttaaggaatggttgtggtgggctggactgctgtcaatgggagctggtgaggtggccaacttcgctgcgtatgcgtttgcaccagccactctagtgactccactaggagctctcagcgtgctagtaagtgccattctttcttcatactttctcaatgaaagacttaatcttcatgggaaaattgggtgtttgctaagtattctaggatctacagttatggtcattcatgctccaaaggaagaggagattgagactttaaatgaaatgtctcacaagctaggtgatccaggttttgtggtctttgcaacccttgtggtcattgtggccttgatattaatcttcgtggtgggtcctcgccatggacagacaaacattcttgtgtacataacaatctgctctgtaatcggcgcgttttcagtctcctgtgtgaagggcctgggcattgctatcaaggagctgtttgcagggaagcctgtgctgcggcatcccctggcttggattctgctgctgagcctcatcgtctgtgtgagcacacagattaattacctaaatagggccctggatatattcaacacttccattgtgactccaatatattatgtattctttacaacatcagttttaacttgttcagctattctttttaaggagtggcaagatatgcctgttgacgatgtcattggtactttgagtggcttctttacaatcattgtggggatattcttgttgcatgcctttaaagacgtcagctttagtctagcaagtctgcctgtgtcttttcgaaaagacgagaaagcaatgaatggcaatctctctaatatgtatgaagttcttaataataatgaagaaagcttaacctgtggaatcgaacaacacactggtgaaaatgtctcccgaagaaatggaaatctgacagctttttaagaaaggtgtaattaaaggttaatctgtgattgttatgaagtgaatttgaatatcatcagaatgtgtctgaaaaaacattgtcctcaaataatgttctttaaaggcaatctttttaaagatttcactaatttggaccaagaaattacttttcttgtatttaaacaaacaatggtagctcactaaaatgacctcagcacatgacgatttctattaacattttattgttgtagaagtattttacattttcatcccttctccaaaagccgaatgcactaatgacagttttaagtctatgaaaatgctttattttttcattggtgatgaaagtctgaaatgtgcatttgtcatccccactccatcaatccctgaccatgtaaggcttttttattttaaaaaaacagagttatcccaatacattatcctgtgatttaccttacctacaaaagtggctcctgtttgtttgatgatgattggttttatttttgaaatatttattaagggaaaactaagttactgaatgaaggaacctctttcttacaaaacaaaaaaaagggcagaaatcaccccaaggaacgatttctcaggttgagatgatcaccgtgaatccggcttcctctgagcattcgatggccttagcacctcatcaagccagcacatcctgcctgctgttgcagcctggctgggtttattcttcagttaccctaatcccatgatgcctggaaccttgattaccgttttacatcagctcttgtacttttcagtatattttcataatgagttatattgtcatttagactttgaacagctctgggaaatagaagactagggttgtttcttaaatttagctcatgttataataaaaagttgaa

SEQ ID NO: 20424 - DNA, 3130 bp, Homo sapiens
  source 1..3130: mol_type = unassigned DNA
gtcatttagccgcgcctaggttttccggcgccggccctaggtcccggcagcggtggtgacggcggtgccggaggttgtccttggcaggttttcctcggcgcttctccatggaggaggcggtgcgaacggcttcagccccgaatgctcgcatctcccactggacggcgacgaaggcggtggccgtgcgagcgcaggactgggcggcctgtgtgggggtgtgagccgcggtgcccaaggctgcgccggcgaggggaagccgcgcggccggccggccgactagggctggagctactcggccagggtttaagactttaaatgagaataaagggtggtatttacgaggaaatgagagtgaataagtcatctctaacctctcccagcctttttttcataagagagaccatattaaacttacatgtttgaagactgcttcattctgcctctagtaccagcggtttctctgttctgtgatcaatgtgattcacaggaactccttaagtaacaaacgaaatgagccaggggcgtggaaaatatgacttctatattggtctgggattggctatgagctccagcattttcattggaggaagtttcattttgaaaaaaaagggcctccttcgacttgccaggaaaggctctatgagagcaggtcaaggtggccatgcatatcttaaggaatggttgtggtgggctggactgctgtcaatgggagctggtgaggtggccaacttcgctgcgtatgcgtttgcaccagccactctagtgactccactaggagctctcagcgtgctagtaagtgccattctttcttcatactttctcaatgaaagacttaatcttcatgggaaaattgggtgtttgctaagtattctaggatctacagttatggtcattcatgctccaaaggaagaggagattgagactttaaatgaaatgtctcacaagctaggtgatccaggttttgtggtctttgcaacccttgtggtcattgtggccttgatattaatcttcgtggtgggtcctcgccatggacagacaaacattcttgtgtacataacaatctgctctgtaatcggcgcgttttcagtctcctgtgtgaagggcctgggcattgctatcaaggagctgtttgcagggaagcctgtgctgcggcatcccctggcttggattctgctgctgagcctcatcgtctgtgtgagcacacagattaattacctaaatagggccctggatatattcaacacttccattgtgactccaatatattatgtattctttacaacatcagttttaacttgttcagctattctttttaaggagtggcaagatatgcctgttgacgatgtcattggtactttgagtggcttctttacaatcattgtggggatattcttgttgcatgcctttaaagacgtcagctttagtctagcaagtctgcctgtgtcttttcgaaaagacgagaaagcaatgaatggcaatctctctaatatgtatgaagttcttaataataatgaagaaagcttaacctgtggaatcgaacaacacactggtgaaaatgtctcccgaagaaatggaaatctgacagctttttaagaaaggtgtaattaaaggttaatctgtgattgttatgaagtgaatttgaatatcatcagaatgtgtctgaaaaaacattgtcctcaaataatgttctttaaaggcaatctttttaaagatttcactaatttggaccaagaaattacttttcttgtatttaaacaaacaatggtagctcactaaaatgacctcagcacatgacgatttctattaacattttattgttgtagaagtattttacattttcatcccttctccaaaagccgaatgcactaatgacagttttaagtctatgaaaatgctttattttttcattggtgatgaaagtctgaaatgtgcatttgtcatccccactccatcaatccctgaccatgtaaggcttttttattttaaaaaaacagagttatcccaatacattatcctgtgatttaccttacctacaaaagtggctcctgtttgtttgatgatgattggttttatttttgaaatatttattaagggaaaactaagttactgaatgaaggaacctctttcttacaaaacaaaaaaaagggcagaaatcaccccaaggaacgatttctcaggttgagatgatcaccgtgaatccggcttcctctgagcattcgatggccttagcacctcatcaagccagcacatcctgcctgctgttgcagcctggctgggtttattcttcagttaccctaatcccatgatgcctggaaccttgattaccgttttacatcagctcttgtacttttcagtatattttcataatgagttatattgtcatttagactttgaacagctctgggaaatagaagactagggttgtttcttaaatttagctcatgttataataaaaagttgaaatgaagttcttattctaaaagtctgaatgcttagaacaaacttaacatgtttatagaatatggtctctttgtaccaagtactttgcttaagagctcctttgggccactacatattttggtttctagaaaatgtttgtttatgaagaagtcgatggaaaactgcaaacatatgcagaaaaggtagaataataaaaaaggtctaatgaactccattcagctttgaacctatccactcataaccattgactggcctttaaaaaaaagtattggcagaattaatttccacctaggtgatgggaagaaagtgttcgcctgttccagcctgtggctcctgcctggaggttacccagtggtgcgccagcgccaagccatcactccccgagggcctcccctgccaatggtgctggtatcccatgcagctcaccactggctgcgtggaaactcccttttttccaactttattattggccttctaaggagctgttttagatgttttttctaactgcctcctcccatgccattttaatactacagatgtactacgtatctgtttatatactgtacctacatctgtgctttgtacataaaagaaccagttttctcccccttgaggacagagactcatttgaacatgcataggttaataaataataaattcttatttaaca

SEQ ID NO: 20425 - DNA, 1412 bp, Homo sapiens
  source 1..1412: mol_type = unassigned DNA
gacggcggtgccggaggttgtccttggcaggttttcctcggcgcttctccatggaggaggcggtgcgaacggcttcagccccgaatgctcgcatctcccactggacggcgacgaaggcggtggccgtgcgagcgcaggactgggcggcctgtgtgggggtgtgagccgcggtgcccaaggctgcgccggcgaggggaagccgcgcggccggccggccgactagggtttgaagactgcttcattctgcctctagtaccagcggtttctctgttctgtgatcaatgtgattcacaggaactccttaagtaacaaacgaaatgagccaggggcgtggaaaatatgacttctatattggtctgggattggctatgagctccagcattttcattggaggaagtttcattttgaaaaaaaagggcctccttcgacttgccaggaaaggctctatgagagcagtgggagctggtgaggtggccaacttcgctgcgtatgcgtttgcaccagccactctagtgactccactaggagctctcagcgtgctagtaagtgccattctttcttcatactttctcaatgaaagacttaatcttcatgggaaaattgggtgtttgctaagtattctaggatctacagttatggtcattcatgctccaaaggaagaggagattgagactttaaatgaaatgtctcacaagctaggtgatccaggttttgtggtctttgcaacccttgtggtcattgtggccttgatattaatcttcgtggtgggtcctcgccatggacagacaaacattcttgtgtacataacaatctgctctgtaatcggcgcgttttcagtctcctgtgtgaagggcctgggcattgctatcaaggagctgtttgcagggaagcctgtgctgcggcatcccctggcttggattctgctgctgagcctcatcgtctgtgtgagcacacagattaattacctaaatagggccctggatatattcaacacttccattgtgactccaatatattatgtattctttacaacatcagttttaacttgttcagctattctttttaaggagtggcaagatatgcctgttgacgatgtcattggtactttgagtggcttctttacaatcattgtggggatattcttgttgcatgcctttaaagacgtcagctttagtctagcaagtctgcctgtgtcttttcgaaaagacgagaaagcaatgaatggcaatctctctaatatgtatgaagttcttaataataatgaagaaagcttaacctgtggaatcgaacaacacactggtgaaaatgtctcccgaagaaatggaaatctgacagctttttaagaaaggtgtaattaaaggttaatctgtgattgttatgaagtgaatttgaatatcatcagaatgtgtctg

SEQ ID NO: 20426 - DNA, 554 bp, Homo sapiens
  source 1..554: mol_type = unassigned DNA
gcggtggtgacggcggtgccggaggttgtccttggcaggttttcctcggcgcttctccatggaggaggcggtgcgaacggcttcagccccgaatgctcgcatctcccactggacggcgacgaaggcggtggccgtgcgagcgcaggactgggcggcctgtgtgggggtgtgagccgcggtgcccaaggctgcgccggcgaggggaagccgcgcggccggccggccgactagggctctcccggctgtgatagaccttcagttacagagagagggagcagagtgggaccaggtctgagaatagtgaagcaactcattcctttcaggacattccctctgatgtcctattttcaaactgaactccttaagtaacaaacgaaatgagccaggggcgtggaaaatatgacttctatattggtctgggattggctatgagctccagcattttcattggaggaagtttcattttgaaaaaaaagggcctccttcgacttgccaggaaaggctctatgagagcaggtcaaggtggccatgcatatcttaaggaatggttgtgg

SEQ ID NO: 20427 - DNA, 2094 bp, Homo sapiens
  source 1..2094: mol_type = unassigned DNA
cctgtatcccaagaccctgcctcctcttgcggtggggggaaagcggcctcttactctaggcctttcggtttgcgcgagcgggcaggaaagcgtgcgtgcggctaagagagtgggcgctctcgcggccgctgacgatggaagaactggagcaaggcctgttgatgcagccatgggcgtggctacagcttgcagagaactccctcttggccaaggtttttatcaccaagcagggctatgccttgttggtttcagatcttcaacaggtgtggcatgaacaggtggacactagtgtggtcagccagcgagccaaggagctgaacaagcggctcactgctcctcctgcagctttcctctgtcatttggataatctccttcgcccattgttgaaggacgctgctcaccctagcgaagctaccttctcctgtgattgtgtggcagatgcactgattctacgggtgcgaagtgagctctctggcctccccttctattggaatttccactgcatgctagctagtccttccctggtctcccaacatttgattcgtcctctgatgggcatgagtctggcattacagtgccaagtgagggagctagcaacgttacttcatatgaaagacctagagatccaagactaccaggagagtggggctacgctgattcgagatcgattgaagacagaaccatttgaagaaaattccttcttggaacaatttatgatagagaaactgccagaggcatgcagcattggtgatggaaagccctttgtcatgaatctgcaggatctgtatatggcagtcaccacacaagaggtccaagtgggacagaagcatcaaggcgctggagatcctcatacctcaaacagtgcttccctgcaaggaatcgatagccaatgtgtaaaccagccagaacaactggtctcctcagccccaaccctctcagcacctgagaaagagtccacgggtacttcaggccctctgcagagacctcagctgtcaaaggtcaagaggaagaagccaaggggtctcttcagttaatctgttgtggcctcagctgctgaggatggacttggagaacagcttccaagcttcaccttgaaagaagcttacatggcagcaatatttctaaaatagtgatacagtcagaggcctcctgtaagggcgagagaactgaagttgatgttgacaggcccacagggaattggccttccctgttcaagtggaagccagtctctgagaatcccgtgctctcctctcttttggtggaggttctgtaggttcaggtttctaccatggactttaggtatatagggcaagtcagcaagaaagcaccacacactcaggaagccttgtctacctttccctagcgtctctagccagccagccccagatactcctcagagacccacttctctcttttgcatggaataaaaagcactcacagtccctgcttttgggattacttatgctgtggaactcataacccaattcacttccttcactgggtcccaccccattgttgtctctggatgaagtctagccatcagtctggtccttcagattcttcgtaaacttttctgcagttgccagagctaagtctccatttggaaactttgatctcaagaactctcttgatggtgggcacaagacagataggtgattgctgctttcctttgccaaacttggatgcatttttctctttgtttccaaagtataggcaacaggttaaactaccacgtggggtagtttatcaatcctcccgcctcatccttctgcataactgggactaaaggcacacaccaccacacctagctaatttttgtatttttttgtgtgtggagacaaggctttgccatgttgcccaggctggtcttgaactcctggactctagtgatctgcccacctcaacctcccaaagtgctgggattacaggcatgagctaccacgcctatccaatttctggtttatttactttcgatggttaaatgcctccttattcaaatatcctgtatatatactggcgtttctgtcctgatgtcaagtctcgagagaagatgatcaaacaataataaaataattataataagaacaacaataa

SEQ ID NO: 20428 - DNA, 1954 bp, Homo sapiens
  source 1..1954: mol_type = unassigned DNA
atggaagaactggagcaaggcctgttgatgcagccatgggcgtggctacagcttgcagagaactccctcttggccaaggtttttatcaccaagcagggctatgccttgttggtttcagatcttcaacaggtgtggcatgaacaggtggacactagtgtggtcagccagcgagccaaggagctgaacaagcggctcactgctcctcctgcagctttcctctgtcatttggataatctccttcgcccattgttgaaggacgctgctcaccctagcgaagctaccttctcctgtgattgtgtggcagatgcactgattctacgggtgcgaagtgagctctctggcctccccttctattggaatttccactgcatgctagctagtccttccctggtctcccaacatttgattcgtcctctgatgggcatgagtctggcattacagtgccaagtgagggagctagcaacgttacttcatatgaaagacctagagatccaagactaccaggagagtggggctacgctgattcgagatcgattgaagacagaaccatttgaagaaaattccttcttggaacaatttatgatagagaaactgccagaggcatgcagcattggtgatggaaagccctttgtcatgaatctgcaggatctgtatatggcagtcaccacacaagaggtccaagtgggacagaagcatcaaggcgctggagatcctcatacctcaaacagtgcttccctgcaaggaatcgatagccaatgtgtaaaccagccagaacaactggtctcctcagccccaaccctctcagcacctgagaaagagtccacggccctctgcagagacctcagctgtcaaaggtcaagaggaagaagccaaggggtctcttcagttaatctgttgtggcctcagctgctgaggatggacttggagaacagcttccaagcttcaccttgaaagaagcttacatggcagcaatatttctaaaatagtgatacagtcagaggcctcctgtaagggcgagagaactgaagttgatgttgacaggcccacagggaattggccttccctgttcaagtggaagccagtctctgagaatcccgtgctctcctctcttttggtggaggttctgtaggttcaggtttctaccatggactttaggtatatagggcaagtcagcaagaaagcaccacacactcaggaagccttgtctacctttccctagcgtctctagccagccagccccagatactcctcagagacccacttctctcttttgcatggaataaaaagcactcacagtccctgcttttgggattacttatgctgtggaactcataacccaattcacttccttcactgggtcccaccccattgttgtctctggatgaagtctagccatcagtctggtccttcagattcttcgtaaacttttctgcagttgccagagctaagtctccatttggaaactttgatctcaagaactctcttgatggtgggcacaagacagataggtgattgctgctttcctttgccaaacttggatgcatttttctctttgtttccaaagtataggcaacaggttaaactaccacgtggggtagtttatcaatcctcccgcctcatccttctgcataactgggactaaaggcacacaccaccacacctagctaatttttgtatttttttgtgtgtggagacaaggctttgccatgttgcccaggctggtcttgaactcctggactctagtgatctgcccacctcaacctcccaaagtgctgggattacaggcatgagctaccacgcctatccaatttctggtttatttactttcgatggttaaatgcctccttattcaaatatcctgtatatatactggcgtttctgtcctgatgtcaagtctcgagagaagatgatcaaacaataataaaataattataataagaacaacaataataaa

SEQ ID NO: 20429 - DNA, 734 bp, Homo sapiens
  source 1..734: mol_type = unassigned DNA
agtccgctggctgctgcccggcgtggatggtagggctcgagtgaagatggaagaactggagcaaggcctgttgatgcagccatgggcgtggctacagcttgcagagaactccctcttggccaaggtttttatcaccaagcagggctatgccttgttggtttcagatcttcaacaggtgtggcatgaacaggtggacactagtgtggtcagccagcgagccaaggagctgaacaagcggctcactgctcctcctgcagctttcctctgtcatttggataatctccttcgcccattgttgaaggacgctgctcaccctagcgaagctaccttctcctgtgattgtgtggcagatgcactgattctacgggtgcgaagtgagctctctggcctccccttctattggaatttccactgcatgctagctagtccttccctggtctcccaacatttgattcgtcctctgatgggcatgagtctggcattacagtgccaagtgagggagctagcaacgttacttcatatgaaagacctagagatccaagactaccaggagagtggggctacgctgattcgagatcgattgaagacagaaccatttgaagaaaattccttcttggaacaatttatgatagagaaactgccagaggcatgcagcattggtgatggaaagccctttgtcatgaatctgcaggatctgtatatggcagtcaccacacaagaggtccaagtgggac

SEQ ID NO: 20430 - DNA, 1051 bp, Homo sapiens
  source 1..1051: mol_type = unassigned DNA
gcagaagcgttccgtgcgtgcaagtgctgcgaaccacgtgggtcccgggcgcgtttcgggtgctggcggctgcagccggagttcaaacctaagcagctggaaggaaccatggccaactgtgagcgtaccttcattgcgatcaaaccagatggggtccagcggggtcttgtgggagagattatcaagcgttttgagcagaaaggattccgccttgttggtctgaaattcatgcaagcttccgaagatcttctcaaggaacactacgttgacctgaaggaccgtccattctttgccggcctggtgaaatacatgcactcagggccggtagttgccatggtctgggaggggctgaatgtggtgaagacgggccgagtcatgctcggggagaccaaccctgcagactccaagcctgggaccatccgtggagacttctgcatacaagttggcaggaccatggccaacctggagcgcaccttcatcgccatcaagccggacggcgtgcagcgcggcctggtgggcgagatcatcaagcgcttcgagcagaagggattccgcctcgtggccatgaagttcctccgggcctctgaagaacacctgaagcagcactacattgacctgaaagaccgaccattcttccctgggctggtgaagtacatgaactcagggccggttgtggccatggtctgggaggggctgaacgtggtgaagacaggccgagtgatgcttggggagaccaatccagcagattcaaagccaggcaccattcgtggggacttctgcattcaggttggcaggaacatcattcatggcagtgattcagtaaaaagtgctgaaaaagaaatcagcctatggtttaagcctgaagaactggttgactacaagtcttgtgctcatgactgggtctatgaataagaggtggacacaacagcagtctccttcagcacggcgtggtgtgtccctggacacagctcttcattccattgacttagaggcaacaggattgatcattcttttatagagcatatttgccaataaagcttttggaagccgg

SEQ ID NO: 20431 - DNA, 646 bp, Homo sapiens
  source 1..646: mol_type = unassigned DNA
cctggcgactcctcccgttccctcttccgcttgcgctgccgcaggaccatggccaacctggagcgcaccttcatcgccatcaagccggacggcgtgcagcgcggcctggtgggcgagatcatcaagcgcttcgagcagaagggattccgcctcgtggccatgaagttcctccgggcctctgaagaacacctgaagcagcactacattgacctgaaagaccgaccattcttccctgggctggtgaagtacatgaactcagggccggttgtggccatggtctgggaggggctgaacgtggtgaagacaggccgagtgatgcttggggagaccaatccagcagattcaaagccaggcaccattcgtggggacttctgcattcaggttggcaggaacatcattcatggcagtgattcagtaaaaagtgctgaaaaagaaatcagcctatggtttaagcctgaagaactggttgactacaagtcttgtgctcatgactgggtctatgaataagaggtggacacaacagcagtctccttcagcacggcgtggtgtgtccctggacacagctcttcattccattgacttagaggcaacaggattgatcattcttttatagagcatatttgccaataaagcttttggaagccgg

SEQ ID NO: 20432 - DNA, 754 bp, Homo sapiens
  source 1..754: mol_type = unassigned DNA
caaagggagcttgtttgccagggacactgcaagtaggaagtgtctacaggtcgatgacaggcctaatctctatgacagggtctagactttcctcagggtccaggggcgcacctcagggtgaactggaaaactcgaccgcactttagtgccaggaccatggccaacctggagcgcaccttcatcgccatcaagccggacggcgtgcagcgcggcctggtgggcgagatcatcaagcgcttcgagcagaagggattccgcctcgtggccatgaagttcctccgggcctctgaagaacacctgaagcagcactacattgacctgaaagaccgaccattcttccctgggctggtgaagtacatgaactcagggccggttgtggccatggtctgggaggggctgaacgtggtgaagacaggccgagtgatgcttggggagaccaatccagcagattcaaagccaggcaccattcgtggggacttctgcattcaggttggcaggaacatcattcatggcagtgattcagtaaaaagtgctgaaaaagaaatcagcctatggtttaagcctgaagaactggttgactacaagtcttgtgctcatgactgggtctatgaataagaggtggacacaacagcagtctccttcagcacggcgtggtgtgtccctggacacagctcttcattccattgacttagaggcaacaggattgatcattcttttatagagcatatttgccaataaagcttttggaagccgg

SEQ ID NO: 20433 - DNA, 866 bp, Homo sapiens
  source 1..866: mol_type = unassigned DNA
gtgggcccggtctgtgggcgccccccgatttcccgcaggtcccgcgcggcgtcggagcgggagattcccttgcagcttgcgccccgcgggccttcgggctccgcagagggacgccggccctgcgcggggcggaagcggccgggaagccacgtgtccccgcggccgcgcgtggtgggggaggagggaccggcggcgcccacgtggcctccgcgggccccgccagagcctgcgcccgggccctgaccgcacctctcgccccgcaggaccatggccaacctggagcgcaccttcatcgccatcaagccggacggcgtgcagcgcggcctggtgggcgagatcatcaagcgcttcgagcagaagggattccgcctcgtggccatgaagttcctccgggcctctgaagaacacctgaagcagcactacattgacctgaaagaccgaccattcttccctgggctggtgaagtacatgaactcagggccggttgtggccatggtctgggaggggctgaacgtggtgaagacaggccgagtgatgcttggggagaccaatccagcagattcaaagccaggcaccattcgtggggacttctgcattcaggttggcaggaacatcattcatggcagtgattcagtaaaaagtgctgaaaaagaaatcagcctatggtttaagcctgaagaactggttgactacaagtcttgtgctcatgactgggtctatgaataagaggtggacacaacagcagtctccttcagcacggcgtggtgtgtccctggacacagctcttcattccattgacttagaggcaacaggattgatcattcttttatagagcatatttgccaataaagcttttggaagccgga

SEQ ID NO: 20434 - DNA, 749 bp, Homo sapiens
  source 1..749: mol_type = unassigned DNA
gccggctcccgggtgtggtggtcgcaccagctctctgctctcccagcgcagcgccgccgcccggcccctccagcttcccggtaaggcggtgggggcgcatcccctggcgactcctcccgttccctcttccgcttgcgctgccgcaggaccatggccaacctggagcgcaccttcatcgccatcaagccggacggcgtgcagcgcggcctggtgggcgagatcatcaagcgcttcgagcagaagggattccgcctcgtggccatgaagttcctccgggcctctgaagaacacctgaagcagcactacattgacctgaaagaccgaccattcttccctgggctggtgaagtacatgaactcagggccggttgtggccatggtctgggaggggctgaacgtggtgaagacaggccgagtgatgcttggggagaccaatccagcagattcaaagccaggcaccattcgtggggacttctgcattcaggttggcaggaacatcattcatggcagtgattcagtaaaaagtgctgaaaaagaaatcagcctatggtttaagcctgaagaactggttgactacaagtcttgtgctcatgactgggtctatgaataagaggtggacacaacagcagtctccttcagcacggcgtggtgtgtccctggacacagctcttcattccattgacttagaggcaacaggattgatcattcttttatagagcatatttgccaataaagcttttggaagccgga

SEQ ID NO: 20435 - DNA, 826 bp, Homo sapiens
  source 1..826: mol_type = unassigned DNA
gcgagggcgcgccccggctgggcgtggacactgttctccggccgcgtcgggccgggcgggtggggcgttcctgcgggttgggcggctgggccctccggggtgtggccaccccgcgctccgccctgcgcccctcctccgccgccggctcccgggtgtggtggtcgcaccagctctctgctctcccagcgcagcgccgccgcccggcccctccagcttcccggaccatggccaacctggagcgcaccttcatcgccatcaagccggacggcgtgcagcgcggcctggtgggcgagatcatcaagcgcttcgagcagaagggattccgcctcgtggccatgaagttcctccgggcctctgaagaacacctgaagcagcactacattgacctgaaagaccgaccattcttccctgggctggtgaagtacatgaactcagggccggttgtggccatggtctgggaggggctgaacgtggtgaagacaggccgagtgatgcttggggagaccaatccagcagattcaaagccaggcaccattcgtggggacttctgcattcaggttggcaggaacatcattcatggcagtgattcagtaaaaagtgctgaaaaagaaatcagcctatggtttaagcctgaagaactggttgactacaagtcttgtgctcatgactgggtctatgaataagaggtggacacaacagcagtctccttcagcacggcgtggtgtgtccctggacacagctcttcattccattgacttagaggcaacaggattgatcattcttttatagagcatatttgccaataaagcttttggaagccggacac

SEQ ID NO: 20436 - DNA, 692 bp, Homo sapiens
  source 1..692: mol_type = unassigned DNA
ctgtaggcgggggagtcatcaaggcagggcagaggcaggaccagatggccgtttgaggtgctgagcaaagctcccggtttgcgcggagaggaccatggccaacctggagcgcaccttcatcgccatcaagccggacggcgtgcagcgcggcctggtgggcgagatcatcaagcgcttcgagcagaagggattccgcctcgtggccatgaagttcctccgggcctctgaagaacacctgaagcagcactacattgacctgaaagaccgaccattcttccctgggctggtgaagtacatgaactcagggccggttgtggccatggtctgggaggggctgaacgtggtgaagacaggccgagtgatgcttggggagaccaatccagcagattcaaagccaggcaccattcgtggggacttctgcattcaggttggcaggaacatcattcatggcagtgattcagtaaaaagtgctgaaaaagaaatcagcctatggtttaagcctgaagaactggttgactacaagtcttgtgctcatgactgggtctatgaataagaggtggacacaacagcagtctccttcagcacggcgtggtgtgtccctggacacagctcttcattccattgacttagaggcaacaggattgatcattcttttatagagcatatttgccaataaagcttttggaagccgg

SEQ ID NO: 20437 - DNA, 773 bp, Homo sapiens
  source 1..773: mol_type = unassigned DNA
atctcagggcagtaccactgctgtgcggctgtcagtcagtgctgcaggcgccgagaggaggggcttgtgaccgccccagggaagctgggcatcaccaaagggagcttgtttgccagggacactgcaagtaggaagtgtctacaggtcgatgacaggcctaatctctatgacagggtctagactttcctcagggtccaggggcgcacctcagggtgaactggaaaactcgaccgcactttagtgccaggaccatggccaacctggagcgcaccttcatcgccatcaagccggacggcgtgcagcgcggcctggtgggcgagatcatcaagcgcttcgagcagaagggattccgcctcgtggccatgaagttcctccgggcctctgaagaacacctgaagcagcactacattgacctgaaagaccgaccattcttccctgggctggtgaagtacatgaactcagggccggttgtggccatggtctgggaggggctgaacgtggtgaagacaggccgagtgatgcttggggagaccaatccagcagattcaaagccaggcaccattcgtggggacttctgcattcaggttggcaggaacatcattcatggcagtgattcagtaaaaagtgctgaaaaagaaatcagcctatggtttaagcctgaagaactggttgactacaagtcttgtgctcatgactgggtctatgaataagaggtggacacaacagcagtctccttcagcacggcgtggtgtgtccctggacacagctcttca

SEQ ID NO: 20438 - DNA, 1193 bp, Homo sapiens
  source 1..1193: mol_type = unassigned DNA
ggagttcaaacctaagcagctggaagggccctgtggctaggtaccatagagtctctacacaggactaagtcagcctggtgtgcaggggaggcagacacacaaacagaaaattggactacagtgctaagatgctgtaagaagaggttaactaaaggacaggaagatggggccaagagatggtgctactgtctactttagggatcgtctttcaaggcgaggggcctcctatctcaagctgtgatacaggaaccatggccaactgtgagcgtaccttcattgcgatcaaaccagatggggtccagcggggtcttgtgggagagattatcaagcgttttgagcagaaaggattccgccttgttggtctgaaattcatgcaagcttccgaagatcttctcaaggaacactacgttgacctgaaggaccgtccattctttgccggcctggtgaaatacatgcactcagggccggtagttgccatggtctgggaggggctgaatgtggtgaagacgggccgagtcatgctcggggagaccaaccctgcagactccaagcctgggaccatccgtggagacttctgcatacaagttggcaggaccatggccaacctggagcgcaccttcatcgccatcaagccggacggcgtgcagcgcggcctggtgggcgagatcatcaagcgcttcgagcagaagggattccgcctcgtggccatgaagttcctccgggcctctgaagaacacctgaagcagcactacattgacctgaaagaccgaccattcttccctgggctggtgaagtacatgaactcagggccggttgtggccatggtctgggaggggctgaacgtggtgaagacaggccgagtgatgcttggggagaccaatccagcagattcaaagccaggcaccattcgtggggacttctgcattcaggttggcaggaacatcattcatggcagtgattcagtaaaaagtgctgaaaaagaaatcagcctatggtttaagcctgaagaactggttgactacaagtcttgtgctcatgactgggtctatgaataagaggtggacacaacagcagtctccttcagcacggcgtggtgtgtccctggacacagctcttcattccattgacttagaggcaacaggattgatcattcttttatagagcatatttgccaataaagcttttggaagccg

SEQ ID NO: 20439 - DNA, 1014 bp, Homo sapiens
  source 1..1014: mol_type = unassigned DNA
aggagacttggcctccgcagctgccctccggccccccacggctgccgggttccggggtgcaagtgaagcagcctccccgcggaggccgcagcgccccgaccaggcctctttaagcgcaggccccgccccgggcgccaccgccccgccccgcggatcccgctcccgcaccgccatcatgatctgcctggtgctgaccatcttcgctaacctcttccccgcggcctgcaccggcgcacacgaacgcaccttcctggccgtgaagccggacggcgtgcagcggcggctggtgggcgagattgtgcggcgcttcgagaggaagggcttcaagttggtggcgctgaagctggtgcaggcctccgaggagctgctgcgtgagcactacgccgagctgcgtgaacgcccgttctacggccgccttgtcaagtatatggcctccgggccggtggtggccatggtatggcaggggctggacgtggtgcgcacctcgcgggcgctcatcggagccacgaacccggccgacgccccgcccggcaccatccgcggggatttctgcatcgaggttggcaagaacctgattcacggcagcgactcggtggagagtgcccgccgcgagatcgctctctggttccgcgcagacgagctcctctgctgggaggacagcgctgggcactggctgtatgagtagcccggcagatgcgcgtcacagaggctctcacactccagcctcctccagggcccaggtgggcgggcttctggccccaccccacagcgcttggagcatccctttggacgggctgctgaacatccacctgtctggacgttgcatggagggtggcgcaggcctctccaatccctggcgtacagggtttcctgcccgaggagctgctccaggagcctgcgcggctcgcctggaaacgtgccaggacactgtcctggtgcccagcccaacgtggtccaacgtttttttataataaagtcctcgttttcgtttcgatttgggcccaggaacaggca

SEQ ID NO: 20440 - DNA, 1193 bp, Homo sapiens
  source 1..1193: mol_type = unassigned DNA
aggtctcctagcaacaagttgtaccatatgaggacggccgctgagccataatggagatatcaatgcctccacctcagatatatgtagaaaaaactctggccattatcaaaccagatattgttgacaaagaggaggagatacaagatattattcttagatccggattcaccattgttcagagaagaaaactacgcctcagccctgagcaatgtagtaacttttatgtggaaaagtatggaaaaatgtttttccccaacttaacagcttacatgagttctggaccacttgtcgccatgatattagctagacataaagccatctcttattggttagaacttttgggaccaaataatagcttagtagcgaaggagacacatccagacagtctgagggcaatttatggcacagatgacctaaggaatgcacttcatgggagtaatgactttgctgctgcggaaagagaaatacgttttatgtttcctgaagtgattgttgagcccattccaattggacaagctgctaaggactatttaaatttacatataatgccaactctgcttgaaggactcacagagctttgtaagcaaaaaccagcagatcctttgatttggctagctgattggctgctgaaaaataatcctaacaaacccaaactttgtcaccatccaattgtagaagaaccttattaaaaaaaaaatcctcgaaagaacaaatcatgaactatcttattataaaaggctgtacttctactgtttgaaaaaattatttctagggtttaagtaactacaagtaaaataaatttatttcttaaaaataagtgttaaaggaataactattctatgaagcagataacattaaggtaaaatataggcttagagtatgattttaacaatgatgtaacactaggtaatggaaaactcatgtaagatgttgctagatgtttttgtttttcttaagtttgagaagtaagacataaagtttagttatacattttcccaagcacatatcctatatctaaatacataattaatgcacagttgagacagtctagtttaaaaggcttaggtccttttgtagtccataagcatggtgatttggtttcatgctcatgtgtcagatatgcttccctcaaaccttgttacagcatcatcacattacctgtttgatgtaaaaaataaaaaatagaaaggtgt

SEQ ID NO: 20441 - DNA, 913 bp, Homo sapiens
  source 1..913: mol_type = unassigned DNA
actggggctccgaatgacccagaatctggggtgggcttaggccccgggccgcgtgttcttgccacgagaacccctagcagcctggccttggaatggctggatgaggtgcattcgttggttcattcagatactgttaagagccagctgtgtgctaggagtgagatggcctcaatcttgcgaagccctcaggctctccagctcactctagccctgatcaagcctgacgcagtcgcccatccactgattctggaggctgttcatcagcagattctaagcaacaagttcctgattgtacgaatgagagaactactgtggagaaaggaagattgccagaggttttaccgagagcatgaagggcgttttttctatcagaggctggtggagttcatggccagcgggccaatccgagcctacatccttgcccacaaggatgccatccagctctggaggacgctcatgggacccaccagagtgttccgagcacgccatgtggccccagattctatccgtgggagtttcggcctcactgacacccgcaacaccacccatggttcggactctgtggtttcagccagcagagagattgcagccttcttccctgacttcagtgaacagcgctggtatgaggaggaagagccccagttgcgctgtggccctgtgtgctatagcccagagggaggtgtccactatgtagctggaacaggaggcctaggaccagcctgatgcaggtctatgaagaccagtggtagtgcccagacttctcctagacatctagtctaaaacattctcctaggaccagggaagcctggcttacagtgccatttctgctgggcaccaccacctgcctgagggcctagctcaccacagcacatcctccaggatctagccttctatctacctcttctctggaatg

SEQ ID NO: 20442 - DNA, 2004 bp, Homo sapiens
  source 1..2004: mol_type = unassigned DNA
gacaaggtgaacccgcagccggacttctgctgcactggggctccgaatgacccagaatctggggagtgagatggcctcaatcttgcgaagccctcaggctctccagctcactctagccctgatcaagcctgacgcagtcgcccatccactgattctggaggctgttcatcagcagattctaagcaacaagttcctgattgtacgaatgagagaactactgtggagaaaggaagattgccagaggttttaccgagagcatgaagggcgttttttctatcagaggctggtggagttcatggccagcgggccaatccgagcctacatccttgcccacaaggatgccatccagctctggaggacgctcatgggacccaccagagtgttccgagcacgccatgtggccccagattctatccgtgggagtttcggcctcactgacacccgcaacaccacccatggttcggactctgtggtttcagccagcagagagattgcagccttcttccctgacttcagtgaacagcgctggtatgaggaggaagagccccagttgcgctgtggccctgtgtgctatagcccagagggaggtgtccactatgtagctggaacaggaggcctaggaccagcctgatgcaggtctatgaagaccagtggtagtgcccagacttctcctagacatctagtctaaaacattctcctaggaccagggaagcctggcttacagtgccatttctgctgggcaccaccacctgcctgagggcctagctcaccacagcacatcctccaggatctagccttctatctacctcttctctggaatgtttatggtggttcagaagaatgatgactcctctttgctgagaactgttcatccttcttcaagaagaagcttgccaggccgggcacggtggctcacgcctataatcccagcactttgggaggccgaggcaggcggatcacaaggtcaggaattcgagaccagcctgaccaacatggtgaaaccccatctctactaaaaatacaacaattagccaggcatggtggtgcatgcctgtaatcccagctactcagaggctgaggcaggagaattgcttgaacctgggaggcagagggtgcagtgagccgagatcgtgccattgcactccagcctgggcgacattctgtctcaaaaaaaaaaaaaaagaagcttgtctaattgacttgcctaaaaaatgcagtgactccaaacaacatttgacctgtcttcctcaataaaagtcagtgttctcctgaatcctttatgctgccacatttaggggaaacttttcaggcttcatcattctgacttctcagcagcattcagttattgcttcattctccagaaacactctcttctcttggattttctgatcccacacccttggttttctccttctgtgtgtttttcttcatctcctttatcagcttatgcaaacatttattttcataaattctctattcaagacatactgaaaaatgcaaagatggttaagacatgattgggtcctcaagttgctaattatgaatttgggtggtcagccagctataacgtggcagagatggagaagtgccctaacagaggtataaagtcctgtgggagaacagaggaaagaaggtttcctttggctgggtgaggaggtgaaggagatagggtggaaagtcttttataaaagatatagctggctttggaactaagcctgaaggtcaaatagggtatccatagcaggggtctggggcactagacagtctgttcattttcaggaatatatgggtcagttttgtatgtgtgacctaagaaacctgtgacacttcttacaggtcttgacttttctttctcagtacatgtgtatttctctttttggtggccttgaaacctttgagttgaaaattgccttcaccatctgccactttcactaatggtagaccaggaaatttggacccactgaacatagagaacaactagaaaagctgtgcaaaatataaaca

SEQ ID NO: 20443 - DNA, 1209 bp, Homo sapiens
  source 1..1209: mol_type = unassigned DNA
ggagtgagatggcctcaatcttgcgaagccctcaggctctccagctcactctagccctgatcaagcctgacgcagtcgcccatccactgattctggaggctgttcatcagcagattctaagcaacaagttcctgattgtacgaatgagagaactactgtggagaaaggaagattgccagaggttttaccgagagcatgaagggcgttttttctatcagaggctggtggagttcatggccagcgggccaatccgagcctacatccttgcccacaaggatgccatccagctctggaggacgctcatgggacccaccagagtgttccgagcacgccatgtggccccagattctatccgtgggagtttcggcctcactgacacccgcaacaccacccatggttcggactctgtggtttcagccagcagagagattgcagccttcttccctgacttcagtgaacagcgctggtatgaggaggaagagccccagttgcgctgtggccctgtgtgctatagcccagagggaggtgtccactatgtagctggaacaggaggcctaggaccagcctgatgcaggtctatgaagaccagtggtagtgcccagacttctcctagacatctagtctaaaacattctcctaggaccagggaagcctggcttacagtgccatttctgctgggcaccaccacctgcctgagggcctagctcaccacagcacatcctccaggatctagccttctatctacctcttctctggaatgtttatggtggttcagaagaatgatgactcctctttgctgagaactgttcatccttcttcaagaagaagcttgccaggccgggcacggtggctcacgcctataatcccagcactttgggaggccgaggcaggcggatcacaaggtcaggaattcgagaccagcctgaccaacatggtgaaaccccatctctactaaaaatacaacaattagccaggcatggtggtgcatgcctgtaatcccagctactcagaggctgaggcaggagaattgcttgaacctgggaggcagagggtgcagtgagccgagatcgtgccattgcactccagcctgggcgacattctgtctcaaaaaaaaaaaaaaagaagcttgtctaattgacttgcctaaaaaatgcagtgactccaaacaacatttgacctgtcttcctcaataaaagtcagtgttctcctg

SEQ ID NO: 20444 - DNA, 966 bp, Homo sapiens
  source 1..966: mol_type = unassigned DNA
gacaaggtgaacccgcagccggacttctgctgcactggggctccgaatgacccagaatctggggagtgagatggcctcaatcttgcgaagccctcaggctctccagctcactctagccctgatcaagcctgacgcagtcgcccatccactgattctggaggctgttcatcagcagattctaagcaacaagttcctgattgtacgaatgagagaactactgtggagaaaggaagattgccagaggttttaccgagagcatgaagactctgtggtttcagccagcagagagattgcagccttcttccctgacttcagtgaacagcgctggtatgaggaggaagagccccagttgcgctgtggccctgtgtgctatagcccagagggaggtgtccactatgtagctggaacaggaggcctaggaccagcctgatgcaggtctatgaagaccagtggtagtgcccagacttctcctagacatctagtctaaaacattctcctaggaccagggaagcctggcttacagtgccatttctgctgggcaccaccacctgcctgagggcctagctcaccacagcacatcctccaggatctagccttctatctacctcttctctggaatgtttatggtggttcagaagaatgatgactcctctttgctgagaactgttcatccttcttcaagaagaagcttgccaggccgggcacggtggctcacgcctataatcccagcactttgggaggccgaggcaggcggatcacaaggtcaggaattcgagaccagcctgaccaacatggtgaaaccccatctctactaaaaatacaacaattagccaggcatggtggtgcatgcctgtaatcccagctactcagaggctgaggcaggagaattgcttgaacctgggaggcagagggtgcagtgagccgagatcgtgccattgcactccagcctgggcgacattctgtctc

SEQ ID NO: 20445 - DNA, 757 bp, Homo sapiens
  source 1..757: mol_type = unassigned DNA
gaaggaccctgcgagggccgcaggctatccagcgtggcgcctggtggccgggccctgtgccggaggacaaggagtgagatggcctcaatcttgcgaagccctcaggctctccagctcactctagccctgatcaagcctgacgcagtcgcccatccactgattctggaggctgttcatcagcagattctaagcaacaagttcctgattgtacgaatgagagaactactgtggagaaaggaagattgccagaggttttaccgagagcatgaagggcgttttttctatcagaggctggtggagttcatggccagcgggccaatccgagcctacatccttgcccacaaggatgccatccagctctggaggacgctcatgggacccaccagagtgttccgagcacgccatgtggccccagattctatccgtgggagtttcggcctcactgacacccgcaacaccacccatggttcggactctgtggtttcagccagcagagagattgcagccttcttccctgacttcagtgaacagcgctggtatgaggaggaagagccccagttgcgctgtggccctgtgtgctatagcccagagggaggtgtccactatgtagctggaacaggaggcctaggaccagcctgatgcaggtctatgaagaccagtggtagtgcccagacttctcctagacatctagtctaaaacattctcctaggaccagggaagcctggcttacagtgccatttctgctgggcaccaccac

SEQ ID NO: 20446 - DNA, 1127 bp, Homo sapiens
  source 1..1127: mol_type = unassigned DNA
gacaaggtgaacccgcagccggacttctgctgcactggggctccgaatgacccagaatctggggagtgagatggcctcaatcttgcgaagccctcaggctctccagctcactctagccctgatcaagcctgacgcagtcgcccatccactgattctggaggctgttcatcagcagattctaagcaacaagttcctgattgtacgaatgagagaactactgtggagaaaggaagattgccagaggttttaccgagagcatgaagcgggccaatccgagcctacatccttgcccacaaggatgccatccagctctggaggacgctcatgggacccaccagagtgttccgagcacgccatgtggccccagattctatccgtgggagtttcggcctcactgacacccgcaacaccacccatggttcggactctgtggtttcagccagcagagagattgcagccttcttccctgacttcagtgaacagcgctggtatgaggaggaagagccccagttgcgctgtggccctgtgtgctatagcccagagggaggtgtccactatgtagctggaacaggaggcctaggaccagcctgatgcaggtctatgaagaccagtggtagtgcccagacttctcctagacatctagtctaaaacattctcctaggaccagggaagcctggcttacagtgccatttctgctgggcaccaccacctgcctgagggcctagctcaccacagcacatcctccaggatctagccttctatctacctcttctctggaatgtttatggtggttcagaagaatgatgactcctctttgctgagaactgttcatccttcttcaagaagaagcttgccaggccgggcacggtggctcacgcctataatcccagcactttgggaggccgaggcaggcggatcacaaggtcaggaattcgagaccagcctgaccaacatggtgaaaccccatctctactaaaaatacaacaattagccaggcatggtggtgcatgcctgtaatcccagctactcagaggctgaggcaggagaattgcttgaacctgggaggcagagggtgcagtgagccgagatcgtgccattgcactccagcctgggcgacattctgtctc

SEQ ID NO: 20447 - DNA, 1353 bp, Homo sapiens
  source 1..1353: mol_type = unassigned DNA
agaatctggggtgggcttaggccccgggccgcgtgttcttgccacgagaacccctagcagcctggccttggaatggctggatgaggtgcattcgttggttcattcagatactgttaagagccagctgtgtgctaggtactgcttacaccttctggtggtgaagacggaactgaagggaacttgcaaggagctgtgagaaagtgtaacgggaagtgagctaagatcactaaggagtgagatggcctcaatcttgcgaagccctcaggctctccagctcactctagccctgatcaagcctgacgcagtcgcccatccactgattctggaggctgttcatcagcagattctaagcaacaagttcctgattgtacgaatgagagaactactgtggagaaaggaagattgccagaggttttaccgagagcatgaagggcgttttttctatcagaggctggtggagttcatggccagcgggccaatccgagcctacatccttgcccacaaggatgccatccagctctggaggacgctcatgggacccaccagagtgttccgagcacgccatgtggccccagattctatccgtgggagtttcggcctcactgacacccgcaacaccacccatggttcggactctgtggtttcagccagcagagagattgcagccttcttccctgacttcagtgaacagcgctggtatgaggaggaagagccccagttgcgctgtggccctgtgtgctatagcccagagggaggtgtccactatgtagctggaacaggaggcctaggaccagcctgatgcaggtctatgaagaccagtggtagtgcccagacttctcctagacatctagtctaaaacattctcctaggaccagggaagcctggcttacagtgccatttctgctgggcaccaccacctgcctgagggcctagctcaccacagcacatcctccaggatctagccttctatctacctcttctctggaatgtttatggtggttcagaagaatgatgactcctctttgctgagaactgttcatccttcttcaagaagaagcttgccaggccgggcacggtggctcacgcctataatcccagcactttgggaggccgaggcaggcggatcacaaggtcaggaattcgagaccagcctgaccaacatggtgaaaccccatctctactaaaaatacaacaattagccaggcatggtggtgcatgcctgtaatcccagctactcagaggctgaggcaggagaattgcttgaacctgggaggcagagggtgcagtgagccgagatcgtgccattgcactccagcctgggcgacattctgtctcaaaaaaaaaaaaaaagaa

SEQ ID NO: 20448 - DNA, 1642 bp, Homo sapiens
  source 1..1642: mol_type = unassigned DNA
ggaagtaaaactgccggaaacagaataatggcgtctcgtagccccaggcgacagcgtggaggggcgggtctgtcgattggatgaacgcagctgagattactcccagccactaaggacgaagaggtggggcggtggcgtcccacgcctcgtgcgacagtgggcggggctttgttgcctgagtaaccgtatgatggtggtggtggtggtgtcttcctgtctcaacgatacctattttctagtgctgagatcctgagacaatgaatcatagtgaaagattcgttttcattgcagagtggtatgatccaaatgcttcacttcttcgacgttatgagcttttattttacccaggggatggatctgttgaaatgcatgatgtaaagaatcatcgcacctttttaaagcggaccaaatatgataacctgcacttggaagatttatttataggcaacaaagtgaatgtcttttctcgacaactggtattaattgactatggggatcaatatacagctcgccagctgggcagtaggaaagaaaaaacgctagccctaattaaaccagatgcaatatcaaaggctggagaaataattgaaataataaacaaagctggatttactataaccaaactcaaaatgatgatgctttcaaggaaagaagcattggattttcatgtagatcaccagtcaagaccctttttcaatgagctgatccagtttattacaactggtcctattattgccatggagattttaagagatgatgctatatgtgaatggaaaagactgctgggacctgcaaactctggagtggcacgcacagatgcttctgaaagcattagagccctctttggaacagatggcataagaaatgcagcgcatggccctgattcttttgcttctgcggccagagaaatggagttgttttttccttcaagtggaggttgtgggccggcaaacactgctaaatttactaattgtacctgttgcattgttaaaccccatgctgtcagtgaaggactgttgggaaagatcctgatggctatccgagatgcaggttttgaaatctcagctatgcagatgttcaatatggatcgggttaatgttgaggaattctatgaagtttataaaggagtagtgaccgaatatcatgacatggtgacagaaatgtattctggcccttgtgtagcaatggagattcaacagaataatgctacaaagacatttcgagaattttgtggacctgctgatcctgaaattgcccggcatttacgccctggaactctcagagcaatctttggtaaaactaagatccagaatgctgttcactgtactgatctgccagaggatggcctattagaggttcaatacttcttcaagatcttggataattagtggtgtggaaagtaaagaagtcacaggttgggacatttagacaagagtgaatcacacacgaggaatgtgttcattcttttattgtccgttgttttaacctgactgaatacaagatcaacaagagcactgtactcctggcaattattacatatgttagaacatggattttgcactgtagacaacatttaacaccagtctatggggtactgcattgctttttataaagttcaaaataaagatttattttcaaacaa

SEQ ID NO: 20449 - DNA, 1590 bp, Homo sapiens
  source 1..1590: mol_type = unassigned DNA
agaataatggcgtctcgtagccccaggcgacagcgtggaggggcgggtctgtcgattggatgaacgcagctgagattactcccagccactaaggacgaagaggtggggcggtggcgtcccacgcctcgtgcgacagtgggcggggctttgttgcctgagtaaccgtatgatggtggtggtggtggtgtcttcctgtctcaacgatacctattttctagtgctgagatcctgagacaatgagtggtatgatccaaatgcttcacttcttcgacgttatgagcttttattttacccaggggatggatctgttgaaatgcatgatgtaaagaatcatcgcacctttttaaagcggaccaaatatgataacctgcacttggaagatttatttataggcaacaaagtgaatgtcttttctcgacaactggtattaattgactatggggatcaatatacagctcgccagctgggcagtaggaaagaaaaaacgctagccctaattaaaccagatgcaatatcaaaggctggagaaataattgaaataataaacaaagctggatttactataaccaaactcaaaatgatgatgctttcaaggaaagaagcattggattttcatgtagatcaccagtcaagaccctttttcaatgagctgatccagtttattacaactggtcctattattgccatggagattttaagagatgatgctatatgtgaatggaaaagactgctgggacctgcaaactctggagtggcacgcacagatgcttctgaaagcattagagccctctttggaacagatggcataagaaatgcagcgcatggccctgattcttttgcttctgcggccagagaaatggagttgttttttccttcaagtggaggttgtgggccggcaaacactgctaaatttactaattgtacctgttgcattgttaaaccccatgctgtcagtgaaggactgttgggaaagatcctgatggctatccgagatgcaggttttgaaatctcagctatgcagatgttcaatatggatcgggttaatgttgaggaattctatgaagtttataaaggagtagtgaccgaatatcatgacatggtgacagaaatgtattctggcccttgtgtagcaatggagattcaacagaataatgctacaaagacatttcgagaattttgtggacctgctgatcctgaaattgcccggcatttacgccctggaactctcagagcaatctttggtaaaactaagatccagaatgctgttcactgtactgatctgccagaggatggcctattagaggttcaatacttcttcaagatcttggataattagtggtgtggaaagtaaagaagtcacaggttgggacatttagacaagagtgaatcacacacgaggaatgtgttcattcttttattgtccgttgttttaacctgactgaatacaagatcaacaagagcactgtactcctggcaattattacatatgttagaacatggattttgcactgtagacaacatttaacaccagtctatggggtactgcattgctttttataaagttcaaaataaagatttattttcaaacaa

SEQ ID NO: 20450 - DNA, 2713 bp, Homo sapiens
  source 1..2713: mol_type = unassigned DNA
aatcgagaacgccattttgtaccccttggcaggcaccgagctccgtcgtctcgtttccggcggtcgcgcgctcttttctcgggacgggagaggccgtgtagcgtcgccgttactccgaggagataccagtcggtagaggagaagtcgaggttagagggaactgggaggcactttgctgtctgcaatcgaagttgagggtgcaaaaatgcagagtaataaaacttttaacttggagaagcaaaaccatactccaagaaagcatcatcaacatcaccaccagcagcagcaccaccagcagcaacagcagcagccgccaccaccgccaatacctgcaaatgggcaacaggccagcagccaaaatgaaggcttgactattgacctgaagaattttagaaaaccaggagagaagaccttcacccaacgaagccgtctttttgtgggaaatcttcctcccgacatcactgaggaagaaatgaggaaactatttgagaaatatggaaaggcaggcgaagtcttcattcataaggataaaggatttggctttatccgcttggaaacccgaaccctagcggagattgccaaagtggagctggacaatatgccactccgtggaaagcagctgcgtgtgcgctttgcctgccatagtgcatcccttacagttcgaaaccttcctcagtatgtgtccaacgaactgctggaagaagccttttctgtgtttggccaggtagagagggctgtagtcattgtggatgatcgaggaaggccctcaggaaaaggcattgttgagttctcagggaagccagctgctcggaaagctctggacagatgcagtgaaggctccttcctgctaaccacatttcctcgtcctgtgactgtggagcccatggaccagttagatgatgaagagggacttccagagaagctggttataaaaaaccagcaatttcacaaggaacgagagcagccacccagatttgcacagcctggctcctttgagtatgaatatgccatgcgctggaaggcactcattgagatggagaagcagcagcaggaccaagtggaccgcaacatcaaggaggctcgtgagaagctggagatggagatggaagctgcacgccatgagcaccaggtcatgctaatgagacaggatttgatgaggcgccaagaagaacttcggaggatggaagagctgcacaaccaagaggtgcaaaaacgaaagcaactggagctcaggcaggaggaagagcgcaggcgccgtgaagaagagatgcggcggcagcaagaagaaatgatgcggcgacagcaggaaggattcaagggaaccttccctgatgcgagagagcaggagattcggatgggtcagatggctatgggaggtgctatgggcataaacaacagaggtgccatgccccctgctcctgtgccagctggtaccccagctcctccaggacctgccactatgatgccggatggaactttgggattgaccccaccaacaactgaacgctttggtcaggctgctacaatggaaggaattggggcaattggtggaactcctcctgcattcaaccgtgcagctcctggagctgaatttgccccaaacaaacgtcgccgatactaataagttgcagtgtctagtttctcaaaacccttaaaagaaggaccctttttggactagccagaattctaccctggaaaagtgttagggattccttccaatagttagatctaccctgcctgtactactctagggagtatgctggaggcagagggcaagggaggggtggtattaaacaagtcaattctgtgtggtatattgtttaatcagttctgtgtggtgcattcctgaagtctctaatgtgactgttgagggcctggggaaaccatggcaaagtggatccagttagagcccattaatcttgatcattccggttttttttttttttgtccatcttgtttcatttgcttgccccgcccccgagacggagtcttactctgtcgcccaggctggagtgtagtggcatgatctcggctcactgcaatctctgcctcccgggttcaagcttgtccaggttgatcttgaactcctgacctcgtgatctacccacctcggcctcccaaaatgctgggattacaggggtgagccaccgtgcccaacctcacttgcttcttatccttacactcccccagccccagagaaactgccacatacaccacaaaaaccaaacatcccccaatgaccttagccccattgctccattcactcccaggtgagaattcaggcaaacgtccacaaaggtcacaggcagcgtacatacggttctgttataccccatatattaccccttcatgtcctaaagaagacattttctcttagagattttcattttagtgtatctttaaaaaaaaatcttgtgttaacttgcctccatctttttcttgggtgaggacacccaggaatgacccttttgtgtctatgatgttgctgttcacagcttttcttgataggcctagtacaatcttgggaacagggttactgtatactgaaggtctgacagtagctcttagactcgcctatcttaggtagtcatgctgtgcattttttttttcattggtgtactgtgtttgatttgtctcatatatttggagtttttctgaaaaatggagcagtaatgcagcatcaacctattaaaatacattttaagccttttaa

SEQ ID NO: 20451 - DNA, 2606 bp, Homo sapiens
  source 1..2606: mol_type = unassigned DNA
tcgtttccggcggtcgcgcgctcttttctcgggacgggagaggccgtgtagcgtcgccgttactccgaggagataccagtcggtagaggggtgcaaaaatgcagagtaataaaacttttaacttggagaagcaaaaccatactccaagaaagcatcatcaacatcaccaccagcagcagcaccaccagcagcaacagcagcagccgccaccaccgccaatacctgcaaatgggcaacaggccagcagccaaaatgaaggcttgactattgacctgaagaattttagaaaaccaggagagaagaccttcacccaacgaagccgtctttttgtgggaaatcttcctcccgacatcactgaggaagaaatgaggaaactatttgagaaatatggaaaggcaggcgaagtcttcattcataaggataaaggatttggctttatccgcttggaaacccgaaccctagcggagattgccaaagtggagctggacaatatgccactccgtggaaagcagctgcgtgtgcgctttgcctgccatagtgcatcccttacagttcgaaaccttcctcagtatgtgtccaacgaactgctggaagaagccttttctgtgtttggccaggtagagagggctgtagtcattgtggatgatcgaggaaggccctcaggaaaaggcattgttgagttctcagggaagccagctgctcggaaagctctggacagatgcagtgaaggctccttcctgctaaccacatttcctcgtcctgtgactgtggagcccatggaccagttagatgatgaagagggacttccagagaagctggttataaaaaaccagcaatttcacaaggaacgagagcagccacccagatttgcacagcctggctcctttgagtatgaatatgccatgcgctggaaggcactcattgagatggagaagcagcagcaggaccaagtggaccgcaacatcaaggaggctcgtgagaagctggagatggagatggaagctgcacgccatgagcaccaggtcatgctaatgagacaggatttgatgaggcgccaagaagaacttcggaggatggaagagctgcacaaccaagaggtgcaaaaacgaaagcaactggagctcaggcaggaggaagagcgcaggcgccgtgaagaagagatgcggcggcagcaagaagaaatgatgcggcgacagcaggaaggattcaagggaaccttccctgatgcgagagagcaggagattcggatgggtcagatggctatgggaggtgctatgggcataaacaacagaggtgccatgccccctgctcctgtgccagctggtaccccagctcctccaggacctgccactatgatgccggatggaactttgggattgaccccaccaacaactgaacgctttggtcaggctgctacaatggaaggaattggggcaattggtggaactcctcctgcattcaaccgtgcagctcctggagctgaatttgccccaaacaaacgtcgccgatactaataagttgcagtgtctagtttctcaaaacccttaaaagaaggaccctttttggactagccagaattctaccctggaaaagtgttagggattccttccaatagttagatctaccctgcctgtactactctagggagtatgctggaggcagagggcaagggaggggtggtattaaacaagtcaattctgtgtggtatattgtttaatcagttctgtgtggtgcattcctgaagtctctaatgtgactgttgagggcctggggaaaccatggcaaagtggatccagttagagcccattaatcttgatcattccggttttttttttttttgtccatcttgtttcatttgcttgccccgcccccgagacggagtcttactctgtcgcccaggctggagtgtagtggcatgatctcggctcactgcaatctctgcctcccgggttcaagcttgtccaggttgatcttgaactcctgacctcgtgatctacccacctcggcctcccaaaatgctgggattacaggggtgagccaccgtgcccaacctcacttgcttcttatccttacactcccccagccccagagaaactgccacatacaccacaaaaaccaaacatcccccaatgaccttagccccattgctccattcactcccaggtgagaattcaggcaaacgtccacaaaggtcacaggcagcgtacatacggttctgttataccccatatattaccccttcatgtcctaaagaagacattttctcttagagattttcattttagtgtatctttaaaaaaaaatcttgtgttaacttgcctccatctttttcttgggtgaggacacccaggaatgacccttttgtgtctatgatgttgctgttcacagcttttcttgataggcctagtacaatcttgggaacagggttactgtatactgaaggtctgacagtagctcttagactcgcctatcttaggtagtcatgctgtgcattttttttttcattggtgtactgtgtttgatttgtctcatatatttggagtttttctgaaaaatggagcagtaatgcagcatcaacctattaaaatacattttaagccttttaa

SEQ ID NO: 20452 - DNA, 1921 bp, Homo sapiens
  source 1..1921: mol_type = unassigned DNA
aacgccattttgtaccccttggcaggcaccgagctccgtcgtctcgtttccggcggtcgcgcgctcttttctcgggacgggagaggccgtgtagcgtcgccgttactccgaggagataccagtcggtagaggagaagtcgaggttagagggaactgggaggcactttgctgtctgcaatcgaagttgagaggcccagtatttaggcgacagtgaatttattactctgaagagggttctgcacatatttccaaattatattggtggtcatcagaagtaggtgataggaagaaatacttctcaagggtgcaaaaatgcagagtaataaaacttttaacttggagaagcaaaaccatactccaagaaagcatcatcaacatcaccaccagcagcagcaccaccagcagcaacagcagcagccgccaccaccgccaatacctgcaaatgggcaacaggccagcagccaaaatgaaggcttgactattgacctgaagaattttagaaaaccaggagagaagaccttcacccaacgaagccgtctttttgtgggaaatcttcctcccgacatcactgaggaagaaatgaggaaactatttgagaaatatggaaaggcaggcgaagtcttcattcataaggataaaggatttggctttatccgcttggaaacccgaaccctagcggagattgccaaagtggagctggacaatatgccactccgtggaaagcagctgcgtgtgcgctttgcctgccatagtgcatcccttacagttcgaaaccttcctcagtatgtgtccaacgaactgctggaagaagccttttctgtgtttggccaggtagagagggctgtagtcattgtggatgatcgaggaaggccctcaggaaaaggcattgttgagttctcagggaagccagctgctcggaaagctctggacagatgcagtgaaggctccttcctgctaaccacatttcctcgtcctgtgactgtggagcccatggaccagttagatgatgaagagggacttccagagaagctggttataaaaaaccagcaatttcacaaggaacgagagcagccacccagatttgcacagcctggctcctttgagtatgaatatgccatgcgctggaaggcactcattgagatggagaagcagcagcaggaccaagtggaccgcaacatcaaggaggctcgtgagaagctggagatggagatggaagctgcacgccatgagcaccaggtcatgctaatgagacaggatttgatgaggcgccaagaagaacttcggaggatggaagagctgcacaaccaagaggtgcaaaaacgaaagcaactggagctcaggcaggaggaagagcgcaggcgccgtgaagaagagatgcggcggcagcaagaagaaatgatgcggcgacagcaggaaggattcaagggaaccttccctgatgcgagagagcaggagattcggatgggtcagatggctatgggaggtgctatgggcataaacaacagaggtgccatgccccctgctcctgtgccagctggtaccccagctcctccaggacctgccactatgatgccggatggaactttgggattgaccccaccaacaactgaacgctttggtcaggctgctacaatggaaggaattggggcaattggtggaactcctcctgcattcaaccgtgcagctcctggagctgaatttgccccaaacaaacgtcgccgatactaataagttgcagtgtctagtttctcaaaacccttaaaagaaggaccctttttggactagccagaattctaccctggaaaagtgttagggattccttccaatagttagatctaccctgcctgtactactctagggagtatgctggaggcagagggcaagggaggggtggtattaaacaagtcaattctgtgtggta

SEQ ID NO: 20453 - DNA, 855 bp, Homo sapiens
  source 1..855: mol_type = unassigned DNA
ccgtgtagcgtcgccgttactccgaggagataccagtcggtagaggagaagtcgaggttagagggaactgggaggcactttgctgtctgcaatcgaagttgagggtgcaaaaatgcagagtaataaaacttttaacttggagaagcaaaaccatactccaagaaagcatcatcaacatcaccaccagcagcagcaccaccagcagcaacagcagcagccgccaccaccgccaatacctgcaaatgggcaacaggccagcagccaaaatgaaggcttgactattgacctgaagaattttagaaaaccaggagagaagaccttcacccaacgaagccgtctttttgtgggaaatcttcctcccgacatcactgaggaagaaatgaggaaactatttgagaaatatggaaaggcaggcgaagtcttcattcataaggataaaggatttggctttatccgcttggaaacccgaaccctagcggagattgccaaagtggagctggacaatatgccactccgtggaaagcagctgcgtgtgcgctttgcctgccatagtgcatcccttacagttcgaaaccttcctcaggaacgagagcagccacccagatttgcacagcctggctcctttgagtatgaatatgccatgcgctggaaggcactcattgagatggagaagcagcagcaggaccaagtggaccgcaacatcaaggaggctcgtgagaagctggagatggagatggaagctgcacgccatgagcaccaggtcatgctaatgagacaggatttgatgaggcgccaagaagaacttcggaggatggaagagctgcacaaccaagaggtgcaaaaacgaaagcaact

SEQ ID NO: 20454 - DNA, 703 bp, Homo sapiens
  source 1..703: mol_type = unassigned DNA
ctcccgacatcactgaggaagaaatgaggaaactatttgagaaatatggaaaggcaggcgaagtcttcattcataaggataaaggatttggctttatccgcttggtagagagggctgtagtcattgtggatgatcgaggaaggccctcaggaaaaggcattgttgagttctcagggaagccagctgctcggaaagctctggacagatgcagtgaaggctccttcctgctaaccacatttcctcgtcctgtgactgtggagcccatggaccagttagatgatgaagagggacttccagagaagctggttataaaaaaccagcaatttcacaaggaacgagagcagccacccagatttgcacagcctggctcctttgagtatgaatatgccatgcgctggaaggcactcattgagatggagaagcagcagcaggaccaagtggaccgcaacatcaaggaggctcgtgagaagctggagatggagatggaagctgcacgccatgagcaccaggtcatgctaatgagacaggatttgatgaggcgccaagaagaacttcggaggatggaagagctgcacaaccaagaggtgcaaaaacgaaagcaactggagctcaggcaggaggaagagcgcaggcgccgtgaagaagagatgcggcggcagcaagaagaaatgatgcggcgacagcaggaaggattcaagggaac

SEQ ID NO: 20455 - DNA, 622 bp, Homo sapiens
  source 1..622: mol_type = unassigned DNA
ctcttttctcgggacgggagaggccgtgtagcgtcgccgttactccgaggagataccagtcggtagaggagaagtcgaggttagagggaactgggaggcactttgctgtctgcaatcgaagttgagaggcccagtatttaggcgacagtgaatttattactctgaagagggttctgcacatatttccaaattatattggtggtcatcagaagtaggtgataggaagaaatacttctcaagggtgcaaaaatgcagagtaataaaacttttaacttggagaagcaaaaccatactccaagaaagcatcatcaacatcaccaccagcagcagcaccaccagcagcaacagcagcagccgccaccaccgccaatacctgcaaatgggcaacaggccagcagccaaaatgaaggcttgactattgacctgaagaattttagaaaaccaggagagaagaccttcacccaacgaagccgtctttttgtgggaaatcttcctcccgacatcactgaggaagaaatgaggaaactatttgagaaatatggaaaggaaacccgaaccctagcggagattgccaaagtggagctggacaatatgccactccgtggaaagcagctgcgtgtgc

SEQ ID NO: 20456 - DNA, 491 bp, Homo sapiens
  source 1..491: mol_type = unassigned DNA
gtgggatttcttggaacaatcagcgaaggaagaggctagggcgaagctaggtttggagggtggatggcgcttccgaggccccttgaggccttgtctctgccgccacactgccttctcagcccacccgcggggggccacctttctcaactcgcttcgcttcgggctttccccattttcgttcctgccctgtttctttgtgcaactcatctccgaatcttacccgtgtcaagaagtcgaggttagagggaactgggaggcactttgctgtctgcaatcgaagttgagggtgcaaaaatgcagagtaataaaacttttaacttggagaagcaaaaccatactccaagaaagcatcatcaacatcaccaccagcagcagcaccaccagcagcaacagcagcagccgccaccaccgccaatacctgcaaatgggcaacaggccagcagccaaaatgaaggcttgactattgacctgaagaattttagaaaaccagg

SEQ ID NO: 20457 - DNA, 726 bp, Homo sapiens
  source 1..726: mol_type = unassigned DNA
gcatatccagagcccgccgctttcgtagtcagatttctagaagtcgaggttagagggaactgggaggcactttgctgtctgcaatcgaagttgagggtgcaaaaatgcagagtaataaaacttttaacttggagaagcaaaaccatactccaagaaagcatcatcaacatcaccaccagcagcagcaccaccagcagcaacagcagcagccgccaccaccgccaatacctgcaaatgggcaacaggccagcagccaaaatgaaggcttgactattgacctgaagaattttagaaaaccaggagagaagaccttcacccaacgaagccgtctttttgtgggaaatcttcctcccgacatcactgaggaagaaatgaggaaactatttgagaaatatggaaaggcaggcgaagtcttcattcataaggataaaggatttggctttatccgcttggaaacccgaaccctagcggagattgccaaagtggagctggacaatatgccactccgtggaaagcagctgcgtgtgcgctttgcctgccatagtgcatcccttacagttcgaaaccttcctcagtatgtgtccaacgaactgctggaagaagccttttctgtgtttggccaggtagagagggctgtagtcattgtggatgatcgaggaaggccctcaggaaaaggcattgttgagttctcagggaagccagctgctcggaaagctctggacagat

SEQ ID NO: 20458 - DNA, 2882 bp, Homo sapiens
  source 1..2882: mol_type = unassigned DNA
caggcgcagtgcaggactgctccgagcacgcctacgcgcgcattttctccccttcctctccctctttccactttcctctccctttttctcctctcctttccccctcccaccacttggtctttcagtctttcagtcagttcgtttaggtctctccttccgacccccacccccagctcctctccctttccttttccccctccccctttcctttcccgtctcacgcgccaggccgcttgcacatgcgcattaggtacaaagcctcgctctttgtccccatctgtcgttcacacgaactcaagcctttggcattcggcagccaatagaatctaagaaatggcggaaaaatgattccgcctcgggagctaaaccttgattggcagtttagctaaccaatcgagaacgccattttgtaccccttggcaggcaccgagctccgtcgtctcgtttccggcggtcgcgcgctcttttctcgggacgggagaggccgtgtagcgtcgccgttactccgaggagataccagtcggtagaggatgaaggcttgactattgacctgaagaattttagaaaaccaggagagaagaccttcacccaacgaagccgtctttttgtgggaaatcttcctcccgacatcactgaggaagaaatgaggaaactatttgagaaatatggaaaggcaggcgaagtcttcattcataaggataaaggatttggctttatccgcttggaaacccgaaccctagcggagattgccaaagtggagctggacaatatgccactccgtggaaagcagctgcgtgtgcgctttgcctgccatagtgcatcccttacagttcgaaaccttcctcagtatgtgtccaacgaactgctggaagaagccttttctgtgtttggccaggtagagagggctgtagtcattgtggatgatcgaggaaggccctcaggaaaaggcattgttgagttctcagggaagccagctgctcggaaagctctggacagatgcagtgaaggctccttcctgctaaccacatttcctcgtcctgtgactgtggagcccatggaccagttagatgatgaagagggacttccagagaagctggttataaaaaaccagcaatttcacaaggaacgagagcagccacccagatttgcacagcctggctcctttgagtatgaatatgccatgcgctggaaggcactcattgagatggagaagcagcagcaggaccaagtggaccgcaacatcaaggaggctcgtgagaagctggagatggagatggaagctgcacgccatgagcaccaggtcatgctaatgagacaggatttgatgaggcgccaagaagaacttcggaggatggaagagctgcacaaccaagaggtgcaaaaacgaaagcaactggagctcaggcaggaggaagagcgcaggcgccgtgaagaagagatgcggcggcagcaagaagaaatgatgcggcgacagcaggaaggattcaagggaaccttccctgatgcgagagagcaggagattcggatgggtcagatggctatgggaggtgctatgggcataaacaacagaggtgccatgccccctgctcctgtgccagctggtaccccagctcctccaggacctgccactatgatgccggatggaactttgggattgaccccaccaacaactgaacgctttggtcaggctgctacaatggaaggaattggggcaattggtggaactcctcctgcattcaaccgtgcagctcctggagctgaatttgccccaaacaaacgtcgccgatactaataagttgcagtgtctagtttctcaaaacccttaaaagaaggaccctttttggactagccagaattctaccctggaaaagtgttagggattccttccaatagttagatctaccctgcctgtactactctagggagtatgctggaggcagagggcaagggaggggtggtattaaacaagtcaattctgtgtggtatattgtttaatcagttctgtgtggtgcattcctgaagtctctaatgtgactgttgagggcctggggaaaccatggcaaagtggatccagttagagcccattaatcttgatcattccggttttttttttttttgtccatcttgtttcatttgcttgccccgcccccgagacggagtcttactctgtcgcccaggctggagtgtagtggcatgatctcggctcactgcaatctctgcctcccgggttcaagcttgtccaggttgatcttgaactcctgacctcgtgatctacccacctcggcctcccaaaatgctgggattacaggggtgagccaccgtgcccaacctcacttgcttcttatccttacactcccccagccccagagaaactgccacatacaccacaaaaaccaaacatcccccaatgaccttagccccattgctccattcactcccaggtgagaattcaggcaaacgtccacaaaggtcacaggcagcgtacatacggttctgttataccccatatattaccccttcatgtcctaaagaagacattttctcttagagattttcattttagtgtatctttaaaaaaaaatcttgtgttaacttgcctccatctttttcttgggtgaggacacccaggaatgacccttttgtgtctatgatgttgctgttcacagcttttcttgataggcctagtacaatcttgggaacagggttactgtatactgaaggtctgacagtagctcttagactcgcctatcttaggtagtcatgctgtgcattttttttttcattggtgtactgtgtttgatttgtctcatatatttggagtttttctgaaaaatggagcagtaatgcagcatcaacctattaaaatacattttaagcctttt

SEQ ID NO: 20459 - DNA, 4661 bp, Homo sapiens
  source 1..4661: mol_type = unassigned DNA
cttacggcagtctcgcgggatttccccctctcgcgggaattatttgaacgttcgagcggtaaatactccctggggctgtcatagaagactactcggagagcgctgcctctgggttggcgggctggcaggctgtagccgagcgcgggcaggactcgtcccggcagggttccagagccatgggagcggaaaggaggctgctgtcgattaaggaggcctttcggctggcgcagcagccgcaccagaaccaggcgaagctggtggtggcgctgagccgcacctaccgcacgatggatgataagacagtttttcatgaggagttcattcattaccttaaatatgttatggtggtctataaacgtgaaccagctgtggagagggtaatagaatttgcagcaaagtttgttacctcatttcaccaatcagatatggaagatgatgaggaagaggaagatggtggccttttaaattatttgtttacttttctcttaaagtctcatgaagcaaacagcaatgcagtgagatttagagtgtgcctgctcataaacaagcttttgggaagtatgccagaaaatgctcagattgatgatgatgtgtttgataaaattaataaagccatgcttattagattgaaagataagattccaaatgtgagaatacaggcagttctggcgctttcacgacttcaggatcccaaggatgatgaatgcccagtggttaatgcatatgctactttgattgaaaatgattcaaatccagaagttagacgggcagtgttatcatgtattgcaccatcagcaaagactttgccaaaaattgtagggcgcaccaaggatgtgaaagaggctgtcagaaagctggcttatcaggttttagctgaaaaggttcatatgagagctatgtccattgctcagagagtaatgctccttcaacaaggtcttaatgacagatcagatgctgtgaaacaagctatgcagaagcatcttcttcaaggctggttacggttctctgaaggaaatatcttagagttgctccatcggttggatgtagaaaattcttctgaagtggcagtctctgttctcaatgccttgttttcaataactcctctcagtgaactggtgggactctgtaaaaacaatgatggcaggaaattgattccagtggaaacattaactcctgaaattgctttgtattggtgtgccctttgtgaatatttgaaatcaaaaggagatgaaggtgaagaatttttagagcagattttgccagagcctgtagtatatgcagactatttattgagttacatccagagcattccagttgttaatgaagaacacagaggtgatttttcctatattggaaatttgatgacaaaagaattcataggtcaacaattgattctaattattaagtctttggataccagtgaagaaggaggaagaaaaaaactgctggctgttttacaggagattcttattttacccacaatcccaatatccctggtttcttttcttgttgaaagactactccacatcattatagatgataataagagaacacaaattgttacagaaattatctcagagattcgggcgcccattgttactgttggtgttaataacgatccagctgatgtaagaaagaaagaactcaagatggctgaaataaaagttaagcttatcgaagccaaagaagctttggaaaattgcattaccttacaggattttaatcgggcatcagaattaaaagaagaaataaaagcattagaagatgccagaataaaccttttgaaagagacagagcaacttgaaattaaagaagtccacatagagaagaatgatgctgaaacattgcagaaatgtcttattttatgctatgaactgttgaagcagatgtccatttcaacaggcttaagtgcaaccatgaatggaatcatcgaatctttgattcttcctggaataataagtattcatcctgttgtaagaaacctggctgttttatgcttgggatgctgtggactacagaatcaggattttgcaaggaaacacttcgtattactattgcaggttttgcaaattgatgatgtcacaataaaaataagtgctttaaaggcaatctttgaccaactgatgacgttcgggattgaaccatttaaaactaaaaaaatcaaaacacttcattgtgaaggtacagaaataaacagtgatgatgagcaagaatcaaaagaagttgaagagactgctacagctaagaatgttctgaaactcctttctgatttcttagatagtgaggtatctgaacttaggactggagctgcagaaggactagccaagctgatgttctctgggcttttggtcagcagcaggattctttctcgtcttattttgttatggtacaatcctgtgactgaagaggatgttcaacttcgacattgcctaggcgtgttcttccccgtgtttgcttatgcaagcaggactaatcaggaatgctttgaagaagcttttcttccaaccctgcaaacactggccaatgcccctgcatcttctcctttagctgaaattgatatcacaaatgttgctgagttacttgtagatttgacaagaccaagtggattaaatcctcaggccaagacttcccaagattatcaggccttaacagtacatgacaatttggctatgaaaatttgcaatgagatcttaacaagtccgtgctcgccagaaattcgagtctatacaaaagccttgagttctttagaactcagtagccatcttgcaaaagatcttctggttctattgaatgagattctggagcaagtaaaagataggacatgtctgagagctttggagaaaatcaagattcagttagaaaaaggaaataaagaatttggtgaccaagctgaagcagcacaggatgccaccttgactacaactactttccaaaatgaagatgaaaagaataaagaagtatatatgactccactcaggggtgtaaaagcaacccaagcatcaaagtctactcagctaaagactaacagaggacagagaaaagtgacagtttcagctaggacgaacaggaggtgtcagactgctgaagccgactctgaaagtgatcatgaagttccagaaccagaatcagaaatgaagatgagactaccaagacgagccaaaaccgcagcactagaaaaaagtaaacttaaccttgcccaatttctcaatgaagatctaagttaggaaagacgatggaggtggaatcctttaagattatgtccagttatttgctttaataaagaagaagttacccttgtcaaaatcagaacaaacctgatgtctttctgaagattttctgctgtgcgcttccacgttactttggcctgtattaaagcagtagagcagcatcagttattatagtccagaaaaagtgtgcatcagtcagtcacacagatttatcacaatctgaggtgggcctaggaatctcatttttaaatagtctctccaagtgattcttatgaactctttatgtttaaaatcatgtcattatggaaaacttacaagtgtaactagctagtagcttgcatttgagaagcttatgacttagatgggcagaatcaacaaagatgaaaccgcctgaggacacatttaacaagtaacatttctagggaaaatgaaggaagtaccacaaactggctagaaaggagcttatcaatcaccagtgaggaagaccagtataacgttcaacaacagttattttgacaaaaacttattttgtgattcctacagtgaaaacatttttggtgatatctgcctgggaaatctctcttcctaaagtatttgtatatgggagtccttgtttgtgaatgtttcctggattagggaggtgtcaacataaatgtattattaaccatgaagctgctcgctatatttttggcataacaaaataatatttatttactgtggataataattctagtgggaatataatgtgacaggaacttctctttatatacgctaccaatttatgagcactattcactgtcaatttcatttcttgtcttttgaaattgacacttggcctgacttacgaaacttgtactatatgaaattggtcctcttttctgcaatacccaacgaaacaccttttctctttattattcagaaatgtcctaacatggatctgtttgttttaataattgtgctttttttaggcttatcatctactagaggccatttacttaaggtgaaattttaagatggagctaaagtaagatcactggtttttagaaccaaattgctatacatatgtgcctcatagaacttataaaaggagtcaaagtttcaaagcaagatagttattaagcaaaaggaaaaatggtaatgatagaaagtcagttaaaaatagatgattgttcttcattctgtttgttggctctgtgttctcctgtgcttcagattccttatgtgttgttgttttaaagacaatttgcagggggttgggagaaggactgaaaaggtacattaagtgtgctgtaaggaaaagtcttagaaacataataagctaaaatcccattcacacatggccaggctatccaaaaagaaaggagccatgttctcatgtggtttaccataccaaagcttgctttctctggcatgggaaaaataaatttaagcacc

SEQ ID NO: 20460 - DNA, 1224 bp, Homo sapiens
  source 1..1224: mol_type = unassigned DNA
gttccgaagttgcacggtgaattggcgctatgtctggggacagcagcggccgcgggccagagggccggggccggggccgcgacccgcatcgggatcgcacccgctcccgctcccgctcgcggtcccctttgtcgcccaggtcccgccgcggctctgcgcgggagcgcagagaggccccagagcgcccgagcctggaggacacagagccgtcggattccggggacgagatgatggacccggccagcttggaggcggaggccgaccaaggcctgtgccgccagatccgccatcagtaccgggcgctcatcaactccgtccaacaaaaccgtgaggacatactgaatgccggtgacaaattaacagaggtccttgaagaggctaacactctgtttaatgaagtgtcccgagcaagagaagcagtcctggatgcccactttcttgttttggcttcagatttgggcaaagagaaagcaaagcagctgcgctcagacctgagctcctttgacatgttaagatatgttgaaactctactcacacatatgggtgtaaatccgctagaagctgaagaactcatccgtgatgaagatagtcctgattttgaattcatagtctatgactcctggaagataacaggcagaacagcagaaaacacctttaataaaacccatacattccactttctgttgggttcaatatacggagagtgccctgtgccaaagccacgagttgatcgtccaagaaaagttcctgtgatacaagaggagagggcaatgcctgcccagttaagaagaatggaagaatctcatcaagaagcaacagagaaagaagtagaaagaatcttgggattgttgcagacatattttcgagaagatcgagacagtctcactctttcgcccagactggaatgcagtggcaccatctcaactcactgcaacctccacctcctggattcaagcaattctcctgcctcagcctcctgagtagctgggattacaggcgcacgcgccaccacatctggctaattttttttctgtatttttagtagagacattgtttcgccatgttggccaagctagtcttgaacccctgacctcaggtgatctgccagcatcggcctcccaaagtgctgggattacaggtgtgagtgccatgcccagctggatgattaagttctttatagcattttactcttgtataaattgctgaagtaaaaaatcttagtat

SEQ ID NO: 20461 - DNA, 1394 bp, Homo sapiens
  source 1..1394: mol_type = unassigned DNA
agtttctggcgcgaacttccgccgttccgaagttgcacggtgaattggcgctatgtctggggacagcagcggccgcgggccagagggccggggccggggccgcgacccgcatcgggatcgcacccgctcccgctcccgctcgcggtcccctttgtcgcccaggtcccgccgcggctctgcgcgggagcgcagagaggccccagagcgcccgagcctggaggacacagagccgtcggattccggggacgagatgatggacccggccagcttggaggcggaggccgaccaaggcctgtgccgccagatccgccatcagtaccgggcgctcatcaactccgtccaacaaaaccgtgaggacatactgaatgccggtgacaaattaacagaggtccttgaagaggctaacactctgtttaatgaagtgtcccgagcaagagaagcagtcctggatgcccactttcttgttttggcttcagatttgggcaaagagaaagcaaagcagctgcgctcagacctgagctcctttgacatgttaagatatgttgaaactctactcacacatatgggtgtaaatccgctagaagctgaagaactcatccgtgatgaagatagtcctgattttgaattcatagtctatgactcctggaagataacaggcagaacagcagaaaacacctttaataaaacccatacattccactttctgttgggttcaatatacggagagtgccctgtgccaaagccacgagttgatcgtccaagaaaagttcctgtgatacaagaggagagggcaatgcctgcccagttaagaagaatggaagaatctcatcaagaagcaacagagaaagaagtagaaagaatcttgggattgttgcagacatattttcgagaagatcctgataccccaatgtccttctttgactttgtggttgatcctcattctttcccccgtacagtggaaaacatctttcatgtttccttcattatacgggatggttttgcaagaataagacttgaccaagaccgactgccagtaatagagcctgttagtattaatgaagaaaatgagggatttgaacataacacacaagttagaaatcaaggaattatagctttgagttaccgtgactgggaggagattgtgaagacctttgagatttcagagcctgtgattactccaagtcagaggcagcagaagccaagtgcttgatgctagctgaaggactcaaatggatagtgaagtccaaaacggaaagcggcatgtatcgtacatattgtatgattcaacatttttaaaggcagattgtttttagtaaaatgtagcttttgatagttaataaatttgtcatggttgtctttgattaaaggaaactcaccgccatattcacaaataa

SEQ ID NO: 20462 - DNA, 1409 bp, Homo sapiens
  source 1..1409: mol_type = unassigned DNA
agtagagacgcgccgggtgccagcccctcgccgcaccttaaattgttgacaaagtgctcccactttgtggctggagccgtacgaccttggcgcgggtccccgagtggcgggctggaaaagctggaggccagagccgttcgcggactcgcccgagcccagccagccagtggggagaggcaggacgcggactccgcgtgctttgattgcgcccggcagtcctcggcgtgggctcccggcctcgcagcggcagctgcagctgcagcggcacgcgagagctgtcaaatgcacgttctcggaccccacccggacccgcggaattcgaatctctgggtgggtccgcgcaactgtggagtggccctccaggtgatggtgtgtattgcttgcaaagtttgagaaccactcagttatggagcactcagaggctgcagccggagtccagccctttgggttaagaaaaccgtgaggacatactgaatgccggtgacaaattaacagaggtccttgaagaggctaacactctgtttaatgaagtgtcccgagcaagagaagcagtcctggatgcccactttcttgttttggcttcagatttgggcaaagagaaagcaaagcagctgcgctcagacctgagctcctttgacatgttaagatatgttgaaactctactcacacatatgggtgtaaatccgctagaagctgaagaactcatccgtgatgaagatagtcctgattttgaattcatagtctatgactcctggaagataacaggcagaacagcagaaaacacctttaataaaacccatacattccactttctgttgggttcaatatacggagagtgccctgtgccaaagccacgagttgatcgtccaagaaaagttcctgtgatacaagaggagagggcaatgcctgcccagttaagaagaatggaagaatctcatcaagaagcaacagagaaagaagtagaaagaatcttgggattgttgcagacatattttcgagaagatcctgataccccaatgtccttctttgactttgtggttgatcctcattctttcccccgtacagtggaaaacatctttcatgtttccttcattatacgggatggttttgcaagaataagacttgaccaagaccgactgccagtaataggtaaatgatactatgtttggaaaaattagttttagagaaaatatatttgttagtagaatttaagtattttactaaatgtaaatgaattttcaatgtagattaacttttacaatattgtatcttgctcaactacctgaagatactgaaaacatggccagcgtctaaaattttgatggattcatctatatcattgattcaacatctgctgtaaatattaacaaagaaatgatataatttccctcagatcttaatttagaaag

SEQ ID NO: 20463 - DNA, 2889 bp, Homo sapiens
  source 1..2889: mol_type = unassigned DNA
cctgtctctcttcgggtctcgggcccttgggcgcagcggggcgcgcgccatggcgaaggcgaagaaggtcggggcgcgaaggaaggcctccggggcgccggcgggagcgcgagggggcccggcgaaggccaactccaatccgttcgaggtgaaagttaacaggcagaagttccagatcctgggccggaagacgcgccacgacgtgggactgcccggggtgtctcgcgcacgggccctcaggaagcgtacacagactttactaaaagagtacaaagaaagggataaatccaatgtattcagagataaacgcttcggagaatacaacagcaacatgagccccgaggagaagatgatgaagaggtttgctctggaacagcagcgacatcatgagaaaaaaagcatctacaatctaaatgaagatgaagaattgactcattatggccagtctttggcagacatcgagaagcataatgacattgtggacagtgacagcgatgctgaggatcgaggaacgttgtctgctgagctgactgctgcccactttggaggaggcggtgggctccttcacaagaagactcaacaggaaggcgaggagcgggagaaaccgaagtcccggaaagagctgattgaagagctcattgccaagtcaaaacaagagaagagggagagacaagctcaacgagaagatgccctcgagctcacggagaagctagaccaagactggaaagaaattcagactctcctgtcccacaaaactcccaagtcagagaacagagacaaaaaggaaaaacccaagcccgatgcatatgacatgatggttcgcgagcttggctttgaaatgaaggcgcagccctctaacaggatgaagacggaggcagaattggcaaaggaagagcaggagcacctcaggaagctggaggctgagagacttcgaagaatgcttggaaaggatgaggatgaaaatgttaagaaaccaaaacatatgtcagcagatgatctgaatgatggcttcgtgctagataaagatgacaggcgtttgctttcctacaaagatggaaagatgaatgtcgaggaagatgtccaggaagagcaaagcaaggaagccagtgaccctgagagcaacgaggaagaaggtgacagttcaggcggggaggacacagaggagagcgacagcccagatagccacttggacctggaatccaacgtggagagtgaggaagaaaacgagaagccagcaaaagagcagaggcagactcctgggaaagggttgataagcggcaaggaaagagctggaaaagctaccagagacgagctgccctacacgttcgcagcccctgaatcctatgaggaactgagatctctgttgttaggaagatcgatggaagagcagcttttggtggtggagagaattcagaagtgcaaccacccgagtctcgcagaaggaaacaaagcaaaattagaaaaactgtttggctttcttttggaatacgttggcgatttggctacagatgacccaccagacctcacagtcattgataagttggttgtgcacttatatcatctttgccagatgtttcctgaatctgcaagtgacgctatcaaatttgttctccgagatgcgatgcatgagatggaagaaatgattgagaccaaaggccgggcggcattgccagggttggatgtgctcatttatttgaaaatcactgggctgctatttccaacttccgacttctggcacccagtggtgacccctgccctcgtgtgcctcagtcagctgctcaccaagtgccccatcctgtccctccaggacgtggtgaagggcctgttcgtgtgctgcctgttcctggagtatgtggctttgtcccagaggtttatacctgagcttattaattttcttcttgggattctttacatagcaactccaaacaaagcaagccaaggttccactctggtgcaccctttcagagcgcttgggaagaactcggaactgctcgtggtgtctgctagagaggatgtggccacgtggcagcagagcagcctctccctccgctgggcgagtagactgagggccccaacttcgacagaggccaatcacatccgactgtcctgcctggctgtgggcctggccctgctgaagcgctgcgtgctcatgtacgggtccctgccatccttccacgccatcatggggcctctccaagccctcctcacggatcacctggcggactgcagccacccgcaggagctccaggagctgtgtcagagcacactgaccgaaatggaaagccagaagcagctctgccggccgctgacctgtgagaagagcaagcctgtcccactgaagcttttcacaccccggctggtcaaagtcctcgagtttggaagaaaacaaggcagtagtaaggaggaacaggaaaggaagaggctgatccacaaacacaagcgtgaatttaaaggggccgttcgagaaatccgcaaggacaatcagttcctggcgaggatgcaactctcagaaatcatggaacgggatgcggaaagaaagcggaaagtaaagcagctttttaacagcctggctacacaggaaggcgaatggaaggctctgaagaggaaaaagttcaaaaaataaattacattttataaataagctccccccacccgctgcctgcggttttgtttctgttaaaacgtcacctgatgaaatagaatgaatcctgaaatgcacctctgggatcgggaatggtctgtgtgttatcagctgcgactggttcactgcgtctggacaagcctcatggggactggggattctggccagtgtaatttctgtcaaccacggacgtttgccttcatgtgtagaatttactgttgttatgcaaattatattttcaattataa

SEQ ID NO: 20464 - DNA, 2535 bp, Homo sapiens
  source 1..2535: mol_type = unassigned DNA
gcggggcgcgcgccatggcgaaggcgaagaaggtcggggcgcgaaggaaggcctccggggcgccggcgggagcgcgagggggcccggcgaaggccaactccaatccgttcgaggtgaaagttaacaggcagaagttccagatcctgggccggaagacgcgccacgacgtgggactgcccggggtgtctcgcgcacgggccctcaggaagcgtacacagactttactaaaagagtacaaagaaagggataaatccaatgtattcagagataaacgcttcggagaatacaacagcaacatgagccccgaggagaagatgatgaagaggtttgctctggaacagcagcgacatcatgagaaaaaaagcatctacaatctaaatgaagatgaagaattgactcattatggccagtctttggcagacatcgagaagcataatgacattgtggacagtgacagcgatgctgaggatcgaggaacgttgtctgctgagctgactgctgcccactttggaggaggcggtgggctccttcacaagaagactcaacaggaaggcgaggagcgggagaaaccgaagtcccggaaagagctgattgaagagctcattgccaagtcaaaacaagagaagagggagagacaagctcaacgagaagatgccctcgagctcacggagaagctagaccaagactggaaagaaattcagactctcctgtcccacaaaactcccaagtcagagaacagagacaaaaaggaaaaacccaagcccgatgcatatgacatgatggttcgcgagcttggctttgaaatgaaggcgcagccctctaacaggatgaagacggaggcagaattggcaaaggaagagcaggagcacctcaggaagctggaggctgagagacttcgaagaatgcttggaaaggatgaggatgaaaatgttaagaaaccaaaacatatgtcagcagatgatctgaatgatggcttcgtgctagataaagatgacaggcgtttgctttcctacaaagatggaaagatgaatgtcgaggaagatgtccaggaagagcaaagcaaggaagccagtgaccctgagagcaacgaggaagaaggtgacagttcaggcggggaggacacagaggagagcgacagcccagatagccacttggacctggaatccaacgtggagagtgaggaagaaaacgagaagccagcaaaagagcagaggcagactcctgggaaagggttgataagcggcaaggaaagagctggaaaagctaccagagacgagctgccctacacgttcgcagcccctgaatcctatgaggaactgagatctctgttgttaggaagatcgatggaagagcagcttttggtggtggagagaattcagaagtgcaaccacccgagtctcgcagaaggaaacaaagcaaaattagaaaaactgtttggctttcttttggaatacgttggcgatttggctacagatgacccaccagacctcacagtcattgataagttggttgtgcacttatatcatctttgccagatgtttcctgaatctgcaagtgacgctatcaaatttgttctccgagatgcgatgcatgagatggaagaaatgattgagaccaaaggccgggcggcattgccagggttggatgtgctcatttatttgaaaatcactgggctgctatttccaacttccgacttctggcacccagtggtgacccctgccctcgtgtgcctcagtcagctgctcaccaagtgccccatcctgtccctccaggacgtggtgaagggcctgttcgtgtgctgcctgttcctggagtatgtggctttgtcccagaggtttatacctgagcttattaattttcttcttgggattctttacatagcaactccaaacaaagcaagccaaggttccactctggtgcaccctttcagagcgcttgggaagaactcggaactgctcgtggtgtctgctagagaggatgtggccacgtggcagcagagcagcctctccctccgctgggcgagtagactgagggccccaacttcgacagaggccaatcacatccgactgtcctgcctggctgtgggcctggccctgctgaagcgctgcgtgctcatgtacgggtccctgccatccttccacgccatcatggggcctctccaagccctcctcacggatcacctggcggactgcagccacccgcaggagctccaggagctgtgtcagagcacactgaccgaaatggaaagccagaagcagctctgccggccgctgacctgtgagaagagcaagcctgtcccactgaagcttttcacaccccggctggtctcgaattcccgacctcaggtaatccacctgccttggccccccaattataggtgtgagccacagcacccagccaaaaaagtaattttttttagagtaataatgctataatgttggtgtgattccaacctccagctccccccacccgctgcctgcggttttgtttctgttaaaacgtcacctgatgaaatagaatgaatcctgaaatgca

SEQ ID NO: 20465 - DNA, 3538 bp, Homo sapiens
  source 1..3538: mol_type = unassigned DNA
tcttagggtagcgcgcgcctgtctctcttcgggtctcgggcccttgggcgcagcggggcgcgcgccatggcgaaggcgaagaaggtcggggcgcgaaggaaggcctccggggcgccggcgggagcgcgagggggcccggcgaaggccaactccaatccgttcgaggtgaaagttaacaggcagaagttccagatcctgggccggaagacgcgccacgacgtgggactgcccggggtgtctcgcgcacgggccctcaggaagcgtacacagactttactaaaagagtacaaagaaagggataaatccaatgtattcagagataaacgcttcggagaatacaacagcaacatgagccccgaggagaagatgatgaagaggtttgctctggaacagcagcgacatcatgagaaaaaaagcatctacaatctaaatgaagatgaagaattgactcattatggccagtctttggcagacatcgagaagcataatgacattgtggacagtgacagcgatgctgaggatcgaggaacgttgtctgctgagctgactgctgcccactttggaggaggcggtgggctccttcacaagaagactcaacaggaaggcgaggagcgggagaaaccgaagtcccggaaagagctgattgaagagctcattgccaagtcaaaacaagagaagagggagagacaagctcaacgagaagatgccctcgagctcacggagaagctagaccaagactggaaagaaattcagactctcctgtcccacaaaactcccaagtcagagaacagagacaaaaaggaaaaacccaagcccgatgcatatgacatgatggttcgcgagcttggctttgaaatgaaggcgcagccctctaacaggatgaagacggaggcagaattggcaaaggaagagcaggagcacctcaggaagctggaggctgagagacttcgaagaatgcttggaaaggatgaggatgaaaatgttaagaaaccaaaacatatgtcagcagatgatctgaatgatggcttcgtgctagataaagatgacaggcgtttgctttcctacaaagatggaaagatgaatgtcgaggaagatgtccaggaagagcaaagcaaggaagccagtgaccctgagagcaacgaggaagaaggtgacagttcaggcggggaggacacagaggagagcgacagcccagatagccacttggacctggaatccaacgtggagagtgaggaagaaaacgagaagccagcaaaagagcagaggcagactcctgggaaagggttgataagcggcaaggaaagagctggaaaagctaccagagacgagctgccctacacgttcgcagcccctgaatcctatgaggaactgagatctctgttgttaggaagatcgatggaagagcagcttttggtggtggagagaattcagaagtgcaaccacccgagtctcgcagaaggaaacaaagcaaaattagaaaaactgtttggctttcttttggaatacgttggcgatttggctacagatgacccaccagacctcacagtcattgataagttggttgtgcacttatatcatctttgccagatgtttcctgaatctgcaagtgacgctatcaaatttgttctccgagatgcgatgcatgagatggaagaaatgattgagaccaaaggccgggcggcattgccagggttggatgtgctcatttatttgaaaatcactgggctgctatttccaacttccgacttctggcacccagtggtgacccctgccctcgtgtgcctcagtcagctgctcaccaagtgccccatcctgtccctccaggacgtggtgaagggcctgttcgtgtgctgcctgttcctggagtatgtggctttgtcccagaggtttatacctgagcttattaattttcttcttgggattctttacatagcaactccaaacaaagcaagccaaggttccactctggtgcaccctttcagagcgcttgggaagaactcggaactgctcgtggtgtctgctagagaggatgtggccacgtggcagcagagcagcctctccctccgctgggcgagtagactgagggccccaacttcgacagaggccaatcacatccgactgtcctgcctggctgtgggcctggccctgctgaagcgctgcgtgctcatgtacgggtccctgccatccttccacgccatcatggggcctctccaagccctcctcacggatcacctggcggactgcagccacccgcaggagctccaggagctgtgtcagagcacactgaccgaaatggaaagccagaagcagctctgccggccgctgacctgtgagaagagcaagcctgtcccactgaagcttttcacaccccggctggtcaaagtcctcgagtttggaagaaaacaaggcagtagtaaggaggaacaggaaaggaagaggctgatccacaaacacaagcgtgaatttaaaggggccgttcgagaaatccgcaaggacaatcagttcctggcgaggatgcaactctcagaaatcatggaacgggatgcggaaagaaagcggaaagtaaagcagctttttaacagcctggctacacaggaaggcgaatggaaggctctgaagaggaaaaagttcaaaaaataaattacattttataaataaggcaaggaactggacattacctcacatctgcaattccaaccctctgggaggccaaggcaggaagattgcttcagcccaggagttcgagaccagcctgggcaacacaggaagaccccgtctctaccaaaaaaacataaaaattagccaagtgtggtggcacgcacctgtagtcccaactactcgggaggctgaagcaggaggactgcttgagctgagtccaaggttacagtgagccgtgattgagccactgcactccagcctcggccacagtgcaagactgtgtcgcttaaaaaaaaatttttttttttgagacggagttttgctcttgttgcccaggctggagtgcaatggcacaacctccacctcctgggttcaagcgattctcctgcctcagcctcccgagtagctgggattacagacatgtgccaccacgcccagctaattttgtatttttagtagagacggggtttctccatgttggtcaggctggtctcgaattcccgacctcaggtaatccacctgccttggccccccaattataggtgtgagccacagcacccagccaaaaaagtaattttttttagagtaataatgctataatgttggtgtgattccaacctccagctccccccacccgctgcctgcggttttgtttctgttaaaacgtcacctgatgaaatagaatgaatcctgaaatgcacctctgggatcgggaatggtctgtgtgttatcagctgcgactggttcactgcgtctggacaagcctcatggggactggggattctggccagtgtaatttctgtcaaccacggacgtttgccttcatgtgtagaatttactgttgttatgcaaattatattttcaattataaatgaaacaa

SEQ ID NO: 20466 - DNA, 2080 bp, Homo sapiens
  source 1..2080: mol_type = unassigned DNA
cctgtctctcttcgggtctcgggcccttgggcgcagcggggcgcgcgccatggcgaaggcgaagaaggtcggggcgcgaaggaaggcctccggggcgccggcgggagcgcgagggggcccggcgaaggccaactccaatccgttcgaggtgaaagttaacaggcagaagttccagatcctgggccggaagacgcgccacgacgtgggactgcccggggtgtctcgcgcacgggccctcaggaagcgtacacagactttactaaaagagtacaaagaaagggataaatccaatgtattcagagataaacgcttcggagaatacaacagcaacatgagccccgaggagaagatgatgaagaggtttgctctggaacagcagcgacatcatgagaaaaaaagcatctacaatctaaatgaagatgaagaattgactcattatggccagtctttggcagacatcgagaagcataatgacattgtggacagtgacagcgatgctgaggatcgaggaacgttgtctgctgagctgactgctgcccactttggaggaggcggtgggctccttcacaagaagactcaacaggaaggcgaggagcgggagaaaccgaagtcccggaaagagctgattgaagagctcattgccaagtcaaaacaagagaagagggagagacaagctcaacgagaagatgccctcgagctcacggagaagctagaccaagactggaaagaaattcagactctcctgtcccacaaaactcccaagtcagagaacagagacaaaaaggaaaaacccaagcccgatgcatatgacatgatggttcgcgagcttggctttgaaatgaaggcgcagccctctaacaggatgaagacggaggcagaattggcaaaggaagagcaggagcacctcaggaagctggaggctgagagacttcgaagaatgcttggaaaggatgaggatgaaaatgttaagaaaccaaaacatatgtcagcagatgatctgaatgatggcttcgtgctagataaagatgacaggcgtttgctttcctacaaagatggaaagatgaatgtcgaggaagatgtccaggaagagcaaagcaaggaagccagtgaccctgagagcaacgaggaagaaggtgacagttcaggcggggaggacacagaggagagcgacagcccagatagccacttggacctggaatccaacgtggagagtgaggaagaaaacgagaagccagcaaaagagcagaggcagactcctgggaaagggttgataagcggcaaggaaagagctggaaaagctaccagagacgagctgccctacacgttcgcagcccctgaatcctatgaggaactgagatctctgttgttaggaagatcgatggaagagcagcttttggtggtggagagaattcagaagtgcaaccacccgagtctcgcagaaggaaacaaagcaaaattagaaaaactgtttggctttcttttggaatacgttggcgatttggctacagatgacccaccagacctcacagtcattgataagttggttgtgcacttatatcatctttgccagatgtttcctgaatctgcaagtgacgctatcaaatttgttctccgagatgcgatgcatgagatggaagaaatgattgagaccaaaggccgggcggcattgccagggttggatgtgctcatttatttgaaaatcactgggctgctatttccaacttccgacttctggcacccagtggtgacccctgccctcgtgtgcctcagtcagctgctcaccaagtgccccatcctgtccctccaggacgtggtgaagggcctgttcgtgtgctgcctgttcctggagtatgtggctttgtcccagaggtttatacctgagcttattaattttcttcttgggattctttacatagcaactccaaacaaagcaagccaaggttccactctggtgcaccctttcagagcgcttgggaagaactcggaactgctcgtggtgtctgctagagaggatgtggccacgtggcagcagagcagcctctccctccgctggtggtctcgaattcccgacctcaggtaa

SEQ ID NO: 20467 - DNA, 3303 bp, Homo sapiens
  source 1..3303: mol_type = unassigned DNA
aggctgtccgcggagctccttgagcccgcgtgggaaacctgggcgcttcgcgcggagacgcctttgtggctgcttcctggagcatttttttccccttagagctgttcgctgttttccctgtcacgccgcttttctgaaagacgggttgtgcgctttgggcttattcctggacggtccccaaaggtccccgaaaggaccaggcccggacacgtggggccttggtttccggccggaagtcccgggaggtgtagggctagagttctggccgtggcgggccggtttctgcgtgctgcgtgcgcggccgcgtgggctatggggcggcggtcgcggggtcggcggctccagcaacagcagcggccggaggacgcggaggatggcgccgagggtggtggaaagcgcggcgaggcgggctgggaaggaggctaccccgagatcgtcaaggagaacaagctgttcgagcactactaccaggagctcaagatcgtgcccgagggcgagtggggccagttcatggacgctctcagggagccgctcccggccactttaagaattactggttacaaaagccacgcaaaagagattctccattgcttaaagaacaaatattttaaggaattggaggacctggaggtggacggtcagaaagttgaagttccacagccactgagttggtatcctgaagaacttgcctggcacacaaatttaagtcgaaaaatcttgagaaaatcgccacacttggaaaagtttcatcagtttctagttagtgaaacagaatctggaaatattagtcgtcaagaagctgttagcatgatcccaccactgctcctcaacgtgcggcctcatcataagatcttagatatgtgtgcagcacctggctcaaagaccacacagttaattgaaatgctacatgccgacatgaatgtcccctttccagagggatttgttattgcgaatgatgtggacaacaagcgctgctacctgctcgtccatcaagccaagaggctgagcagcccctgcatcatggtggtcaaccatgatgcctccagcatacccaggctccagatagatgtggacggcaggaaagagatcctcttctatgatcgaattttatgtgatgtcccttgcagtggagacggcactatgagaaaaaacattgatgtttggaaaaagtggaccaccttaaatagcttgcagctacatggcttacagctgcggattgcaacacgcggggctgaacagctggctgaaggtggaaggatggtgtattccacgtgttcactaaaccctattgaggatgaagcagtcatagcatctttactggaaaaaagtgaaggtgctttggagcttgctgatgtgtctaatgaactgccagggctgaagtggatgcctggaatcacacagtggaaggtaatgacgaaagatgggcagtggtttacagactgggacgctgttcctcacagcagacacacccagatccgacctaccatgttccctccgaaggacccagaaaagctgcaggccatgcacctggagcgatgccttaggatattaccccatcatcagaatactggagggttttttgtggcagtattggtgaaaaaatcttcaatgccgtggaataaacgtcagccaaagcttcagggtaaatctgcagagaccagagaaagcacacagctgagccctgcagatctcacagaagggaaacccacagatccctctaagctggaaagtccgtcattcacaggaactggtgacacagaaatagctcatgcaactgaggatttagagaataatggcagtaagaaagatggcgtgtgtggtcctcctccatcaaagaaaatgaagttatttggatttaaagaagatccatttgtatttattcctgaagatgacccattatttccacctattgagaaattttatgctttggatccttcattcccaaggatgaatttgttaactcggactacagaagggaagaaaaggcagctctacatggtttctaaggagttgcggaatgtgctgctgaataacagtgagaagatgaaggttattaacacggggatcaaagtctggtgtagaaataacagcggtgaagagtttgactgtgctttccggctggcacaggagggaatatatacattgtatccatttattaactcaagaattattactgtatcaatggaagatgttaagatactgttgacccaggaaaatcccttttttagaaaactcagcagtgagacctacagtcaagcaaaggacctggcaaagggaagcatcgtgctgaagtatgaaccagattctgcgaatccagacgctctgcagtgtcccatcgtcttatgcggatggcggggaaaggcctccattcgaacttttgtgcccaagaatgaacggcttcattatctcaggatgatggggctggaggtattgggagaaaagaagaaggaaggggttatcctcacaaatgagagtgcagccagcaccggacagccagacaatgacgtgactgagggacagagagcaggagagcccaacagcccagatgcagaagaggccaacagtccagacgtgacagcaggctgtgacccggcgggggtccatccaccccggtgagcaggcccaaggcagcgggggcccacacccctcacacgcaaaactggcttcttctggtcactggtgtctgaaaccaaatccagagcagcctgtggcctgtaaagcatatatttctaatgactgcagactggtgggatcataggagccttctgaatgaccaggactgctttctttggagctgatgaaaatgtactcttttagcgtgttagaaatcacttgttttattttgtttctttggccaagctgggtctagtgtttcttttgctgggaatagactttcaaaagttgtacttctatcaagaaacaaaactgcccttgcagaaatttcaggtcttttgttaagcctgtattggtcttaaggtgcagtattttttaaattattatttatagaaagaatctataaattcttggggaagtgtgttataagctttaataattacattgagctgcacctcagtggtgtgtcattaacatgcagtggggttaatatctgaggcctcagatgactttgtgccttttggaataaagggtaaaataaactctcccagagtaagagctgtatcgtgaattgtcatactaattattgagggggacttatgtgcttttattgaatggagtgctttacaatttttatttttaaatggggttgggatccttggaatatttcaataaaattgataaaatata

SEQ ID NO: 20468 - DNA, 3217 bp, Homo sapiens
  source 1..3217: mol_type = unassigned DNA
aggctgtccgcggagctccttgagcccgcgtgggaaacctgggcgcttcgcgcggagacgcctttgtggctgcttcctggagcatttttttccccttagagctgttcgctgttttccctgtcacgccgcttttctgaaagacgggttgtgcgctttgggcttattcctggacggtccccaaaggtccccgaaaggaccaggcccggacacgtggggccttggtttccggccggaagtcccgggaggtgtagggctagagttctggccgtggcgggccggtttctgcgtgctgcgtgcgcggccgcgtgggctatggggcggcggtcgcggggtcggcggctccagcaacagcagcggccggaggacgcggaggatggcgccgagggtggtggaaagcgcggcgaggcgggctgggaaggaggctaccccgagatcgtcaaggagaacaagctgttcgagcactactaccaggagctcaagatcgtgcccgagggcgagtggggccagttcatggacgctctcagggagccgctcccggccactttaagaattactggttacaaaagccacgcaaaagagattctccattgcttaaagaacaaatattttaaggaattggaggacctggaggtggacggtcagaaagttgaagttccacagccactgagttggtatcctgaagaacttgcctggcacacaaatttaagtcgaaaaatcttgagaaaatcgccacacttggaaaagtttcatcagtttctagttagtgaaacagaatctggaaatattagtcgtcaagaagctgttagcatgatcccaccactgctcctcaacgtgcggcctcatcataagagggatttgttattgcgaatgatgtggacaacaagcgctgctacctgctcgtccatcaagccaagaggctgagcagcccctgcatcatggtggtcaaccatgatgcctccagcatacccaggctccagatagatgtggacggcaggaaagagatcctcttctatgatcgaattttatgtgatgtcccttgcagtggagacggcactatgagaaaaaacattgatgtttggaaaaagtggaccaccttaaatagcttgcagctacatggcttacagctgcggattgcaacacgcggggctgaacagctggctgaaggtggaaggatggtgtattccacgtgttcactaaaccctattgaggatgaagcagtcatagcatctttactggaaaaaagtgaaggtgctttggagcttgctgatgtgtctaatgaactgccagggctgaagtggatgcctggaatcacacagtggaaggtaatgacgaaagatgggcagtggtttacagactgggacgctgttcctcacagcagacacacccagatccgacctaccatgttccctccgaaggacccagaaaagctgcaggccatgcacctggagcgatgccttaggatattaccccatcatcagaatactggagggttttttgtggcagtattggtgaaaaaatcttcaatgccgtggaataaacgtcagccaaagcttcagggtaaatctgcagagaccagagaaagcacacagctgagccctgcagatctcacagaagggaaacccacagatccctctaagctggaaagtccgtcattcacaggaactggtgacacagaaatagctcatgcaactgaggatttagagaataatggcagtaagaaagatggcgtgtgtggtcctcctccatcaaagaaaatgaagttatttggatttaaagaagatccatttgtatttattcctgaagatgacccattatttccacctattgagaaattttatgctttggatccttcattcccaaggatgaatttgttaactcggactacagaagggaagaaaaggcagctctacatggtttctaaggagttgcggaatgtgctgctgaataacagtgagaagatgaaggttattaacacggggatcaaagtctggtgtagaaataacagcggtgaagagtttgactgtgctttccggctggcacaggagggaatatatacattgtatccatttattaactcaagaattattactgtatcaatggaagatgttaagatactgttgacccaggaaaatcccttttttagaaaactcagcagtgagacctacagtcaagcaaaggacctggcaaagggaagcatcgtgctgaagtatgaaccagattctgcgaatccagacgctctgcagtgtcccatcgtcttatgcggatggcggggaaaggcctccattcgaacttttgtgcccaagaatgaacggcttcattatctcaggatgatggggctggaggtattgggagaaaagaagaaggaaggggttatcctcacaaatgagagtgcagccagcaccggacagccagacaatgacgtgactgagggacagagagcaggagagcccaacagcccagatgcagaagaggccaacagtccagacgtgacagcaggctgtgacccggcgggggtccatccaccccggtgagcaggcccaaggcagcgggggcccacacccctcacacgcaaaactggcttcttctggtcactggtgtctgaaaccaaatccagagcagcctgtggcctgtaaagcatatatttctaatgactgcagactggtgggatcataggagccttctgaatgaccaggactgctttctttggagctgatgaaaatgtactcttttagcgtgttagaaatcacttgttttattttgtttctttggccaagctgggtctagtgtttcttttgctgggaatagactttcaaaagttgtacttctatcaagaaacaaaactgcccttgcagaaatttcaggtcttttgttaagcctgtattggtcttaaggtgcagtattttttaaattattatttatagaaagaatctataaattcttggggaagtgtgttataagctttaataattacattgagctgcacctcagtggtgtgtcattaacatgcagtggggttaatatctgaggcctcagatgactttgtgccttttggaataaagggtaaaataaactctcccagagtaagagctgtatcgtgaattgtcatactaattattgagggggacttatgtgcttttattgaatggagtgctttacaatttttatttttaaatggggttgggatccttggaatatttcaataaaattgataaaatat

SEQ ID NO: 20469 - DNA, 2619 bp, Homo sapiens
  source 1..2619: mol_type = unassigned DNA
agggctagagttctggccgtggcgggccggtttctgcgtgctgcgtgcgcggccgcgtgggctatggggcggcggtcgcggggtcggcggctccagcaacagcagcggccggaggacgcggaggatggcgccgagggtggtggaaagcgcggcgaggcgggctgggaaggaggctaccccgagatcgtcaaggagaacaagctgttcgagcactactaccaggagctcaagatcgtgcccgagggcgagtggggccagttcatggacgctctcagggagccgctcccggccactttaagaattactggttacaaaaggtatcctgaagaacttgcctggcacacaaatttaagtcgaaaaatcttgagaaaatcgccacacttggaaaagtttcatcagtttctagttagtgaaacagaatctggaaatattagtcgtcaagaagctgttagcatgatcccaccactgctcctcaacgtgcggcctcatcataagatcttagatatgtgtgcagcacctggctcaaagaccacacagttaattgaaatgctacatgccgacatgaatgtcccctttccagagggatttgttattgcgaatgatgtggacaacaagcgctgctacctgctcgtccatcaagccaagaggctgagcagcccctgcatcatggtggtcaaccatgatgcctccagcatacccaggctccagatagatgtggacggcaggaaagagatcctcttctatgatcgaattttatgtgatgtcccttgcagtggagacggcactatgagaaaaaacattgatgtttggaaaaagtggaccaccttaaatagcttgcagctacatggcttacagctgcggattgcaacacgcggggctgaacagctggctgaaggtggaaggatggtgtattccacgtgttcactaaaccctattgaggatgaagcagtcatagcatctttactggaaaaaagtgaaggtgctttggagcttgctgatgtgtctaatgaactgccagggctgaagtggatgcctggaatcacacagtggaaggtaatgacgaaagatgggcagtggtttacagactgggacgctgttcctcacagcagacacacccagatccgacctaccatgttccctccgaaggacccagaaaagctgcaggccatgcacctggagcgatgccttaggatattaccccatcatcagaatactggagggttttttgtggcagtattggtgaaaaaatcttcaatgccgtggaataaacgtcagccaaagcttcagggtaaatctgcagagaccagagaaagcacacagctgagccctgcagatctcacagaagggaaacccacagatccctctaagctggaaagtccgtcattcacaggaactggtgacacagaaatagctcatgcaactgaggatttagagaataatggcagtaagaaagatggcgtgtgtggtcctcctccatcaaagaaaatgaagttatttggatttaaagaagatccatttgtatttattcctgaagatgacccattatttccacctattgagaaattttatgctttggatccttcattcccaaggatgaatttgttaactcggactacagaagggaagaaaaggcagctctacatggtttctaaggagttgcggaatgtgctgctgaataacagtgagaagatgaaggttattaacacggggatcaaagtctggtgtagaaataacagcggtgaagagtttgactgtgctttccggctggcacaggagggaatatatacattgtatccatttattaactcaagaattattactgtatcaatggaagatgttaagatactgttgacccaggaaaatcccttttttagaaaactcagcagtgagacctacagtcaagcaaaggacctggcaaagggaagcatcgtgctgaagtatgaaccagattctgcgaatccagacgctctgcagtgtcccatcgtcttatgcggatggcggggaaaggcctccattcgaacttttgtgcccaagaatgaacggcttcattatctcaggatgatggggctggaggtattgggagaaaagaagaaggaaggggttatcctcacaaatgagagtgcagccagcaccggacagccagacaatgacgtgactgagggacagagagcaggagagcccaacagcccagatgcagaagaggccaacagtccagacgtgacagcaggctgtgacccggcgggggtccatccaccccggtgagcaggcccaaggcagcgggggcccacacccctcacacgcaaaactggcttcttctggtcactggtgtctgaaaccaaatccagagcagcctgtggcctgtaaagcatatatttctaatgactgcagactggtgggatcataggagccttctgaatgaccaggactgctttctttggagctgatgaaaatgtactcttttagcgtgttagaaatcacttgttttattttgtttctttggccaagctgggtctagtgtttcttttgctgggaatagactttcaaaagttgtacttctatcaagaaacaaaactgcccttgcagaaatttcaggtcttttgttaagcctgtattggtctt

SEQ ID NO: 20470 - DNA, 2400 bp, Homo sapiens
  source 1..2400: mol_type = unassigned DNA
ggctcgtccccgagtaggggacgggaacgcctgggtcccggggacgtggggcgcagggtctggggcccgaggccacggacgaagcgggaagccggctaggcagcggtctctgtctgggatggacgccgcgccccacgcggacctcccgccccgacttcacccagctctgctgcccgtaactcatatgacaagaacatcaggaaccggactattaccccgaaagggccttcccaagtcgtttcgccgcctgcagtgcccgaccgggggccgcgcgtccccggcaaccacgcccgcccgcgcagctgcagaggccggaaaaggcccgctcgcccgcgctcggcaccacccagcccgcgctccgggcgataccaccctgggcggcccctccaaaggccggagatggtgtcgtccccggcctccgattggtcgggggggcgggggcgtggcctctggagcctggttccgcgcgccggagcgcgctagccgcattgcgagccgaacccgggagctggcgccatggtgctgttgcacgtgctgtttgagcacgcggtcggctacgcgctgctggcgctgaaggaagtggaggagatcagtctgctgcagccgcaggtggaggagtctgtgctcaacctgggcaaattccacagcatcgttcgtctggtggccttttgtccctttgcctcatcccaggttgccttggaaaatgccaacgccgtgtctgaaggggttgttcatgaggacctccgcctgctcttggagacccacctgccgtccaaaaagaagaaagtactcttgggagttggggatcccaagattggtgccgcaatacaggaggagttagggtacaactgccagactggaggagtcatagctgagatcctgcgaggagttcgtctgcacttccacaatctggtgaagggtctgaccgatctgtcagcttgtaaagcacagctggggctgggacacagctattcccgtgccaaagttaagtttaatgtgaaccgggtggacaatatgatcatccagtccattagcctcctggaccagctggataaggacatcaataccttctctatgcgtgtcagggagtggtacgggtatcactttccggagctggtgaagatcatcaacgacaatgccacatactgccgtcttgcccagtttattggaaaccgaagggaactgaatgaggacaagctggagaagctggaggagctgacaatggatggggccaaggctaaggctattctggatgcctcacggtcctccatgggcatggacatatctgccattgacttgataaacatcgagagcttctccagtcgtgtggtgtctttatctgaataccgccagagcctacacacttacctgcgctccaagatgagccaagtagcccccagcctgtcagccctaattggggaagcggtaggtgcacgtctcatcgcacatgctggcagcctcaccaacctggccaagtatccagcatccacagtgcagatccttggggctgaaaaggccctgttcagagccctgaagacaaggggtaacactccaaaatatggactcattttccactccaccttcattggccgagcagctgccaagaacaaaggccgcatctcccgatacctggcaaacaaatgcagtattgcctcacgaatcgattgcttctctgaggtgcccacgagtgtattcggggagaagcttcgagaacaagttgaagagcgactgtccttctatgagactggagagataccacgaaagaatctggatgtcatgaaggaagcaatggttcaggcagaggaagcggctgctgagattactaggaagctggagaaacaggagaagaaacgcttaaagaaggaaaagaaacggctggctgcacttgccctcgcgtcttcagaaaacagcagtagtactccagaggagtgtgaggagatgagtgaaaaacccaaaaagaagaaaaagcaaaagccccaggaggttcctcaggagaatggaatggaagacccatctatctctttctccaaacccaagaaaaagaaatctttttccaaggaggagttgatgagtagcgatcttgaagagaccgctggcagcaccagtattcccaagaggaagaagtctacacccaaggaggaaacagttaatgaccctgaggaggcaggccacagaagtggctccaagaaaaagaggaaattctccaaagaggagccggtcagcagtgggcctgaagaggcggttggcaagagcagctccaagaagaagaaaaagttccataaagcatcccaggaagattagaatgcaaatggacattctctgggaggtggggcataccatagcccaaggtgacatttcccaccctgtgccgtgttccccaataaaaacaaattcacaaga

SEQ ID NO: 20471 - DNA, 1566 bp, Homo sapiens
  source 1..1566: mol_type = unassigned DNA
caaaggccggagatggtgtcgtccccggcctccgattggtcgggggggcgggggcgtggcctctggagcctggttccgcgcgccggagcgcgctagccgcattgcgagccgaacccgggagctggcgccatggtgctgttgcacgtgctgtttgagcacgcggtcggctacgcgctgctggcgctgaaggaagtggaggagatcagtctgctgcagccgcaggtggaggagtctgtgctcaacctgggcaaattccacagcatcgttcgtctggtggccttttgtccctttgcctcatcccaggttgccttggaaaatgccaacgccgtgtctgaaggggttgttcatgaggacctccgcctgctcttggagacccacctgccgtccaaaaagaagaaagtactcttgggagttggggatcccaagattggtgccgcaatacaggaggagttagggtacaactgccagactggaggagtcatagctgagatcctgcgaggagttcgtctgcacttccacaatctggtgaagggtctgaccgatctgtcagcttgtaaagcacagctggggctgggacacagctattcccgtgccaaagttaagtttaatgtgaaccgggtggacaatatgatcatccagtccattagcctcctggaccagctggataaggacatcaataccttctctatgcgtgtcagggagtggtacgggtatcactttccggagctggtgaagatcatcaacgacaatgccacatactgccgtcttgcccagtttattggaaaccgaagggaactgaatgaggacaagctggagaagctggaggagctgacaatggatggggccaaggctaaggctattctggatgcctcacggtcctccatgggcatggacatatctgccattgacttgataaacatcgagagcttctccagtcgtgtggtgtctttatctgaataccgccagagcctacacacttacctgcgctccaagatgagccaagtagcccccagcctgtcagccctaattggggaagcggtaggtgcacgtctcatcgcacatgctggcagcctcaccaacctggccaagtatccagcatccacagtgcagatccttggggctgaaaaggccctgttcagagccctgaagacaaggggtaacactccaaaatatggactcattttccactccaccttcattggccgagcagctgccaagaacaaaggccgcatctcccgatacctggcaaacaaatgcagtattgcctcacgaatcgattgcttctctgaggtgcccacgagtgtattcggggagaagcttcgagaacaagttgaagagcgactgtccttctatgagactggagagataccacgaaagaatctggatgtcatgaaggaagcaatggttcaggcagaggaagcggctgctgagattactaggaagctggagaaacaggagaagaaacgcttaaagaaggaaaagaaacggctggctgcacttgccctcgcgtcttcagaaaacagcagtagtactccagaggagtgtgaggaaggagataggtgctga

SEQ ID NO: 20472 - DNA, 919 bp, Homo sapiens
  source 1..919: mol_type = unassigned DNA
acttgataaacatcgagagcttctccagtcgtgtggtgtctttatctgaataccgccagagcctacacacttacctgcgctccaagatgagccaagtagcccccagcctgtcagccctaattggggaagcggtaggtgcacgtctcatcgcacatgctggcagcctcaccaacctggccaagtatccagcatccacagtgcagatccttggggctgaaaaggccctgttcagagccctgaagacaaggggtaacactccaaaatatggactcattttccactccaccttcattggccgagcagctgccaagaacaaaggccgcatctcccgatacctggcaaacaaatgcagtattgcctcacgaatcgattgcttctctgaggtgcccacgagtgtattcggggagaagcttcgagaacaagttgaagagcgactgtccttctatgagactggagagataccacgaaagaatctggatgtcatgaaggaagcaatggttcaggcagaggaagcggctgctgagattactaggaagctggagaaacaggagaagaaacgcttaaagaaggaaaagaaacggctggctgcacttgccctcgcgtcttcagaaaacagcagtagtactccagaggagtgtgaggaaggagataggtgctgaacttgctcaagagcccagagagctggttgtagctcacacccgttccctgggcatgtgtgttctgtcctcggctgcctcccaggagtcctcaacctggggtagtgtaaattcctgctctgcttattatcagacgtgtgtccggaggtggtcgtgtttcacagtggggatgggggcagggaggtccccaatgtgctaagctacaatcattctccctgagattttcatttagcacccagtttcttaaacagtgtttcagggcc

SEQ ID NO: 20473 - DNA, 856 bp, Homo sapiens
  source 1..856: mol_type = unassigned DNA
ggagctggcgccatggtgctgttgcacgtgctgtttgagcacgcggtcggctacgcgctgctggcgctgaaggaagtggaggagatcagtctgctgcagccgcaggtggaggagtctgtgctcaacctgggcaaattccacagcatcgttcgtctggtggccttttgtccctttgcctcatcccaggttgccttggaaaatgccaacgccgtgtctgaaggggttgttcatgaggacctccgcctgctcttggagacccacctgccgtccaaaaagaagaaagtactcttgggagttggggatcccaagattggtgccgcaatacaggaggagttagggtacaactgccagactggaggagtcatagctgagatcctgcgaggagttcgtctgcacttccacaatctggtgaagggtctgaccgatctgtcagcttgtaaagcacagctggggctgggacacagctattcccgtgccaaagttaagtttaatgtgaaccgggtggacaatatgatcatccagtccattagcctcctggaccagctggataaggacatcaataccttctctatgcgtgtcaggcagagtaggtgtggagaaggcaaggctgtagctctatggtttttgatgaagcagctgggccagggagtgactgtggctctttgcagggagtggtacgggtatcactttccggagctggtgaagatcatcaacgacaatgccacatactgccgtcttgcccagtttattggaaaccgaagggaactgaatgaggacaagctggagaagctggaggagctgacaatggatggggccaaggctaaggctattctggatgcctcacggtcctccatgg

SEQ ID NO: 20474 - DNA, 1833 bp, Homo sapiens
  source 1..1833: mol_type = unassigned DNA
cctctctctctctccctctctctctccctctctctctctccctgtgtcgcttaaacaacagtcctaacttttgtgtgttgcaaatataaaaggcaagccatgtgacagagggacagaagaacaaaagcatttggaagtaacaggacctctttctagctctcagaaaagtctgagaagaaaggagccctgcgttcccctaagctgtgcagcagatactgtgatgatggattgcaagtgcaaagagtaagacaaaactccagcacataaaggacaatgacaaccagaaagcttcagcccgatcctgccctttccttgaacgggactggatcctaggaggtgaagccatttccaattttttgtcctctgcctccctctgctgttcttctagagaagtttttccttacaacaatgagaaaacatgtactagctgcatccttttctatgctctccctgctggtgataatgggagatacagacagtaaaacggacagctcattcataatggactcggaccctcgacgctgcatgaggcaccactatgtggattctatcagtcacccattgtacaagtgtagctcaaagatggtgctcctggccaggtgcgaggggcactgcagccaggcgtcacgctccgagcctttggtgtcgttcagcactgtcctcaagcaacccttccgttcctcctgtcactgctgccggccccagacttccaagctgaaggcactgcggctgcgatgctcagggggcatgcgactcactgccacctaccggtacatcctctcctgtcactgcgaggaatgcaattcctgaggcccgctgctgtgtgtggcttctggatgggacaactgtagaggcagttcgaccagccagggaaagactggcaagaaaagagttaaggcaaaaaaggatgcaacaattctcccgggactctgcatattctagtaataaagactctacatgcttgttgacagagagagatactctgggaacttctttgcagttcccatctcctttctctggtacaatttcttttggttcattttcagattcaggcattttcccccttggctctcaatgctgtttgggtttccaacaattcagcattagtgggaaaaagtgggccctcatacacaagcgtgtcaggctgtcagtgtttggtgcacgctggggaagaatttactttggaaagtagaaaagcccagcttttcctgggacatcttctgttattgttgatgtttttttttaccttgtcattttggtctaaggttgccattgctgctaaaggttaccgatttcaaagtccagataccaagcatgtggatatgtttagctacgtttactcacagccagcgaactgacattaaaataactaacaaacagattcttttatgtgatgctggaactcttgacagctataattattattcagaaatgactttttgaaagtaaaagcagcataaagaatttgtcacaggaaggctgtctcagataaattatggtaaaattttgtaagggagcagacttttaaagacttgcacaaatacggatcctgcactgactctggaaaaggcatatatgtactagtggcatggagaatgcaccatactcatgcatgcaaattagacaaccaagtatgaatctatttgtgggtgtgctatagctttagccgtgtcacgggcatcattctctaatatccacttgtccatgtgaaacatgttgccaaaatggtggcctggcttgtcttctgaacgtttggttcaaatgtgttttggtcctggaggctcaaattttgagttattcccacgttttgaaataaaaagagtatattcaaaa

SEQ ID NO: 20475 - DNA, 11389 bp, Homo sapiens
  source 1..11389: mol_type = unassigned DNA
aaacttcgggcggcggctgaggcggcggccgaggagcggcggactcggggcgcggggagtcgaggcatttgcgcctgggcttcggagcgtagcgccagggcctgagcctttgaagcaggaggaggggaggagagagtggggctcctctatcgggaccccctccccatgtggatctgcccaggcggcggcggcggcggcggaggaggaggcgaccgagaagatgcccgccctgcgccccgctctgctgtgggcgctgctggcgctctggctgtgctgcgcggcccccgcgcatgcattgcagtgtcgagatggctatgaaccctgtgtaaatgaaggaatgtgtgttacctaccacaatggcacaggatactgcaaatgtccagaaggcttcttgggggaatattgtcaacatcgagacccctgtgagaagaaccgctgccagaatggtgggacttgtgtggcccaggccatgctggggaaagccacgtgccgatgtgcctcagggtttacaggagaggactgccagtactcaacatctcatccatgctttgtgtctcgaccctgcctgaatggcggcacatgccatatgctcagccgggatacctatgagtgcacctgtcaagtcgggtttacaggtaaggagtgccaatggacggatgcctgcctgtctcatccctgtgcaaatggaagtacctgtaccactgtggccaaccagttctcctgcaaatgcctcacaggcttcacagggcagaaatgtgagactgatgtcaatgagtgtgacattccaggacactgccagcatggtggcacctgcctcaacctgcctggttcctaccagtgccagtgccctcagggcttcacaggccagtactgtgacagcctgtatgtgccctgtgcaccctcaccttgtgtcaatggaggcacctgtcggcagactggtgacttcacttttgagtgcaactgccttccaggttttgaagggagcacctgtgagaggaatattgatgactgccctaaccacaggtgtcagaatggaggggtttgtgtggatggggtcaacacttacaactgccgctgtcccccacaatggacaggacagttctgcacagaggatgtggatgaatgcctgctgcagcccaatgcctgtcaaaatgggggcacctgtgccaaccgcaatggaggctatggctgtgtatgtgtcaacggctggagtggagatgactgcagtgagaacattgatgattgtgccttcgcctcctgtactccaggctccacctgcatcgaccgtgtggcctccttctcttgcatgtgcccagaggggaaggcaggtctcctgtgtcatctggatgatgcatgcatcagcaatccttgccacaagggggcactgtgtgacaccaaccccctaaatgggcaatatatttgcacctgcccacaaggctacaaaggggctgactgcacagaagatgtggatgaatgtgccatggccaatagcaatccttgtgagcatgcaggaaaatgtgtgaacacggatggcgccttccactgtgagtgtctgaagggttatgcaggacctcgttgtgagatggacatcaatgagtgccattcagacccctgccagaatgatgctacctgtctggataagattggaggcttcacatgtctgtgcatgccaggtttcaaaggtgtgcattgtgaattagaaataaatgaatgtcagagcaacccttgtgtgaacaatgggcagtgtgtggataaagtcaatcgtttccagtgcctgtgtcctcctggtttcactgggccagtttgccagattgatattgatgactgttccagtactccgtgtctgaatggggcaaagtgtatcgatcacccgaatggctatgaatgccagtgtgccacaggtttcactggtgtgttgtgtgaggagaacattgacaactgtgaccccgatccttgccaccatggtcagtgtcaggatggtattgattcctacacctgcatctgcaatcccgggtacatgggcgccatctgcagtgaccagattgatgaatgttacagcagcccttgcctgaacgatggtcgctgcattgacctggtcaatggctaccagtgcaactgccagccaggcacgtcaggggttaattgtgaaattaattttgatgactgtgcaagtaacccttgtatccatggaatctgtatggatggcattaatcgctacagttgtgtctgctcaccaggattcacagggcagagatgtaacattgacattgatgagtgtgcctccaatccctgtcgcaagggtgcaacatgtatcaacggtgtgaatggtttccgctgtatatgccccgagggaccccatcaccccagctgctactcacaggtgaacgaatgcctgagcaatccctgcatccatggaaactgtactggaggtctcagtggatataagtgtctctgtgatgcaggctgggttggcatcaactgtgaagtggacaaaaatgaatgcctttcgaatccatgccagaatggaggaacttgtgacaatctggtgaatggatacaggtgtacttgcaagaagggctttaaaggctataactgccaggtgaatattgatgaatgtgcctcaaatccatgcctgaaccaaggaacctgctttgatgacataagtggctacacttgccactgtgtgctgccatacacaggcaagaattgtcagacagtattggctccctgttccccaaacccttgtgagaatgctgctgtttgcaaagagtcaccaaattttgagagttatacttgcttgtgtgctcctggctggcaaggtcagcggtgtaccattgacattgacgagtgtatctccaagccctgcatgaaccatggtctctgccataacacccagggcagctacatgtgtgaatgtccaccaggcttcagtggtatggactgtgaggaggacattgatgactgccttgccaatccttgccagaatggaggttcctgtatggatggagtgaatactttctcctgcctctgccttccgggtttcactggggataagtgccagacagacatgaatgagtgtctgagtgaaccctgtaagaatggagggacctgctctgactacgtcaacagttacacttgcaagtgccaggcaggatttgatggagtccattgtgagaacaacatcaatgagtgcactgagagctcctgtttcaatggtggcacatgtgttgatgggattaactccttctcttgcttgtgccctgtgggtttcactggatccttctgcctccatgagatcaatgaatgcagctctcatccatgcctgaatgagggaacgtgtgttgatggcctgggtacctaccgctgcagctgccccctgggctacactgggaaaaactgtcagaccctggtgaatctctgcagtcggtctccatgtaaaaacaaaggtacttgcgttcagaaaaaagcagagtcccagtgcctatgtccatctggatgggctggtgcctattgtgacgtgcccaatgtctcttgtgacatagcagcctccaggagaggtgtgcttgttgaacacttgtgccagcactcaggtgtctgcatcaatgctggcaacacgcattactgtcagtgccccctgggctatactgggagctactgtgaggagcaactcgatgagtgtgcgtccaacccctgccagcacggggcaacatgcagtgacttcattggtggatacagatgcgagtgtgtcccaggctatcagggtgtcaactgtgagtatgaagtggatgagtgccagaatcagccctgccagaatggaggcacctgtattgaccttgtgaaccatttcaagtgctcttgcccaccaggcactcggggcctactctgtgaagagaacattgatgactgtgcccggggtccccattgccttaatggtggtcagtgcatggataggattggaggctacagttgtcgctgcttgcctggctttgctggggagcgttgtgagggagacatcaacgagtgcctctccaacccctgcagctctgagggcagcctggactgtatacagctcaccaatgactacctgtgtgtttgccgtagtgcctttactggccggcactgtgaaaccttcgtcgatgtgtgtccccagatgccctgcctgaatggagggacttgtgctgtggccagtaacatgcctgatggtttcatttgccgttgtcccccgggattttccggggcaaggtgccagagcagctgtggacaagtgaaatgtaggaagggggagcagtgtgtgcacaccgcctctggaccccgctgcttctgccccagtccccgggactgcgagtcaggctgtgccagtagcccctgccagcacgggggcagctgccaccctcagcgccagcctccttattactcctgccagtgtgccccaccattctcgggtagccgctgtgaactctacacggcaccccccagcacccctcctgccacctgtctgagccagtattgtgccgacaaagctcgggatggcgtctgtgatgaggcctgcaacagccatgcctgccagtgggatgggggtgactgttctctcaccatggagaacccctgggccaactgctcctccccacttccctgctgggattatatcaacaaccagtgtgatgagctgtgcaacacggtcgagtgcctgtttgacaactttgaatgccaggggaacagcaagacatgcaagtatgacaaatactgtgcagaccacttcaaagacaaccactgtgaccaggggtgcaacagtgaggagtgtggttgggatgggctggactgtgctgctgaccaacctgagaacctggcagaaggtaccctggttattgtggtattgatgccacctgaacaactgctccaggatgctcgcagcttcttgcgggcactgggtaccctgctccacaccaacctgcgcattaagcgggactcccagggggaactcatggtgtacccctattatggtgagaagtcagctgctatgaagaaacagaggatgacacgcagatcccttcctggtgaacaagaacaggaggtggctggctctaaagtctttctggaaattgacaaccgccagtgtgttcaagactcagaccactgcttcaagaacacggatgcagcagcagctctcctggcctctcacgccatacaggggaccctgtcataccctcttgtgtctgtcgtcagtgaatccctgactccagaacgcactcagctcctctatctccttgctgttgctgttgtcatcattctgtttattattctgctgggggtaatcatggcaaaacgaaagcgtaagcatggctctctctggctgcctgaaggtttcactcttcgccgagatgcaagcaatcacaagcgtcgtgagccagtgggacaggatgctgtggggctgaaaaatctctcagtgcaagtctcagaagctaacctaattggtactggaacaagtgaacactgggtcgatgatgaagggccccagccaaagaaagtaaaggctgaagatgaggccttactctcagaagaagatgaccccattgatcgacggccatggacacagcagcaccttgaagctgcagacatccgtaggacaccatcgctggctctcacccctcctcaggcagagcaggaggtggatgtgttagatgtgaatgtccgtggcccagatggctgcaccccattgatgttggcttctctccgaggaggcagctcagatttgagtgatgaagatgaagatgcagaggactcttctgctaacatcatcacagacttggtctaccagggtgccagcctccaggcccagacagaccggactggtgagatggccctgcaccttgcagcccgctactcacgggctgatgctgccaagcgtctcctggatgcaggtgcagatgccaatgcccaggacaacatgggccgctgtccactccatgctgcagtggcagctgatgcccaaggtgtcttccagattctgattcgcaaccgagtaactgatctagatgccaggatgaatgatggtactacacccctgatcctggctgcccgcctggctgtggagggaatggtggcagaactgatcaactgccaagcggatgtgaatgcagtggatgaccatggaaaatctgctcttcactgggcagctgctgtcaataatgtggaggcaactcttttgttgttgaaaaatggggccaaccgagacatgcaggacaacaaggaagagacacctctgtttcttgctgcccgggaggggagctatgaagcagccaagatcctgttagaccattttgccaatcgagacatcacagaccatatggatcgtcttccccgggatgtggctcgggatcgcatgcaccatgacattgtgcgccttctggatgaatacaatgtgaccccaagccctccaggcaccgtgttgacttctgctctctcacctgtcatctgtgggcccaacagatctttcctcagcctgaagcacaccccaatgggcaagaagtctagacggcccagtgccaagagtaccatgcctactagcctccctaaccttgccaaggaggcaaaggatgccaagggtagtaggaggaagaagtctctgagtgagaaggtccaactgtctgagagttcagtaactttatcccctgttgattccctagaatctcctcacacgtatgtttccgacaccacatcctctccaatgattacatcccctgggatcttacaggcctcacccaaccctatgttggccactgccgcccctcctgccccagtccatgcccagcatgcactatctttttctaaccttcatgaaatgcagcctttggcacatggggccagcactgtgcttccctcagtgagccagttgctatcccaccaccacattgtgtctccaggcagtggcagtgctggaagcttgagtaggctccatccagtcccagtcccagcagattggatgaaccgcatggaggtgaatgagacccagtacaatgagatgtttggtatggtcctggctccagctgagggcacccatcctggcatagctccccagagcaggccacctgaagggaagcacataaccacccctcgggagcccttgccccccattgtgactttccagctcatccctaaaggcagtattgcccaaccagcgggggctccccagcctcagtccacctgccctccagctgttgcgggccccctgcccaccatgtaccagattccagaaatggcccgtttgcccagtgtggctttccccactgccatgatgccccagcaggacgggcaggtagctcagaccattctcccagcctatcatcctttcccagcctctgtgggcaagtaccccacacccccttcacagcacagttatgcttcctcaaatgctgctgagcgaacacccagtcacagtggtcacctccagggtgagcatccctacctgacaccatccccagagtctcctgaccagtggtcaagttcatcaccccactctgcttctgactggtcagatgtgaccaccagccctacccctgggggtgctggaggaggtcagcggggacctgggacacacatgtctgagccaccacacaacaacatgcaggtttatgcgtgagagagtccacctccagtgtagagacataactgacttttgtaaatgctgctgaggaacaaatgaaggtcatccgggagagaaatgaagaaatctctggagccagcttctagaggtaggaaagagaagatgttcttattcagataatgcaagagaagcaattcgtcagtttcactgggtatctgcaaggcttattgattattctaatctaataagacaagtttgtggaaatgcaagatgaatacaagccttgggtccatgtttactctcttctatttggagaataagatggatgcttattgaagcccagacattcttgcagcttggactgcattttaagccctgcaggcttctgccatatccatgagaagattctacactagcgtcctgttgggaattatgccctggaattctgcctgaattgacctacgcatctcctcctccttggacattcttttgtcttcatttggtgcttttggttttgcacctctccgtgattgtagccctaccagcatgttatagggcaagacctttgtgcttttgatcattctggcccatgaaagcaactttggtctcctttcccctcctgtcttcccggtatcccttggagtctcacaaggtttactttggtatggttctcagcacaaacctttcaagtatgttgtttctttggaaaatggacatactgtattgtgttctcctgcatatatcattcctggagagagaaggggagaagaatacttttcttcaacaaattttgggggcaggagatcccttcaagaggctgcaccttaatttttcttgtctgtgtgcaggtcttcatataaactttaccaggaagaagggtgtgagtttgttgtttttctgtgtatgggcctggtcagtgtaaagttttatccttgatagtctagttactatgaccctccccacttttttaaaaccagaaaaaggtttggaatgttggaatgaccaagagacaagttaactcgtgcaagagccagttacccacccacaggtccccctacttcctgccaagcattccattgactgcctgtatggaacacatttgtcccagatctgagcattctaggcctgtttcactcactcacccagcatatgaaactagtcttaactgttgagcctttcctttcatatccacagaagacactgtctcaaatgttgtacccttgccatttaggactgaactttccttagcccaagggacccagtgacagttgtcttccgtttgtcagatgatcagtctctactgattatcttgctgcttaaaggcctgctcaccaatctttctttcacaccgtgtggtccgtgttactggtatacccagtatgttctcactgaagacatggactttatatgttcaagtgcaggaattggaaagttggacttgttttctatgatccaaaacagccctataagaaggttggaaaaggaggaactatatagcagcctttgctattttctgctaccatttcttttcctctgaagcggccatgacattccctttggcaactaacgtagaaactcaacagaacattttcctttcctagagtcaccttttagatgataatggacaactatagacttgctcattgttcagactgattgcccctcacctgaatccactctctgtattcatgctcttggcaatttctttgactttcttttaagggcagaagcattttagttaattgtagataaagaatagttttcttcctcttctccttgggccagttaataattggtccatggctacactgcaacttccgtccagtgctgtgatgcccatgacacctgcaaaataagttctgcctgggcattttgtagatattaacaggtgaattcccgactcttttggtttgaatgacagttctcattccttctatggctgcaagtatgcatcagtgcttcccacttacctgatttgtctgtcggtggccccatatggaaaccctgcgtgtctgttggcataatagtttacaaatggttttttcagtcctatccaaatttattgaaccaacaaaaataattacttctgccctgagataagcagattaagtttgttcattctctgctttattctctccatgtggcaacattctgtcagcctctttcatagtgtgcaaacattttatcattctaaatggtgactctctgcccttggacccatttattattcacagatggggagaacctatctgcatggacctctgtggaccacagcgtacctgcccctttctgccctcctgctccagccccacttctgaaagtatcagctactgatccagccactggatattttatatcctcccttttccttaagcacaatgtcagaccaaattgcttgtttctttttcttggactactttaatttggatcctttgggtttggagaaagggaatgtgaaagctgtcattacagacaacaggtttcagtgatgaggaggacaacactgcctttcaaactttttactgatctcttagattttaagaactcttgaattgtgtggtatctaataaaagggaaggtaagatggataatcactttctcatttgggttctgaattggagactcagtttttatgagacacatcttttatgccatgtatagatcctcccctgctatttttggtttatttttattgttataaatgctttctttctttgactcctcttctgcctgcctttggggataggtttttttgtttgtttatttgcttcctctgttttgttttaagcatcattttcttatgtgaggtggggaagggaaaggtatgagggaaagagagtctgagaattaaaatattttagtataagcaattggctgtgatgctcaaatccattgcatcctcttattgaatttgccaatttgtaatttttgcataataaagaaccaaaggtgtaatgttttgttgagaggtggtttagggattttggccctaaccaatacattgaatgtatgatgactatttgggaggacacatttatgtacccagaggcccccactaataagtggtactatggttacttccttgtgtacatttctcttaaaagtgatattatatctgtttgtatgagaaacccagtaaccaataaaatgaccgcatattcctgactaaacgtagtaaggaaaatgcacactttgtttttacttttccgtttcattctaaaggtagttaagatgaaatttatatgaaagcatttttatcacaaaataaaaaaggtttgccaagctcagtggtgttgtattttttattttccaatactgcatccatggcctggcagtgttacctcatgatgtcataatttgctgagagagcaaattttcttttctttctgaatcccacaaagcctagcaccaaacttctttttttcttcctttaattagatcataaataaatgatcctggggaaaaagcatctgtcaaataggaaacatcacaaaactgagcactcttctgtgcactagccatagctggtgacaaacagatggttgctcagggacaaggtgccttccaatggaaatgcgaagtagttgctatagcaagaattgggaactgggatataagtcataatattaattatgctgttatgtaaatgattggtttgtaacattccttaagtgaaatttgtgtagaacttaatatacaggattataaaataatattttgtgtataaatttgttataagttcacattcatacatttatttataaagtcagtgagatatttgaacatgaa

SEQ ID NO: 20476 - DNA, 5041 bp, Homo sapiens
  source 1..5041: mol_type = unassigned DNA
agacatgtgggttctttcaaacatactggacttcctccttaggttttagttgtgttagttaatagttgaatgttgaaggagaggatgccaagggatattaaagaagttgtccagtgtacagaagcttactggaaggagtggccaactagttaaaggtttgacacctcaatatcaacaaaatgccaagtggatcattttgactctcacagcaatccaactggacatttgaccatgccccgtggtcagtggagagcttcttctctgaaggccacttttatctagcacatcaaggctatacacctctttcactaagaagaatttggcacttttatgttgtgagagctgagattcaccattctccaccatcctgagaagagctttgatagaagggctactcctgagcattgcagtgtcgagatggctatgaaccctgtgtaaatgaaggaatgtgtgttacctaccacaatggcacaggatactgcaaatgtccagaaggcttcttgggggaatattgtcaacatcgagacccctgtgagaagaaccgctgccagaatggtgggacttgtgtggcccaggccatgctggggaaagccacgtgccgatgtgcctcagggtttacaggagaggactgccagtactcaacatctcatccatgctttgtgtctcgaccctgcctgaatggcggcacatgccatatgctcagccgggatacctatgagtgcacctgtcaagtcgggtttacaggtaaggagtgccaatggacggatgcctgcctgtctcatccctgtgcaaatggaagtacctgtaccactgtggccaaccagttctcctgcaaatgcctcacaggcttcacagggcagaaatgtgagactgatgtcaatgagtgtgacattccaggacactgccagcatggtggcacctgcctcaacctgcctggttcctaccagtgccagtgccctcagggcttcacaggccagtactgtgacagcctgtatgtgccctgtgcaccctcaccttgtgtcaatggaggcacctgtcggcagactggtgacttcacttttgagtgcaactgccttccagaaacagtgagaagaggaacagagctctgggaaagggacaggcaagtctggaatggaaaagaacacgatgagaattagacactggaaaatatgtatgtgtggttaataaagtgctttaaactgaattgacattaacagtaggtgatcaactttcctatgtgcttgtgcttttgcttttgatggagtaattcattgttttcttatccacctaaatgcacccagctgcccttgattttctctgggctactggccttcacaaccctctcccatgtaccctctctgactttggggtaaccctcccctaacttaaagctagagaattctgaaactgaggaggggatcctctgttaatcagtgagcactttttgatgagctgatagatgatatatgagagactatgcgtggcacaatactttgttacactcttcactgatacaagtgttctagagtgcacacacaacccaaagatagaaacaaaaagaggagcagtgtcggggagcttggggcctggtgttccatggagagggagaaaggaacaagcctggccaattcattcaactccttataaaaatgatgaggaggctgaaaaccaagaattttgattgggaacagaatacaagcagctggagcagatgaattactaagcaacaaagatcctgtttttatacaaatatccttagtacaaaaacaaaagaaggaaaactgtaggggggagtaatgtgctaagtaagcagaattgcctcaaaaagaagttgttctagttactctttcagagtgggaatcttagattctggtattgtggatatggttcacatataatgggattgtgtgttttattttggagagattaaaggtcataggttggtcctcagtataaaatcaactggtaatttattcatttcatttggtaaaaatgtattgactgcctgctatgttctaggcaccatgctatgtatttggaatacagctatacaaagcattgtcacataattgaaatgaaaactttatattatttaagtcacaagaacaagctatttaattatattacttttagtttctcttttaataaagaatagataatgctatcattctagatactaaataagtgttttcttaacataatattactattcactttatcttgtagaagaaataactaaaatacgtctgtcttcactcctgcatttgtttgcattttaagggttaaagacagaaatagaaatgtaaacaactttattttgaaaatatttcaatattgcaaatatctctgggtctgatattctagtaatctaattggctagtaattgatgttagtgtgatttattgttgaaggctaaatgtgtttttcagtttcaagaaaattgcttttaataattgcctagaacaagaggttgatttggcagcaagatgttgacgggaagttagagaagtcaataaaggaagtttttagctgagagagagtgattattcactcccatagcctctgcattgttatccattagccacgataagaaccttagggaattctgagagtgtgtccaggaaaggatctgtcaaactagaatagtatctcctccttgagaaaggaaataaccaaggattccgcagctgagaggctgccagggctagtgaaatagagtaaggaaatcttggctgtctcttattctctggttgtagtttaacgcaagacacttatttactcactgatggtgtgtgtgtatgtgggaggggagattagcatgaggggtgggaatggggagatttgatgaagagaaaactaacatttttttggtgactcaggaactgtgccaggtacttccatgcttattagctcaattacacaaaaatcttgggaccaggtattatttttcaagtcttcccacatgaagtaactgaagtttggagatgttaagtgattcacccaaagttgtacagctaatatgtggttaggctgggtcctgaaaccgaggcagtttattttcaaagcctttgctttgtgcatcttactgcgccacattgcactgcacatctgcttcctgaaagcactttgtaggtgtgtaaaacttttcgttaaatgctttaagctgtttgggttaaaaatatatgttcatgttataagaaaaccaagacactcctaattataatcaaatagtacttgttacatatcaatatgtgtgtgtgtgtgtgtgtgtgtgtgtgtgtgtgtgtgtgtgtatatatatatggcattgtgcagatgtttaaaagtagttacatagactagttcttgcttttcagggtcccataatctaaaccagatgacttcagctttggataaatatatagaaggaaatttaaagagaattcaaaacaatagatgatgcagtgacactgtgaataaatgttatttatacagtttgtaagatttcatgctcattgttcgtatgtcccaggtggagttcagaaaatattcacttcatttccacaaagggaaatagtgcctagagatggttttcttttaaaaagtccttttcataatgcagtgcccttccttccattgcccttcattccattgcttcccatgcttgtcaagagactaaaatgttacttatagtaatagtcactatctcaatgtaaatagcacccttatttgatgagaattattatttcagttctaaaaatggggaaacaaagtcagcaggaggcaaagtagcttgttaaagtattctgcaactttcaaatggttgcttccactgcatttcacgtcttggcacttctaattgagggttactctaaccaccctatttaaaattgtaactgtcccccacccccttaattactaaccctggtctactttttgttttctttttctgtaactcttatcttcttactatataatttatactatataatttacttcattatgtctattgtttattgtctgtcttttccaaattctactgcctcttaccctctccagaatgaaaactagtatctttgtttttgtttactgatgtaacccaaacacctacaaacagtgcccagtatatactaggcccgcaaatatatattggctgactgactgtatggtttagtatcatgtcatagtattgagactgtaactttggtcttctcattttcttctttgtattgtgcgtcctagacttagtttggcctctccttttgtccttgtatactctaatactggataagaattttggagtctttttcaactctgagtcagtgaatgccacataacttagtgactatatttaaatggttaatttacaattttttccctgcaaaggatactgtagtcactgtgagtattttagtattattgtaggactcaagagggaattaaaactacaaaaatgactcgtcttgtatgacacagaaagaaatgtttcttcacagagggaggagaaaaatatcttcaagagagaactaattgaatcaaatcaatgaaccatgtctcatctttttggataagtaactgttagtaatccagacacttcatgagctttcattatgtaaagtctttagcagaagctaaaggaggggcaccaaccacagtaattttaacttaagaacaaaatggagcatgaaaataaattattaaatcatttactcccactatttttgggttagggccaataatggggagagaaagaggtagactagttttgtgtttgtggctattttaatagagtagcacaagtaatcaaaaaacagtaggctgttttgaatttactggctgtcccttatgagttcacagttagattggactgtcctcaatgtactttcttttttttctttctttcccacatctctttatttctctgattttgtttaaacttcataaagagctctctgatctttcctttccaaacaatgaaggtttatcctttgtaaactacctctgtactccacaggctgatgatatatgatatccctatatcattaaagtaaagcctaagcac

SEQ ID NO: 20477 - DNA, 959 bp, Homo sapiens
  source 1..959: mol_type = unassigned DNA
tcaacaaaatgccaagtggatcattttgactctcacagcaatccaactggacatttgaccatgccccgtggtcagtggagagcttcttctctgaaggccacttttatctagcacatcaaggctatacacctctttcactaagaagaatttggcacttttatgttgtgagagctgagattcaccattctccaccatcctgagaagagctttgatagaagggctactcctgaggcattgcagtgtcgagatggctatgaaccctgtgtaaatgaaggaatgtgtgttacctaccacaatggcacaggatactgcaaatgtccagaaggcttcttgggggaatattgtcaacatcgagacccctgtgagaagaaccgctgccagaatggtgggacttgtgtggcccaggccatgctggggaaagccacgtgccgatgtgcctcagggtttacaggagaggactgccagtactcaacatctcatccatgctttgtgtctcgaccctgcctgaatggcggcacatgccatatgctcagccgggatacctatgagtgcacctgtcaagtcgggtttacaggtaaggagtgccaatggacggatgcctgcctgtctcatccctgtgcaaatggaagtacctgtaccactgtggccaaccagttctcctgcaaatgcctcacaggcttcacagggcagaaatgtgagactgatgtcaatgagtgtgacattccaggacactgccagcatggtggcacctgcctcaacctgcctggttcctaccagtgccagtgccctcagggcttcacaggccagtactgtgacagcctgtatgtgccctgtgcaccctcaccttgtgtcaatggaggcacctgtcggcagactggtgacttcacttttgagtgcaactgccttccagcatgttggcctcgaactcctgatctcagacttcttctgggggaaaaaaa

SEQ ID NO: 20478 - DNA, 672 bp, Homo sapiens
  source 1..672: mol_type = unassigned DNA
atgtggatctgcccaggcggcggcggcggcggcggaggaggaggcgaccgagaagatgcccgccctccgctctgctgtgggcgctgctggcgctctggctgtgctgcgcggcccccgcgcatggtgagtatcgggctgaggggcgctgtccgcggcgcccggggctgccacctggggcgacccttctccccctcggtccttctctgtgtgggaaggccaggctcggccgccggcgcggagcgaggccactcgctgggttcccaagagtttggacatcgccgggggcccctcccgtggtgccccgccaaccgccggggttccccgccgtctgctccccgcggcccgggaccccttacacgcctcctcggcaggagggaggccggcagcaagtctcagaaactcctttttcgtagtgccagggtgcagggaggtgggcagttttgcccttcaggttccgcgtttcttggggtcgagcgagagccgacggcgggcctcggaggggctgagcgaaggaatgccagattctggcgtggagagcgggggcagggccgccaagccaaacggcctgcaccgtcgcagccagcctcgcctttgccagggggcggcacatgggccgggtgtgtgggcttggtttggatggggacggggttttgcggcgcgcctgagttttga

SEQ ID NO: 20479 - DNA, 2954 bp, Homo sapiens
  source 1..2954: mol_type = unassigned DNA
tcaacaaaatgccaagtggatcattttgactctcacagcaatccaactggacatttgaccatgccccgtggtcagtggagagcttcttctctgaaggccacttttatctagcacatcaaggctatacacctctttcactaagaagaatttggcacttttatgttgtgagagctgagattcaccattctccaccatcctgagaagagctttgatagaagggctactcctgaggcattgcagtgtcgagatggctatgaaccctgtgtaaatgaaggaatgtgtgttacctaccacaatggcacaggatactgcaaatgtccagaaggcttcttgggggaatattgtcaacatcgagacccctgtgagaagaaccgctgccagaatggtgggacttgtgtggcccaggccatgctggggaaagccacgtgccgatgtgcctcagggtttacaggagaggactgccagtactcaacatctcatccatgctttgtgtctcgaccctgcctgaatggcggcacatgccatatgctcagccgggatacctatgagtgcacctgtcaagtcgggtttacaggtaaggagtgccaatggacggatgcctgcctgtctcatccctgtgcaaatggaagtacctgtaccactgtggccaaccagttctcctgcaaatgcctcacaggcttcacagggcagaaatgtgagactgatgtcaatgagtgtgacattccaggacactgccagcatggtggcacctgcctcaacctgcctggttcctaccagtgccagtgccctcagggcttcacaggccagtactgtgacagcctgtatgtgccctgtgcaccctcaccttgtgtcaatggaggcacctgtcggcagactggtgacttcacttttgagtgcaactgccttccaggttttgaagggagcacctgtgagaggaatattgatgactgccctaaccacaggtgtcagaatggaggggtttgtgtggatggggtcaacacttacaactgccgctgtcccccacaatggacaggacagttctgcacagaggatgtggatgaatgcctgctgcagcccaatgcctgtcaaaatgggggcacctgtgccaaccgcaatggaggctatggctgtgtatgtgtcaacggctggagtggagatgactgcagtgagaacattgatgattgtgccttcgcctcctgtactccaggctccacctgcatcgaccgtgtggcctccttctcttgcatgtgcccagaggggaaggcaggtctcctgtgtcatctggatgatgcatgcatcagcaatccttgccacaagggggcactgtgtgacaccaaccccctaaatgggcaatatatttgcacctgcccacaaggctacaaaggggctgactgcacagaagatgtggatgaatgtgccatggccaatagcaatccttgtgagcatgcaggaaaatgtgtgaacacggatggcgccttccactgtgagtgtctgaagggttatgcaggacctcgttgtgagatggacatcaatgagtgccattcagacccctgccagaatgatgctacctgtctggataagattggaggcttcacatgtctgtgcatgccaggtttcaaaggtgtgcattgtgaattagaaataaatgaatgtcagagcaacccttgtgtgaacaatgggcagtgtgtggataaagtcaatcgtttccagtgcctgtgtcctcctggtttcactgggccagtttgccagattgatattgatgactgttccagtactccgtgtctgaatggggcaaagtgtatcgatcacccgaatggctatgaatgccagtgtgccacaggtttcactggtgtgttgtgtgaggagaacattgacaactgtgaccccgatccttgccaccatggtcagtgtcaggatggtattgattcctacacctgcatctgcaatcccgggtacatgggcgccatctgcagtgaccagattgatgaatgttacagcagcccttgcctgaacgatggtcgctgcattgacctggtcaatggctaccagtgcaactgccagccaggcacgtcaggggttaattgtgaaattaattttgatgactgtgcaagtaacccttgtatccatggaatctgtatggatggcattaatcgctacagttgtgtctgctcaccaggattcacagggcagagatgtaacattgacattgatgagtgtgcctccaatccctgtcgcaagggtgcaacatgtatcaacggtgtgaatggtttccgctgtatatgccccgagggaccccatcaccccagctgctactcacaggtgaacgaatgcctgagcaatccctgcatccatggaaactgtactggaggtctcagtggatataagtgtctctgtgatgcaggctgggttggcatcaactgtgaagtggacaaaaatgaatgcctttcgaatccatgccagaatggaggaacttgtgacaatctggtgaatggatacaggtgtacttgcaagaagggctttaaaggctataactgccaggtgaatattgatgaatgtgcctcaaatccatgcctgaaccaaggaacctgctttgatgacataagtggctacacttgccactgtgtgctgccatacacaggtgggtcctggaggtaccagcagggaccagaggggatacttgaccttgctttgtcagtgcctgagtctcagtgcccaggtctgtggggctgtaatgctcctccgagggctcactcctcagttgtccttcctgcctttactgactggatcttgagctttgaggaaacattgtggcctcctaagatgcaagtggtggacagtcatttgcctacattgtactttagtatttgaaagaaatttttttttaattgtatgtggctggaaccaggcacatagatgatggttgtctatcatttgaatgtttccaggacattagc

SEQ ID NO: 20480 - DNA, 8070 bp, Homo sapiens
  source 1..8070: mol_type = unassigned DNA
gcggcgcggaggctggcccgggacgcgcccggagcccagggaaggagggaggaggggagggtcgcggccggccgccatggggccgggggcccgtggccgccgccgccgccgtcgcccgatgtcgccgccaccgccaccgccacccgtgcgggcgctgcccctgctgctgctgctagcggggccgggggctgcagcccccccttgcctggacggaagcccgtgtgcaaatggaggtcgttgcacccagctgccctcccgggaggctgcctgcctgtgcccgcctggctgggtgggtgagcggtgtcagctggaggacccctgtcactcaggcccctgtgctggccgtggtgtctgccagagttcagtggtggctggcaccgcccgattctcatgccggtgcccccgtggcttccgaggccctgactgctccctgccagatccctgcctcagcagcccttgtgcccacggtgcccgctgctcagtggggcccgatggacgcttcctctgctcctgcccacctggctaccagggccgcagctgccgaagcgacgtggatgagtgccgggtgggtgagccctgccgccatggtggcacctgcctcaacacacctggctccttccgctgccagtgtccagctggctacacagggccactatgtgagaaccccgcggtgccctgtgcaccctcaccatgccgtaacgggggcacctgcaggcagagtggcgacctcacttacgactgtgcctgtcttcctgggtttgagggtcagaattgtgaagtgaacgtggacgactgtccaggacaccgatgtctcaatggggggacatgcgtggatggcgtcaacacctataactgccagtgccctcctgagtggacaggccagttctgcacggaggacgtggatgagtgtcagctgcagcccaacgcctgccacaatgggggtacctgcttcaacacgctgggtggccacagctgcgtgtgtgtcaatggctggacaggcgagagctgcagtcagaatatcgatgactgtgccacagccgtgtgcttccatggggccacctgccatgaccgcgtggcttctttctactgtgcctgccccatgggcaagactggcctcctgtgtcacctggatgacgcctgtgtcagcaacccctgccacgaggatgctatctgtgacacaaatccggtgaacggccgggccatttgcacctgtcctcccggcttcacgggtggggcatgtgaccaggatgtggacgagtgctctatcggcgccaacccctgcgagcacttgggcaggtgcgtgaacacgcagggctccttcctgtgccagtgcggtcgtggctacactggacctcgctgtgagaccgatgtcaacgagtgtctgtcggggccctgccgaaaccaggccacgtgcctcgaccgcataggccagttcacctgtatctgtatggcaggcttcacaggaacctattgcgaggtggacattgacgagtgtcagagtagcccctgtgtcaacggtggggtctgcaaggaccgagtcaatggcttcagctgcacctgcccctcgggcttcagcggctccacgtgtcagctggacgtggacgaatgcgccagcacgccctgcaggaatggcgccaaatgcgtggaccagcccgatggctacgagtgccgctgtgccgagggctttgagggcacgctgtgtgatcgcaacgtggacgactgctcccctgacccatgccaccatggtcgctgcgtggatggcatcgccagcttctcatgtgcctgtgctcctggctacacgggcacacgctgcgagagccaggtggacgaatgccgcagccagccctgccgccatggcggcaaatgcctagacctggtggacaagtacctctgccgctgcccttctgggaccacaggtgtgaactgcgaagtgaacattgacgactgtgccagcaacccctgcacctttggagtctgccgtgatggcatcaaccgctacgactgtgtctgccaacctggcttcacagggcccctttgtaacgtggagatcaatgagtgtgcttccagcccatgcggcgagggaggttcctgtgtggatggggaaaatggcttccgctgcctctgcccgcctggctccttgcccccactctgcctccccccgagccatccctgtgcccatgagccctgcagtcacggcatctgctatgatgcacctggcgggttccgctgtgtgtgtgagcctggctggagtggcccccgctgcagccagagcctggcccgagacgcctgtgagtcccagccgtgcagggccggtgggacatgcagcagcgatggaatgggtttccactgcacctgcccgcctggtgtccagggacgtcagtgtgaactcctctccccctgcaccccgaacccctgtgagcatgggggccgctgcgagtctgcccctggccagctgcctgtctgctcctgcccccagggctggcaaggcccacgatgccagcaggatgtggacgagtgtgctggccccgcaccctgtggccctcatggtatctgcaccaacctggcagggagtttcagctgcacctgccatggagggtacactggcccttcctgcgatcaggacatcaatgactgtgaccccaacccatgcctgaacggtggctcgtgccaagacggcgtgggctccttttcctgctcctgcctccctggtttcgccggcccacgatgcgcccgcgatgtggatgagtgcctgagcaacccctgcggcccgggcacctgtaccgaccacgtggcctccttcacctgcacctgcccgccaggctacggaggcttccactgcgaacaggacctgcccgactgcagccccagctcctgcttcaatggcgggacctgtgtggacggcgtgaactcgttcagctgcctgtgccgtcccggctacacaggagcccactgccaacatgaggcagacccctgcctctcgcggccctgcctacacgggggcgtctgcagcgccgcccaccctggcttccgctgcacctgcctcgagagcttcacgggcccgcagtgccagacgctggtggattggtgcagccgccagccttgtcaaaacgggggtcgctgcgtccagactggggcctattgcctttgtccccctggatggagcggacgcctctgtgacatccgaagcttgccctgcagggaggccgcagcccagatcggggtgcggctggagcagctgtgtcaggcgggtgggcagtgtgtggatgaagacagctcccactactgcgtgtgcccagagggccgtactggtagccactgtgagcaggaggtggacccctgcttggcccagccctgccagcatggggggacctgccgtggctatatggggggctacatgtgtgagtgtcttcctggctacaatggtgataactgtgaggacgacgtggacgagtgtgcctcccagccctgccagcacgggggttcatgcattgacctcgtggcccgctatctctgctcctgtcccccaggaacgctgggggtgctctgcgagattaatgaggatgactgcggcccaggcccaccgctggactcagggccccggtgcctacacaatggcacctgcgtggacctggtgggtggtttccgctgcacctgtcccccaggatacactggtttgcgctgcgaggcagacatcaatgagtgtcgctcaggtgcctgccacgcggcacacacccgggactgcctgcaggacccaggcggaggtttccgttgcctttgtcatgctggcttctcaggtcctcgctgtcagactgtcctgtctccctgcgagtcccagccatgccagcatggaggccagtgccgtcctagcccgggtcctgggggtgggctgaccttcacctgtcactgtgcccagccgttctggggtccgcgttgcgagcgggtggcgcgctcctgccgggagctgcagtgcccggtgggcgtcccatgccagcagacgccccgcgggccgcgctgcgcctgccccccagggttgtcgggaccctcctgccgcagcttcccggggtcgccgccgggggccagcaacgccagctgcgcggccgccccctgtctccacgggggctcctgccgccccgcgccgctcgcgcccttcttccgctgcgcttgcgcgcagggctggaccgggccgcgctgcgaggcgcccgccgcggcacccgaggtctcggaggagccgcggtgcccgcgcgccgcctgccaggccaagcgcggggaccagcgctgcgaccgcgagtgcaacagcccaggctgcggctgggacggcggcgactgctcgctgagcgtgggcgacccctggcggcaatgcgaggcgctgcagtgctggcgcctcttcaacaacagccgctgcgaccccgcctgcagctcgcccgcctgcctctacgacaacttcgactgccacgccggtggccgcgagcgcacttgcaacccggtgtacgagaagtactgcgccgaccactttgccgacggccgctgcgaccagggctgcaacacggaggagtgcggctgggatgggctggattgtgccagcgaggtgccggccctgctggcccgcggcgtgctggtgctcacagtgctgctgccgccagaggagctactgcgttccagcgccgactttctgcagcggctcagcgccatcctgcgcacctcgctgcgcttccgcctggacgcgcacggccaggccatggtcttcccttaccaccggcctagtcctggctccgaaccccgggcccgtcgggagctggcccccgaggtgatcggctcggtagtaatgctggagattgacaaccggctctgcctgcagtcgcctgagaatgatcactgcttccccgatgcccagagcgccgctgactacctgggagcgttgtcagcggtggagcgcctggacttcccgtacccactgcgggacgtgcggggggagccgctggagcctccagaacccagcgtcccgctgctgccactgctagtggcgggcgctgtcttgctgctggtcattctcgtcctgggtgtcatggtggcccggcgcaagcgcgagcacagcaccctctggttccctgagggcttctcactgcacaaggacgtggcctctggtcacaagggccggcgggaacccgtgggccaggacgcgctgggcatgaagaacatggccaagggtgagagcctgatgggggaggtggccacagactggatggacacagagtgcccagaggccaagcggctaaaggtagaggagccaggcatgggggctgaggaggctgtggattgccgtcagtggactcaacaccatctggttgctgctgacatccgcgtggcaccagccatggcactgacaccaccacagggcgacgcagatgctgatggcatggatgtcaatgtgcgtggcccagatggcttcaccccgctaatgctggcttccttctgtgggggggctctggagccaatgccaactgaagaggatgaggcagatgacacatcagctagcatcatctccgacctgatctgccagggggctcagcttggggcacggactgaccgtactggcgagactgctttgcacctggctgcccgttatgcccgtgctgatgcagccaagcggctgctggatgctggggcagacaccaatgcccaggaccactcaggccgcactcccctgcacacagctgtcacagccgatgcccagggtgtcttccagattctcatccgaaaccgctctacagacttggatgcccgcatggcagatggctcaacggcactgatcctggcggcccgcctggcagtagagggcatggtggaagagctcatcgccagccatgctgatgtcaatgctgtggatgagcttgggaaatcagccttacactgggctgcggctgtgaacaacgtggaagccactttggccctgctcaaaaatggagccaataaggacatgcaggatagcaaggaggagacccccctattcctggccgcccgcgagggcagctatgaggctgccaagctgctgttggaccactttgccaaccgtgagatcaccgaccacctggacaggctgccgcgggacgtagcccaggagagactgcaccaggacatcgtgcgcttgctggatcaacccagtgggccccgcagcccccccggtccccacggcctggggcctctgctctgtcctccaggggccttcctccctggcctcaaagcggcacagtcggggtccaagaagagcaggaggccccccgggaaggcggggctggggccgcaggggccccgggggcggggcaagaagctgacgctggcctgcccgggccccctggctgacagctcggtcacgctgtcgcccgtggactcgctggactccccgcggcctttcggtgggccccctgcttcccctggtggcttcccccttgaggggccctatgcagctgccactgccactgcagtgtctctggcacagcttggtggcccaggccgggcgggtctagggcgccagccccctggaggatgtgtactcagcctgggcctgctgaaccctgtggctgtgcccctcgattgggcccggctgcccccacctgcccctccaggcccctcgttcctgctgccactggcgccgggaccccagctgctcaacccagggacccccgtctccccgcaggagcggcccccgccttacctggcagtcccaggacatggcgaggagtacccggcggctggggcacacagcagccccccaaaggcccgcttcctgcgggttcccagtgagcacccttacctgaccccatcccccgaatcccctgagcactgggccagcccctcacctccctccctctcagactggtccgaatccacgcctagcccagccactgccactggggccatggccaccaccactggggcactgcctgcccagccacttcccttgtctgttcccagctcccttgctcaggcccagacccagctggggccccagccggaagttacccccaagaggcaagtgttggcctgagacgctcgtcagttcttagatcttgggggcctaaagagacccccgtcctgcctcctttctttctctgtctcttccttccttttagtctttttcatcctcttctctttccaccaaccctcctgcatccttgccttgcagcgtgaccgagataggtcatcagcccagggcttcagtcttcctttatttataatgggtgggggctaccacccaccctctcagtcttgtgaagagtctgggacctccttcttccccacttctctcttccctcattcctttctctctccttctggcctctcatttccttacactctgacatgaatgaattattattatttttatttttctttttttttttacattttgtatagaaacaaattcatttaaacaaacttattattattattttttacaaaatatatatatggagatgctccctccccctgtgaaccccccagtgcccccgtggggctgagtctgtgggcccattcggccaagctggattctgtgtacctagtacacaggcatgactgggatcccgtgtaccgagtacacgacccaggtatgtaccaagtaggcacccttgggcgcacccactggggccaggggtcgggggagtgttgggagcctcctccccaccccacctccctcacttcactgcattccagatgggacatgttccatagccttgctggggaagggcccactgccaactccctctgccccagccccacccttggccatctccctttgggaactagggggctgctggtgggaaatgggagccagggcagatgtatgcattcctttgtgtccctgtaaatgtgggactacaagaagaggagctgcctgagtggtactttctcttcctggtaatcctctggcccagcctcatggcagaatagaggtatttttaggctatttttgtaatatggcttctggtcaaaatccctgtgtagctgaattcccaagccctgcattgtacagccccccactcccctcaccacctaataaaggaatagttaacactc

SEQ ID NO: 20481 - DNA, 7914 bp, Homo sapiens
  source 1..7914: mol_type = unassigned DNA
gcggcgcggaggctggcccgggacgcgcccggagcccagggaaggagggaggaggggagggtcgcggccggccgccatggggccgggggcccgtggccgccgccgccgccgtcgcccgatgtcgccgccaccgccaccgccacccgtgcgggcgctgcccctgctgctgctgctagcggggccgggggctgcagcccccccttgcctggacggaagcccgtgtgcaaatggaggtcgttgcacccagctgccctcccgggaggctgcctgcctgtgcccgcctggctgggtgggtgagcggtgtcagctggaggacccctgtcactcaggcccctgtgctggccgtggtgtctgccagagttcagtggtggctggcaccgcccgattctcatgccggtgcccccgtggcttccgaggccctgactgctccctgccagatccctgcctcagcagcccttgtgcccacggtgcccgctgctcagtggggcccgatggacgcttcctctgctcctgcccacctggctaccagggccgcagctgccgaagcgacgtggatgagtgccgggtgggtgagccctgccgccatggtggcacctgcctcaacacacctggctccttccgctgccagtgtccagctggctacacagggccactatgtgagaaccccgcggtgccctgtgcaccctcaccatgccgtaacgggggcacctgcaggcagagtggcgacctcacttacgactgtgcctgtcttcctgggtttgagggtcagaattgtgaagtgaacgtggacgactgtccaggacaccgatgtctcaatggggggacatgcgtggatggcgtcaacacctataactgccagtgccctcctgagtggacaggccagttctgcacggaggacgtggatgagtgtcagctgcagcccaacgcctgccacaatgggggtacctgcttcaacacgctgggtggccacagctgcgtgtgtgtcaatggctggacaggcgagagctgcagtcagaatatcgatgactgtgccacagccgtgtgcttccatggggccacctgccatgaccgcgtggcttctttctactgtgcctgccccatgggcaagactggcctcctgtgtcacctggatgacgcctgtgtcagcaacccctgccacgaggatgctatctgtgacacaaatccggtgaacggccgggccatttgcacctgtcctcccggcttcacgggtggggcatgtgaccaggatgtggacgagtgctctatcggcgccaacccctgcgagcacttgggcaggtgcgtgaacacgcagggctccttcctgtgccagtgcggtcgtggctacactggacctcgctgtgagaccgatgtcaacgagtgtctgtcggggccctgccgaaaccaggccacgtgcctcgaccgcataggccagttcacctgtatctgtatggcaggcttcacaggaacctattgcgaggtggacattgacgagtgtcagagtagcccctgtgtcaacggtggggtctgcaaggaccgagtcaatggcttcagctgcacctgcccctcgggcttcagcggctccacgtgtcagctggacgtggacgaatgcgccagcacgccctgcaggaatggcgccaaatgcgtggaccagcccgatggctacgagtgccgctgtgccgagggctttgagggcacgctgtgtgatcgcaacgtggacgactgctcccctgacccatgccaccatggtcgctgcgtggatggcatcgccagcttctcatgtgcctgtgctcctggctacacgggcacacgctgcgagagccaggtggacgaatgccgcagccagccctgccgccatggcggcaaatgcctagacctggtggacaagtacctctgccgctgcccttctgggaccacaggtgtgaactgcgaagtgaacattgacgactgtgccagcaacccctgcacctttggagtctgccgtgatggcatcaaccgctacgactgtgtctgccaacctggcttcacagggcccctttgtaacgtggagatcaatgagtgtgcttccagcccatgcggcgagggaggttcctgtgtggatggggaaaatggcttccgctgcctctgcccgcctggctccttgcccccactctgcctccccccgagccatccctgtgcccatgagccctgcagtcacggcatctgctatgatgcacctggcgggttccgctgtgtgtgtgagcctggctggagtggcccccgctgcagccagagcctggcccgagacgcctgtgagtcccagccgtgcagggccggtgggacatgcagcagcgatggaatgggtttccactgcacctgcccgcctggtgtccagggacgtcagtgtgaactcctctccccctgcaccccgaacccctgtgagcatgggggccgctgcgagtctgcccctggccagctgcctgtctgctcctgcccccagggctggcaagacccatgcctgaacggtggctcgtgccaagacggcgtgggctccttttcctgctcctgcctccctggtttcgccggcccacgatgcgcccgcgatgtggatgagtgcctgagcaacccctgcggcccgggcacctgtaccgaccacgtggcctccttcacctgcacctgcccgccaggctacggaggcttccactgcgaacaggacctgcccgactgcagccccagctcctgcttcaatggcgggacctgtgtggacggcgtgaactcgttcagctgcctgtgccgtcccggctacacaggagcccactgccaacatgaggcagacccctgcctctcgcggccctgcctacacgggggcgtctgcagcgccgcccaccctggcttccgctgcacctgcctcgagagcttcacgggcccgcagtgccagacgctggtggattggtgcagccgccagccttgtcaaaacgggggtcgctgcgtccagactggggcctattgcctttgtccccctggatggagcggacgcctctgtgacatccgaagcttgccctgcagggaggccgcagcccagatcggggtgcggctggagcagctgtgtcaggcgggtgggcagtgtgtggatgaagacagctcccactactgcgtgtgcccagagggccgtactggtagccactgtgagcaggaggtggacccctgcttggcccagccctgccagcatggggggacctgccgtggctatatggggggctacatgtgtgagtgtcttcctggctacaatggtgataactgtgaggacgacgtggacgagtgtgcctcccagccctgccagcacgggggttcatgcattgacctcgtggcccgctatctctgctcctgtcccccaggaacgctgggggtgctctgcgagattaatgaggatgactgcggcccaggcccaccgctggactcagggccccggtgcctacacaatggcacctgcgtggacctggtgggtggtttccgctgcacctgtcccccaggatacactggtttgcgctgcgaggcagacatcaatgagtgtcgctcaggtgcctgccacgcggcacacacccgggactgcctgcaggacccaggcggaggtttccgttgcctttgtcatgctggcttctcaggtcctcgctgtcagactgtcctgtctccctgcgagtcccagccatgccagcatggaggccagtgccgtcctagcccgggtcctgggggtgggctgaccttcacctgtcactgtgcccagccgttctggggtccgcgttgcgagcgggtggcgcgctcctgccgggagctgcagtgcccggtgggcgtcccatgccagcagacgccccgcgggccgcgctgcgcctgccccccagggttgtcgggaccctcctgccgcagcttcccggggtcgccgccgggggccagcaacgccagctgcgcggccgccccctgtctccacgggggctcctgccgccccgcgccgctcgcgcccttcttccgctgcgcttgcgcgcagggctggaccgggccgcgctgcgaggcgcccgccgcggcacccgaggtctcggaggagccgcggtgcccgcgcgccgcctgccaggccaagcgcggggaccagcgctgcgaccgcgagtgcaacagcccaggctgcggctgggacggcggcgactgctcgctgagcgtgggcgacccctggcggcaatgcgaggcgctgcagtgctggcgcctcttcaacaacagccgctgcgaccccgcctgcagctcgcccgcctgcctctacgacaacttcgactgccacgccggtggccgcgagcgcacttgcaacccggtgtacgagaagtactgcgccgaccactttgccgacggccgctgcgaccagggctgcaacacggaggagtgcggctgggatgggctggattgtgccagcgaggtgccggccctgctggcccgcggcgtgctggtgctcacagtgctgctgccgccagaggagctactgcgttccagcgccgactttctgcagcggctcagcgccatcctgcgcacctcgctgcgcttccgcctggacgcgcacggccaggccatggtcttcccttaccaccggcctagtcctggctccgaaccccgggcccgtcgggagctggcccccgaggtgatcggctcggtagtaatgctggagattgacaaccggctctgcctgcagtcgcctgagaatgatcactgcttccccgatgcccagagcgccgctgactacctgggagcgttgtcagcggtggagcgcctggacttcccgtacccactgcgggacgtgcggggggagccgctggagcctccagaacccagcgtcccgctgctgccactgctagtggcgggcgctgtcttgctgctggtcattctcgtcctgggtgtcatggtggcccggcgcaagcgcgagcacagcaccctctggttccctgagggcttctcactgcacaaggacgtggcctctggtcacaagggccggcgggaacccgtgggccaggacgcgctgggcatgaagaacatggccaagggtgagagcctgatgggggaggtggccacagactggatggacacagagtgcccagaggccaagcggctaaaggtagaggagccaggcatgggggctgaggaggctgtggattgccgtcagtggactcaacaccatctggttgctgctgacatccgcgtggcaccagccatggcactgacaccaccacagggcgacgcagatgctgatggcatggatgtcaatgtgcgtggcccagatggcttcaccccgctaatgctggcttccttctgtgggggggctctggagccaatgccaactgaagaggatgaggcagatgacacatcagctagcatcatctccgacctgatctgccagggggctcagcttggggcacggactgaccgtactggcgagactgctttgcacctggctgcccgttatgcccgtgctgatgcagccaagcggctgctggatgctggggcagacaccaatgcccaggaccactcaggccgcactcccctgcacacagctgtcacagccgatgcccagggtgtcttccagattctcatccgaaaccgctctacagacttggatgcccgcatggcagatggctcaacggcactgatcctggcggcccgcctggcagtagagggcatggtggaagagctcatcgccagccatgctgatgtcaatgctgtggatgagcttgggaaatcagccttacactgggctgcggctgtgaacaacgtggaagccactttggccctgctcaaaaatggagccaataaggacatgcaggatagcaaggaggagacccccctattcctggccgcccgcgagggcagctatgaggctgccaagctgctgttggaccactttgccaaccgtgagatcaccgaccacctggacaggctgccgcgggacgtagcccaggagagactgcaccaggacatcgtgcgcttgctggatcaacccagtgggccccgcagcccccccggtccccacggcctggggcctctgctctgtcctccaggggccttcctccctggcctcaaagcggcacagtcggggtccaagaagagcaggaggccccccgggaaggcggggctggggccgcaggggccccgggggcggggcaagaagctgacgctggcctgcccgggccccctggctgacagctcggtcacgctgtcgcccgtggactcgctggactccccgcggcctttcggtgggccccctgcttcccctggtggcttcccccttgaggggccctatgcagctgccactgccactgcagtgtctctggcacagcttggtggcccaggccgggcgggtctagggcgccagccccctggaggatgtgtactcagcctgggcctgctgaaccctgtggctgtgcccctcgattgggcccggctgcccccacctgcccctccaggcccctcgttcctgctgccactggcgccgggaccccagctgctcaacccagggacccccgtctccccgcaggagcggcccccgccttacctggcagtcccaggacatggcgaggagtacccggcggctggggcacacagcagccccccaaaggcccgcttcctgcgggttcccagtgagcacccttacctgaccccatcccccgaatcccctgagcactgggccagcccctcacctccctccctctcagactggtccgaatccacgcctagcccagccactgccactggggccatggccaccaccactggggcactgcctgcccagccacttcccttgtctgttcccagctcccttgctcaggcccagacccagctggggccccagccggaagttacccccaagaggcaagtgttggcctgagacgctcgtcagttcttagatcttgggggcctaaagagacccccgtcctgcctcctttctttctctgtctcttccttccttttagtctttttcatcctcttctctttccaccaaccctcctgcatccttgccttgcagcgtgaccgagataggtcatcagcccagggcttcagtcttcctttatttataatgggtgggggctaccacccaccctctcagtcttgtgaagagtctgggacctccttcttccccacttctctcttccctcattcctttctctctccttctggcctctcatttccttacactctgacatgaatgaattattattatttttatttttctttttttttttacattttgtatagaaacaaattcatttaaacaaacttattattattattttttacaaaatatatatatggagatgctccctccccctgtgaaccccccagtgcccccgtggggctgagtctgtgggcccattcggccaagctggattctgtgtacctagtacacaggcatgactgggatcccgtgtaccgagtacacgacccaggtatgtaccaagtaggcacccttgggcgcacccactggggccaggggtcgggggagtgttgggagcctcctccccaccccacctccctcacttcactgcattccagatgggacatgttccatagccttgctggggaagggcccactgccaactccctctgccccagccccacccttggccatctccctttgggaactagggggctgctggtgggaaatgggagccagggcagatgtatgcattcctttgtgtccctgtaaatgtgggactacaagaagaggagctgcctgagtggtactttctcttcctggtaatcctctggcccagcctcatggcagaatagaggtatttttaggctatttttgtaatatggcttctggtcaaaatccctgtgtagctgaattcccaagccctgcattgtacagccccccactcccctcaccacctaataaaggaatagttaacactc

SEQ ID NO: 20482 - DNA, 6745 bp, Homo sapiens
  source 1..6745: mol_type = unassigned DNA
agacgtgaggcttgcagcaggccgaggaggaagaagaggggcagtgggagcagaggaggtggctcctgccccagtgagagctctgagggtccctgcctgaagagggacagggaccggggcttggagaaggggctgtggaatgcagcccccttcactgctgctgctgctgctgctgctgctgctgctatgtgtctcagtggtcagacccagagggctgctgtgtgggagtttcccagaaccctgtgccaatggaggcacctgcctgagcctgtctctgggacaagggacctgccagtgtgcccctggcttcctgggtgagacgtgccagtttcctgacccctgccagaacgcccagctctgccaaaatggaggcagctgccaagccctgcttcccgctcccctagggctccccagctctccctctccattgacacccagcttcttgtgcacttgcctccctggcttcactggtgagagatgccaggccaagcttgaagacccttgtcctccctccttctgttccaaaaggggccgctgccacatccaggcctcgggccgcccacagtgctcctgcatgcctggatggacaggtgagcagtgccagcttcgggacttctgttcagccaacccatgtgttaatggaggggtgtgtctggccacatacccccagatccagtgccactgcccaccgggcttcgagggccatgcctgtgaacgtgatgtcaacgagtgcttccaggacccaggaccctgccccaaaggcacctcctgccataacaccctgggctccttccagtgcctctgccctgtggggcaggagggtccacgttgtgagctgcgggcaggaccctgccctcctaggggctgttcgaatgggggcacctgccagctgatgccagagaaagactccacctttcacctctgcctctgtcccccaggtttcataggcccagactgtgaggtgaatccagacaactgtgtcagccaccagtgtcagaatgggggcacttgccaggatgggctggacacctacacctgcctctgcccagaaacctggacaggctgggactgctccgaagatgtggatgagtgtgagacccagggtccccctcactgcagaaacgggggcacctgccagaactctgctggtagctttcactgcgtgtgtgtgagtggctggggcggcacaagctgtgaggagaacctggatgactgtattgctgccacctgtgccccgggatccacctgcattgaccgggtgggctctttctcctgcctctgcccacctggacgcacaggactcctgtgccacttggaagacatgtgtctgagccagccgtgccatggggatgcccaatgcagcaccaaccccctcacaggctccacactctgcctgtgtcagcctggctattcggggcccacctgccaccaggacctggacgagtgtctgatggcccagcaaggcccaagtccctgtgaacatggcggttcctgcctcaacactcctggctccttcaactgcctctgtccacctggctacacaggctcccgttgtgaggctgatcacaatgagtgcctctcccagccctgccacccaggaagcacctgtctggacctacttgccaccttccactgcctctgcccgccaggcttagaagggcagctctgtgaggtggagaccaacgagtgtgcctcagctccctgcctgaaccacgcggattgccatgacctgctcaacggcttccagtgcatctgcctgcctggattctccggcacccgatgtgaggaggatatcgatgagtgcagaagctctccctgtgccaatggtgggcagtgccaggaccagcctggagccttccactgcaagtgtctcccaggctttgaagggccacgctgtcaaacagaggtggatgagtgcctgagtgacccatgtcccgttggagccagctgccttgatcttccaggagccttcttttgcctctgcccctctggtttcacaggccagctctgtgaggttcccctgtgtgctcccaacctgtgccagcccaagcagatatgtaaggaccagaaagacaaggccaactgcctctgtcctgatggaagccctggctgtgccccacctgaggacaactgcacctgccaccacgggcactgccagagatcctcatgtgtgtgtgacgtgggttggacggggccagagtgtgaggcagagctagggggctgcatctctgcaccctgtgcccatggggggacctgctacccccagccctctggctacaactgcacctgccctacaggctacacaggacccacctgtagtgaggagatgacagcttgtcactcagggccatgtctcaatggcggctcctgcaaccctagccctggaggctactactgcacctgccctccaagccacacagggccccagtgccaaaccagcactgactactgtgtgtctgccccgtgcttcaatgggggtacctgtgtgaacaggcctggcaccttctcctgcctctgtgccatgggcttccagggcccgcgctgtgagggaaagctccgccccagctgtgcagacagcccctgtaggaatagggcaacctgccaggacagccctcagggtccccgctgcctctgccccactggctacaccggaggcagctgccagactctgatggacttatgtgcccagaagccctgcccacgcaattcccactgcctccagactgggccctccttccactgcttgtgcctccagggatggaccgggcctctctgcaaccttccactgtcctcctgccagaaggctgcactgagccaaggcatagacgtctcttccctttgccacaatggaggcctctgtgtcgacagcggcccctcctatttctgccactgcccccctggattccaaggcagcctgtgccaggatcacgtgaacccatgtgagtccaggccttgccagaacggggccacctgcatggcccagcccagtgggtatctctgccagtgtgccccaggctacgatggacagaactgctcaaaggaactcgatgcttgtcagtcccaaccctgtcacaaccatggaacctgtactcccaaacctggaggattccactgtgcctgccctccaggctttgtggggctacgctgtgagggagacgtggacgagtgtctggaccagccctgccaccccacaggcactgcagcctgccactctctggccaatgccttctactgccagtgtctgcctggacacacaggccagtggtgtgaggtggagatagacccctgccacagccaaccctgctttcatggagggacctgtgaggccacagcaggatcacccctgggtttcatctgccactgccccaagggttttgaaggccccacctgcagccacagggccccttcctgcggcttccatcactgccaccacggaggcctgtgtctgccctcccctaagccaggcttcccaccacgctgtgcctgcctcagtggctatgggggtcctgactgcctgaccccaccagctcctaaaggctgtggccctccctccccatgcctatacaatggcagctgctcagagaccacgggcttggggggcccaggctttcgatgctcctgccctcacagctctccagggccccggtgtcagaaacccggagccaaggggtgtgagggcagaagtggagatggggcctgcgatgctggctgcagtggcccgggaggaaactgggatggaggggactgctctctgggagtcccagacccctggaagggctgcccctcccactctcggtgctggcttctcttccgggacgggcagtgccacccacagtgtgactctgaagagtgtctgtttgatggctacgactgtgagacccctccagcctgcactccagcctatgaccagtactgccatgatcacttccacaacgggcactgtgagaaaggctgcaacactgcagagtgtggctgggatggaggtgactgcaggcctgaagatggggacccagagtgggggccctccctggccctgctggtggtactgagccccccagccctagaccagcagctgtttgccctggcccgggtgctgtccctgactctgagggtaggactctgggtaaggaaggatcgtgatggcagggacatggtgtacccctatcctggggcccgggctgaagaaaagctaggaggaactcgggaccccacctatcaggagagagcagcccctcaaacgcagcccctgggcaaggagaccgactccctcagtgctgggtttgtggtggtcatgggtgtggatttgtcccgctgtggccctgaccacccggcatcccgctgtccctgggaccctgggcttctactccgcttccttgctgcgatggctgcagtgggagccctggagcccctgctgcctggaccactgctggctgtccaccctcatgcagggaccgcaccccctgccaaccagcttccctggcctgtgctgtgctccccagtggccggggtgattctcctggccctaggggctcttctcgtcctccagctcatccggcgtcgacgccgagagcatggagctctctggctgccccctggtttcactcgacggcctcggactcagtcagctccccaccgacgccggcccccactaggcgaggacagcattggtctcaaggcactgaagccaaaggcagaagttgatgaggatggagttgtgatgtgctcaggccctgaggagggagaggaggtgggccaggctgaagaaacaggcccaccctccacgtgccagctctggtctctgagtggtggctgtggggcgctccctcaggcagccatgctaactcctccccaggaatctgagatggaagcccctgacctggacacccgtggacctgatggggtgacacccctgatgtcagcagtttgctgtggggaagtacagtccgggaccttccaaggggcatggttgggatgtcctgagccctgggaacctctgctggatggaggggcctgtccccaggctcacaccgtgggcactggggagacccccctgcacctggctgcccgattctcccggccaaccgctgcccgccgcctccttgaggctggagccaaccccaaccagccagaccgggcagggcgcacaccccttcatgctgctgtggctgctgatgctcgggaggtctgccagcttctgctccgtagcagacaaactgcagtggacgctcgcacagaggacgggaccacacccttgatgctggctgccaggctggcggtggaagacctggttgaagaactgattgcagcccaagcagacgtgggggccagagataaatgggggaaaactgcgctgcactgggctgctgccgtgaacaacgcccgagccgcccgctcgcttctccaggccggagccgataaagatgcccaggacaacagggagcagacgccgctattcctggcggcgcgggaaggagcggtggaagtagcccagctactgctggggctgggggcagcccgagagctgcgggaccaggctgggctagcgccggcggacgtcgctcaccaacgtaaccactgggatctgctgacgctgctggaaggggctgggccaccagaggcccgtcacaaagccacgccgggccgcgaggctgggcccttcccgcgcgcacggacggtgtcagtaagcgtgcccccgcatgggggcggggctctgccgcgctgccggacgctgtcagccggagcaggccctcgtgggggcggagcttgtctgcaggctcggacttggtccgtagacttggctgcgcgggggggcggggcctattctcattgccggagcctctcgggagtaggagcaggaggaggcccgacccctcgcggccgtaggttttctgcaggcatgcgcgggcctcggcccaaccctgcgataatgcgaggaagatacggagtggctgccgggcgcggaggcagggtctcaacggatgactggccctgtgattgggtggccctgggagcttgcggttctgcctccaacattccgatcccgcctccttgccttactccgtccccggagcggggatcacctcaacttgactgtggtcccccagccctccaagaaatgcccataaaccaaggaggagagggtaaaaaatagaagaatacatggtagggaggaattccaaaaatgattacccattaaaaggcaggctggaaggccttcctggttttaagatggatcccccaaaatgaagggttgtgagtttagtttctctcctaaaatgaatgtatgcccaccagagcagacatcttccacgtggagaagctgcagctctggaaagagggtttaagatgctaggatgaggcaggcccagtcctcctccagaaaataagacaggccacaggagggcagagtggagtggaaatacccctaagttggaaccaagaattgcaggcatatgggatgtaagatgttctttcctatatatggtttccaaagggtgcccctatgatccattgtccccactgcccacaaatggctgacaaatatttattgggcacctactatgtgccaggcactgtgtaggtgctgaaaagtggccaagggccacccccgctgatgactccttgcattccctcccctcacaacaaagaactccactgtggggatgaagcgcttcttctagccactgctatcgctatttaagaaccctaaatctgtcacccataataaagctgatttgaagtgtta

SEQ ID NO: 20483 - DNA, 3741 bp, Homo sapiens
  source 1..3741: mol_type = unassigned DNA
tgtgccccaggctacgatggacagaactgctcaaaggaactcgatgcttgtcagtcccaaccctgtcacaaccatggaacctgtactcccaaacctggaggcttccactgtgcctgccctccaggctttgtggggctacgctgtgagggagacgtggacgagtgtctggaccagccctgccaccccacaggcactgcagcctgccactctctggccaatgccttctactgccagtgtctgcctggacacacaggccagtggtgtgaggtggagatagacccctgccacagccaaccctgctttcatggagggacctgtgaggccacagcaggatcacccctgggtttcatctgccactgccccaagggttttgaaggccccacctgcagccacagggccccttcctgcggcttccatcactgccaccacggaggcctgtgtctgccctcccctaagccaggcttcccaccacgctgtgcctgcctcagtggctatgggggtcctgactgcctgaccccaccagctcctaaaggctgtggccctccctccccatgcctatacaatggcagctgctcagagaccacgggcttggggggcccaggctttcgatgctcctgccctcacagctctccagggccccggtgtcagaaacccggagccaaggggtgtgagggcagaagtggagatggggcctgcgatgctggctgcagtggcccgggaggaaactgggatggaggggactgctctctgggagtcccagacccctggaagggctgcccctcccactctcggtgctggcttctcttccgggacgggcagtgccacccacagtgtgactctgaagagtgtctgtttgatggctacgactgtgagacccctccagcctgcactccagcctatgaccagtactgccatgatcacttccacaacgggcactgtgagaaaggctgcaacactgcagagtgtggctgggatggaggtgactgcaggcctgaagatggggacccagagtgggggccctccctggccctgctggtggtactgagccccccagccctagaccagcagctgtttgccctggcccgggtgctgtccctgactctgagggtaggactctgggtaaggaaggatcgtgatggcagggacatggtgtacccctatcctggggcccgggctgaagaaaagctaggaggaactcgggaccccacctatcaggagagagcagcccctcaaacgcagcccctgggcaaggagaccgactccctcagtgctgggtttgtggtggtcatgggtgtggatttgtcccgctgtggccctgaccacccggcatcccgctgtccctgggaccctgggcttctactccgcttccttgctgcgatggctgcagtgggagccctggagcccctgctgcctggaccactgctggctgtccaccctcatgcagggaccgcaccccctgccaaccagcttccctggcctgtgctgtgctccccagtggccggggtgattctcctggccctaggggctcttctcgtcctccagctcatccggcgtcgacgccgagagcatggagctctctggctgccccctggtttcactcgacggcctcggactcagtcagctccccaccgacgccggcccccactaggcgaggacagcattggtctcaaggcactgaagccaaaggcagaagttgatgaggatggagttgtgatgtgctcaggccctgaggagggagaggaggtgggccaggctgaagaaacaggcccaccctccacgtgccagctctggtctctgagtggtggctgtggggcgctccctcaggcagccatgctaactcctccccaggaatctgagatggaagcccctgacctggacacccgtggacctgatggggtgacacccctgatgtcagcagtttgctgtggggaagtacagtccgggaccttccaaggggcatggttgggatgtcctgagccctgggaacctctgctggatggaggggcctgtccccaggctcacaccgtgggcactggggagacccccctgcacctggctgcccgattctcccggccaaccgctgcccgccgcctccttgaggctggagccaaccccaaccagccagaccgggcagggcgcacaccccttcatgctgctgtggctgctgatgctcgggaggtctgccagcttctgctccgtagcagacaaactgcagtggacgctcgcacagaggacgggaccacacccttgatgctggctgccaggctggcggtggaagacctggttgaagaactgattgcagcccaagcagacgtgggggccagagataaatgggggaaaactgcgctgcactgggctgctgccgtgaacaacgcccgagccgcccgctcgcttctccaggccggagccgataaagatgcccaggacaacagggagcagacgccgctattcctggcggcgcgggaaggagcggtggaagtagcccagctactgctggggctgggggcagcccgagagctgcgggaccaggctgggctagcgccggcggacgtcgctcaccaacgtaaccactgggatctgctgacgctgctggaaggggctgggccaccagaggcccgtcacaaagccacgccgggccgcgaggctgggcccttcccgcgcgcacggacggtgtcagtaagcgtgcccccgcatgggggcggggctctgccgcgctgccggacgctgtcagccggagcaggccctcgtgggggcggagcttgtctgcaggctcggacttggtccgtagacttggctgcgcgggggggcggggcctattctcattgccggagcctctcgggagtaggagcaggaggaggcccgacccctcgcggccgtaggttttctgcaggcatgcgcgggcctcggcccaaccctgcgataatgcgaggaagatacggagtggctgccgggcgcggaggcagggtctcaacggatgactggccctgtgattgggtggccctgggagcttgcggttctgcctccaacattccgatcccgcctccttgccttactccgtccccggagcggggatcacctcaacttgactgtggtcccccagccctccaagaaatgcccataaaccaaggaggagagggtaaaaaatagaagaatacatggtagggaggaattccaaaaatgattacccattaaaaggcaggctggaaggccttcctggttttaagatggatcccccaaaatgaagggttgtgagtttagtttctctcctaaaatgaatgtatgcccaccagagcagacatcttccacgtggagaagctgcagctctggaaagagggtttaagatgctaggatgaggcaggcccagtcctcctccagaaaataagacaggccacaggagggcagagtggagtggaaatacccctaagttggaaccaagaattgcaggcatatgggatgtaagatgttctttcctatatatggtttccaaagggtgcccctatgatccattgtccccactgcccacaaatggctgacaaatatttattgggcacctactatgtgccaggcactgtgtaggtgctgaaaagtggccaagggccacccccgctgatgactccttgcattccctcccctcacaacaaagaactccactgtggggatgaagcgcttcttctagccactgctatcgctatttaagaaccctaaatctgtcacccataataaagctgatttgaagtgtta

SEQ ID NO: 20484 - DNA, 6751 bp, Homo sapiens
  source 1..6751: mol_type = unassigned DNA
agacgtgaggcttgcagcaggccgaggaggaagaagaggggcagtgggagcagaggaggtggctcctgccccagtgagagctctgagggtccctgcctgaagagggacagggaccggggcttggagaaggggctgtggaatgcagcccccttcactgctgctgctgctgctgctgctgctgctgctgctgctatgtgtctcagtggtcagacccagagggctgctgtgtgggagtttcccagaaccctgtgccaatggaggcacctgcctgagcctgtctctgggacaagggacctgccagtgtgcccctggcttcctgggtgagacgtgccagtttcctgacccctgccagaacgcccagctctgccaaaatggaggcagctgccaagccctgcttcccgctcccctagggctccccagctctccctctccattgacacccagcttcttgtgcacttgcctccctggcttcactggcgagagatgccaggcccagcttgaagacccttgtcctccctccttctgttccaaaaggggccgctgccacatccaggcctcgggccgcccacagtgctcctgcatgcctggatggacaggtgagcagtgccagcttcgggacttctgttcagccaacccatgtgttaatggaggggtgtgtctggccacatacccccagatccagtgccactgcccaccgggcttcgagggccatgcctgtgaacgtgatgtcaacgagtgcttccaggacccaggaccctgccccaaaggcacctcctgccataacaccctgggctccttccagtgcctctgccctgtggggcaggagggtccacgttgtgagctgcgggcaggaccctgccctcctaggggctgttcgaatgggggcacctgccagctgatgccagagaaagactccacctttcacctctgcctctgtcccccaggtttcataggcccagactgtgaggtgaatccagacaactgtgtcagccaccagtgtcagaatgggggcacttgccaggatgggctggacacctacacctgcctctgcccagaaacctggacaggctgggactgctccgaagatgtggatgagtgtgaggcccagggtccccctcactgcagaaacgggggcacctgccagaactctgctggtagctttcactgcgtgtgtgtgagtggctggggcggcacaagctgtgaggagaacctggatgactgtattgctgccacctgtgccccgggatccacctgcattgaccgggtgggctctttctcctgcctctgcccacctggacgcacaggactcctgtgccacttggaagacatgtgtctgagccagccgtgccatggggatgcccaatgcagcaccaaccccctcacaggctccacactctgcctgtgtcagcctggctattcggggcccacctgccaccaggacctggacgagtgtctgatggcccagcaaggcccaagtccctgtgaacatggcggttcctgcctcaacactcctggctccttcaactgcctctgtccacctggctacacaggctcccgttgtgaggctgatcacaatgagtgcctctcccagccctgccacccaggaagcacctgtctggacctacttgccaccttccactgcctctgcccgccaggcttagaagggcagctctgtgaggtggagaccaacgagtgtgcctcagctccctgcctgaaccacgcggattgccatgacctgctcaacggcttccagtgcatctgcctgcctggattctccggcacccgatgtgaggaggatatcgatgagtgcagaagctctccctgtgccaatggtgggcagtgccaggaccagcctggagccttccactgcaagtgtctcccaggctttgaagggccacgctgtcaaacagaggtggatgagtgcctgagtgacccatgtcccgttggagccagctgccttgatcttccaggagccttcttttgcctctgcccctctggtttcacaggccagctctgtgaggttcccctgtgtgctcccaacctgtgccagcccaagcagatatgtaaggaccagaaagacaaggccaactgcctctgtcctgatggaagccctggctgtgccccacctgaggacaactgcacctgccaccacgggcactgccagagatcctcatgtgtgtgtgacgtgggttggacggggccagagtgtgaggcagagctagggggctgcatctctgcaccctgtgcccatggggggacctgctacccccagccctctggctacaactgcacctgccctacaggctacacaggacccacctgtagtgaggagatgacagcttgtcactcagggccatgtctcaatggcggctcctgcaaccctagccctggaggctactactgcacctgccctccaagccacacagggccccagtgccaaaccagcactgactactgtgtgtctgccccgtgcttcaatgggggtacctgtgtgaacaggcctggcaccttctcctgcctctgtgccatgggcttccagggcccgcgctgtgagggaaagctccgccccagctgtgcagacagcccctgtaggaatagggcaacctgccaggacagccctcagggtccccgctgcctctgccccactggctacaccggaggcagctgccagactctgatggacttatgtgcccagaagccctgcccacgcaattcccactgcctccagactgggccctccttccactgcttgtgcctccagggatggaccgggcctctctgcaaccttccactgtcctcctgccagaaggctgcactgagccaaggcatagacgtctcttccctttgccacaatggaggcctctgtgtcgacagcggcccctcctatttctgccactgcccccctggattccaaggcagcctgtgccaggatcacgtgaacccatgtgagtccaggccttgccagaacggggccacctgcatggcccagcccagtgggtatctctgccagtgtgccccaggctacgatggacagaactgctcaaaggaactcgatgcttgtcagtcccaaccctgtcacaaccatggaacctgtactcccaaacctggaggcttccactgtgcctgccctccaggctttgtggggctacgctgtgagggagacgtggacgagtgtctggaccagccctgccaccccacaggcactgcagcctgccactctctggccaatgccttctactgccagtgtctgcctggacacacaggccagtggtgtgaggtggagatagacccctgccacagccaaccctgctttcatggagggacctgtgaggccacagcaggatcacccctgggtttcatctgccactgccccaagggttttgaaggccccacctgcagccacagggccccttcctgcggcttccatcactgccaccacggaggcctgtgtctgccctcccctaagccaggcttcccaccacgctgtgcctgcctcagtggctatgggggtcctgactgcctgaccccaccagctcctaaaggctgtggccctccctccccatgcctatacaatggcagctgctcagagaccacgggcttggggggcccaggctttcgatgctcctgccctcacagctctccagggccccggtgtcagaaacccggagccaaggggtgtgagggcagaagtggagatggggcctgcgatgctggctgcagtggcccgggaggaaactgggatggaggggactgctctctgggagtcccagacccctggaagggctgcccctcccactctcggtgctggcttctcttccgggacgggcagtgccacccacagtgtgactctgaagagtgtctgtttgatggctacgactgtgagacccctccagcctgcactccagcctatgaccagtactgccatgatcacttccacaacgggcactgtgagaaaggctgcaacactgcagagtgtggctgggatggaggtgactgcaggcctgaagatggggacccagagtgggggccctccctggccctgctggtggtactgagccccccagccctagaccagcagctgtttgccctggcccgggtgctgtccctgactctgagggtaggactctgggtaaggaaggatcgtgatggcagggacatggtgtacccctatcctggggcccgggctgaagaaaagctaggaggaactcgggaccccacctatcaggagagagcagcccctcaaacgcagcccctgggcaaggagaccgactccctcagtgctgggtttgtggtggtaatgggtgtggatttgtcccgctgtggccctgaccacccggcatcccgctgtccctgggaccctgggcttctactccgcttccttgctgcgatggctgcagtgggagccctggagcccctgctgcctggaccactgctggctgtccaccctcatgcagggaccgcaccccctgccaaccagcttccctggcctgtgctgtgctccccagtggccggggtgattctcctggccctaggggctcttctcgtcctccagctcatccggcgtcgacgccgagagcatggagctctctggctgccccctggtttcactcgacggcctcggactcagtcagctccccaccgacgccggcccccactaggcgaggacagcattggtctcaaggcactgaagccaaaggcagaagttgatgaggatggagttgtgatgtgctcaggccctgaggagggagaggaggtgggccaggctgaagaaacaggcccaccctccacgtgccagctctggtctctgagtggtggctgtggggcgctccctcaggcagccatgctaactcctccccaggaatctgagatggaagcccctgacctggacacccgtggacctgatggggtgacacccctgatgtcagcagtttgctgtggggaagtacagtccgggaccttccaaggggcatggttgggatgtcctgagccctgggaacctctgctggatggaggggcctgtccccaggctcacaccgtgggcactggggagacccccctgcacctggctgcccgattctcccggccaaccgctgcccgccgcctccttgaggctggagccaaccccaaccagccagaccgggcagggcgcacaccccttcatgctgctgtggctgctgatgctcgggaggtctgccagcttctgctccgtagcagacaaactgcagtggacgctcgcacagaggacgggaccacacccttgatgctggctgccaggctggcggtggaagacctggttgaagaactgattgcagcccaagcagacgtgggggccagagataaatgggggaaaactgcgctgcactgggctgctgccgtgaacaacgcccgagccgcccgctcgcttctccaggccggagccgataaagatgcccaggacaacagggagcagacgccgctattcctggcggcgcgggaaggagcggtggaagtagcccagctactgctggggctgggggcagcccgagagctgcgggaccaggctgggctagcgccggcggacgtcgctcaccaacgtaaccactgggatctgctgacgctgctggaaggggctgggccaccagaggcccgtcacaaagccacgccgggccgcgaggctgggcccttcccgcgcgcacggacggtgtcagtaagcgtgcccccgcatgggggcggggctctgccgcgctgccggacgctgtcagccggagcaggccctcgtgggggcggagcttgtctgcaggctcggacttggtccgtagacttggctgcgcgggggggcggggcctattctcattgccggagcctctcgggagtaggagcaggaggaggcccgacccctcgcggccgtaggttttctgcaggcatgcgcgggcctcggcccaaccctgcgataatgcgaggaagatacggagtggctgccgggcgcggaggcagggtctcaacggatgactggccctgtgattgggtggccctgggagcttgcggttctgcctccaacattccgatcccgcctccttgccttactccgtccccggagcggggatcacctcaacttgactgtggtcccccagccctccaagaaatgcccataaaccaaggaggagagggtaaaaaatagaagaatacatggtagggaggaattccaaaaatgattacccattaaaaggcaggctggaaggccttcctggttttaagatggatcccccaaaatgaagggttgtgagtttagtttctctcctaaaatgaatgtatgcccaccagagcagacatcttccacgtggagaagctgcagctctggaaagagggtttaagatgctaggatgaggcaggcccagtcctcctccagaaaataagacaggccacaggagggcagagtggagtggaaatacccctaagttggaaccaagaattgcaggcatatgggatgtaagatgttctttcctatatatggtttccaaagggtgcccctatgatccattgtccccactgcccacaaatggctgacaaatatttattgggcacctactatgtgccaggcactgtgtaggtgctgaaaagtggccaagggccacccccgctgatgactccttgcattccctcccctcacaacaaagaactccactgtggggatgaagcgcttcttctagccactgctatcgctatttaagaaccctaaatctgtcacccataataaagctgatttgaagtgtta

SEQ ID NO: 20485 - DNA, 6745 bp, Homo sapiens
  source 1..6745: mol_type = unassigned DNA
agacgtgaggcttgcagcaggccgaggaggaagaagaggggcagtgggagcagaggaggtggctcctgccccagtgagagctctgagggtccctgcctgaagagggacagggaccggggcttggagaaggggctgtggaatgcagcccccttcactgctgctgctgctgctgctgctgctgctgctatgtgtctcagtggtcagacccagagggctgctgtgtgggagtttcccagaaccctgtgccaatggaggcacctgcctgagcctgtctctgggacaagggacctgccagtgtgcccctggcttcctgggtgagacgtgccagtttcctgacccctgccagaacgcccagctctgccaaaatggaggcagctgccaagccctgcttcccgctcccctagggctccccagctctccctctccattgacacccagcttcttgtgcacttgcctccctggcttcactggcgagagatgccaggcccagcttgaagacccttgtcctccctccttctgttccaaaaggggccgctgccacatccaggcctcgggccgcccacagtgctcctgcatgcctggatggacaggtgagcagtgccagcttcgggacttctgttcagccaacccatgtgttaatggaggggtgtgtctggccacatacccccagatccagtgccactgcccaccgggcttcgagggccatgcctgtgaacgtgatgtcaacgagtgcttccaggacccaggaccctgccccaaaggcacctcctgccataacaccctgggctccttccagtgcctctgccctgtggggcaggagggtccacgttgtgagctgcgggcaggaccctgccctcctaggggctgttcgaatgggggcacctgccagctgatgccagagaaagactccacctttcacctctgcctctgtcccccaggtttcataggcccagactgtgaggtgaatccagacaactgtgtcagccaccagtgtcagaatgggggcacttgccaggatgggctggacacctacacctgcctctgcccagaaacctggacaggctgggactgctccgaagatgtggatgagtgtgagacccagggtccccctcactgcagaaacgggggcacctgccagaactctgctggtagctttcactgcgtgtgtgtgagtggctggggcggcacaagctgtgaggagaacctggatgactgtattgctgccacctgtgccccgggatccacctgcattgaccgggtgggctctttctcctgcctctgcccacctggacgcacaggactcctgtgccacttggaagacatgtgtctgagccagccgtgccatggggatgcccaatgcagcaccaaccccctcacaggctccacactctgcctgtgtcagcctggctattcggggcccacctgccaccaggacctggacgagtgtctgatggcccagcaaggcccaagtccctgtgaacatggcggttcctgcctcaacactcctggctccttcaactgcctctgtccacctggctacacaggctcccgttgtgaggctgatcacaatgagtgcctctcccagccctgccacccaggaagcacctgtctggacctacttgccaccttccactgcctctgcccgccaggcttagaagggcagctctgtgaggtggagaccaacgagtgtgcctcagctccctgcctgaaccacgcggattgccatgacctgctcaacggcttccagtgcatctgcctgcctggattctccggcacccgatgtgaggaggatatcgatgagtgcagaagctctccctgtgccaatggtgggcagtgccaggaccagcctggagccttccactgcaagtgtctcccaggctttgaagggccacgctgtcaaacagaggtggatgagtgcctgagtgacccatgtcccgttggagccagctgccttgatcttccaggagccttcttttgcctctgcccctctggtttcacaggccagctctgtgaggttcccctgtgtgctcccaacctgtgccagcccaagcagatatgtaaggaccagaaagacaaggccaactgcctctgtcctgatggaagccctggctgtgccccacctgaggacaactgcacctgccaccacgggcactgccagagatcctcatgtgtgtgtgacgtgggttggacggggccagagtgtgaggcagagctagggggctgcatctctgcaccctgtgcccatggggggacctgctacccccagccctctggctacaactgcacctgccctacaggctacacaggacccacctgtagtgaggagatgacagcttgtcactcagggccatgtctcaatggcggctcctgcaaccctagccctggaggctactactgcacctgccctccaagccacacagggccccagtgccaaaccagcactgactactgtgtgtctgccccgtgcttcaatgggggtacctgtgtgaacaggcctggcaccttctcctgcctctgtgccatgggcttccagggcccgcgctgtgagggaaagctccgccccagctgtgcagacagcccctgtaggaatagggcaacctgccaggacagccctcagggtccccgctgcctctgccccactggctacaccggaggcagctgccagactctgatggacttatgtgcccagaagccctgcccacgcaattcccactgcctccagactgggccctccttccactgcttgtgcctccagggatggaccgggcctctctgcaaccttccactgtcctcctgccagaaggctgcactgagccaaggcatagacgtctcttccctttgccacaatggaggcctctgtgtcgacagcggcccctcctatttctgccactgcccccctggattccaaggcagcctgtgccaggatcacgtgaacccatgtgagtccaggccttgccagaacggggccacctgcatggcccagcccagtgggtatctctgccagtgtgccccaggctacgatggacagaactgctcaaaggaactcgatgcttgtcagtcccaaccctgtcacaaccatggaacctgtactcccaaacctggaggcttccactgtgcctgccctccaggctttgtggggctacgctgtgagggagacgtggacgagtgtctggaccagccctgccaccccacaggcactgcagcctgccactctctggccaatgccttctactgccagtgtctgcctggacacacaggccagtggtgtgaggtggagatagacccctgccacagccaaccctgctttcatggagggacctgtgaggccacagcaggatcacccctgggtttcatctgccactgccccaagggttttgaaggccccacctgcagccacagggccccttcctgcggcttccatcactgccaccacggaggcctgtgtctgccctcccctaagccaggcttcccaccacgctgtgcctgcctcagtggctatgggggtcctgactgcctgaccccaccagctcctaaaggctgtggccctccctccccatgcctatacaatggcagctgctcagagaccacgggcttggggggcccaggctttcgatgctcctgccctcacagctctccagggccccggtgtcagaaacccggagccaaggggtgtgagggcagaagtggagatggggcctgcgatgctggctgcagtggcccgggaggaaactgggatggaggggactgctctctgggagtcccagacccctggaagggctgcccctcccactctcggtgctggcttctcttccgggacgggcagtgccacccacagtgtgactctgaagagtgtctgtttgatggctacgactgtgagacccctccagcctgcactccagcctatgaccagtactgccatgatcacttccacaacgggcactgtgagaaaggctgcaacactgcagagtgtggctgggatggaggtgactgcaggcctgaagatggggacccagagtgggggccctctctggccctgctggtggtactgagccccccagccctagaccagcagctgtttgccctggcccgggtgctgtccctgactctgagggtaggactctgggtaaggaaggatcgtgatggcagggacatggtgtacccctatcctggggcccgggctgaagaaaagctaggaggaactcgggaccccacctatcaggagagagcagcccctcaaacgcagcccctgggcaaggagaccgactccctcagtgctgggtttgtggtggtcatgggtgtggatttgtcccgctgtggccctgaccacccggcatcccgctgtccctgggaccctgggcttctactccgcttccttgctgcgatggctgcagtgggagccctggagcccctgctgcctggaccactgctggctgtccaccctcatgcagggaccgcaccccctgccaaccagcttccctggcctgtgctgtgctccccagtggccggggtgattctcctggccctaggggctcttctcgtcctccagctcatccggcgtcgacgccgagagcatggagctctctggctgccccctggtttcactcgacggcctcggactcagtcagctccccaccgacgccggcccccactaggcgaggacagcattggtctcaaggcactgaagccaaaggcagaagttgatgaggatggagttgtgatgtgctcaggccctgaggagggagaggaggtgggccaggctgaagaaacaggcccaccctccacgtgccagctctggtctctgagtggtggctgtggggcgctccctcaggcagccatgctaactcctccccaggaatctgagatggaagcccctgacctggacacccgtggacctgatggggtgacacccctgatgtcagcagtttgctgtggggaagtacagtccgggaccttccaaggggcatggttgggatgtcctgagccctgggaacctctgctggatggaggggcctgtccccaggctcacaccgtgggcactggggagacccccctgcacctggctgcccgattctcccggccaaccgctgcccgccgcctccttgaggctggagccaaccccaaccagccagaccgggcagggcgcacaccccttcatgctgctgtggctgctgatgctcgggaggtctgccagcttctgctccgtagcagacaaactgcagtggacgctcgcacagaggacgggaccacacccttgatgctggctgccaggctggcggtggaagacctggttgaagaactgattgcagcccaagcagacgtgggggccagagataaatgggggaaaactgcgctgcactgggctgctgccgtgaacaacgcccgagccgcccgctcgcttctccaggccggagccgataaagatgcccaggacaacagggagcagacgccgctattcctggcggcgcgggaaggagcggtggaagtagcccagctactgctggggctgggggcagcccgagagctgcgggaccaggctgggctagcgccggcggacgtcgctcaccaacgtaaccactgggatctgctgacgctgctggaaggggctgggccaccagaggcccgtcacaaagccacgccgggccgcgaggctgggcccttcccgcgcgcacggacggtgtcagtaagcgtgcccccgcatgggggcggggctctgccgcgctgccggacgctgtcagccggagcaggccctcgtgggggcggagcttgtctgcaggctcggacttggtccgtagacttggctgcgcgggggggcggggcctattctcattgccggagcctctcgggagtaggagcaggaggaggcccgacccctcgcggccgtaggttttctgcaggcatgcgcgggcctcggcccaaccctgcgataatgcgaggaagatacggagtggctgccgggcgcggaggcagggtctcaacggatgactggccctgtgattgggtggccctgggagcttgcggttctgcctccaacattccgatcccgcctccttgccttactccgtccccggagcggggatcacctcaacttgactgtggtcccccagccctccaagaaatgcccataaaccaaggaggagagggtaaaaaatagaagaatacatggtagggaggaattccaaaaatgattacccattaaaaggcaggctggaaggccttcctggttttaagatggatcccccaaaatgaagggttgtgagtttagtttctctcctaaaatgaatgtatgcccaccagagcagacatcttccacgtggagaagctgcagctctggaaagagggtttaagatgctaggatgaggcaggcccagtcctcctccagaaaataagacaggccacaggagggcagagtggagtggaaatacccctaagttggaaccaagaattgcaggcatatgggatgtaagatgttctttcctatatatggtttccaaagggtgcccctatgatccattgtccccactgcccacaaatggctgacaaatatttattgggcacctactatgtgccaggcactgtgtaggtgctgaaaagtggccaagggccacccccgctgatgactccttgcattccctcccctcacaacaaagaactccactgtggggatgaagcgcttcttctagccactgctatcgctatttaagaaccctaaatctgtcacccataataaagctgatttgaagtgtta

SEQ ID NO: 20486 - DNA, 957 bp, Homo sapiens
  source 1..957: mol_type = unassigned DNA
gatgtcagcagtttgctgtggggaagtacagtccgggaccttccaaggggcatggttgggatgtcctgagccctgggaacctctgctggatggaggggcctgtccccaggctcacaccgtgggcactggggagacccccctgcacctggctgcccgattctcccggccaaccgctgcccgccgcctccttgaggctggagccaaccccaaccagccagaccgggcagggcgcacaccccttcatgctgctgtggctgctgatgctcgggaggtctgccagcttctgctccgtagcagacaaactgcagtggacgctcgcacagaggacgggaccacacccttgatgctggctgccaggctggcggtggaagacctggttgaagaactgattgcagcccaagcagacgtgggggccagagataaatggggagcagacgccgctattcctggcggcgcgggaaggagcggtggaagtagcccagctactgctggggctgggggcagcccgagagctgcgggaccaggctgggctagcgccggcggacgtcgctcaccaacgtaaccactgggatctgctgacgctgctggaaggggctgggccaccagaggcccgtcacaaagccacgccgggccgcgaggctgggcccttcccgcgcgcacggacggtgtcagtaagcgtgcccccgcatgggggcggggctctgccgcgctgccggacgctgtcagccggagcaggccctcgtgggggcggagcttgtctgcaggctcggacttggtccgtagacttggctgcgcgggggggcggggcctattctcattgccggagcctctcgggagtaggagcaggaggaggcccgacccctcgcggccgtaggttttctgcaggcatgcgcgggcctcggcccaaccctgcgataatgcgaggaagatacggagtggctgccgggcgcggaggca

SEQ ID NO: 20487 - DNA, 6742 bp, Homo sapiens
  source 1..6742: mol_type = unassigned DNA
agacgtgaggcttgcagcaggccgaggaggaagaagaggggcagtgggagcagaggaggtggctcctgccccagtgagagctctgagggtccctgcctgaagagggacagggactggggcttggagaaggggctgtggaatgcagcccccttcactgctgctgctgctgctgctgctgctgctatgtgtctcagtggtcagacccagagggctgctgtgtgggagtttcccagaaccctgtgccaatggaggcacctgcctgagcctgtctctgggacaagggacctgccagtgtgcccctggcttcctgggtgagacgtgccagtttcctgacccctgccagaacgcccagctctgccaaaatggaggcagctgccaagccctgcttcccgctcccctagggctccccagctctccctctccattgacacccagcttcttgtgcacttgcctccctggcttcactggcgagagatgccaggcccagcttgaagacccttgtcctccctccttctgttccaaaaggggccgctgccacatccaggcctcgggccgcccacagtgctcctgcatgcctggatggacaggtgagcagtgccagcttcgggacttctgttcagccaacccatgtgttaatggaggggtgtgtctggccacatacccccagatccagtgccactgcccaccgggcttcgagggccatgcctgtgaacgtgatgtcaacgagtgcttccaggacccaggaccctgccccaaaggcacctcctgccataacaccctgggctccttccagtgcctctgccctgtggggcaggagggtccacgttgtgagctgcgggcaggaccctgccctcctaggggctgttcgaatgggggcacctgccagctgatgccagagaaagactccacctttcacctctgcctctgtcccccaggtttcataggcccagactgtgaggtgaatccagacaactgtgtcagccaccagtgtcagaatgggggcacttgccaggatgggctggacacctacacctgcctctgcccagaaacctggacaggctgggactgctccgaagatgtggatgagtgtgagacccagggtccccctcactgcagaaacgggggcacctgccagaactctgctggtagctttcactgcgtgtgtgtgagtggctggggcggcacaagctgtgaggagaacctggatgactgtattgctgccacctgtgccccgggatccacctgcattgaccgggtgggctctttctcctgcctctgcccacctggacgcacaggactcctgtgccacttggaagacatgtgtctgagccagccgtgccatggggatgcccaatgcagcaccaaccccctcacaggctccacactctgcctgtgtcagcctggctattcggggcccacctgccaccaggacctggacgagtgtctgatggcccagcaaggcccaagtccctgtgaacatggcggttcctgcctcaacactcctggctccttcaactgcctctgtccacctggctacacaggctcccgttgtgaggctgatcacaatgagtgcctctcccagccctgccacccaggaagcacctgtctggacctacttgccaccttccactgcctctgcccgccaggcttagaagggcagctctgtgaggtggagaccaacgagtgtgcctcagctccctgcctgaaccacgcggattgccatgacctgctcaacggcttccagtgcatctgcctgcctggattctccggcacccgatgtgaggaggatatcgatgagtgcagaagctctccctgtgccaatggtgggcagtgccaggaccagcctggagccttccactgcaagtgtctcccaggctttgaagggccacgctgtcaaacagaggtggatgagtgcctgagtgacccatgtcccgttggagccagctgccttgatcttccaggagccttcttttgcctctgcccctctggtttcacaggccagctctgtgaggttcccctgtgtgctcccaacctgtgccagcccaagcagatatgtaaggaccagaaagacaaggccaactgcctctgtcctgatggaagccctggctgtgccccacctgaggacaactgcacctgccaccacgggcactgccagagatcctcatgtgtgtgtgacgtgggttggacggggccagagtgtgaggcagagctagggggctgcatctctgcaccctgtgcccatggggggacctgctacccccagccctctggctacaactgcacctgccctacaggctacacaggacccacctgtagtgaggagatgacagcttgtcactcagggccatgtctcaatggcggctcctgcaaccctagccctggaggctactactgcacctgccctccaagccacacagggccccagtgccaaaccagcactgactactgtgtgtctgccccgtgcttcaatgggggtacctgtgtgaacaggcctggcaccttctcctgcctctgtgccatgggcttccagggcccgcgctgtgagggaaagctccgccccagctgtgcagacagcccctgtaggaatagggcaacctgccaggacagccctcagggtccccgctgcctctgccccactggctacaccggaggcagctgccagactctgatggacttatgtgcccagaagccctgcccacgcaattcccactgcctccagactgggccctccttccactgcttgtgcctccagggatggaccgggcctctctgcaaccttccactgtcctcctgccagaaggctgcactgagccaaggcatagacgtctcttccctttgccacaatggaggcctctgtgtcgacagcggcccctcctatttctgccactgcccccctggattccaaggcagcctgtgccaggatcacgtgaacccatgtgagtccaggccttgccagaacggggccacctgcatggcccagcccagtgggtatctctgccagtgtgccccaggctacgatggacagaactgctcaaaggaactcgatgcttgtcagtcccaaccctgtcacaaccatggaacctgtactcccaaacctggaggcttccactgtgcctgccctccaggctttgtggggctacgctgtgagggagacgtggacgagtgtctggaccagccctgccaccccacaggcactgcagcctgccactctctggccaatgccttctactgccagtgtctgcctggacacacaggccagtggtgtgaggtggagatagacccctgccacagccaaccctgctttcatggagggacctgtgaggccacagcaggatcacccctgggtttcatctgccactgccccaagggttttgaaggccccacctgcagccacagggccccttcctgcggcttccatcactgccaccacggaggcctgtgtctgccctcccctaagccaggcttcccaccacgctgtgcctgcctcagtggctatgggggtcctgactgcctgaccccaccagctcctaaaggctgtggccctccctccccatgcctatacaatggcagctgctcagagaccacgggcttggggggcccaggctttcgatgctcctgccctcacagctctccagggccccggtgtcagaaacccggagccaaggggtgtgagggcagaagtggagatggggcctgcgatgctggctgcagtggcccgggaggaaactgggatggaggggactgctctctgggagtcccagacccctggaagggctgcccctcccactctcggtgctggcttctcttccgggacgggcagtgccacccacagtgtgactctgaagagtgtctgtttgatggctacgactgtgagacccctccagcctgcactccagcctatgaccagtactgccatgatcacttccacaacgggcactgtgagaaaggctgcaacactgcagagtgtggctgggatggaggtgactgcaggcctgaagatggggacccagagtgggggccctccctggccctgctggtggtactgagccccccagccctagaccagcagctgtttgccctggcccgggtgctgtccctgactctgagggtaggactctgggtaaggaaggatcgtgatggcagggacatggtgtacccctatcctggggcccgggctgaagaaaagctaggaggaactcgggaccccacctatcaggagagagcagcccctcaaacacagcccctgggcaaggagaccgactccctcagtgctgggtttgtggtggtcatgggtgtggatttgtcccgctgtggccctgaccacccggcatcccgctgtccctgggaccctgggcttctactccgcttccttgctgcgatggctgcagtgggagccctggagcccctgctgcctggaccactgctggctgtccaccctcatgcagggaccgcaccccctgccaaccagcttccctggcctgtgctgtgctccccagtggccggggtgattctcctggccctaggggctcttctcgtcctccagctcatccggcgtcgacgccgagagcatggagctctctggctgccccctggtttcactcgacggcctcggactcagtcagctccccaccgacgccggcccccactaggcgaggacagcattggtctcaaggcactgaagccaaaggcagaagttgatgaggatggagttgtgatgtgctcaggccctgaggagggagaggaggtgggccaggctgaagaaacaggcccaccctccacgtgccagctctggtctctgagtggtggctgtggggcgctccctcaggcagccatgctaactcctccccaggaatctgagatggaagcccctgacctggacacccgtggacctgatggggtgacacccctgatgtcagcagtttgctgtggggaagtacagtccgggaccttccaaggggcatggttgggatgtcctgagccctgggaacctctgctggatggaggggcctgtccccaggctcacaccgtgggcactggggagacccccctgcacctggctgcccgattctcccggccaaccgctgcccgccgcctccttgaggctggagccaaccccaaccagccagaccgggcagggcgcacaccccttcatgctgctgtggctgctgatgctcgggaggtctgccagcttctgctccgtagcagacaaactgcagtggacgctcgcacagaggacgggaccacacccttgatgctggctgccaggctggcggtggaagacctggttgaagaactgattgcagcccaagcagacgtgggggccagagataaatgggggaaaactgcgctgcactgggctgctgccgtgaacaacgcccgagccgcccgctcgcttctccaggccggagccgataaagatgcccaggacaacagggagcagacgccgctattcctggcggcgcgggaaggagcggtggaagtagcccagctactgctggggctgggggcagcccgagagctgcgggaccaggctgggctagcgccggcggacgtcgctcaccaacgtaaccactgggatctgctgacgctgctggaaggggctgggccaccagaggcccgtcacaaagccacgccgggccgcgaggctgggcccttcccgcgcgcacggacggtgtcagtaagcgtgcccccgcatgggggcggggctctgccgcgctgccggacgctgtcagccggagcaggccctcgtgggggcggagcttgtctgcaggctcggacttggtccgtagacttggctgcgcgggggggcggggcctattctcattgccggagcctctcgggagtaggagcaggaggaggcccgacccctcgcggccgtaggttttctgcaggcatgcgcgggcctcggcccaaccctgcgataatgcgaggaagatacggagtggctgccgggcgcggaggcagggtctcaacggatgactggccctgtgattgggtggccctgggagcttgcggttctgcctccaacattccgatcccgcctccttgccttactccgtccccggagcggggatcacctcaacttgactgtggtcccccagccctccaagaaatgcccataaaccaaggaggagagggtaaaaaatagaagaatacatggtagggaggaattccaaaaatgattacccattaaaaggcaggctggaaggccttcctggttttaagatggatcccccaaaatgaagggttgtgagtttagtttctctcctaaaatgaatgtatgcccaccagagcagacatcttccacgtggagaagctgcagctctggaaagagggtttaagatgctaggatgaggcaggcccagtcctcctccagaaaataagacaggccacaggagggcagagtggagtggaaatacccctaagttggaaccaagaattgcaggcatatgggatgtaagatgttctttcctatatatggtttccaaagggtgcccctatgatccattgtccccactgcccacaaatggctgacaaatatttattgggcacctactatgtgccaggcactgtgtaggtgctgaaaagtggccaagggccacccccgctgatgactccttgcattccctcccctcacaacaaagaactccactgtggggatgaagcgcttcttctagccactgctatcgctatttaagaaccctaaatctgtcacccataataaagctgatttgaagtgtta

SEQ ID NO: 20488 - DNA, 6745 bp, Homo sapiens
  source 1..6745: mol_type = unassigned DNA
agacgtgaggcttgcagcaggccgaggaggaagaagaggggcagtgggagcagaggaggtggctcctgccccagtgagagctctgagggtccctgcctgaagagggacagggaccggggcttggagaaggggctgtggaatgcagcccccttcactgctgctgctgctgctgctgctgctgctgctatgtgtctcagtggtcagacccagagggctgctgtgtgggagtttcccagaaccctgtgccaatggaggcacctgcctgagcctgtctctgggacaagggacctgccagtgtgcccctggcttcctgggtgagacgtgccagtttcctgacccctgccagaacgcccagctctgccaaaatggaggcagctgccaagccctgcttcccgctcccctagggctccccagctctccctctccattgacacccagcttcttgtgcacttgcctccctggcttcactggtgagagatgccaggccaagcttgaagacccttgtcctccctccttctgttccaaaaggggccgctgccacatccaggcctcgggccgcccacagtgctcctgcatgcctggatggacaggtgagcagtgccagcttcgggacttctgttcagccaacccatgtgttaatggaggggtgtgtctggccacatacccccagatccagtgccactgcccaccgggcttcgagggccatgcctgtgaacgtgatgtcaacgagtgcttccaggacccaggaccctgccccaaaggcacctcctgccataacaccctgggctccttccagtgcctctgccctgtggggcaggagggtccacgttgtgagctgcgggcaggaccctgccctcctaggggctgttcgaatgggggcacctgccagctgatgccagagaaagactccacctttcacctctgcctctgtcccccaggtttcataggcccagactgtgaggtgaatccagacaactgtgtcagccaccagtgtcagaatgggggcacttgccaggatgggctggacacctacacctgcctctgcccagaaacctggacaggctgggactgctccgaagatgtggatgagtgtgagacccagggtccccctcactgcagaaacgggggcacctgccagaactctgctggtagctttcactgcgtgtgtgtgagtggctggggcggcacaagctgtgaggagaacctggatgactgtattgctgccacctgtgccccgggatccacctgcattgaccgggtgggctctttctcctgcctctgcccacctggacgcacaggactcctgtgccacttggaagacatgtgtctgagccagccgtgccatggggatgcccaatgcagcaccaaccccctcacaggctccacactctgcctgtgtcagcctggctattcggggcccacctgccaccaggacctggacgagtgtctgatggcccagcaaggcccaagtccctgtgaacatggcggttcctgcctcaacactcctggctccttcaactgcctctgtccacctggctacacaggctcccgttgtgaggctgatcacaatgagtgcctctcccagccctgccacccaggaagcacctgtctggacctacttgccaccttccactgcctctgcccgccaggcttagaagggcagctctgtgaggtggagaccaacgagtgtgcctcagctccctgcctgaaccacgcggattgccatgacctgctcaacggcttccagtgcatctgcctgcctggattctccggcacccgatgtgaggaggatatcgatgagtgcagaagctctccctgtgccaatggtgggcagtgccaggaccagcctggagccttccactgcaagtgtctcccaggctttgaagggccacgctgtcaaacagaggtggatgagtgcctgagtgacccatgtcccgttggagccagctgccttgatcttccaggagccttcttttgcctctgcccctctggtttcacaggccagctctgtgaggttcccctgtgtgctcccaacctgtgccagcccaagcagatatgtaaggaccagaaagacaaggccaactgcctctgtcctgatggaagccctggctgtgccccacctgaggacaactgcacctgccaccacgggcactgccagagatcctcatgtgtgtgtgacgtgggttggacggggccagagtgtgaggcagagctagggggctgcatctctgcaccctgtgcccatggggggacctgctacccccagccctctggctacaactgcacctgccctacaggctacacaggacccacctgtagtgaggagatgacagcttgtcactcagggccatgtctcaatggcggctcctgcaaccctagccctggaggctactactgcacctgccctccaagccacacagggccccagtgccaaaccagcactgactactgtgtgtctgccccgtgcttcaatgggggtacctgtgtgaacaggcctggcaccttctcctgcctctgtgccatgggcttccagggcccgcgctgtgagggaaagctccgccccagctgtgcagacagcccctgtaggaatagggcaacctgccaggacagccctcagggtccccgctgcctctgccccactggctacaccggaggcagctgccagactctgatggacttatgtgcccagaagccctgcccacgcaattcccactgcctccagactgggccctccttccactgcttgtgcctccagggatggaccgggcctctctgcaaccttccactgtcctcctgccagaaggctgcactgagccaaggcatagacgtctcttccctttgccacaatggaggcctctgtgtcgacagcggcccctcctatttctgccactgcccccctggattccaaggcagcctgtgccaggatcacgtgaacccatgtgagtccaggccttgccagaacggggccacctgcatggcccagcccagtgggtatctctgccagtgtgccccaggctacgatggacagaactgctcaaaggaactcgatgcttgtcagtcccaaccctgtcacaaccatggaacctgtactcccaaacctggaggcttccactgtgcctgccctccaggctttgtggggctacgctgtgagggagacgtggacgagtgtctggaccagccctgccaccccacaggcactgcagcctgccactctctggccaatgccttctactgccagtgtctgcctggacacacaggccagtggtgtgaggtggagatagacccctgccacagccaaccctgctttcatggagggacctgtgaggccacagcaggatcacccctgggtttcatctgccactgccccaagggttttgaaggccccacctgcagccacagggccccttcctgcggcttccatcactgccaccacggaggcctgtgtctgccctcccctaagccaggcttcccaccacgctgtgcctgcctcagtggctatgggggtcctgactgcctgaccccaccagctcctaaaggctgtggccctccctccccatgcctatacaatggcagctgctcagagaccacgggcttggggggcccaggctttcgatgctcctgccctcacagctctccagggccccggtgtcagaaacccggagccaaggggtgtgagggcagaagtggagatggggcctgcgatgctggctgcagtggcccgggaggaaactgggatggaggggactgctctctgggagtcccagacccctggaagggctgcccctcccactctcggtgctggcttctcttccgggacgggcagtgccacccacagtgtgactctgaagagtgtctgtttgatggctacgactgtgagacccctccagcctgcactccagcctatgaccagtactgccatgatcacttccacaacgggcactgtgagaaaggctgcaacactgcagagtgtggctgggatggaggtgactgcaggcctgaagatggggacccagagtgggggccctccctggccctgctggtggtactgagccccccagccctagaccagcagctgtttgccctggcccgggtgctgtccctgactctgagggtaggactctgggtaaggaaggatcgtgatggcagggacatggtgtacccctatcctggggcccgggctgaagaaaagctaggaggaactcgggaccccacctatcaggagagagcagcccctcaaacgcagcccctgggcaaggagaccgactccctcagtgctgggtttgtggtggtcatgggtgtggatttgtcccgctgtggccctgaccacccggcatcccgctgtccctgggaccctgggcttctactccgcttccttgctgcgatggctgcagtgggagccctggagcccctgctgcctggaccactgctggctgtccaccctcatgcagggaccgcaccccctgccaaccagcttccctggcctgtgctgtgctccccagtggccggggtgattctcctggccctaggggctcttctcgtcctccagctcatccggcgtcgacgccgagagcatggagctctctggctgccccctggtttcactcgacggcctcggactcagtcagctccccaccgacgccggcccccactaggcgaggacagcattggtctcaaggcactgaagccaaaggcagaagttgatgaggatggagttgtgatgtgctcaggccctgaggagggagaggaggtgggccaggctgaagaaacaggcccaccctccacgtgccagctctggtctctgagtggtggctgtggggcgctccctcaggcagccatgctaactcctccccaggaatctgagatggaagcccctgacctggacacccgtggacctgatggggtgacacccctgatgtcagcagtttgctgtggggaagtacagtccgggaccttccaaggggcatggttgggatgtcctgagccctgggaacctctgctggatggaggggcctgtccccaggctcacaccgtgggcactggggagacccccctgcacctggctgcccgattctcccggccaaccgctgcccgccgcctccttgaggctggagccaaccccaaccagccagaccgggcagggcgcacaccccttcatgctgctgtggctgctgatgctcgggaggtctgccagcttctgctccgtagcagacaaactgcagtggacgctcgcacagaggacgggaccacacccttgatgctggctgccaggctggcggtggaagacctggttgaagaactgattgcagcccaagcagacgtgggggccagagataaatgggggaaaactgcgctgcactgggctgctgccgtgaacaacgcccgagccgcccgctcgcttctccaggccggagccgataaagatgcccaggacaacagggagcagacgccgctattcctggcggcgcgggaaggagcggtggaagtagcccagctactgctggggctgggggcagcccgagagctgcgggaccaggctgggctagcgccggcggacgtcgctcaccaacgtaaccactgggatctgctgacgctgctggaaggggctgggccaccagaggcccgtcacaaagccacgccgggccgcgaggctgggcccttcccgcgcgcacggacggtgtcagtaagcgtgcccccgcatgggggcggggctctgccgcgctgccggacgctgtcagccggagcaggccctcgtgggggcggagcttgtctgcaggctcggacttggtccgtagacttggctgcgcgggggggcggggcctattctcattgccggagcctctcgggagtaggagcaggaggaggcccgacccctcgcggccgtaggttttctgcaggcatgcgcgggcctcggcccaaccctgcgataatgcgaggaagatacggagtggctgccgggcgcggaggcagggtctcaacggatgactggccctgtgattgggtggccctgggagcttgcggttctgcctccaacattccgatcccgcctccttgccttactccgtccccggagcggggatcacctcaacttgactgtggtcccccagccctccaagaaatgcccataaaccaaggaggagagggtaaaaaatagaagaatacatggtagggaggaattccaaaaatgattacccattaaaaggcaggctggaaggccttcctggttttaagatggatcccccaaaatgaagggttgtgagtttagtttctctcctaaaatgaatgtatgcccaccagagcagacatcttccacgtggagaagctgcagctctggaaagagggtttaagatgctaggatgaggcaggcccagtcctcctccagaaaataagacaggccacaggagggcagagtggagtggaaatacccctaagttggaaccaagaattgcaggcatatgggatgtaagatgttctttcctatatatggtttccaaagggtgcccctatgatccattgtccccactgcccacaaatggctgacaaatatttattgggcacctactatgtgccaggcactgtgtaggtgctgaaaagtggccaagggccacccccgctgatgactccttgcattccctcccctcacaacaaagaactccactgtggggatgaagcgcttcttctagccactgctatcgctatttaagaaccctaaatctgtcacccataataaagctgatttgaagtgtta

SEQ ID NO: 20489 - DNA, 957 bp, Homo sapiens; identical to SEQ ID NO: 20486
  source 1..957: mol_type = unassigned DNA

SEQ ID NO: 20490 - DNA, 957 bp, Homo sapiens; identical to SEQ ID NO: 20486
  source 1..957: mol_type = unassigned DNA

SEQ ID NO: 20491 - DNA, 957 bp, Homo sapiens; identical to SEQ ID NO: 20486
  source 1..957: mol_type = unassigned DNA

SEQ ID NO: 20492 - DNA, 957 bp, Homo sapiens; identical to SEQ ID NO: 20486
  source 1..957: mol_type = unassigned DNA

SEQ ID NO: 20493 - DNA, 957 bp, Homo sapiens; identical to SEQ ID NO: 20486
  source 1..957: mol_type = unassigned DNA

SEQ ID NO: 20494 - DNA, 2324 bp, Homo sapiens
  source 1..2324: mol_type = unassigned DNA
ctcccccctccgccgagcccgggcggcggcggcggcacatctaacgcgcgggcacccgggccgccgcggcccccgcaaataagcccagcctcggcccccgccgctcattggcgcgggccgcagccagcgcacccagaccctgcgctgccctcggacggccgggcgcggagccccagctgcggaggccgacggcacccggccccgagcgcctcgacgccgagccgcgcgcgccttctccgccaggcccggcgggcgggagcgggggcgagggagcaggagcggccagtgcccccgacacccccggcccggcacccccggcccggcatcccccgccgccgccgccgccgcctcaaggccgcccgctccccgcaggtggacgcggccatgggccgaggggtgcgcgtgctgctgctgctgagcctgctgcactgcgccgggggcagcgagggcaggaagacctggcggcgccggggtcagcagccgcctcctcccccgcggaccgaggcggcgccggcggccggacagcccgtggagagcttcccgctggacttcacggccgtggagggtaacatggacagcttcatggcgcaagtcaagagcctggcgcagtccctgtacccctgctccgcgcagcagctcaacgaggacctgcgcctgcacctcctactcaacacctcggtgacctgcaacgacggcagccccgccggctactacctgaaggagtccaggggcagccggcggtggctcctcttcctggaaggcggctggtactgcttcaaccgcgagaactgcgactccagatacgacaccatgcggcgcctcatgagctcccgggactggccgcgcactcgcacaggcacagggatcctgtcctcacagccggaggagaacccctactggtggaacgcaaacatggtcttcatcccctactgctccagtgatgtttggagcggggcttcatccaagtctgagaagaacgagtacgccttcatgggcgccctcatcatccaggaggtggtgcgggagcttctgggcagagggctgagcggggccaaggtgctgctgctggccgggagcagcgcggggggcaccggggtgctcctgaatgtggaccgtgtggctgagcagctggagaagctgggctacccagccatccaggtgcgaggcctggctgactccggctggttcctggacaacaagcagtatcgccacacagactgcgtcgacacgatcacgtgcgcgcccacggaggccatccgccgtggcatcaggtactggaacggggtggtcccggagcgctgccgacgccagttccaggagggcgaggagtggaactgcttctttggctacaaggtctacccgaccctgcgctgccctgtgttcgtggtgcagtggctgtttgacgaggcacagctgacggtggacaacgtgcacctgacggggcagccggtgcaggagggcctgcggctgtacatccagaacctcggccgcgagctgcgccacacactcaaggacgtgccggccagctttgcccccgcctgcctctcccatgagatcatcatccggagccactggacggatgtccaggtgaaggggacgtcgctgccccgagcactgcactgctgggacaggagcctccatgacagccacaaggccagcaagacccccctcaagggctgccccgtccacctggtggacagctgcccctggccccactgcaacccctcatgccccaccgtccgagaccagttcacggggcaagagatgaacgtggcccagttcctcatgcacatgggcttcgacatgcagacggtggcccagccgcagggactggagcccagtgagctgctggggatgctgagcaacggaagctaggcagactgtctggaggaggagccggcactgaggggcccagacacccgctgccccagtgccacctcaccccccaccagcaggccctcccgtctcttcgggacagggccccagccgtcccccctgtctgggtctgcccactgccctcctgccccggctttccctgcccctctcccacagcccagccagagacaagggacctgctgtcatccccatctgtggcctgggggtccttcctgacaacgagggggtagccagaagagaagcactggattcctcagtccaccagctcagacagcacccaccggccccacccatcaagcccttttatattattttataaagtgacttttttattactttaattttttaaaaaaaggaaaataagaatatatgatgaatgatattgttttgtaactttttaaaaatgattttaaagagacaaaaaagaa

SEQ ID NO: 20495 - DNA, 996 bp, Homo sapiens
  source 1..996: mol_type = unassigned DNA
agagggggagcgcagccgagccgggcgcaccagcgggacggcgcagggccaggggcgctgagaggacggggccactgggccgcccgcgctggccgcggtggacgcggccatgggccgaggggtgcgcgtgctgctgctgctgagcctgctgcactgcgccgggggcagcgagggcaggaagacctggcggcgccggggtcagcagccgcctcctcccccgcggaccgaggcggcgccggcggccggacagcccgtggagagcttcccgctggacttcacggccgtggagggtaacatggacagcttcatggcgcaagtcaagagcctggcgcagtccctgtacccctgctccgcgcagcagctcaacgaggacctgcgcctgcacctcctactcaacacctcggtgacctgcaacgacggcagccccgccggctactacctgaaggagtccaggggcagccggcggtggctcctcttcctggaaggcggctggtactgcttcaaccgcgagaactgcgactccagatacgacaccatgcggcgcctcatgagctcccgggactggccgcgcactcgcacaggcacagggatcctgtcctcacagccggaggagaacccctactggtggaacgcaaacatggtcttcatcccctactgctccagtgatgtttggagcggggcttcatccaagtctgagaagaacgagtacgccttcatgggcgccctcatcatccaggaggtggtgcgggagcttctgggcagagggctgagcggggccaaggtgctgctgctggccgggagcagcgcggggggcaccggggtgctcctgaatgtggaccgtgtggctgagcagctggagaagctgggctacccagccatccaggtgcgaggcctggctgactccggctggttcctggacaacaagcagtatcgccacacagactgcgtcgacacgatcacgtgcgcgcccacggaggccatccgccgtggcatcag

SEQ ID NO: 20496 - DNA, 5048 bp, Homo sapiens
  source 1..5048: mol_type = unassigned DNA
cttggctgttcctgaggcctggcctggctccccgctgaccccttcccagacctgggatggcggaggccggcctgaggggctggctgctgtgggccctgctcctgcgcttggcccagagtgagccttacacaaccatccaccagcctggctactgcgccttctatgacgaatgtgggaagaacccagagctgtctggaagcctcatgacactctccaacgtgtcctgcctgtccaacacgccggcccgcaagatcacaggtgatcacctgatcctattacagaagatctgcccccgcctctacaccggccccaacacccaagcctgctgctccgccaagcagctggtatcactggaagcgagtctgtcgatcaccaaggccctcctcacccgctgcccagcctgctctgacaattttgtgaacctgcactgccacaacacgtgcagccccaatcagagcctcttcatcaatgtgacccgcgtggcccagctaggggctggacaactcccagctgtggtggcctatgaggccttctaccagcatagctttgccgagcagagctatgactcctgcagccgtgtgcgcgtccctgcagctgccacgctggctgtgggcaccatgtgtggcgtgtatggctctgccctttgcaatgcccagcgctggctcaacttccagggagacacaggcaatggtctggccccactggacatcaccttccacctcttggagcctggccaggccgtggggagtgggattcagcctctgaatgagggggttgcacgttgcaatgagtcccaaggtgacgacgtggcgacctgctcctgccaagactgtgctgcatcctgtcctgccatagcccgcccccaggccctcgactccaccttctacctgggccagatgccgggcagtctggtcctcatcatcatcctctgctctgtcttcgctgtggtcaccatcctgcttgtgggattccgtgtggcccccgccagggacaaaagcaagatggtggaccccaagaagggcaccagcctctctgacaagctcagcttctccacccacaccctccttggccagttcttccagggctggggcacgtgggtggcttcgtggcctctgaccatcttggtgctatctgtcatcccggtggtggccttggcagcgggcctggtctttacagaactcactacggaccccgtggagctgtggtcggcccccaacagccaagcccggagtgagaaagctttccatgaccagcatttcggccccttcttccgaaccaaccaggtgatcctgacggctcctaaccggtccagctacaggtatgactctctgctgctggggcccaagaacttcagcggaatcctggacctggacttgctgctggagctgctagagctgcaggagaggctgcggcacctccaggtatggtcgcccgaagcacagcgcaacatctccctgcaggacatctgctacgcccccctcaatccggacaataccagtctctacgactgctgcatcaacagcctcctgcagtatttccagaacaaccgcacgctcctgctgctcacagccaaccagacactgatggggcagacctcccaagtcgactggaaggaccattttctgtactgtgccaatgccccgctcaccttcaaggatggcacagccctggccctgagctgcatggctgactacggggcccctgtcttccccttccttgccattggggggtacaaaggaaaggactattctgaggcagaggccctgatcatgacgttctccctcaacaattaccctgccggggacccccgtctggcccaggccaagctgtgggaggaggccttcttagaggaaatgcgagccttccagcgtcggatggctggcatgttccaggtcacgttcatggctgagcgctctctggaagacgagatcaatcgcaccacagctgaagacctgcccatctttgccaccagctacattgtcatattcctgtacatctctctggccctgggcagctattccagctggagccgagtgatggtggactccaaggccacgctgggcctcggcggggtggccgtggtcctgggagcagtcatggctgccatgggcttcttctcctacttgggtatccgctcctccctggtcatcctgcaagtggttcctttcctggtgctgtccgtgggggctgataacatcttcatctttgttctcgagtaccagaggctgccccggaggcctggggagccacgagaggtccacattgggcgagccctaggcagggtggctcccagcatgctgttgtgcagcctctctgaggccatctgcttcttcctaggggccctgacccccatgccagctgtgcggacctttgccctgacctctggccttgcagtgatccttgacttcctcctgcagatgtcagcctttgtggccctgctctccctggacagcaagaggcaggaggcctcccggttggacgtctgctgctgtgtcaagccccaggagctgcccccgcctggccagggagaggggctcctgcttggcttcttccaaaaggcttatgcccccttcctgctgcactggatcactcgaggtgttgtgctgctgctgtttctcgccctgttcggagtgagcctctactccatgtgccacatcagcgtgggactggaccaggagctggccctgcccaaggactcgtacctgcttgactatttcctctttctgaaccgctacttcgaggtgggggccccggtgtactttgttaccaccttgggctacaacttctccagcgaggctgggatgaatgccatctgctccagtgcaggctgcaacaacttctccttcacccagaagatccagtatgccacagagttccctgagcagtcttacctggccatccctgcctcctcctgggtggatgacttcattgactggctgaccccgtcctcctgctgccgcctttatatatctggccccaataaggacaagttctgcccctcgaccgtcaactctctgaactgcctaaagaactgcatgagcatcacgatgggctctgtgaggccctcggtggagcagttccataagtatcttccctggttcctgaacgaccggcccaacatcaaatgtcccaaaggcggcctggcagcatacagcacctctgtgaacttgacttcagatggccaggttttagacacagttgccattctgtcacccaggctggagtacagtggcacaatctcggctcactgcaacctctacctcctggattcaacctccaggttcatggcctatcacaagcccctgaaaaactcacaggattacacagaagctctgcgggcagctcgagagctggcagccaacatcactgctgacctgcggaaagtgcctggaacagacccggcttttgaggtcttcccctacacgatcaccaatgtgttttatgagcagtacctgaccatcctccctgaggggctcttcatgctcagcctctgccttgtgcccaccttcgctgtctcctgcctcctgctgggcctggacctgcgctccggcctcctcaacctgctctccattgtcatgatcctcgtggacactgtcggcttcatggccctgtggggcatcagttacaatgctgtgtccctcatcaacctggtctcggcggtgggcatgtctgtggagtttgtgtcccacattacccgctcctttgccatcagcaccaagcccacctggctggagagggccaaagaggccaccatctctatgggaagtgcggtgtttgcaggtgtggccatgaccaacctgcctggcatccttgtcctgggcctcgccaaggcccagctcattcagatcttcttcttccgcctcaacctcctgatcactctgctgggcctgctgcatggcttggtcttcctgcccgtcatcctcagctacgtggggcctgacgttaacccggctctggcactggagcagaagcgggctgaggaggcggtggcagcagtcatggtggcctcttgcccaaatcacccctcccgagtctccacagctgacaacatctatgtcaaccacagctttgaaggttctatcaaaggtgctggtgccatcagcaacttcttgcccaacaatgggcggcagttctgatacagccagaggccctgtctaggctctatggccctgaaccaaagggttatggggatcttccttgtgactgccccttgacacacgccctcctcaaatcctaggggaggccattcccatgagactgcctgtcactggaggatggcctgctcttgaggtatccaggcagcaccactgatggctcctctgctcccatagtgggtccccagtttccaagtcacctaggccttgggcagtgcctcctcctgggcctgggtctggaagttggcaggaacagacacactccatgtttgtcccacactcactcactttcctaggagcccacttctcatccaacttttcccttctcagttcctctctcgaaagtcttaattctgtgtcagtaagtctttaacacgtagcagtgtccctgagaacacagacaatgaccactaccctgggtgtgatatcacaggaggccagagagaggcaaaggctcaggccaagagccaacgctgtgggaggccggtcggcagccactccctccagggcgcacctgcaggtctgccatccacggccttttctggcaagagaagggcccaggaaggatgctctcataaggcccaggaaggatgctctcataagcaccttggtcatggattagcccctcctggaaaatggtgttgggtttggtctccagctccaatacttattaaggctgttgctgccagtcaaggccacccaggagtctgaaggctgggagctcttggggctgggctggtcctcccatcttcacctcgggcctggatcccaggcctcaaaccagcccaacccgagcttttggacagctctccagaagcatgaactgcagtggagatgaagatcctggctctgtgctgtgcacataggtgtttaataaacatttgttggcagaaa

SEQ ID NO: 20497 - DNA, 4141 bp, Homo sapiens
  source 1..4141: mol_type = unassigned DNA
cttggctgttcctgaggcctggcctggctccccgctgaccccttcccagacctgggatggcggaggccggcctgaggggctggctgctgtgggccctgctcctgcgcttggcccagagtgagccttacacaaccatccaccagcctggctactgcgccttctatgacgaatgtgggaagaacccagagctgtctggaagcctcatgacactctccaacgtgtcctgcctgtccaacacgccggcccgcaagatcacaggtgatcacctgatcctattacagaagatctgcccccgcctctacaccggccccaacacccaagcctgctgctccgccaagcagctggtatcactggaagcgagtctgtcgatcaccaaggccctcctcacccgctgcccagcctgctctgacaattttgtgaacctgcactgccacaacacgtgcagccccaatcagagcctcttcatcaatgtgacccgcgtggcccagctaggggctggacaactcccagctgtggtggcctatgaggccttctaccagcatagctttgccgagcagagctatgactcctgcagccgtgtgcgcgtccctgcagctgccacgctggctgtgggcaccatgtgtggcgtgtatggctctgccctttgcaatgcccagcgctggctcaacttccagggagacacaggcaatggtctggccccactggacatcaccttccacctcttggagcctggccaggccgtggggagtgggattcagcctctgaatgagggggttgcacgttgcaatgagtcccaaggtgacgacgtggcgacctgctcctgccaagactgtgctgcatcctgtcctgccatagcccgcccccaggccctcgactccaccttctacctgggccagatgccgggcagtctggtcctcatcatcatcctctgctctgtcttcgctgtggtcaccatcctgcttgtgggattccgtgtggcccccgccagggacaaaagcaagatggtggaccccaagaagggcaccagcctctctgacaagctcagcttctccacccacaccctccttggccagttcttccagggctggggcacgtgggtggcttcgtggcctctgaccatcttggtgctatctgtcatcccggtggtggccttggcagcgggcctggtctttacagaactcactacggaccccgtggagctgtggtcggcccccaacagccaagcccggagtgagaaagctttccatgaccagcatttcggccccttcttccgaaccaaccaggtgatcctgacggctcctaaccggtccagctacaggtatgactctctgctgctggggcccaagaacttcagcggaatcctggacctggacttgctgctggagctgctagagctgcaggagaggctgcggcacctccaggtatggtcgcccgaagcacagcgcaacatctccctgcaggacatctgctacgcccccctcaatccggacaataccagtctctacgactgctgcatcaacagcctcctgcagtatttccagaacaaccgcacgctcctgctgctcacagccaaccagacactgatggggcagacctcccaagtcgactggaaggaccattttctgtactgtgccaatgccccgctcaccttcaaggatggcacagccctggccctgagctgcatggctgactacggggcccctgtcttccccttccttgccattggggggtacaaaggaaaggactattctgaggcagaggccctgatcatgacgttctccctcaacaattaccctgccggggacccccgtctggcccaggccaagctgtgggaggaggccttcttagaggaaatgcgagccttccagcgtcggatggctggcatgttccaggtcacgttcatggctgagcgctctctggaagacgagatcaatcgcaccacagctgaagacctgcccatctttgccaccagctacattgtcatattcctgtacatctctctggccctgggcagctattccagctggagccgagtgatggtggactccaaggccacgctgggcctcggcggggtggccgtggtcctgggagcagtcatggctgccatgggcttcttctcctacttgggtatccgctcctccctggtcatcctgcaagtggttcctttcctggtgctgtccgtgggggctgataacatcttcatctttgttctcgagtaccagaggctgccccggaggcctggggagccacgagaggtccacattgggcgagccctaggcagggtggctcccagcatgctgttgtgcagcctctctgaggccatctgcttcttcctaggggccctgacccccatgccagctgtgcggacctttgccctgacctctggccttgcagtgatccttgacttcctcctgcagatgtcagcctttgtggccctgctctccctggacagcaagaggcaggaggcctcccggttggacgtctgctgctgtgtcaagccccaggagctgcccccgcctggccagggagaggggctcctgcttggcttcttccaaaaggcttatgcccccttcctgctgcactggatcactcgaggtgttgtgctgctgctgtttctcgccctgttcggagtgagcctctactccatgtgccacatcagcgtgggactggaccaggagctggccctgcccaaggactcgtacctgcttgactatttcctctttctgaaccgctacttcgaggtgggggccccggtgtactttgttaccaccttgggctacaacttctccagcgaggctgggatgaatgccatctgctccagtgcaggctgcaacaacttctccttcacccagaagatccagtatgccacagagttccctgagcagtcttacctggccatccctgcctcctcctgggtggatgacttcattgactggctgaccccgtcctcctgctgccgcctttatatatctggccccaataaggacaagttctgcccctcgaccgtcaactctctgaactgcctaaagaactgcatgagcatcacgatgggctctgtgaggccctcggtggagcagttccataagtatcttccctggttcctgaacgaccggcccaacatcaaatgtcccaaaggcggcctggcagcatacagcacctctgtgaacttgacttcagatggccaggttttagcctccaggttcatggcctatcacaagcccctgaaaaactcacaggattacacagaagctctgcgggcagctcgagagctggcagccaacatcactgctgacctgcggaaagtgcctggaacagacccggcttttgaggtcttcccctacacgatcaccaatgtgttttatgagcagtacctgaccatcctccctgaggggctcttcatgctcagcctctgccttgtgcccaccttcgctgtctcctgcctcctgctgggcctggacctgcgctccggcctcctcaacctgctctccattgtcatgatcctcgtggacactgtcggcttcatggccctgtggggcatcagttacaatgctgtgtccctcatcaacctggtctcggcggtgggcatgtctgtggagtttgtgtcccacattacccgctcctttgccatcagcaccaagcccacctggctggagagggccaaagaggccaccatctctatgggaagtgcggtgtttgcaggtgtggccatgaccaacctgcctggcatccttgtcctgggcctcgccaaggcccagctcattcagatcttcttcttccgcctcaacctcctgatcactctgctgggcctgctgcatggcttggtcttcctgcccgtcatcctcagctacgtggggcctgacgttaacccggctctggcactggagcagaagcgggctgaggaggcggtggcagcagtcatggtggcctcttgcccaaatcacccctcccgagtctccacagctgacaacatctatgtcaaccacagctttgaaggttctatcaaaggtgctggtgccatcagcaacttcttgcccaacaatgggcggcagttctgatacagccagaggccctgtctaggctctatggccctgaaccaaagggttatggggatcttccttgtgactgccccttgacacacgcc

SEQ ID NO: 20498 - DNA, 4001 bp, Homo sapiens
  source 1..4001: mol_type = unassigned DNA
tggctgttcctgaggcctggcctggctccccgctgaccccttcccagacctgggatggcggaggccggcctgaggggctggctgctgtgggccctgctcctgcgcttggcccagagtgagccttacacaaccatccaccagcctggctactgcgccttctatgacgaatgtgggaagaacccagagctgtctggaagcctcatgacactctccaacgtgtcctgcctgtccaacacgccggcccgcaagatcacaggtgatcacctgatcctattacagaagatctgcccccgcctctacaccggccccaacacccaagcctgctgctccgccaagcagctggtatcactggaagcgagtctgtcgatcaccaaggccctcctcacccgctgcccagcctgctctgacaattttgtgaacctgcactgccacaacacgtgcagccccaatcagagcctcttcatcaatgtgacccgcgtggcccagctaggggctggacaactcccagctgtggtggcctatgaggccttctaccagcatagctttgccgagcagagctatgactcctgcagccgtgtgcgcgtccctgcagctgccacgctggctgtgggcaccatgtgtggcgtgtatggctctgccctttgcaatgcccagcgctggctcaacttccagggagacacaggcaatggtctggccccactggacatcaccttccacctcttggagcctggccaggccgtggggagtgggattcagcctctgaatgagggggttgcacgttgcaatgagtcccaaggtgacgacgtggcgacctgctcctgccaagactgtgctgcatcctgtcctgccatagcccgcccccaggccctcgactccaccttctacctgggccagatgccgggcagtctggtcctcatcatcatcctctgctctgtcttcgctgtggtcaccatcctgcttgtgggattccgtgtggcccccgccagggacaaaagcaagatggtggaccccaagaagggcaccagcctctctgacaagctcagcttctccacccacaccctccttggccagttcttccagggctggggcacgtgggtggcttcgtggcctctgaccatcttggtgctatctgtcatcccggtggtggccttggcagcgggcctggtctttacagaactcactacggaccccgtggagctgtggtcggcccccaacagccaagcccggagtgagaaagctttccatgaccagcatttcggccccttcttccgaaccaaccaggtgatcctgacggctcctaaccggtccagctacaggtatgactctctgctgctggggcccaagaacttcagcggaatcctggacctggacttgctgctggagctgctagagctgcaggagaggctgcggcacctccaggtatggtcgcccgaagcacagcgcaacatctccctgcaggacatctgctacgcccccctcaatccggacaataccagtctctacgactgctgcatcaacagcctcctgcagtatttccagaacaaccgcacgctcctgctgctcacagccaaccagacactgatggggcagacctcccaagtcgactggaaggaccattttctgtactgtgccaatgccccgctcaccttcaaggatggcacagccctggccctgagctgcatggctgactacggggcccctgtcttccccttccttgccattggggggtacaaaggaaaggactattctgaggcagaggccctgatcatgacgttctccctcaacaattaccctgccggggacccccgtctggcccaggccaagctgtgggaggaggccttcttagaggaaatgcgagccttccagcgtcggatggctggcatgttccaggtcacgttcatggctgagcgctctctggaagacgagatcaatcgcaccacagctgaagacctgcccatctttgccaccagctacattgtcatattcctgtacatctctctggccctgggcagctattccagctggagccgagtgatggtggactccaaggccacgctgggcctcggcggggtggccgtggtcctgggagcagtcatggctgccatgggcttcttctcctacttgggtatccgctcctccctggtcatcctgcaagtggttcctttcctggtgctgtccgtgggggctgataacatcttcatctttgttctcgagtaccagaggctgccccggaggcctggggagccacgagaggtccacattgggcgagccctaggcagggtggctcccagcatgctgttgtgcagcctctctgaggccatctgcttcttcctaggggccctgacccccatgccagctgtgcggacctttgccctgacctctggccttgcagtgatccttgacttcctcctgcagatgtcagcctttgtggccctgctctccctggacagcaagaggcaggaggcctcccggttggacgtctgctgctgtgtcaagccccaggagctgcccccgcctggccagggagaggggctcctgcttggcttcttccaaaaggcttatgcccccttcctgctgcactggatcactcgaggtgttgtggtgggggccccggtgtactttgttaccaccttgggctacaacttctccagcgaggctgggatgaatgccatctgctccagtgcaggctgcaacaacttctccttcacccagaagatccagtatgccacagagttccctgagcagtcttacctggccatccctgcctcctcctgggtggatgacttcattgactggctgaccccgtcctcctgctgccgcctttatatatctggccccaataaggacaagttctgcccctcgaccgtcaactctctgaactgcctaaagaactgcatgagcatcacgatgggctctgtgaggccctcggtggagcagttccataagtatcttccctggttcctgaacgaccggcccaacatcaaatgtcccaaaggcggcctggcagcatacagcacctctgtgaacttgacttcagatggccaggttttagcctccaggttcatggcctatcacaagcccctgaaaaactcacaggattacacagaagctctgcgggcagctcgagagctggcagccaacatcactgctgacctgcggaaagtgcctggaacagacccggcttttgaggtcttcccctacacgatcaccaatgtgttttatgagcagtacctgaccatcctccctgaggggctcttcatgctcagcctctgccttgtgcccaccttcgctgtctcctgcctcctgctgggcctggacctgcgctccggcctcctcaacctgctctccattgtcatgatcctcgtggacactgtcggcttcatggccctgtggggcatcagttacaatgctgtgtccctcatcaacctggtctcggcggtgggcatgtctgtggagtttgtgtcccacattacccgctcctttgccatcagcaccaagcccacctggctggagagggccaaagaggccaccatctctatgggaagtgcggtgtttgcaggtgtggccatgaccaacctgcctggcatccttgtcctgggcctcgccaaggcccagctcattcagatcttcttcttccgcctcaacctcctgatcactctgctgggcctgctgcatggcttggtcttcctgcccgtcatcctcagctacgtggggcctgacgttaacccggctctggcactggagcagaagcgggctgaggaggcggtggcagcagtcatggtggcctcttgcccaaatcacccctcccgagtctccacagctgacaacatctatgtcaaccacagctttgaaggttctatcaaaggtgctggtgccatcagcaacttcttgcccaacaatgggcggcagttctgatacagccagaggccctgtctaggctctatggccctgaaccaaagggttatggggatcttccttgtgactgccccttgacacacgcc

SEQ ID NO: 20499 - DNA, 1393 bp, Homo sapiens
  source 1..1393: mol_type = unassigned DNA
ggaggcgcgagccgcgccaaagtctgcaacggcctcaagtctcgacgccagcctaggcaaaaggcaatgtatctaaacgaaaagaaaataggctttctccgctctaccgcctcgggcagccacacctccacacttccggcggtgtaccggccaaatgccgcctgccagcaacttccgtcctcctagctaaaagcggaaaacagaggctcggaaccgctgcgtggttcttgctcttcactcggccgttttaaagggtgactctttcctgtcccggcctgcgtggtgtgggcttgtgggtctttgagacccgaaaattgagagcgttttcgcactccagcggctgctcctggcggctctgcggccgtcaccatgccacagaatgaatatattgaattacaccgtaaacgctatggataccgtttggattaccatgagaaaaagagaaagaaggaaagtcgagaggctcatgaacgttcaaagaaggcaaagaaaatgattggtctgaaggctaagctttaccataaacagcgtcatgctgagaaaatacaaatgaaaaagactatcaagatgcatgaaaagagaaacaccaaacaaaagaatgatgaaaagacaccacagggagcagtacctgcctatctgctggacagagagggacaatctcgagctaaagtactttccaatatgattaaacagaaaagaaaagagaaggcgggaaaatgggaagtccctctgcctaaagtacgtgcccagggagaaacagaagtattaaaagttattcgaacaggaaagagaaagaagaaggcatggaagagaatggttactaaagtgtgctttgttggagatggctttacaagaaaaccacctaaatatgaaagattcatcaggccaatgggcttgcgtttcaagaaagcccatgtaacacatcctgaactgaaagccaccttttgcctaccaatacttggtgtaaagaagaatccctcatccccactgtatacaactttgggtgttattaccaaaggtactgtcattgaagtaaatgtgagcgaattgggccttgtgacacaaggaggcaaagttatttggggaaaatatgcccaggttaccaacaatcctgaaaatgatggatgtataaatgcagtcttactggtttgacagcaatttcatatataattattgaggactacacaccaattgaagaaactgccattactgtgatgtttctgaatactaccaaacagccatacatgtctgcaatgaagagatttattaaattgtaaacattaaagtggtccagttttataaatggtctttattttgaaatacgctttgaccccatgttcataaaactgaatgattgaaaaaaagcaaatatacaaatatcctacttcatcaa

SEQ ID NO: 20500 - DNA, 2768 bp, Homo sapiens
  source 1..2768: mol_type = unassigned DNA
gaccggggtcggggcagggggcggggccgagcgggagaccagagagccggagccggatcccgatcccgagtccgagccgccgccgccatgagctgccccgtgcccgcctgctgcgcgctgctgctagtcctggggctctgccgggcgcgtccccggaacgcactgctgctcctcgcggatgacggaggctttgagagtggcgcgtacaacaacagcgccatcgccaccccgcacctggacgccttggcccgccgcagcctcctctttcgcaatgccttcacctcggtcagcagctgctctcccagccgcgccagcctcctcactggcctgccccagcatcagaatgggatgtacgggctgcaccaggacgtgcaccacttcaactccttcgacaaggtgcggagcctgccgctgctgctcagccaagctggtgtgcgcacaggcatcatcgggaagaagcacgtggggccggagaccgtgtacccgtttgactttgcgtacacggaggagaatggctccgtcctccaggtggggcggaacatcactagaattaagctgctcgtccggaaattcctgcagactcaggatgaccggcctttcttcctctacgtcgccttccacgacccccaccgctgtgggcactcccagccccagtacggaaccttctgtgagaagtttggcaacggagagagcggcatgggtcgtatcccagactggaccccccaggcctacgacccactggacgtgctggtgccttacttcgtccccaacaccccggcagcccgagccgacctggccgctcagtacaccaccgtcggccgcatggaccaaggagttggactggtgctccaggagctgcgtgacgccggtgtcctgaacgacacactggtgatcttcacgtccgacaacgggatccccttccccagcggcaggaccaacctgtactggccgggcactgctgaacccttactggtgtcatccccggagcacccaaaacgctggggccaagtcagcgaggcctacgtgagcctcctagacctcacgcccaccatcttggattggttctcgatcccgtaccccagctacgccatctttggctcgaagaccatccacctcactggccggtccctcctgccggcgctggaggccgagcccctctgggccaccgtctttggcagccagagccaccacgaggtcaccatgtcctaccccatgcgctccgtgcagcaccggcacttccgcctcgtgcacaacctcaacttcaagatgccctttcccatcgaccaggacttctacgtctcacccaccttccaggacctcctgaaccgcaccacagctggtcagcccacgggctggtacaaggacctccgtcattactactaccgggcgcgctgggagctctacgaccggagccgggacccccacgagacccagaacctggccaccgacccgcgctttgctcagcttctggagatgcttcgggaccagctggccaagtggcagtgggagacccacgacccctgggtgtgcgcccccgacggcgtcctggaggagaagctctctccccagtgccagcccctccacaatgagctgtgaccatcccaggaggcctgtgcacacatcccaggcatgtcccagacacatcccacacgtgtccgtgtggccggccagcctggggagtagtggcaacagcccttccgtccacactcccatccaaggagggttcttccttcctgtggggtcactcttgccattgcctggagggggaccagagcatgtgaccagagcatgtgcccagcccctccaccaccaggggcactgccgtcatggcaggggacacagttgtccttgtgtctgaaccatgtcccagcacgggaattctagacatacgtggtctgcggacagggcagcgcccccagcccatgacaagggagtcttgttttctggcttggtttggggacctgcaaatgggaggcctgaggccctcttcaggctttggcagccacagatacttctgaacccttcacagagagcaggcaggggcttcggtgccgcgtgggcagtacgcaggtcccaccgacactcacctgggagcacggcgcctggctcttaccagcgtctggcctagaggaagcctttgagcgacctttgggcaggtttctgcttcttctgttttgccccatggtcaagtccctgttccccaggcaggtttcagctgattggcagcaggctccctgagtgatgagcttgaacctgtggtgtttctgggcagaagcttatcttttttgagagtgtccgaagatgaaggcatggcgatgcccgtcctctggcttgggttaattcttcggtgacactggcattgctgggtggtgatgcccgtcctctggcttgggttaattcttcggtgacactggcgttgctgggtggcaatgcccatcctctgccttgggttaattcttcggtgacactggcgttgctgggtggcgatgcccgtcctctggcttgggttaattcttggatgacgtcggcgttgctgggagaatgtgccgttcctgccctgcctccacccacctcgggagcagaagcccggcctggacacccctcggcctggacacccctcgaaggagagggcgcttccttgagtaggtgggctccccttgcccttccctccctatcactccatactggggtgggctggaggaggccacaggccagctattgtaaaagctttttattttagtaaaatatacagaagttctttttctgaa

SEQ ID NO: 20501 - DNA, 2612 bp, Homo sapiens
  source 1..2612: mol_type = unassigned DNA
agagagccggagccggatcccgatcccgagtccgagccgccgccgccatgagctgccccgtgcccgcctgctgcgcgctgctgctagtcctggggctctgccgggcgcgtccccggaacgcactgctgctcctcgcggatgacggaggctttgagagtggcgcgtacaacaacagcgccatcgccaccccgcacctggacgccttggcccgccgcagcctcctctttcgcaatgccttcacctcggtcagcagctgctctcccagccgcgccagcctcctcactggcctgccccaggcatcatcgggaagaagcacgtggggccggagaccgtgtacccgtttgactttgcgtacacggaggagaatggctccgtcctccaggtggggcggaacatcactagaattaagctgctcgtccggaaattcctgcagactcaggatgaccggcctttcttcctctacgtcgccttccacgacccccaccgctgtgggcactcccagccccagtacggaaccttctgtgagaagtttggcaacggagagagcggcatgggtcgtatcccagactggaccccccaggcctacgacccactggacgtgctggtgccttacttcgtccccaacaccccggcagcccgagccgacctggccgctcagtacaccaccgtcggccgcatggaccaaggagttggactggtgctccaggagctgcgtgacgccggtgtcctgaacgacacactggtgatcttcacgtccgacaacgggatccccttccccagcggcaggaccaacctgtactggccgggcactgctgaacccttactggtgtcatccccggagcacccaaaacgctggggccaagtcagcgaggcctacgtgagcctcctagacctcacgcccaccatcttggattggttctcgatcccgtaccccagctacgccatctttggctcgaagaccatccacctcactggccggtccctcctgccggcgctggaggccgagcccctctgggccaccgtctttggcagccagagccaccacgaggtcaccatgtcctaccccatgcgctccgtgcagcaccggcacttccgcctcgtgcacaacctcaacttcaagatgccctttcccatcgaccaggacttctacgtctcacccaccttccaggacctcctgaaccgcaccacagctggtcagcccacgggctggtacaaggacctccgtcattactactaccgggcgcgctgggagctctacgaccggagccgggacccccacgagacccagaacctggccaccgacccgcgctttgctcagcttctggagatgcttcgggaccagctggccaagtggcagtgggagacccacgacccctgggtgtgcgcccccgacggcgtcctggaggagaagctctctccccagtgccagcccctccacaatgagctgtgaccatcccaggaggcctgtgcacacatcccaggcatgtcccagacacatcccacacgtgtccgtgtggccggccagcctggggagtagtggcaacagcccttccgtccacactcccatccaaggagggttcttccttcctgtggggtcactcttgccattgcctggagggggaccagagcatgtgaccagagcatgtgcccagcccctccaccaccaggggcactgccgtcatggcaggggacacagttgtccttgtgtctgaaccatgtcccagcacgggaattctagacatacgtggtctgcggacagggcagcgcccccagcccatgacaagggagtcttgttttctggcttggtttggggacctgcaaatgggaggcctgaggccctcttcaggctttggcagccacagatacttctgaacccttcacagagagcaggcaggggcttcggtgccgcgtgggcagtacgcaggtcccaccgacactcacctgggagcacggcgcctggctcttaccagcgtctggcctagaggaagcctttgagcgacctttgggcaggtttctgcttcttctgttttgccccatggtcaagtccctgttccccaggcaggtttcagctgattggcagcaggctccctgagtgatgagcttgaacctgtggtgtttctgggcagaagcttatcttttttgagagtgtccgaagatgaaggcatggcgatgcccgtcctctggcttgggttaattcttcggtgacactggcattgctgggtggtgatgcccgtcctctggcttgggttaattcttcggtgacactggcgttgctgggtggcaatgcccatcctctgccttgggttaattcttcggtgacactggcgttgctgggtggcgatgcccgtcctctggcttgggttaattcttggatgacgtcggcgttgctgggagaatgtgccgttcctgccctgcctccacccacctcgggagcagaagcccggcctggacacccctcggcctggacacccctcgaaggagagggcgcttccttgagtaggtgggctccccttgcccttccctccctatcactccatactggggtgggctggaggaggccacaggccagctattgtaaaagctttttattttagtaaaatatacagaagttc

SEQ ID NO: 20502 - DNA, 1545 bp, Homo sapiens
  source 1..1545: mol_type = unassigned DNA
atcccgagtccgagccgccgccgccatgagctgccccgtgcccgcctgctgcgcgctgctgctagtcctggggctctgccgggcgcgtccccggaacgcactgctgctcctcgccgaccgtgcactctctgtctcccacctcacgcagcggatgacggaggctttgagagtggcgcgtacaacaacagcgccatcgccaccccgcacctggacgccttggcccgccgcagcctcctctttcgcaatgccttcacctcggtcagcagctgctctcccagccgcgccagcctcctcactggcctgccccagcatcagaatgggatgtacgggctgcaccaggacgtgcaccacttcaactccttcgacaaggtgcggagcctgccgctgctgctcagccaagctggtgtgcgcacaggcatcatcgggaagaagcacgtggggccggagaccgtgtacccgtttgactttgcgtacacggaggagaatggctccgtcctccaggtggggcggaacatcactagaattaagctgctcgtccggaaattcctgcagactcaggatgaccggcctttcttcctctacgtcgccttccacgacccccaccctgtgggcactcccagccccagtacggaaccttctgtgagaagtttggcaacggagagagcggcatgggtcgtatcccagactggaccccccaggcctacgacccactggacgtgctggtgccttacttcgtccccaacaccccggcagcccgagccgacctggccgctcagtacaccaccgtcggccgcatggaccaaggagttggactggtgctccaggagctgcgtgacgccggtgtcctgaacgacacactggtgatcttcacgtccgacaacgggatccccttccccagcggcaggaccaacctgtactggccgggcactgctgaacccttactggtgtcatccccggagcacccaaaacgctggggccaagtcagcgaggcctacgtgagcctcctaggtatgcctttgtctgtctccgtcaggaaaggtgtgggagtggatctgggacggggccatgacctgtcagatgctgctccacacccattacctaatgtggctctcatatcatctgggtgaggaagggactgtcactcccactctacagaggaaaagaatgaggctcagagaggtgaagtaagctgctcaggattgcacagctggtaagcactaagctaggattctcgcctggatcctgctgctttcaaaaccattgccttttccccgcctacctccgatgagcttcagaatcacctgggatgcttgttaatatccaaattgcaaatcccagggtgtccgattcagtagatcttggcgggctcaagaatttgcatgtctgacaagttcccaggtgatgccgatactgtgggcctggggacccctctctgagcatccgtgcaccccatcctgccttcctgggggacccaaagcacctcatgaccctgctcattcctaaaaagacctaggacatctagtcccatgttatggatgtgcagac

SEQ ID NO: 20503 - DNA, 1989 bp, Homo sapiens
  source 1..1989: mol_type = unassigned DNA
ccgcggcgtccagggtcggcagcaaccgcagccgagcccgagcgggtggcggcgccatggcgtgcgcggggctgctcaccgtgtgcctgctccggccgcccgcgccccagccccagccccagaccccgcggcacccccagctcgcgcccgacccggggcccgccggacacacgctcttccaggacgttttccgcagagcagacaagaatgatgatgggaagctctcatttgaggaattccagaattactttgccgatggggttctcagcctgggggagctgcaggaactgttcagcggcattgatgggcatctcaccgacaatttagaaacagaaaaactgtgtgactacttctcagagcacctgggtgtctaccggccggtgctggctgcattggaatcgctgaaccgtgcagtgctcgctgccatggatgccaccaagctggagtacgagagggcctccaaagtggaccagtttgtgacgcgcttcctgctgcgggagacggtgagccagctgcaagcccttcagagctcgctggagggggcgtcagataccctggaggcccaggcccatggctggcggtcagatgcagagagcgtggaggcgcagagcaggctctgcggcagccggcgggcaggacgccgagccctgaggagtgtcagccggtcatccacctggtcccccggctcttctgacacagggcgcagctcagaggccgagatgcagtggcggctccaggtgaaccgcctccaggagctcatcgaccagctcgagtgcaaggtgagggccgtggggccagggccccacaagggaggaccctcctggtatccaccagagccaggcccatgctggaggcccggcccacactctgtgccctcacaggccccccggctggaacccctgcgtgaagaggacctggccaaggggcctgacttgcacatcctcatggcccagaggcaggtccaggtggcagaggaaggcctgcaggacttccaccgagccctgcgctgctatgtggacttcacaggggcccagagccattgtctgcatgtgtccgcccagaagatgctggacggtgcctccttcaccctgtatgagttctggcaggatgaggcctcctggagaaggcaccagcagtcgcctggcagcaaggccttccagcgcatcctcatcgaccacctgcgggccccggacaccctcaccactgtgttcttcccagcctcctggtggataatgaataacaactgagccagacctgcacacgccgagggccccgggaccctgcctgcctccctctggagccttctggactggccagcccagcgcaaagaccaggacttgtctcctcctggacttgggcctggtggaagggctctcagcccagggatcagggactgggctgcttgctttctatttattattgatttatttatccctgtattttattgtttgtcacttcagcctccaagctactttggcttctgcctggctcaggagacctggattctggtccctgctgtccctgcctggctgagcgacccagggcaggtcccgtccctgtctgggtgggcctcaggccatctggccgcctagcgagggtcctgctttcttcctgctgtcttgggaccaggcttctgctcctcctcagccagcggcagaagcagggctgatgctcagggaccccccaaccctcaaaccttgcctccgaggctgggcctgagctgggtgccccgtcgccctcccaggccactaggctctgactcttccagcacccatggatgtgccagaggcctctgggttggtttgcatgtcatttgcatatcgtttgcatgccctcatcccacccattctcagggcagtatgggaagccccaaggtgacctggccaagtagcaataatttgggtccagggtcacctattgcccccagaggcctctgaaccccaggctgggaccccagcacagaggcaataaaggcagtggtcccttcca

SEQ ID NO: 20504 - DNA, 1942 bp, Homo sapiens
  source 1..1942: mol_type = unassigned DNA
gagcccgcgcgtcggcgccggcgccaaggggcggcctctagccacaccgagtccgccgcggcgtccagggtcggcagcaaccgcagccgagcccgagcgggtggcggcgccatggcgtgcgcggggctgctcaccgtgtgcctgctccggccgcccgcgccccagccccagccccagaccccgcggcacccccagctcgcgcccgacccggggcccgccggacacacgctcttccaggacgttttccgcagagcagacaagaatgatgatgggaagctctcatttgaggaattccagaattactttgccgatggggttctcagcctgggggagctgcaggaactgttcagcggcattgatgggcatctcaccgacaatttagaaacagaaaaactgtgtgactacttctcagagcacctgggtgtctaccggccggtgctggctgcattggaatcgctgaaccgtgcagtgctcgctgccatggatgccaccaagctggagtacgagagggcctccaaagtggaccagtttgtgacgcgcttcctgctgcgggagacggtgagccagctgcaagcccttcagagctcgctggagggggcgtcagataccctggaggcccaggcccatggctggcggtcagatgcagagagcgtggaggcgcagagcaggctctgcggcagccggcgggcaggacgccgagccctgaggagtgtcagccggtcatccacctggtcccccggctcttctgacacagggcgcagctcagaggccgagatgcagtggcggctccaggtgaaccgcctccaggagctcatcgaccagctcgagtgcaaggccccccggctggaacccctgcgtgaagaggacctggccaaggggcctgacttgcacatcctcatggcccagaggcaggtccaggtggcagaggaaggcctgcaggacttccaccgagccctgcgctgctatgtggacttcacaggggcccagagccattgtctgcatgtgtccgcccagaagatgctggacggtgcctccttcaccctgtatgagttctggcaggatgaggcctcctggagaaggcaccagcagtcgcctggcagcaaggccttccagcgcatcctcatcgaccacctgcgggccccggacaccctcaccactgtgttcttcccagcctcctggtggataatgaataacaactgagccagacctgcacacgccgagggccccgggaccctgcctgcctccctctggagccttctggactggccagcccagcgcaaagaccaggacttgtctcctcctggacttgggcctggtggaagggctctcagcccagggatcagggactgggctgcttgctttctatttattattgatttatttatccctgtattttattgtttgtcacttcagcctccaagctactttggcttctgcctggctcaggagacctggattctggtccctgctgtccctgcctggctgagcgacccagggcaggtcccgtccctgtctgggtgggcctcaggccatctggccgcctagcgagggtcctgctttcttcctgctgtcttgggaccaggcttctgctcctcctcagccagcggcagaagcagggctgatgctcagggaccccccaaccctcaaaccttgcctccgaggctgggcctgagctgggtgccccgtcgccctcccaggccactaggctctgactcttccagcacccatggatgtgccagaggcctctgggttggtttgcatgtcatttgcatatcgtttgcatgccctcatcccacccattctcagggcagtatgggaagccccaaggtgacctggccaagtagcaataatttgggtccagggtcacctattgcccccagaggcctctgaaccccaggctgggaccccagcacagaggcaataaaggcagtggtcccttcca

SEQ ID NO: 20505 - DNA, 925 bp, Homo sapiens
  source 1..925: mol_type = unassigned DNA
gccgcggcgtccagggtcggcagcaaccgcagccgagcccgagcgggtggcggcgccatggcgtgcgcggggctgctcaccgtgtgcctgctccggccgcccgcgccccagccccagccccagaccccgcggcacccccagctcgcgcccgacccggggcccgccggacacacgctcttccaggacgttttccgcagagcagacaagaatgatgatgggaagctctcatttgaggaattccagaattactttgccgatggggttctcagcctgggggagctgcaggaactgttcagcggcattgatgggcatctcaccgacaatttagaaacagaaaaactgtgtgactacttctcagagcacctgggtgtctaccggccggtgctggctgcattggaatcgctgaaccgtgcagtgctcgctgccatggatgccaccaagctggagtacgagagggcctccaaagtggaccagtttgtgacgcgcttcctgctgcgggagacggtgagccagctgcaagcccttcagagctcgctggagggggcgtcagataccctggaggcccaggcccatggctggcggtcagatgcagagagcgtggaggcgcagagcaggctctgcggcagccggcgggcaggacgccgagccctgaggagtgtcagccggtcatccacctggtcccccggctcttctgacacagggcgcagctcagaggccgagatgcagtggcggctccaggtgaaccgcctccaggagctcatcgaccagctcgagtgcaagcacatcctcatggcccagaggcaggtccaggtggcagaggaaggcctgcaggacttccaccgagccctgcgctgctatgtggacttcacaggggcccagagccattgtctgcatgtgtccgcccagaagatgctggacggtgcct

SEQ ID NO: 20506 - DNA, 1123 bp, Homo sapiens
  source 1..1123: mol_type = unassigned DNA
ggctgacttcgctgcccgtcacgggaatgcgggagagggcggcgccggggcgctcgcgtctgcgtggagaccggctggccgcgcgcgggaagccgcggaactgcgccggaaagtcccccggctctggggccccggtgacccagagtaagcctccaagaaggaggaggaggagagaaaggcggctcttcccgtgcccctaccagaggcttcggtgggcccaccttgtgacctccgcggccggcccctcagtggaactgcgtcccacgcggggggcgtcccgaccgtgggggccgcggcccgcgctgaccctggacgtcgccgcgcagcccctggttccccaaggcagaggaaataccctggtggagccctccttccatagaaccagagatggcatctgtggatttcaagacctatgtggatcaggcctgcagagctgctgaggagtttgtcaatgtctactacaccaccatggataagcggcggcgtttgctgtcccgcctgtacatgggcacagccaccctggtctggaatggcaatgctgtttcaggacaagaatccttgagtgagttttttgaaatgttgccttccagcgagttccaaatcagcgtggtagactgccagcctgttcatgatgaagccacaccaagccagaccacggtccttgttgtcatctgtggatcagtgaagtttgaggggaacaaacaacgggacttcaaccagaacttcatcctgaccgcccaggcctcacccagcaacacagtgtggaagatcgcaagtgactgcttccgcttccaggactgggccagctagtgggggtggcagaggtctctttgcttcattcagccctagctctgtagagaaatgcaaacctcgactctcaaggatgtgaggaacacaagttcatttctgttgttgcggagacactgcagactccactgtgccgaggttgaactcttttttgttgctcaagttctaggagtccctttcctgaatatatacttgtttgtcatagtttccttttcaaagtagtaaacttttctatttttctacttgcccagtagagactctgattctggaaattctgacaaataatttaataatacacatgttgcttctttccctg

SEQ ID NO: 20507 - DNA, 3399 bp, Homo sapiens
  source 1..3399: mol_type = unassigned DNA
cattacgctgctggctggcagcggccgggccggtcggggctgggccctacgcactttgcgtagcgaggggggttaccaaaggcctagtgcttggcctcgagcaagcctggcctatcccctgtagggggtgggtgaggggcgaggctgaggaagaagagaaggggaattggggcgcttgaggggattataatttctttaaaaagaggggaggggagaggccatggccgtcccagccaagaaaaggaagatgaacttctcagagcgggaggtggagatcatcgtggaggagctggagctgaagaagcacctgctggtgaaccacttcaacgccggggtacccctggccgccaagagtgcggcctggcacggcatcctgagaagggtcaacgccgtggccacctgccgcagagagctgcctgaggtcaagaagaagtggtctgacctcaagaccgaggtccgtcgcaaggttgcccaggtccgggccgccgtggagggtggtgaggcgccggggcccactgaggaggacggagctggggggcctgggacaggcggtggcagtggtggcggtggcccagctgtagccccagtgctgctgacccccatgcaacaacgtatctgcaacctgctgggcgaggccaccatcatcagcctgcccagcaccacagagatccaccctgtggccctcggaccctcggccaccgcagccgcagccacggtcaccctgacacagatccccacagagaccacctatcacacgctggaggagggcgtggtggagtactgcacggctgaggcgcccccacctctgccaccagagacccctgtggacatgatggcccagcatgcagacacgtcggtcaagccgcaagcgctcaagagccgcattgctctcaactccgccaagctgatacaggagcagcgggtcaccaacctgcatgtgaaggagatcgcacagcacctggaacagcagaacgacctactgcagatgatccgccgctcccaggaagtgcaggcctgtgcccaggagcgccaggcccaggccatggagggcacacaggctgccctgagcgtcctcatccaggtcctccggcctatgatcaaagatttccgccgctacctgcagagcaacacagctaacccggcccccgcctctgaccctgggcaggtggcccagaatgggcagccagacagcatcatccagtgagggcaggggtcaggccagccttctgccatgatgggatgaaaactccatggacttgtaagtgggtcctgtgattggccttggccttagaccggccacgtgcacagctccctctttaataaacgcttaggggttgcactgtttttgagaagaggaatttgttgggctcctgggacccaaactcatactccccctacttgagctgccttgctaagatccagaagattggttagcagggggtcacgtgtgcatgtgatgggacatgtgttgtcatgaccccgggcttgtgacatgacccagccttggtcttggacaactgtaaggaacaacacaacgggctgtcactgggggccgtcacccagcctgggtctctactgagctgcccaaccccaggtgccatcctttcgagtagggtaatgtcactgatgctggcagttgagcaataatatcttcctcctttgggaggtagtgtgactgaggaggaaaccccacccttttctcctcactgtgcctcagttctcaggggactccaatgactgttgtgctctcccccgaccccaccccaggcacagcgcaggcccttgttaggtagtgtgctgggacgcctccgtaatacatgcagtgtgcagccagtctggctcaggaatgctgtgtatggtggggacggtttggccactctctggttttcaacagcatctctgggcagccctttggtggtttgtccctagagcttttgactcaggtcaagctttggatgctgtaaatttttgagaaagccaactagtgtggaagcttgctgccccactgcagtgggtctgagtgacctgttggctttgtgcggaggcttgcatccagccagttgtatttattctgtgtgtgaacccctcctaggaaggcctccaggaaggctgccctgtggccacacccatcctcctttcctctctgctgactccacatttccaaaattcagtgcaaaaaaagccctgctgagcatcacatgctggactcttcccctgccacaccgctcagtgccttctgttctcttgagactccctctgagtagctgagtgaatccaaagccataattgaccctgaacgtaggaggaggaaaaggcgaagctgacctaagaagtgggaccctggccgggcgaggtggctcaagtctgtaatcccagcgctttgggaggccgaggcgggtggatcacgaggtcaagagatcaagaccatcctggccaacatgatgaaaccccgtctctactaaaaacacaaaaattagctgggcgtggtggcacacgcctgtagtcccagctacccgggaggctgaggcaggagaatcgcttgaacccaggaggcggagattgcagtgagccgagattgcaccgctgcactccagcctggcgacagagcgagactctgtctcaaaaaaaaaacaaagaaaaaaccaaaaaaacaaatgggaccctttggattctatgctcagggaagagcaggcagagccttggagtgctgaaggaggtgctgttccctgttccatctttacactttctcttctgagatgtctgtaaggattttacccagatgccatttgtctgtttcattttcagactcaccatcaattaccaaggcccttgcatctccccagatcgtttcccaagtttggcgatttgctgtcggtgcctcagccacatatgaccaatggttacaactcagggctccagacctcagctaaaaagagaagacgctgccctcctgggcacgaacgtttagaatgctcaactcctctattgtgaccacaggaaggtggccctgaagatgcaccgaagacagctgggaggtgactgctgtactgtcagcctctctgtggaggcattcgtgcagtgccagctaaaagggaggtgaagggggatatcggacccagcgagggagttgctggtagaaggaaagctcttctcagtgtggctggattaagagcagcctagcagcttgggcacctccactctgtgcggtctgatggccccagcaaggtcgctgcagggacttcctgaggacttggtttggtttttttctggggttggaaatctgagccaatattgtgtctgttccatttgggtatgaagaggaagtctggatcacttaaactgactagttatttccgggtcataattttaaattaaagacatatcacttttttatacaca

SEQ ID NO: 20508 - DNA, 1907 bp, Homo sapiens
  source 1..1907: mol_type = unassigned DNA
cggaaagcgttgctgcgtaaatggcgggggcgtgtcttttggctcctccgcgtgtagttacctgagaaacgcgggaagttgggcccaggcagtgttgctgcggttgcctaagttgtttttctatttctggagagagccgtgagcttgtccaggggccccaatcctgaggccgacccggtttctggcgcggtgcgatggaggtagtggaggccgccgccgctcagctggaaactctgaaattcaatggcaccgactttggagttggggaaggtccggcggctccgtctccgggctctgcccctgtgccagggacacagccgccgctacagtcgtttgaggggtccccggacgctgggcagaccgtggaggttaagcctgccggggagcagcctctgcagcccgttctgaacgccgtcgcggccgggaccccggcgccgcagccacagccaccggctgaatcgccggcctgcggagactgcgtcacctccccaggagccgcagagcctgcgcgggcgccggactccttggagacctcggactcggattcggactcggacagtgaaacagattcagatagttcaagttcatcgtcttcctcttcatcttcctcatcgtcgtcttcttcctcttgtatatcacttcctccagtgctgtcagatggagatgatgatttacaaattgagaaggaaaataagaattttcctcttaaaacaaaagatgaattacttcttaatgaactgccttctgttgaagaactcactattattctgcctgaagatattgagttaaagcctcttgggatggtttcaagtattattgaacaactagtaataattgaatctatgactaacctacctccagttaatgaggagactgtaatttttaaaagtgatcgacaagcagcaggaaagatattcgagatatttggacctgttgcacatccattttatgtgttacggtttaattcttcagatcacattgagagtaaaggtattaaaataaaggagactatgtattttgctccatcaatgaaagatttcactcaatatatattcacagaaaaactaaaacaggataagggatcagatgcatcatggaagaatgatcaggaaccaccaccagaggccttagattttagtgatgatgaaaaagagaaggaagccaaacagaggaaaaaatctcagattcaaggccggaaaaaactcaaatctgaatttaatgagcctggtgaagattttactgaagtacatcagaattggaatgctcatagctctgcttcagagcatgcaaaaggatatcgtaacagagaattcacacgaggattttccagggccagataccctcgatcttgccatggcaggcctccacctcagcatttctataactcagaacatatggtatctcaggagacttcaggatttccttctcagagacaaaataatcccattatgccacaatacccctttcctcttccagtgtttgacatgcataattttcccctccgccctccacccccaccaccacccccacctgtaaacatgggttgggctacaccaaacatggctgctcatccattacttaacttaccatactccctacccccaccccctccccctccaccactgcctcctccaccctcttctggagatagtaattctcattttggaccttactattaggtgactatgcatttccagagaaatgtggacttttcatattatgtggtaaggatttttttttttcaagagtgattatggagctagatttttaaaaacactgtaaaatactaaatgattccttctgttgtaagttgatatatatttgtaacctttgtgaaattgtattcatatgaaaatgtcagctcaaattcttgggagaacattaaattatgtaatatttaattaaaa

SEQ ID NO: 20509 - DNA, 1604 bp, Homo sapiens
  source 1..1604: mol_type = unassigned DNA
gtgtcttttggctcctccgcgtgtagttacctgagaaacgcgggaagttgggcccaggcagtgttgctgcggttgcctaagttgtttttctatttctggagagagccgtgagcttgtccaggggccccaatcctgaggccgacccggtttctggcgcggtgcgatggaggtagtggaggccgccgccgctcagctggaaactctgaaattcaatggcaccgactttggagttggggaaggtccggcggctccgtctccgggctctgcccctgtgccagggacacagccgccgctacagtcgtttgaggggtccccggacgctgggcagaccgtggaggttaagcctgccggggagcagcctctgcagcccgttctgaacgccgtcgcggccgggaccccggcgccgcagccacagccaccggctgaatcgccggcctgcggagactgcgtcacctccccaggagccgcagagcctgcgcgggcgccggactccttggagacctcggactcggattcggactcggacagtgaaacagattcagatagttcaagttcatcgtcttcctcttcatcttcctcatcgtcgtcttcttcctcttgtatatcacttcctccagtgctgtcagatggagatgatgatttacaaattgagaaggaaaataagaattttcctcttaaaacaaaagatgaattacttcttaatgaactgccttctgttgaagaactcactattattctgcctgaagatattgagttaaagcctcttgggatggtttcaagtattattgaacaactagtaataattgaatctatgactaacctacctccagttaatgaggagactgtaatttttaaaagtgatcgacaagcagcaggaaagatattcgagatatttggacctgttgcacatccattttatgtgttacggtttaattcttcagatcacattgagagtaaaggtattaaaataaaggagactatgtattttgctccatcaatgaaagatttcactcaatatatattcacagaaaaactaaaacaggataagggatcagatgcatcatggaagaatgatcaggaaccaccaccagaggccttagattttagtgatgatgaaaaagagaaggaagccaaacagaggaaaaaatctcagattcaaggccggaaaaaactcaaatctgaatttaatgagcctggtacaggtatatctcacagatattgtggcctcggatccagaccattgcagtcaagtgagtcacacaaactttttggtttccaaatgcatataaaagttacgtttacatgctactttagtttattaagtatgcaatagcattgtgtctaaaaaaaccaatgtgcatatctcaattggagaatactttactgttcaaaaaataataatgaccctttgagcctgcagtgagttacagtcttttagctgttggaaggtctggactcaagtgctgttggccgctgactaatcagggtagttgttgctaaaagtggcagtttctcctaatagatagcagtgaagtgtgctacattaattggctcttcctttcaccaaagatttctgtgtagcatgtgatgctacttgatagcat

SEQ ID NO: 20510 - DNA, 498 bp, Homo sapiens
  source 1..498: mol_type = unassigned DNA
gggggagcggggggctcgtctgttccaggagccctgaaccaaagagcagcggagtttgagaagccagcagctcggggttcggcagcagcggtcccatcggctgaagttcggggggggtggggcgccgagcgcgcggggtggggggggtcctggtctttggcttctcgactcggtcctgtttcgacagcgaacatgtcgcggcctgtcagaaataggaaggttgttgattactcacagtttcaggaatctgatgatgcagattttgagagtgaggactcagaagacaaagatgtgaagaccaagaaggatgattctcactcagcagaggatagtgaagatgaaaaagaagatcataaaaatgtgcgccaacaacggcaggcggcatctaaagcagcttctaaacagagagagatgctcatggaagatgtgggcagtgaggaagaacaagaagaggaggatgaggcaccattccaggagagaaaagactccttctcccaa

SEQ ID NO: 20511 - DNA, 6496 bp, Homo sapiens
  source 1..6496: mol_type = unassigned DNA
gtctccaatgagcaggcgtgttggggaggagcgcacaaaccctagtgggtttggttgcacggcggctttggcgcattttcggctggtttgattcatccattttgaagagacgggggagcggggggctcgtctgttccaggagccctgaaccaaagagcagcggagtttgagaagccagcagctcggggttcggcagcagcggtcccatcggctgaagttcggggggggtggggcgccgagcgcgcggggtggggggggtcctggtctttggcttctcgactcggtcctgtttcgacagcgaacatgtcgcggcctgtcagaaataggaaggttgttgattactcacagtttcaggaatctgatgatgcagatgaagattatggaagagattcgggccctcccactaagaaaattcgatcatctccccgagaagctaaaaataagaggcgatctggaaagaattcacaggaagatagtgaggactcagaagacaaagatgtgaagaccaagaaggatgattctcactcagcagaggatagtgaagatgaaaaagaagatcataaaaatgtgcgccaacaacggcaggcggcatctaaagcagcttctaaacagagagagatgctcatggaagatgtgggcagtgaggaagaacaagaagaggaggatgaggcaccattccaggagaaagattccggcagcgatgaagatttcctaatggaagatgatgacgatagtgactatggcagttcgaaaaagaaaaacaaaaagatggttaagaagtccaaacctgaaagaaaagaaaagaaaatgcccaaacccagactaaaggctacagtgacgccaagtccagtgaaaggcaaagggaaagtgggtcgccccacagcttcaaaggcatcaaaggaaaagactccttctcccaaagaagaagatgaggaaccggaaagcccgccagaaaagaaaacatctacaagccccccacccgagaaatctggggatgaagggtctgaagatgaagccccttctggggaggattaaaagtgatgatggtctggggagagattttattaaaaaaaaaaagaaaaaaaaagaaaaaagagggaggaaaaaaaagaacctacttaagatagaacatggttttggctatggcttgactcatgggctttcagtgcttttttccatttgttgaaagtaacatttctctctctctctctttttttttttttttttttaaagcaaaccattgtatgtgtaagtgtttaagttacctttttgtctattggtctctttgccagccctcccctttcccaatgaaagccatgtcaaattaatcactggattgactgcttcatctttttatttttaatgaaaggtgtaccacggttgtaaagcaataagatttgagatgaacactattgaaacttcgctttttgctaaaaaatagcaagttgaatagtaatcaaaaaacatagaaagattttagttcaaaatgattgctcctttctctacctggacttttaaaaaatcaattgtcatctaatatgagtttatttgtctatagacacaagtatcaatgtctaaaaaaaatcatgactttaaacttccaccgatgaggcaggtaggagataaagatgaattctgaactgttactaaaagtactcattttttaccttgtagggagggtgggcaatggggttacctgaccttatttgagggtatgggctttcttttttatttcatcacttgttatctcaaagagactcggagccagtgatccttttatcctgctacagtctttagggagctaaaaaaaaaaaaaaagcaggggctgccaaaactcttgatttcatatttccttctctaaatatatatgtatcctgttttttggataaaattttaccaagaatccaaaaaaaaaaaaaccctagaatttaatcaacaagatcagtctacaggtcacagtggatttcttttcaaactgacaatgtttaggttttaagcaaataaagttccagttaatgtgaaactcagtcacaaagagttgagatttttcctttatgaaatagaattgacattcttttatgctataaatgtgcattcaggtcccattaaccatgctctgcttttatttggggatagaacattttctttttcatatcccgatcttcccatttcttcatagaaatgtgataagaagtacatccctgtgatcctgctgcttcgtagagcaccactgcacaccctaccccgagtgccaaccacctctgctataggacactattttcctggccctattcttcacttacttcccatcctgtccttgactaggaatatgttaaatgctgctcccatacaattcagttagctcttgtctttttatttggtccaacccctgctttactgctcatgctgcttaaagcaggagggactagagaaacaaggcattttaggaggcctgtgtgcagttgaaaaccgacttttacacgccttataaaagcagtcaggagatagatccgtaggtttgatccttcacatctaataccaggcgctaatgggaacaaggtttaaagggtcctggtatgctaataaattgaaaaattagtgaaatttaaacttctgcctttttttcctgccttttaatctagatttgcttcctcaatatcctactttgtggtttactaggaacatgcttactctgatctttttttaaaaaacacacagtggcagagtcatttcactattgcactgtgtgttaaagaatgaataaggagttttcagttacatggccaaaaatacaggacttgaacataaatagcagttggatcattctctttcatgacggttaaattcagaggtgtgaactttgtaatgagggtgttaaagattaatctatttgcctaaatgggtttgttcaggtatccatttttaacaaagaagtttgtgttcatatagtaaaagacctatcagtgtttccaccatgcacttctattttttaggagtttataattttaagtcttacattcctagtaacatttgggcttttcttaggttatgtttcgtgaagatttggggggagggctcttttaaaacttcagcctcagttgtttaacagtctctttaatatattaatctgcactaacatctctgtgatatatgcacatattttagaggtaatcatgtcttctagattacttgtgtgcatttgattgggcttcttgtttagggtcccttttaaaattaattcattagattgaaaaatgtattctatatttctgatagactggacagaaggatctgtgtccccaagtgagacaggctctgaataacctttgttttctccactttttattgatgatttaaaacactctagtcttcccctcaaatcatgcatgcaaataggaggacagtggtggtgactcaactggatacaggtgctcaatagtcaggcttgatagtgatgtcaggacgcattacaagctgtaagccgatactgactggccattggcaccatccttgactaaccttcctctttttctctagtgtgcctatggtgaaatggcaatagcattcactgtcgtattttgcagtgctcaggaagtgggacgttaactttgaaggtgcttgtttgtattagctctgctaggtttacctctacaacgtagatttcagcagctatgctgactgacactacattctagttcttaagattttttttccagatccccccttccccagctagacatacgtagcatactttcatcttattcagtctttctgtaacctgctgctgcttttagtcctcctcacctcagatcggaatcaatggagtgggcccagaggatacattttaattccagtaatggtaggtagatttgtcctgctttctaaaacatctcctcatttcatatttccactccatattgattccataagggaaaattaatgggtgtttcctcctttagggaggtaatgcaaagagtgtggacatcttctaatcttgaggaacagtagttgatttcccttgaaggagcttacatattgactgttttcacaataacctgtttgccccagttcaatcctcattttaatacttaatttggtactggctcaaatagcattttcttacagataacaaatcaagagtgaaatttgaggttatactccagtaaagtttttaacacttgtgaatatggtcagctagactaaacttgactcttttttttaatggcttttttatctgtgaacattcagataagtggattttcaagtactggttggggatgggaatcgtgcttttctttaaacttcagtttacgagatgctttgagagcgttaggcaaaagcagaaataaatatcaggagcaacggggaaagctttataaaagatcatggtggccactgttgcagctttgaagaatgagtgctggcttgaacagttctttgcctgcatcattggtagctgcactgaaaggaaaaaactttcaccttaagaatttgaaaaggaagaaacctgggctctggtcttcatggcatttagactgagatgcttaaacagaacagaagtaatacgcatttcctgccataggatagggaaaatgtaacaagctggttgctcttgaggttagaaaattgtctgtttctctgtggatgaagctggatttacttgaaaatggagagttggcttattgtttgaatattgggacatcaagctatctatagccaagtttcagtcgcaaccagttttccctttgtctggggtaaattcgatacaaaatgattctttttgaatcctgaatccataaattacacttttttttttcaaattcacaaaattcacagtggtgctgactgtgtaataaccactattgggaaacatcccgtaaacctgcctgttgccatgccaatggagtgactgaactggtgacatctgtttgagcatgctttgtgtggctggtagaatgccaccgttgtgcatacactttgtacatcaggggtgaagggagggttttctagattattgggggagggtaaaattgggatttttttgttgttccttttttgatggggtgtgggggtatagtactcagcttatgccctaaaataacatgtataaaaacccctgaagtattgtgtgggtgtgtacgtgtgagtgtgtgtttgtatacatctggcaattaaagctttgtcttctggaacttagtgaattcttttctctttttcctccagaagtatttgttacaagatttgtaaataagagctctacttagtttgtttaccatgaacatgttgcagcaaaccttatgcatctaattcctacaaggttaaagaaaggcttttagacttgccaggttaagcaacagccaagttctcagtaattgtttgccttgatttatcttttagacttcattttgccagctctaaaactcccagtcttccttgattttagtccttaatcttttatgttctgagcaggaagggtaaaagacaggaacctgcttcactgtattaactagtccatgggctgagaccggggcatctcttttcttcatactgcaatgttgctagatacatgatcagacaccagagggttgggcattcttgcaataccttaacagtgctgaaatctgcagcatggtactaaggaagttaaagtttgaatgtaaccactttatttaaaaggtttttttctttaatttaaatgaaatggggttgaagtgaacatgattttgttgaccatgttcgtgaattacagatgcaacatgcattggtagaatcgtgtgatggtcttttgtgatacttaatttttacatatcccagtctctgtatgtatctgcatagacaaagaaaaaacaaactcctgctttgcttttattgaagggtttccaggactgcgtgtctgctcctgagctctgttttaagtatgtgtatcctttgcttgtattttgtattaaaaaaataagaaaaagaagcctttattgttgagcatgttggcattgtcccctttatttttttctctttttgggacatatgaagcaagttattctttttctgtatctttttttcttttgtaaactttttttttgttttgtttaaaaatggctttataaaagggcttttataacccagatgtgtgctctgtgtacttcttgtaataccttaaagcaaacacactaacttacacagctttgttaatcagctcccagttcagcctgactttgtgggaacttatttccctaataaattatttagaaactttaacagtgaccatccctgttgttggtaaaagataaacatgtcttggttcaaaagttaatacctcaggatggaatcaagaagcagtagacttaccagtttgattaattaagggagcactggactgggtgcgtaaggattcttaattagcattttttctcatgtttacatccaaggttatgaagtgttgtggaaagcaaagtttaacaatcatatataataaaagataatgtttatactcacagaa

SEQ ID NO: 20512 - DNA, 1658 bp, Homo sapiens
  source 1..1658: mol_type = unassigned DNA
gcatatactgtcatcatcttggaaagaaaaggctgagaacgtaaaactgaggacagaggaggaaagcagggtgacccctgatgttgccctagaaaatggaaaacaaaacacagcaaaacagaaaaacagaagatctgactctgcctttagccaggaaaacagtttgggggagtaaaaagtattagggaaaagagtgggcattttgcctggaaaaaaggtttctagagccatctgggctttccgggaacctggaccagactctggcccagtaggatgtccccgtgtcctccccagcagagcaggaacagggtgatacagctgtccacttcagagctaggagagatggaactgacttggcaggagatcatgtccatcaccgagctgcagggtctgaatgctccaagtgagccatcatttgagccccaagccccagctccataccttggacctccaccacccacaacttactgcccctgctcaatccacccagattctggcttcccacttcctccaccaccttatgagctcccagcatccacatcccatgtcccagatcccccatactcctatggcaacatggccataccagtctccaagccactgagcctctcaggcctgctcagtgagccgctccaagaccccttagccctcctggacattgggctgccagcagggccacctaagccccaagaagacccagaatccgactcaggattatccctcaactatagcgatgctgaatctcttgagctggaggggacagaggctggtcggcggcgcagcgaatatgtagagatgtacccagtggagtacccctactcactcatgcccaactccttggcccactccaactataccttgccagctgctgagacccccttggccttagagccctcctcaggccctgtgcgggctaagcccactgcacggggggaggcagggagtcgggatgaacgtcgggccttggccatgaagattccttttcctacggacaagattgtcaacttgccggtagatgactttaatgagctattggcaaggtacccgctgacagagagccagctagcgctagtccgggacatccgacgacggggcaaaaacaaggtggcagcccagaactgccgcaagaggaagctggaaaccattgtgcagctggagcgggagctggagcggctgaccaatgaacgggagcggcttctcagggcccgcggggaggcagaccggaccctggaggtcatgcgccaacagctgacagagctgtaccgtgacattttccagcaccttcgggatgaatcaggcaacagctactctcctgaagagtacgcgctgcaacaggctgccgatgggaccatcttccttgtgccccgggggaccaagatggaggccacagactgagctggcccagaggggtggaactgctgatgggatttccttcattcccttctgataaaggtactccccaaccctgagtcccagaaggagctgagttctctagaccagaagaggatgacaatggcaacaagtgtttggaagttccaaggtgtgttcaaagaggcttgccttgagggagggctggaatctgtcttccctgactcggctcctcaggtctttagcctccaccttgtctaagctttggtctataaagtgcgctacagaaa

SEQ ID NO: 20513 - DNA, 1762 bp, Homo sapiens
  source 1..1762: mol_type = unassigned DNA
atcgggctcaagtttcctctcttggccgaaaggggcaggaggagaggagagccacggggaaaggggagggttggaggaaggactgagaactcaggccgagggcttcagacgctggtgcgcctgcttggggctcctgtgctcagctcagcctgagcttccacactcagcgctcagcaatggcccgggggcggggcgcggtcctcgcagattctcaaaggtagccgggatcctcgtccagcagtgtcagctcaggctcagcctccccagagacaacaccgggagcctcatctctctcctcaccctgctgtgactccaccacaggtttctagagccatctgggctttccgggaacctggaccagactctggcccagtaggatgtccccgtgtcctccccagcagagcaggaacagggtgatacagctgtccacttcagagctaggagagatggaactgacttggcaggagatcatgtccatcaccgagctgcagggtctgaatgctccaagtgagccatcatttgagccccaagccccagctccataccttggacctccaccacccacaacttactgcccctgctcaatccacccagattctggcttcccacttcctccaccaccttatgagctcccagcatccacatcccatgtcccagatcccccatactcctatggcaacatggccataccagtctccaagccactgagcctctcaggcctgctcagtgagccgctccaagaccccttagccctcctggacattgggctgccagcagggccacctaagccccaagaagacccagaatccgactcaggattatccctcaactatagcgatgctgaatctcttgagctggaggggacagaggctggtcggcggcgcagcgaatatgtagagatgtacccagtggagtacccctactcactcatgcccaactccttggcccactccaactataccttgccagctgctgagacccccttggccttagagccctcctcaggccctgtgcgggctaagcccactgcacggggggaggcagggagtcgggatgaacgtcgggccttggccatgaagattccttttcctacggacaagattgtcaacttgccggtagatgactttaatgagctattggcaaggtacccgctgacagagagccagctagcgctagtccgggacatccgacgacggggcaaaaacaaggtggcagcccagaactgccgcaagaggaagctggaaaccattgtgcagctggagcgggagctggagcggctgaccaatgaacgggagcggcttctcagggcccgcggggaggcagaccggaccctggaggtcatgcgccaacagctgacagagctgtaccgtgacattttccagcaccttcgggatgaatcaggcaacagctactctcctgaagagtacgcgctgcaacaggctgccgatgggaccatcttccttgtgccccgggggaccaagatggaggccacagactgagctggcccagaggggtggaactgctgatgggatttccttcattcccttctgataaaggtactccccaaccctgagtcccagaaggagctgagttctctagaccagaagaggatgacaatggcaacaagtgtttggaagttccaaggtgtgttcaaagaggcttgccttgagggagggctggaatctgtcttccctgactcggctcctcaggtctttagcctccaccttgtctaagctttggtctataaagtgcgctacagaaa

SEQ ID NO: 20514 - DNA, 1833 bp, Homo sapiens
  source 1..1833: mol_type = unassigned DNA
atatactgtcatcatcttggaaagaaaaggctgagaacgtaaaactgaggacagaggaggaaagcagggtgacccctgatgttgccctagaaaatggaaaacaaaacacagcaaaacagaaaaacagaagatctgactctgcctttagccaggaaaacagtttgggggagtaaaaagtattagggaaaagagtgggcattttgcctggaaaaaaggtaaagacctcctgtgctaccaaaggaactgactgtggccatagttggcgaggtggagatcacaacacaggaaaagactttccatcttaagggattgatgaatccagcatgagtgaggatggggaggaggcggtctctccttccctcaggggaagctggagggagcccctccaaggaggtagtgcaaacttgctgaccctagcaggtgtagctctaacacctcttttcctttgacacaggtttctagagccatctgggctttccgggaacctggaccagactctggcccagtaggatgtccccgtgtcctccccagcagagcaggaacagggtgatacagctgtccacttcagagctaggagagatggaactgacttggcaggagatcatgtccatcaccgagctgcagggtctgaatgctccaagtgagccatcatttgagccccaagccccagctccataccttggacctccaccacccacaacttactgcccctgctcaatccacccagattctggcttcccacttcctccaccaccttatgagctcccagcatccacatcccatgtcccagatcccccatactcctatggcaacatggccataccagtctccaagccactgagcctctcaggcctgctcagtgagccgctccaagaccccttagccctcctggacattgggctgccagcagggccacctaagccccaagaagacccagaatccgactcaggattatccctcaactatagcgatgctgaatctcttgagctggaggggacagaggctggtcggcggcgcagcgaatatgtagagatgtacccagtggagtacccctactcactcatgcccaactccttggcccactccaactataccttgccagctgctgagacccccttggccttagagccctcctcaggccctgtgcgggctaagcccactgcacggggggaggcagggagtcgggatgaacgtcgggccttggccatgaagattccttttcctacggacaagattgtcaacttgccggtagatgactttaatgagctattggcaaggtacccgctgacagagagccagctagcgctagtccgggacatccgacgacggggcaaaaacaaggtggcagcccagaactgccgcaagaggaagctggaaaccattgtgcagctggagcgggagctggagcggctgaccaatgaacgggagcggcttctcagggcccgcggggaggcagaccggaccctggaggtcatgcgccaacagctgacagagctgtaccgtgacattttccagcaccttcgggatgaatcaggcaacagctactctcctgaagagtacgcgctgcaacaggctgccgatgggaccatcttccttgtgccccgggggaccaagatggaggccacagactgagctggcccagaggggtggaactgctgatgggatttccttcattcccttctgataaaggtactccccaaccctgagtcccagaaggagctgagttctctagaccagaagaggatgacaatggcaacaagtgtttggaagttccaaggtgtgttcaaagaggcttgccttgagggagggctggaatctgtcttccctgactcg

SEQ ID NO: 20515 - DNA, 1523 bp, Homo sapiens
  source 1..1523: mol_type = unassigned DNA
agacgctggtgcgcctgcttggggctcctgtgctcagctcagcctgagcttccacactcagcgctcagcaatggcccgggggcggggcgcggtcctcgcagattctcaaaggtagccgggatcctcgtccagcagtgtcagctcaggctcagcctccccagagacaacaccgggagcctcatctctctcctcaccctgctgtgactccaccacaggggcagtagagatcagctggacctggagggagaaggaagacatcccaaccccagcatagttgcttctaactggaactcttggctgcttgggaaataggggcttgggaagcagtggaagagaagagaggaggtttctagagccatctgggctttccgggaacctggaccagactctggcccagtaggatgtccccgtgtcctccccagcagagcaggaacagggtgatacagctgtccacttcagagctaggagagatggaactgacttggcaggagatcatgtccatcaccgagctgcagggtctgaatgctccaagtgagccatcatttgagccccaagccccagctccataccttggacctccaccacccacaacttactgcccctgctcaatccacccagattctggcttcccacttcctccaccaccttatgagctcccagcatccacatcccatgtcccagatcccccatactcctatggcaacatggccataccagtctccaagccactgagcctctcaggcctgctcagtgagccgctccaagaccccttagccctcctggacattgggctgccagcagggccacctaagccccaagaagacccagaatccgactcaggattatccctcaactatagcgatgctgaatctcttgagctggaggggacagaggctggtcggcggcgcagcgaatatgtagagatgtacccagtggagtacccctactcactcatgcccaactccttggcccactccaactataccttgccagctgctgagacccccttggccttagagccctcctcaggccctgtgcgggctaagcccactgcacggggggaggcagggagtcgggatgaacgtcgggccttggccatgaagattccttttcctacggacaagattgtcaacttgccggtagatgactttaatgagctattggcaaggtacccgctgacagagagccagctagcgctagtccgggacatccgacgacggggcaaaaacaaggtggcagcccagaactgccgcaagaggaagctggaaaccattgtgcagctggagcgggagctggagcggctgaccaatgaacgggagcggcttctcagggcccgcggggaggcagaccggaccctggaggtcatgcgccaacagctgacagagctgtaccgtgacattttccagcaccttcgggatgaatcaggcaacagctactctcctgaagagtacgcgctgcaacaggctgccgatgggaccatcttccttgtgccccgggggaccaagatggaggccacagactga

SEQ ID NO: 20516 - DNA, 1208 bp, Homo sapiens
  source 1..1208: mol_type = unassigned DNA
ggatggaggcaagggctaggggagatactctttcaaaaggatcatttgtagttcctactaattttgtggtaagtcgaagagaagattccatattaaattgctgtgatgggccatccttgtggtttctagagccatctgggctttccgggaacctggaccagactctggcccagtaggatgtccccgtgtcctccccagcagagcaggaacagggtgatacagctgtccacttcagagctaggagagatggaactgacttggcaggagatcatgtccatcaccgagctgcagggtctgaatgctccaagtgagccatcatttgagccccaagccccagctccataccttggacctccaccacccacaacttactgcccctgctcaatccacccagattctggcttcccacttcctccaccaccttatgagctcccagcatccacatcccatgtcccagatcccccatactcctatggcaacatggccataccagtctccaagccactgagcctctcaggcctgctcagtgagccgctccaagaccccttagccctcctggacattgggctgccagcagggccacctaagccccaagaagacccagaatccgactcaggattatccctcaactatagcgatgctgaatctcttgagctggaggggacagaggctggtcggcggcgcagcgaatatgtagagatgtacccagtggagtacccctactcactcatgcccaactccttggcccactccaactataccttgccagctgctgagacccccttggccttagagccctcctcaggccctgtgcgggctaagcccactgcacggggggaggcagggagtcgggatgaacgtcgggccttggccatgaagattccttttcctacggacaagattgtcaacttgccggtagatgactttaatgagctattggcaaggtacccgctgacagagagccagctagcgctagtccgggacatccgacgacggggcaaaaacaaggtggcagcccagaactgccgcaagaggaagctggaaaccattgtgcagctggagcgggagctggagcggctgaccaatgaacgggagcggcttctcagggcccgcggggaggcagaccggaccctggaggtcatgcgccaacagctgacagagctgtaccgtgacattttccagcaccttcgggatgaatcaggcaacag

SEQ ID NO: 20517 - DNA, 4783 bp, Homo sapiens
  source 1..4783: mol_type = unassigned DNA
tttccgagtgcggtagcaggagggggcggggaggtaagcggaggctccgagctctaggccggccggcggtggcggcggcgaggccgggactcgggcttagggcctgctgtggaggcagcggcggacgccgagctaagcagtttctctggaaacccccctggtaagtgtggaggaggcgggacactctgacccaagacgaaaggcctgtagctccagccaaagaaaataaaccttaggagggagaaggaaaaaaaaaatccatcagctgttcctgagaacagcctgcattggaatctacagagaggacaactaatgtgagtgaggaagtgactgtatgtggactgtggagaaagtaagtcacgtgggcccttgaggacctggactgggttaggaacagttgtactttcagaggtgaggtgtcgagaagggaaagtgaatgtggtctggagtgtgtccttggccttggctccacagggtgtgctttcctctggggccgtcagggagctcatcccttgtgttctgccagggtggggtacggggtttgacactgaggagggtaacctgctggctggagcggcagagcagtggccttgatttgtcttttggaagattttaaaaaccaaaaagcataaacattctggtccttcagcaatgctttctctgaagaaatacttaacggaaggacttctccagttcaccattctgctgagtttgattggggtacgggtggacgtggatacttacctgacctcacagcttcccccactccgggagatcatcctggggcccagttctgcctatactcagacccagttccacaacctgaggaataccttggatggctatggtatccaccccaagagcatagacctggacaattacttcactgcccggcggctcctcagtcaggtgagggccctggacaggttccaggtgccaaccactgaggtaaatgcctggctggttcaccgagacccagaggggtctgtctctggcagtcagcccaactcaggcctcgccctcgagagttccagtggcctccaagatgtgacaggcccagacaacggggtgcgagaaagcgaaacggagcagggattcggtgaagatttggaggatttgggggctgtagcccccccagtcagtggagacttaaccaaagaggacatagatctgattgacatcctttggcgacaggatattgatctgggggctgggcgtgaggtttttgactatagtcaccgccagaaggagcaggatgtggagaaggagctgcgagatggaggcgagcaggacacctgggcaggcgagggcgcggaagctctggcacggaacctgctagtggatggagagactggggagagcttccctgcacagtttccagcagacatttccagcataacagaagcagtgcctagtgagagtgagccccctgctcttcaaaacaacctcttgtctcctcttctgaccgggacagagtcaccatttgatttggaacagcagtggcaagatctcatgtccatcatggaaatgcaggccatggaagtgaacacatcagcaagtgaaatcctgtacagtgcccctcctggagacccactgagcaccaactacagccttgcccccaacactcccatcaatcagaatgtcagcctgcatcaggcgtccctggggggctgcagccaggacttcttactcttcagccccgaggtggaaagcctgcctgtggccagtagctccacgctgctcccgttggcccccagcaattctaccagcctcaactccaccttcggctccaccaacctgacagggctcttctttccaccccagctcaatggcacagccaatgacacagcaggcccagagctgcctgaccctttggggggtctgttagatgaagctatgttggatgagatcagccttatggacctggccattgaagaaggctttaaccctgtgcaggcctcccagctggaggaggaatttgactctgactcaggcctttccttagactcgagccatagcccttcttccctaagcagctctgaaggcagttcttcctcttcttcctcctcctcttcctcttcttcctctgcttcttcctctgcctcttcctccttttctgaggaaggtgcggttggctacagctctgactctgagaccctggatctggaagaggccgagggtgctgtgggctaccagcctgagtattccaagttctgccgcatgagctaccaggatccagctcagctctcatgcctgccctacctggagcacgtgggccacaaccacacatacaacatggcacccagtgccctggactcagccgacctgccaccacccagtgccctcaagaaaggcagcaaggagaagcaggctgacttcctggacaagcagatgagccgggatgagcaccgagcccgagccatgaagatccctttcaccaatgacaaaatcatcaacctgcctgtggaggagttcaatgaactgctgtccaaataccagttgagtgaagcccagctgagcctcatccgagacatccggcgccggggcaagaacaagatggcggcgcagaactgccgcaagcgcaagctggacaccatcctgaatctggagcgtgatgtggaggacctgcagcgtgacaaagcccggctgctgcgggagaaagtggagttcctgcgctccctgcgacagatgaagcagaaggtccagagcctgtaccaggaggtgtttgggcggctgcgagatgagaacggacgaccctactcgcccagtcagtatgcgctccagtacgccggggacggcagtgtcctcctcatcccccgcacgatggccgaccagcaggcccggcggcaggagaggaagccaaaggaccggagaaagtgagcctggggaagaagggggtttgaagcccaccaagaccgaaactggagaagggctggacctggacctggacctggacctacagcggggacttaaatgccttcttatccaatatatcttctcagatgggatgactgcgggtcagtgtacaggaagaggcaggcactggctggctcagctccactcgggtggagtggaagtggccagaccatttagacggacagggtcctcaccctacccctttcctgtgaggcaggggtggtggtggagttgctggaggtagaggagctatgtggagcaaaggccgacagaggggaaggaatggacctgtgagaggaagggaaggtggcagaaagtctcatttcaggaaggagggatagaaggaaggaaggaaggaacccccccccccccgaaaaaaaaatcaaagcgggaagaaaatcagagggaaggttaaggttggctctggccaggattccaggcagcaggttggagtgactggtgggcctagatcactggtgtgataaaccccaattttcaccccggggggggtggggtacacagacacagggtgggggtggggagggacggtgttaactctttctgctccttgcattttgacatccctgaaggggagctcttggatatcattggccatgtttcaatcgaatggagccactgggccccaacactggctttgagatttagagtcaaagggtagagtgaacaggaaagggtcacgtggtcccatgttgcaacagccccaacatcacgcatgtcattcactgccttgccactccatctccctccgtgctccagccacccctgagctgaggctcccattgtctccatcagagcctgcatgtgtatgccgtcctcccctggtccggtgtttgtgttccccacccctcacagactgcctgagctcttctgtaagctggggtagggtgatggcagtgctccgggaactgggcctgcagccttcctcttctgggactgctgtgaggcagaggaatgatggagaatctagtgtagcagcctccaggcaggattcagcacaacactggggagtcacccttccctcgggcctctgcctaccaacaactgggcttatcactgggaaaacacaaaaaattacacaacccagcaacaacaaaagaactagtcctcttagaatttcttgcgctttgatttttttagggcttgtgccctgtttcacttatagggtctagaatgcttgtgttgagtaaaaaggagatgcccaatattcaaagctgctaaatgttctctttgccataaagactccgtgtaactgtgtgaacacttgggatttttctcctctgtcccgaggtcgtcgtctgctttcttttttgggtttctttctagaagattgagaagtgcatatgacaggctgagagcacctccccaaacacacaagctctcagccacaggcagcttctccacagccccagcttcgcacaggctcctggagggctgcctgggggaggcagacatgggagtgccaaggtggccagatggttccaggactacaatgtctttatttttaactgtttgccactgctgccctcacccctgcccggctctggagtaccgtctgccccagacaagtgggagtgaaatgggggtggggggaagcactgattcccagttagggggtgcctaactgagcagtagggatagaaggtgtgaacctgggagtgcttttataaattattttccttgtagattttatttttaatttatctctgtgacctgccagggagaggggagagagagagagatgctgttgagcacatgacaaaataaaataaaatggatgattcattcttaagtgcactttttccccactttgaatttaaattgagaataaaggaaatggactcattgt

SEQ ID NO: 20518 - DNA, 4873 bp, Homo sapiens
  source 1..4873: mol_type = unassigned DNA
tttccgagtgcggtagcaggagggggcggggaggtaagcggaggctccgagctctaggccggccggcggtggcggcggcgaggccgggactcgggcttagggcctgctgtggaggcagcggcggacgccgagctaagcagtttctctggaaacccccctggtaagtgtggaggaggcgggacactctgacccaagacgaaaggcctgtagctccagccaaagaaaataaaccttaggagggagaaggaaaaaaaaaatccatcagctgttcctgagaacagcctgcattggaatctacagagaggacaactaatgtgagtgaggaagtgactgtatgtggactgtggagaaagtaagtcacgtgggcccttgaggacctggactgggttaggaacagttgtactttcagaggtgaggtgtcgagaagggaaagtgaatgtggtctggagtgtgtccttggccttggctccacagggtgtgctttcctctggggccgtcagggagctcatcccttgtgttctgccagggtggggtacggggtttgacactgaggagggtaacctgctggctggagcggcagagcagtggccttgatttgtcttttggaagattttaaaaaccaaaaagcataaacattctggtccttcagcaatgctttctctgaagaaatacttaacggaaggacttctccagttcaccattctgctgagtttgattggggtacgggtggacgtggatacttacctgacctcacagcttcccccactccgggagatcatcctggggcccagttctgcctatactcagacccagttccacaacctgaggaataccttggatggctatggtatccaccccaagagcatagacctggacaattacttcactgcccggcggctcctcagtcaggtgagggccctggacaggttccaggtgccaaccactgaggtaaatgcctggctggttcaccgagacccagaggggtctgtctctggcagtcagcccaactcaggcctcgccctcgagagttccagtggcctccaagatgtgacaggcccagacaacggggtgcgagaaagcgaaacggagcagggattcggtgaagatttggaggatttgggggctgtagcccccccagtcagtggagacttaaccaaagaggacatagatctgattgacatcctttggcgacaggatattgatctgggggctgggcgtgaggtttttgactatagtcaccgccagaaggagcaggatgtggagaaggagctgcgagatggaggcgagcaggacacctgggcaggcgagggcgcggaagctctggcacggaacctgctagtggatggagagactggggagagcttccctgcacaggtgcctagtggggaggaccagacggccctgtccctggaagagtgccttaggctgctggaagccacctgcccctttggggagaatgctgagtttccagcagacatttccagcataacagaagcagtgcctagtgagagtgagccccctgctcttcaaaacaacctcttgtctcctcttctgaccgggacagagtcaccatttgatttggaacagcagtggcaagatctcatgtccatcatggaaatgcaggccatggaagtgaacacatcagcaagtgaaatcctgtacagtgcccctcctggagacccactgagcaccaactacagccttgcccccaacactcccatcaatcagaatgtcagcctgcatcaggcgtccctggggggctgcagccaggacttcttactcttcagccccgaggtggaaagcctgcctgtggccagtagctccacgctgctcccgttggcccccagcaattctaccagcctcaactccaccttcggctccaccaacctgacagggctcttctttccaccccagctcaatggcacagccaatgacacagcaggcccagagctgcctgaccctttggggggtctgttagatgaagctatgttggatgagatcagccttatggacctggccattgaagaaggctttaaccctgtgcaggcctcccagctggaggaggaatttgactctgactcaggcctttccttagactcgagccatagcccttcttccctaagcagctctgaaggcagttcttcctcttcttcctcctcctcttcctcttcttcctctgcttcttcctctgcctcttcctccttttctgaggaaggtgcggttggctacagctctgactctgagaccctggatctggaagaggccgagggtgctgtgggctaccagcctgagtattccaagttctgccgcatgagctaccaggatccagctcagctctcatgcctgccctacctggagcacgtgggccacaaccacacatacaacatggcacccagtgccctggactcagccgacctgccaccacccagtgccctcaagaaaggcagcaaggagaagcaggctgacttcctggacaagcagatgagccgggatgagcaccgagcccgagccatgaagatccctttcaccaatgacaaaatcatcaacctgcctgtggaggagttcaatgaactgctgtccaaataccagttgagtgaagcccagctgagcctcatccgagacatccggcgccggggcaagaacaagatggcggcgcagaactgccgcaagcgcaagctggacaccatcctgaatctggagcgtgatgtggaggacctgcagcgtgacaaagcccggctgctgcgggagaaagtggagttcctgcgctccctgcgacagatgaagcagaaggtccagagcctgtaccaggaggtgtttgggcggctgcgagatgagaacggacgaccctactcgcccagtcagtatgcgctccagtacgccggggacggcagtgtcctcctcatcccccgcacgatggccgaccagcaggcccggcggcaggagaggaagccaaaggaccggagaaagtgagcctggggaagaagggggtttgaagcccaccaagaccgaaactggagaagggctggacctggacctggacctggacctacagcggggacttaaatgccttcttatccaatatatcttctcagatgggatgactgcgggtcagtgtacaggaagaggcaggcactggctggctcagctccactcgggtggagtggaagtggccagaccatttagacggacagggtcctcaccctacccctttcctgtgaggcaggggtggtggtggagttgctggaggtagaggagctatgtggagcaaaggccgacagaggggaaggaatggacctgtgagaggaagggaaggtggcagaaagtctcatttcaggaaggagggatagaaggaaggaaggaaggaacccccccccccccgaaaaaaaaatcaaagcgggaagaaaatcagagggaaggttaaggttggctctggccaggattccaggcagcaggttggagtgactggtgggcctagatcactggtgtgataaaccccaattttcaccccggggggggtggggtacacagacacagggtgggggtggggagggacggtgttaactctttctgctccttgcattttgacatccctgaaggggagctcttggatatcattggccatgtttcaatcgaatggagccactgggccccaacactggctttgagatttagagtcaaagggtagagtgaacaggaaagggtcacgtggtcccatgttgcaacagccccaacatcacgcatgtcattcactgccttgccactccatctccctccgtgctccagccacccctgagctgaggctcccattgtctccatcagagcctgcatgtgtatgccgtcctcccctggtccggtgtttgtgttccccacccctcacagactgcctgagctcttctgtaagctggggtagggtgatggcagtgctccgggaactgggcctgcagccttcctcttctgggactgctgtgaggcagaggaatgatggagaatctagtgtagcagcctccaggcaggattcagcacaacactggggagtcacccttccctcgggcctctgcctaccaacaactgggcttatcactgggaaaacacaaaaaattacacaacccagcaacaacaaaagaactagtcctcttagaatttcttgcgctttgatttttttagggcttgtgccctgtttcacttatagggtctagaatgcttgtgttgagtaaaaaggagatgcccaatattcaaagctgctaaatgttctctttgccataaagactccgtgtaactgtgtgaacacttgggatttttctcctctgtcccgaggtcgtcgtctgctttcttttttgggtttctttctagaagattgagaagtgcatatgacaggctgagagcacctccccaaacacacaagctctcagccacaggcagcttctccacagccccagcttcgcacaggctcctggagggctgcctgggggaggcagacatgggagtgccaaggtggccagatggttccaggactacaatgtctttatttttaactgtttgccactgctgccctcacccctgcccggctctggagtaccgtctgccccagacaagtgggagtgaaatgggggtggggggaagcactgattcccagttagggggtgcctaactgagcagtagggatagaaggtgtgaacctgggagtgcttttataaattattttccttgtagattttatttttaatttatctctgtgacctgccagggagaggggagagagagagagatgctgttgagcacatgacaaaataaaataaaatggatgattcattcttaagtgcactttttccccactttgaatttaaattgagaataaaggaaatggactcattgt

SEQ ID NO: 20519 - DNA, 4873 bp, Homo sapiens; identical to SEQ ID NO: 20518
  source 1..4873: mol_type = unassigned DNA

SEQ ID NO: 20520 - DNA, 2172 bp, Homo sapiens
  source 1..2172: mol_type = unassigned DNA
agcttgagcacggagcatggggtgggagtcccatctcactgcagcctctgcggtgagctcagggtgggggcagctgggcgcctgagtggaactggggttgtgaggtgggagggggctgctcaaggatggaggaagggggctggctgggccgcccaggcagcagcacgggcggggcaccctcctcaggcccctcggagctagcaaggggccacccttccagcctggtgtgctccctgaaagccaagagctccttgcagccccctgtccggcttcccggcaccggctgccctggggctcatctcgcagaccatgacccgcctggaccgcagctctcacagtggtgggggccatgccaaaggcagccggccccttaactctttgctggctggtcaccgggtggcccagcccgcctctgctcctgggtccagggcttctgttcaggacatagatctgattgacatcctttggcgacaggatattgatctgggggctgggcgtgaggtttttgactatagtcaccgccagaaggagcaggatgtggagaaggagctgcgagatggaggcgagcaggacacctgggcaggcgagggcgcggaagctctggcacggaacctgctagtggatggagagactggggagagcttccctgcacagtttccagcagacatttccagcataacagaagcagtgcctagtgagagtgagccccctgctcttcaaaacaacctcttgtctcctcttctgaccgggacagagtcaccatttgatttggaacagcagtggcaagatctcatgtccatcatggaaatgcaggccatggaagtgaacacatcagcaagtgaaatcctgtacagtgcccctcctggagacccactgagcaccaactacagccttgcccccaacactcccatcaatcagaatgtcagcctgcatcaggcgtccctggggggctgcagccaggacttcttactcttcagccccgaggtggaaagcctgcctgtggccagtagctccacgctgctcccgttggcccccagcaattctaccagcctcaactccaccttcggctccaccaacctgacagggctcttctttccaccccagctcaatggcacagccaatgacacagcaggcccagagctgcctgaccctttggggggtctgttagatgaagctatgttggatgagatcagccttatggacctggccattgaagaaggctttaaccctgtgcaggcctcccagctggaggaggaatttgactctgactcaggcctttccttagactcgagccatagcccttcttccctaagcagctctgaaggcagttcttcctcttcttcctcctcctcttcctcttcttcctctgcttcttcctctgcctcttcctccttttctgaggaaggtgcggttggctacagctctgactctgagaccctggatctggaagaggccgagggtgctgtgggctaccagcctgagtattccaagttctgccgcatgagctaccaggatccagctcagctctcatgcctgccctacctggagcacgtgggccacaaccacacatacaacatggcacccagtgccctggactcagccgacctgccaccacccagtgccctcaagaaaggcagcaaggagaagcaggctgacttcctggacaagcagatgagccgggatgagcaccgagcccgagccatgaagatccctttcaccaatgacaaaatcatcaacctgcctgtggaggagttcaatgaactgctgtccaaataccagttgagtgaagcccagctgagcctcatccgagacatccggcgccggggcaagaacaagatggcggcgcagaactgccgcaagcgcaagctggacaccatcctgaatctggagcgtgatgtggaggacctgcagcgtgacaaagcccggctgctgcgggagaaagtggagttcctgcgctccctgcgacagatgaagcagaaggtccagagcctgtaccaggaggtgtttgggcggctgcgagatgagaacggacgaccctactcgcccagtcagtatgcgctccagtacgccggggacggcagtgtcctcctcatcccccgcacgatggccgaccagcaggcccggcggcaggagaggaagccaaaggaccggagaaagtgagcctggggaaga

SEQ ID NO: 20521 - DNA, 2853 bp, Homo sapiens
  source 1..2853: mol_type = unassigned DNA
aaatcagggaggcgcagctcctacaccaacgcctttccggggctccgggtgtgtttgttccaactgtttaaactgtttcaaagcgtccgaactccagcgaccttcgcaaacaactctttatctcgcgggcgagagcgctgcccttatttgcgggggagggcaaactgaacgccggcaccggggagctaacggagacctcctctaggtcccccgcctgctgggaccccagctggcagtcccttcccgcccccggaccgcgagcttcttgcgtcagccccggcgcgggtgggggattttcggaagctcagcccgcgcggccggcgggggaaggaagggcccggactcttgccccgcccttgtggggcgggaggcggagcggggcaggggcccgccggcgtgtagccgattaccgagtgccggggagcccggaggagccgccgacgcagccgccaccgccgccgccgccgccaccagagccgccctgtccgcgccgcgcctcggcagccggaacagggccgccgtcggggagccccaacacacggtccacagctcatcatgatggacttggagctgccgccgccgggactcccgtcccagcaggacatggatttgattgacatactttggaggcaagatatagatcttggagtaagtcgagaagtatttgacttcagtcagcgacggaaagagtatgagctggaaaaacagaaaaaacttgaaaaggaaagacaagaacaactccaaaaggagcaagagaaagcctttttcgctcagttacaactagatgaagagacaggtgaatttctcccaattcagccagcccagcacatccagtcagaaaccagtggatctgccaactactcccaggttgcccacattcccaaatcagatgctttgtactttgatgactgcatgcagcttttggcgcagacattcccgtttgtagatgacaatgaggtttcttcggctacgtttcagtcacttgttcctgatattcccggtcacatcgagagcccagtcttcattgctactaatcaggctcagtcacctgaaacttctgttgctcaggtagcccctgttgatttagacggtatgcaacaggacattgagcaagtttgggaggagctattatccattcctgagttacagtgtcttaatattgaaaatgacaagctggttgagactaccatggttccaagtccagaagccaaactgacagaagttgacaattatcatttttactcatctataccctcaatggaaaaagaagtaggtaactgtagtccacattttcttaatgcttttgaggattccttcagcagcatcctctccacagaagaccccaaccagttgacagtgaactcattaaattcagatgccacagtcaacacagattttggtgatgaattttattctgctttcatagctgagcccagtatcagcaacagcatgccctcacctgctactttaagccattcactctctgaacttctaaatgggcccattgatgtttctgatctatcactttgcaaagctttcaaccaaaaccaccctgaaagcacagcagaattcaatgattctgactccggcatttcactaaacacaagtcccagtgtggcatcaccagaacactcagtggaatcttccagctatggagacacactacttggcctcagtgattctgaagtggaagagctagatagtgcccctggaagtgtcaaacagaatggtcctaaaacaccagtacattcttctggggatatggtacaacccttgtcaccatctcaggggcagagcactcacgtgcatgatgcccaatgtgagaacacaccagagaaagaattgcctgtaagtcctggtcatcggaaaaccccattcacaaaagacaaacattcaagccgcttggaggctcatctcacaagagatgaacttagggcaaaagctctccatatcccattccctgtagaaaaaatcattaacctccctgttgttgacttcaacgaaatgatgtccaaagagcagttcaatgaagctcaacttgcattaattcgggatatacgtaggaggggtaagaataaagtggctgctcagaattgcagaaaaagaaaactggaaaatatagtagaactagagcaagatttagatcatttgaaagatgaaaaagaaaaattgctcaaagaaaaaggagaaaatgacaaaagccttcacctactgaaaaaacaactcagcaccttatatctcgaagttttcagcatgctacgtgatgaagatggaaaaccttattctcctagtgaatactccctgcagcaaacaagagatggcaatgttttccttgttcccaaaagtaagaagccagatgttaagaaaaactagatttaggaggatttgaccttttctgagctagtttttttgtactattatactaaaagctcctactgtgatgtgaaatgctcatactttataagtaattctatgcaaaatcatagccaaaactagtatagaaaataatacgaaactttaaaaagcattggagtgtcagtatgttgaatcagtagtttcactttaactgtaaacaatttcttaggacaccatttgggctagtttctgtgtaagtgtaaatactacaaaaacttatttatactgttcttatgtcatttgttatattcatagatttatatgatgatatgacatctggctaaaaagaaattattgcaaaactaaccactatgtacttttttataaatactgtatggacaaaaaatggcattttttatattaaattgtttagctctggcaaaaaaaaaaaattttaagagctggtactaataaaggattattatgactgttaaatta

SEQ ID NO: 20522 - DNA, 2651 bp, Homo sapiens
  source 1..2651: mol_type = unassigned DNA
actttctcggccggggaggggttcgggctcgggcacccggagttggcccctcgtaacgccgcgggaaagtgcgggcgagggcagtggactctgaggccggagtcggcggcacccggggcttctagttcggacgcggtgccccctggtggcgctcaccgcgcgcgtggccttggcttccgtgacagcgctcggttggccgtcacagcagccctcggttggccctttcctgctttatagcgtgcaaacctcgccgcgccagggccaagggacaggttggagctgttgatctgttgcgcaattgctattttccccagagcggctttgtctttggatttagcgtttcagaattgcaattccaaaatgtgtaagacgggatattctcttctgtgctgtcaagggacatggatttgattgacatactttggaggcaagatatagatcttggagtaagtcgagaagtatttgacttcagtcagcgacggaaagagtatgagctggaaaaacagaaaaaacttgaaaaggaaagacaagaacaactccaaaaggagcaagagaaagcctttttcgctcagttacaactagatgaagagacaggtgaatttctcccaattcagccagcccagcacatccagtcagaaaccagtggatctgccaactactcccaggttgcccacattcccaaatcagatgctttgtactttgatgactgcatgcagcttttggcgcagacattcccgtttgtagatgacaatgaggtttcttcggctacgtttcagtcacttgttcctgatattcccggtcacatcgagagcccagtcttcattgctactaatcaggctcagtcacctgaaacttctgttgctcaggtagcccctgttgatttagacggtatgcaacaggacattgagcaagtttgggaggagctattatccattcctgagttacagtgtcttaatattgaaaatgacaagctggttgagactaccatggttccaagtccagaagccaaactgacagaagttgacaattatcatttttactcatctataccctcaatggaaaaagaagtaggtaactgtagtccacattttcttaatgcttttgaggattccttcagcagcatcctctccacagaagaccccaaccagttgacagtgaactcattaaattcagatgccacagtcaacacagattttggtgatgaattttattctgctttcatagctgagcccagtatcagcaacagcatgccctcacctgctactttaagccattcactctctgaacttctaaatgggcccattgatgtttctgatctatcactttgcaaagctttcaaccaaaaccaccctgaaagcacagcagaattcaatgattctgactccggcatttcactaaacacaagtcccagtgtggcatcaccagaacactcagtggaatcttccagctatggagacacactacttggcctcagtgattctgaagtggaagagctagatagtgcccctggaagtgtcaaacagaatggtcctaaaacaccagtacattcttctggggatatggtacaacccttgtcaccatctcaggggcagagcactcacgtgcatgatgcccaatgtgagaacacaccagagaaagaattgcctgtaagtcctggtcatcggaaaaccccattcacaaaagacaaacattcaagccgcttggaggctcatctcacaagagatgaacttagggcaaaagctctccatatcccattccctgtagaaaaaatcattaacctccctgttgttgacttcaacgaaatgatgtccaaagagcagttcaatgaagctcaacttgcattaattcgggatatacgtaggaggggtaagaataaagtggctgctcagaattgcagaaaaagaaaactggaaaatatagtagaactagagcaagatttagatcatttgaaagatgaaaaagaaaaattgctcaaagaaaaaggagaaaatgacaaaagccttcacctactgaaaaaacaactcagcaccttatatctcgaagttttcagcatgctacgtgatgaagatggaaaaccttattctcctagtgaatactccctgcagcaaacaagagatggcaatgttttccttgttcccaaaagtaagaagccagatgttaagaaaaactagatttaggaggatttgaccttttctgagctagtttttttgtactattatactaaaagctcctactgtgatgtgaaatgctcatactttataagtaattctatgcaaaatcatagccaaaactagtatagaaaataatacgaaactttaaaaagcattggagtgtcagtatgttgaatcagtagtttcactttaactgtaaacaatttcttaggacaccatttgggctagtttctgtgtaagtgtaaatactacaaaaacttatttatactgttcttatgtcatttgttatattcatagatttatatgatgatatgacatctggctaaaaagaaattattgcaaaactaaccactatgtacttttttataaatactgtatggacaaaaaatggcattttttatattaaattgtttagctctggcaaaaaaaaaaaattttaagagctggtactaataaaggattattatgactgttaaatta

SEQ ID NO: 20523 - DNA, 979 bp, Homo sapiens
  source 1..979: mol_type = unassigned DNA
actttctcggccggggaggggttcgggctcgggcacccggagttggcccctcgtaacgccgcgggaaagtgcgggcgagggcagtggactctgaggccggagtcggcggcacccggggcttctagttcggacgcggtgccccctggtggcgctcaccgcgcgcgtggccttggcttccgtgacagcgctcggttggccgtcacagcagccctcggttggccctttcctgctttatagcgtgcaaacctcgccgcgccagggccaagggacaggacatggatttgattgacatactttggaggcaagatatagatcttggagtaagtcgagaagtatttgacttcagtcagcgacggaaagagtatgagctggaaaaacagaaaaaacttgaaaaggaaagacaagaacaactccaaaaggagcaagagaaagcctttttcgctcagttacaactagatgaagagacaggtgaatttctcccaattcagccagcccagcacatccagtcagaaaccagtggatctgccaactactcccaggttgcccacattcccaaatcagatgctttgtactttgatgactgcatgcagcttttggcgcagacattcccgtttgtagatgacaatgaggtttcttcggctacgtttcagtcacttgttcctgatattcccggtcacatcgagagcccagtcttcattgctactaatcaggctcagtcacctgaaacttctgttgctcaggtagcccctgttgatttagacggtatgcaacaggacattgagcaagtttgggaggagctattatccattcctgagttacagtgtcttaatattgaaaatgacaagctggttgagactaccatggttccaagtccagaagccaaactgacagaagttgacaattatcatttttactcatctataccctcaatggaaaaagaagtaggtaactgtagtccacattttcttaatgcttttga

SEQ ID NO: 20524 - DNA, 975 bp, Homo sapiens
  source 1..975: mol_type = unassigned DNA
atagcgtgcaaacctcgccgcgccagggccaagggacaggttggagctgttgatctgttgcgcaattgctattttccccagagcggctttgtctttggatttagcgtttcagaattgcaattccaaaatgtgacatggatttgattgacatactttggaggcaagatatagatcttggagtaagtcgagaagtatttgacttcagtcagcgacggaaagagtatgagctggaaaaacagaaaaaacttgaaaaggaaagacaagaacaactccaaaaggagcaagagaaagcctttttcgctcagttacaactagatgaagagacaggtgaatttctcccaattcagccagcccagcacatccagtcagaaaccagtggatctgccaactactcccaggttgcccacattcccaaatcagatgctttgtactttgatgactgcatgcagcttttggcgcagacattcccgtttgtagatgacaatgaggtttcttcggctacgtttcagtcacttgttcctgatattcccggtcacatcgagagcccagtcttcattgctactaatcaggctcagtcacctgaaacttctgttgctcaggtagcccctgttgatttagacggtatgcaacaggacattgagcaagtttgggaggagctattatccattcctgagttacagtgtcttaatattgaaaatgacaagctggttgagactaccatggttccaagtccagaagccaaactgacagaagttgacaattatcatttttactcatctataccctcaatggaaaaagaagtaggtaactgtagtccacattttcttaatgcttttgaggattccttcagcagcatcctctccacagaagaccccaaccagttgacagtgaactcattaaattcagatgccacagtcaacacagattttggtgatgaattttattctgctttcatagctgagcccagtatcagca

SEQ ID NO: 20525 - DNA, 2399 bp, Homo sapiens
  source 1..2399: mol_type = unassigned DNA
gctttatagcgtgcaaacctcgccgcgccagggccaagggacaggttggagctgttgatctgttgcgcaattgctattttccccagagcggctttgtctttggatttagcgtttcagaattgcaattccaaaatgtgtaagacgggatattctcttctgtgctgtcaagggacatggatttgattgacatactttggaggcaagatatagatcttggagtaagtcgagaagtatttgacttcagtcagcgacggaaagagtatgagctggaaaaacagaaaaaacttgaaaaggaaagacaagaacaactccaaaaggagcaagagaaagcctttttcgctcagttacaactagatgaagagacaggtgaatttctcccaattcagccagcccagcacatccagtcagaaaccagtggatctgccaactactcccaggttgcccacattcccaaatcagatgctttgtactttgatgactgcatgcagcttttggcgcagacattcccgtttgtagatgacaatgagtcacttgttcctgatattcccggtcacatcgagagcccagtcttcattgctactaatcaggctcagtcacctgaaacttctgttgctcaggtagcccctgttgatttagacggtatgcaacaggacattgagcaagtttgggaggagctattatccattcctgagttacagtgtcttaatattgaaaatgacaagctggttgagactaccatggttccaagtccagaagccaaactgacagaagttgacaattatcatttttactcatctataccctcaatggaaaaagaagtaggtaactgtagtccacattttcttaatgcttttgaggattccttcagcagcatcctctccacagaagaccccaaccagttgacagtgaactcattaaattcagatgccacagtcaacacagattttggtgatgaattttattctgctttcatagctgagcccagtatcagcaacagcatgccctcacctgctactttaagccattcactctctgaacttctaaatgggcccattgatgtttctgatctatcactttgcaaagctttcaaccaaaaccaccctgaaagcacagcagaattcaatgattctgactccggcatttcactaaacacaagtcccagtgtggcatcaccagaacactcagtggaatcttccagctatggagacacactacttggcctcagtgattctgaagtggaagagctagatagtgcccctggaagtgtcaaacagaatggtcctaaaacaccagtacattcttctggggatatggtacaacccttgtcaccatctcaggggcagagcactcacgtgcatgatgcccaatgtgagaacacaccagagaaagaattgcctgtaagtcctggtcatcggaaaaccccattcacaaaagacaaacattcaagccgcttggaggctcatctcacaagagatgaacttagggcaaaagctctccatatcccattccctgtagaaaaaatcattaacctccctgttgttgacttcaacgaaatgatgtccaaagagcagttcaatgaagctcaacttgcattaattcgggatatacgtaggaggggtaagaataaagtggctgctcagaattgcagaaaaagaaaactggaaaatatagtagaactagagcaagatttagatcatttgaaagatgaaaaagaaaaattgctcaaagaaaaaggagaaaatgacaaaagccttcacctactgaaaaaacaactcagcaccttatatctcgaagttttcagcatgctacgtgatgaagatggaaaaccttattctcctagtgaatactccctgcagcaaacaagagatggcaatgttttccttgttcccaaaagtaagaagccagatgttaagaaaaactagatttaggaggatttgaccttttctgagctagtttttttgtactattatactaaaagctcctactgtgatgtgaaatgctcatactttataagtaattctatgcaaaatcatagccaaaactagtatagaaaataatacgaaactttaaaaagcattggagtgtcagtatgttgaatcagtagtttcactttaactgtaaacaatttcttaggacaccatttgggctagtttctgtgtaagtgtaaatactacaaaaacttatttatactgttcttatgtcatttgttatattcatagatttatatgatgatatgacatctggctaaaaagaaattattgcaaaactaaccactatgtacttttttataaatactgtatggacaaaaaatggcattttttatattaaattgtttagctctggcaaaaaaaaaaaattttaagagctggtactaataaaggattattatgactgttaaa

SEQ ID NO: 20526 - DNA, 3686 bp, Homo sapiens
  source 1..3686: mol_type = unassigned DNA
gggctcggcgctcaggtggctccttcttcgcttctcccgatccccggcggtgccaggcacggtgccggctgccgagggaacgcctttgtgcccggtgctgggaacccgcgacggccgccacgcgccccggtccattgtttcgcttatctgggttccaggcaggtgcgggcggcgcgcggggtccgcacgtgtcaccccggcggctggggcgccgggacccgcgggcgccggcaggggcgttcccgggcgcgcggcggcgatgaagcacctgaagcggtggtggtcggccggcggcggcctcctgcacctcaccctcctgctgagcttggcggggctccgcgtagacctagatctttacctgctgctgccgccgcccaccctgctgcaggacgagctgctgttcctgggcggcccggccagctccgcctacgcgctcagccccttctcggcctcgggagggtgggggcgcgcgggccacttgcaccccaagggccgggagctggaccctgccgcgccgcccgagggccagctgctccgggaggtgcgcgcgctcggggtccccttcgtccctcgcaccagcgtggatgcatggctggtgcacagcgtggctgccgggagcgcggacgaggcccacgggctgctcggcgccgccgccgcctcgtccaccggaggagccggcgccagcgtggacggcggcagccaggctgtgcaggggggcggcggggacccccgagcggctcggagtggccccttggacgccggggaagaggagaaggcacccgcggaaccgacggctcaggtgccggacgctggcggatgtgcgagcgaggagaatggggtactaagagaaaagcacgaagctgtggatcatagttcccagcatgaggaaaatgaagaaagggtgtcagcccagaaggagaactcacttcagcagaatgatgatgatgaaaacaaaatagcagagaaacctgactgggaggcagaaaagaccactgaatctagaaatgagagacatctgaatgggacagatacttctttctctctggaagacttattccagttgctttcatcacagcctgaaaattcactggagggcatctcattgggagatattcctcttccaggcagtatcagtgatggcatgaattcttcagcacattatcatgtaaacttcagccaggctataagtcaggatgtgaatcttcatgaggccatcttgctttgtcccaacaatacatttagaagagatccaacagcaaggacttcacagtcacaagaaccatttctgcagttaaattctcataccaccaatcctgagcaaacccttcctggaactaatttgacaggatttctttcaccggttgacaatcatatgaggaatctaacaagccaagacctactgtatgaccttgacataaatatatttgatgagataaacttaatgtcattggccacagaagacaactttgatccaatcgatgtttctcagctttttgatgaaccagattctgattctggcctttctttagattcaagtcacaataatacctctgtcatcaagtctaattcctctcactctgtgtgtgatgaaggtgctataggttattgcactgaccatgaatctagttcccatcatgacttagaaggtgctgtaggtggctactacccagaacccagtaagctttgtcacttggatcaaagtgattctgatttccatggagatcttacatttcaacacgtatttcataaccacacttaccacttacagccaactgcaccagaatctacttctgaaccttttccgtggcctgggaagtcacagaagataaggagtagataccttgaagacacagatagaaacttgagccgtgatgaacagcgtgctaaagctttgcatatccctttttctgtagatgaaattgtcggcatgcctgttgattctttcaatagcatgttaagtagatattatctgacagacctacaagtctcacttatccgtgacatcagacgaagagggaaaaataaagttgctgcgcagaactgtcgtaaacgcaaattggacataattttgaatttagaagatgatgtatgtaacttgcaagcaaagaaggaaactcttaagagagagcaagcacaatgtaacaaagctattaacataatgaaacagaaactgcatgacctttatcatgatatttttagtagattaagagatgaccaaggtaggccagtcaatcccaaccactatgctctccagtgtacccatgatggaagtatcttgatagtacccaaagaactggtggcctcaggccacaaaaaggaaacccaaaagggaaagagaaagtgagaagaaactgaagatggactctattatgtgaagtagtaatgttcagaaactgattatttggatcagaaaccattgaaactgcttcaagaattgtatctttaagtactgctacttgaataactcagttaacgctgttttgaagcttacatggacaaatgtttaggacttcaagatcacacttgtgggcaatctgggggagccacaacttttcatgaagtgcattgtatacaaaattcatagttatgtccaaagaataggttaacatgaaaacccagtaagactttccatcttggcagccatcctttttaagagtaagttggttacttcaaaaagagcaaacactggggatcaaattattttaagaggtatttcagttttaaatgcaaaatagccttattttcatttagtttgttagcactatagtgagcttttcaaacactattttaatctttatatttaacttataaattttgctttctatggaaataaattttgtatttgtattaaaaattaacttttcccttttatacagaatctgaaccaaatttaccttactttccttccaaaatatccacattcaggaatataggtgaataacaaataaggcagcatagcaaactgctcagactcaagccaaattgaggtcaacatagtatgccaaatccatagtaaggcaaatccacccccctaccccaatacttaacacacagaatactatgtgatatagaatgcactgaagacctacggtcactggtagtttgagccacaggccttcctcatgtaaccagagacagaatgggctacttgcaaaaacgtaactccttgtgtgtatattaaatccataaaatctctggcagtaaagccagcctgaagggatggcctcaccatcttagaatactgagatctcaccagaacactgtaagccatataaacagtagggaaagagtcagcaacagtgaaaccatctgtttaaaatgggcaaaagcgattaagggaaaaaaaacaggtgaatttgaaaataaaccagggtaaggtaaattctagaaataatagcatttgaaatgaaaacctcacttaagttcactagaacagtaaacaggagattgctgaattttttgaagacagcaatgacctcacctagatgactcaagtttggggaacatcaagattttgacgggtactataatgcttaatatgtccaaattttcaaaatgaagtttctcagatattatttctgccataggagctacagtgtagagtatcacataagtatcttgggctagagaaatgcagtttatatataccgttggatttttataataaagtttcccaagacctgtta

SEQ ID NO: 20527 - DNA, 2247 bp, Homo sapiens
  source 1..2247: mol_type = unassigned DNA
tcagtgtatcaaagggacacctgcacccccatgtttattgcagcaatattcacaatagccttgtagttttagcgcttagaggcatttaaacagcctctctcctccagactacttcactgtagtttattatccctgaccctccacaatgtgattaccaaccgctaggatgagttgcatcttattataaagtagcaaattacaagattgtaacattagactttttaagaaaatccagtcagcttttatactaatccatcttaatttctaggttactcagaattccaggtattctgatttggactcacatctcgtattgtattgcctgtatttaactaggaagttactgccaacagcatctatctctattaaatgtagaggaattgacaaaagaggggaaagaaagttgttaggtaatagaactgcttcagaaatagggctattcatgtttgaagtgtttctccttcgtttttcagggcatctcattgggagatattcctcttccaggcagtatcagtgatggcatgaattcttcagcacattatcatgtaaacttcagccaggctataagtcaggatgtgaatcttcatgaggccatcttgctttgtcccaacaatacatttagaagagatccaacagcaaggacttcacagtcacaagaaccatttctgcagttaaattctcataccaccaatcctgagcaaacccttcctggaactaatttgacaggatttctttcaccggttgacaatcatatgaggaatctaacaagccaagacctactgtatgaccttgacataaatatatttgatgagataaacttaatgtcattggccacagaagacaactttgatccaatcgatgtttctcagctttttgatgaaccagattctgattctggcctttctttagattcaagtcacaataatacctctgtcatcaagtctaattcctctcactctgtgtgtgatgaaggtgctataggttattgcactgaccatgaatctagttcccatcatgacttagaaggtgctgtaggtggctactacccagaacccagtaagctttgtcacttggatcaaagtgattctgatttccatggagatcttacatttcaacacgtatttcataaccacacttaccacttacagccaactgcaccagaatctacttctaaccttttccgtcctgggaagtcacagaagataaggagtagataccttgaagacacagatagaaacttgagccgtgatgaacagcgtgctaaagctttgcatatccctttttctgtagatgaaattgtcggcatgcctgttgattctttcaatagcatgttaagtagatattatctgacagacctacaagtctcacttatccgtgacatcagacgaagagggaaaaataaagttgctgcgcagaactgtcgtaaacgcaaattggacataattttgaatttagaagatgatgtatgtaacttgcaagcaaagaaggaaactcttaagagagagcaagcacaatgtaacaaagctattaacataatgaaacagaaactgcatgacctttatcatgatatttttagtagattaagagatgaccaaggtaggccagtcaatcccaaccactatgctctccagtgtacccatgatggaagtatcttgatagtacccaaagaactggtggcctcaggccacaaaaaggaaacccaaaagggaaagagaaagtgagaagaaactgaagatggactctattatgtgaagtagtaatgttcagaaactgattatttggatcagaaaccattgaaactgcttcaagaattgtatctttaagtactgctacttgaataactcagttaacgctgttttgaagcttacatggacaaatgtttaggacttcaagatcacacttgtgggcaatctgggggagccacaacttttcatgaagtgcattgtatacaaaattcatagttatgtccaaagaataggttaacatgaaaacccagtaagactttccatcttggcagccatcctttttaagagtaagttggttacttcaaaaagagcaaacactggggatcaaattattttaagaggtatttcagttttaaatgcaaaatagccttattttcatttagtttgttagcactatagtgagcttttcaaacactattttaatctttatatttaacttataaattttgctttctatggaaataaattttgtatttgtattaaaaattaacttttccctttt

SEQ ID NO: 20528 - DNA, 1463 bp, Homo sapiens
  source 1..1463: mol_type = unassigned DNA
caagaagcaggcttgatttttttttctccccccttctctctctctctctctctctctcttcctctctccctctttctcctctctcacccacactcacgcacacctccaaaccgcacacccagacgcacacgcataccccagcgcccggcagttatgtattctccgctctgtctcacccaggatgaatttcatcctttcatcgaagcacttctgccccacgtccgagcctttgcctacacatggttcaacctgcaggcccgaaaacgaaaatacttcaaaaaacatgaaaagcgtatgtcaaaagaagaagagagagccgtgaaggatgaattgctaagtgaaaaaccagaggtcaagcagaagtgggcatctcgacttctggcaaagttgcggaaagatatccgacccgaatatcgagaggattttgttcttacagttacagggaaaaaacctccatgttgtgttctttccaacccagaccagaaaggcaagatgcgaagaattgactgcctccgccaggcagataaagtctggaggttggaccttgttatggtgattttgtttaaaggtattccgctggaaagtactgatggcgagcgccttgtaaagtccccacaatgctctaatccagggctctgtgtccaaccccatcacataggggtttctgttaaggaactcgatttatatttggcatactttgtgcatgcagcaggaatgccatctccaaccacactgaagaagtcggagaagtctggtttcagcagcccctccccttcacagacctcctccctgggaacggcgttcacacagcatcaccgacctgtcattacaggacccagagcaagtccgcatgcaacaccatcgactcttcatttcccgacatcacccattatccagcagcctgggccttacttctcacacccagccatccgctatcaccctcaggagacgctgaaagaatttgtccaacttgtctgccctgatgctggtcagcaggctggacaggtggggttcctcaatcccaatgggagcagccaaggcaaggtgcacaacccattccttcccaccccaatgttgccaccgccaccgccaccaccgatggccaggcctgtgcctctgccggtgccagacacaaagcctccaaccacgtcaacagaaggaggtgcagcctcccccacgtcaccaacctactcgacacccagcacctcccccgcaaaccgattcgtcagtgttggaccacgggatccaagctttgtaaatatccctcaacagacacagtcctggtacctgggataaaagttgcagcgtcccaccatccaccagacagaccacctgaccccttctcaactctgtaacatggacgcaacctcaacccagcgcagttacaacttcactatcagcggaaggggagaaaaaccgattcaaatcaacttgtacatggaaacagcaagcattatggtcaa

SEQ ID NO: 20529 - DNA, 1838 bp, Homo sapiens
  source 1..1838: mol_type = unassigned DNA
ttggaaatgtgaacgcaagaagcaggcttgatttttttttctccccccttctctctctctctctctctctctcttcctctctccctctttctcctctctcacccacactcacgcacacctccaaaccgcacacccagacgcacacgcataccccagcgcccggcagttatgtattctccgctctgtctcacccaggatgaatttcatcctttcatcgaagcacttctgccccacgtccgagcctttgcctacacatggttcaacctgcaggcccgaaaacgaaaatacttcaaaaaacatgaaaagcgtatgtcaaaagaagaagagagagccgtgaaggatgaattgctaagtgaaaaaccagaggtcaagcagaagtgggcatctcgacttctggcaaagttgcggaaagatatccgacccgaatatcgagaggattttgttcttacagttacagggaaaaaacctccatgttgtgttctttccaacccagaccagaaaggcaagatgcgaagaattgactgcctccgccaggcagataaagtctggaggttggaccttgttatggtgattttgtttaaaggtattccgctggaaagtactgatggcgagcgccttgtaaagtccccacaatgctctaatccagggctctgtgtccaaccccatcacataggggtttctgttaaggaactcgatttatatttggcatactttgtgcatgcagcaggacatttgggcttccaggacagttttgtcacatcaggtgtttttagtgtcactgagctagtaagagtgtcacagacaccaatagctgcaggaactggcccaaatttttctctctcagatttggaaagttcttcatactacagcatgagtccaggagcaatgaggaggtctttacccagcacatcctctacgagctccacaaagcgcctcaagtctgtggaggatgaaatggacagtcctggtgaggagccattttatacaggccaagggcgctccccaggaagtggcagtcagtcaagtggatggcatgaagtggagccaggaatgccatctccaaccacactgaagaagtcggagaagtctggtttcagcagcccctccccttcacagacctcctccctgggaacggcgttcacacagcatcaccgacctgtcattacaggacccagagcaagtccgcatgcaacaccatcgactcttcatttcccgacatcacccattatccagcagcctgggccttacttctcacacccagccatccgctatcaccctcaggagacgctgaaagaatttgtccaacttgtctgccctgatgctggtcagcaggctggacaggtggggttcctcaatcccaatgggagcagccaaggcaaggtgcacaacccattccttcccaccccaatgttgccaccgccaccgccaccaccgatggccaggcctgtgcctctgccggtgccagacacaaagcctccaaccacgtcaacagaaggaggtgcagcctcccccacgtcaccaacctactcgacacccagcacctcccccgcaaaccgattcgtcagtgttggaccacgggatccaagctttgtaaatatccctcaacagacacagtcctggtacctgggataaaagttgcagcgtcccaccatccaccagacagaccacctgaccccttctcaactctgtaacatggacgcaacctcaacccagcgcagttacaacttcactatcagcggaaggggagaaaaaccgattcaaatcaacttgtacatggaaacagcaagcattatggtcaaacagcaaaggccataaccttttgggattttttttttttt

SEQ ID NO: 20530 - DNA, 2532 bp, Homo sapiens
  source 1..2532: mol_type = unassigned DNA
cacccacactcacgcacacctccaaaccgcacacccagacgcacacgcataccccagcgcccggcagttatgtattctccgctctgtctcacccaggatgaatttcatcctttcatcgaagcacttctgccccacgtccgagcctttgcctacacatggttcaacctgcaggcccgaaaacgaaaatacttcaaaaaacatgaaaagcgtatgtcaaaagaagaagagagagccgtgaaggatgaattgctaagtgaaaaaccagaggtcaagcagaagtgggcatctcgacttctggcaaagttgcggaaagatatccgacccgaatatcgagaggattttgttcttacagttacagggaaaaaacctccatgttgtgttctttccaacccagaccagaaaggcaagatgcgaagaattgactgcctccgccaggcagataaagtctggaggttggaccttgttatggtgattttgtttaaaggtattccgctggaaagtactgatggcgagcgccttgtaaagtccccacaatgctctaatccagggctctgtgtccaaccccatcacataggggtttctgttaaggaactcgatttatatttggcatactttgtgcatgcagcagattcaagtcaatctgaaagtcccagccagccaagtgacgctgacattaaggaccagccagaaaatggacatttgggcttccaggacagttttgtcacatcaggtgtttttagtgtcactgagctagtaagagtgtcacagacaccaatagctgcaggaactggcccaaatttttctctctcagatttggaaagttcttcatactacagcatgagtccaggagcaatgaggaggtctttacccagcacatcctctacgagctccacaaagcgcctcaagtctgtggaggatgaaatggacagtcctggtgaggagccattttatacaggccaagggcgctccccaggaagtggcagtcagtcaagtggatggcatgaagtggagccagcaagtccgcatgcaacaccatcgactcttcatttcccgacatcacccattatccagcagcctgggccttacttctcacacccagccatccgctatcaccctcaggagacgctgaaagaatttgtccaacttgtctgccctgatgctggtcagcaggctggacaggtggggttcctcaatcccaatgggagcagccaaggcaaggtgcacaacccattccttcccaccccaatgttgccaccgccaccgccaccaccgatggccaggcctgtgcctctgccggtgccagacacaaagcctccaaccacgtcaacagaaggaggtgcagcctcccccacgtcaccaacctactcgacacccagcacctcccccgcaaaccgattcgtcagtgttggaccacgggatccaagctttgtaaatatccctcaacagacacagtcctggtacctgggataaaagttgcagcgtcccaccatccaccagacagaccacctgaccccttctcaactctgtaacatggacgcaacctcaacccagcgcagttacaacttcactatcagcggaaggggagaaaaaccgattcaaatcaacttgtacatggaaacagcaagcattatggtcaaacagcaaaggccataaccttttgggatttttttttttttaaaatactttagggactgttgtaatttctcatatggtgctggaaatggttgggctttgtaacatttgaagtgtttccatggtagcgtgagcattaggtgacgtggctagcggaggactacccttgctcactgacttcctgttgtaacacactttccttacggagcctggctgtttcacagtatttcatgaatttacccacacaggtgtgatcctccttgagcattgaggaggcacatggagaactaaatcttttgtagtagctgagatctgcaatatataacgggacagtcaaagggcaatgtttttctgtaacatattggaaaaagaaaatgcagttatattccttttttatttgttcctttagtttgttttggttcagcagtcagcagttaagtatataacatggcccgcaaggacaatgaatccactcacattgcagaacaattccgaaaatggcaaactactactactactgttcagttttttaaaagttttgaaatgctgcacttacatttaaaaaaacaacaacaacattttttcaacaatttcaacaatgacacaaaaattcacatggaaatggggaagatggtctgttttgacagaaactgacaggaatcaatcaaaacaatcgaattttgaattgagtaaagtgcaatttcattggatagctaaatatctttgtaagatagagattgttgaaaattctatttttgtttttctagtcctttcaccccaggactctaaattattggggtaaaaaacagccttgcaagaaaaaggggagctatttttgctttttatgttttttattgttaaacttgtatccctttaaaaactgaaggaaattaaaaaaaa

SEQ ID NO: 20531 - DNA, 9214 bp, Homo sapiens
  source 1..9214: mol_type = unassigned DNA
acaatgctttgagccttaccgcatttcagtgggggaaaaaaagttacctaggaggtctgatttttcaaagaaatttgcatacatgcaaatgtgccgcccggcctcctcctcggttctctacgtgcccacgcggtggcccggggggtgcggggcaacctggcaaagttgcccaagtcctccaccgagacgcacacgcataccccagcgcccggcagttatgtattctccgctctgtctcacccaggatgaatttcatcctttcatcgaagcacttctgccccacgtccgagcctttgcctacacatggttcaacctgcaggcccgaaaacgaaaatacttcaaaaaacatgaaaagcgtatgtcaaaagaagaagagagagccgtgaaggatgaattgctaagtgaaaaaccagaggtcaagcagaagtgggcatctcgacttctggcaaagttgcggaaagatatccgacccgaatatcgagaggattttgttcttacagttacagggaaaaaacctccatgttgtgttctttccaacccagaccagaaaggcaagatgcgaagaattgactgcctccgccaggcagataaagtctggaggttggaccttgttatggtgattttgtttaaaggtattccgctggaaagtactgatggcgagcgccttgtaaagtccccacaatgctctaatccagggctctgtgtccaaccccatcacataggggtttctgttaaggaactcgatttatatttggcatactttgtgcatgcagcagattcaagtcaatctgaaagtcccagccagccaagtgacgctgacattaaggaccagccagaaaatggacatttgggcttccaggacagttttgtcacatcaggtgtttttagtgtcactgagctagtaagagtgtcacagacaccaatagctgcaggaactggcccaaatttttctctctcagatttggaaagttcttcatactacagcatgagtccaggagcaatgaggaggtctttacccagcacatcctctacgagctccacaaagcgcctcaagtctgtggaggatgaaatggacagtcctggtgaggagccattttatacaggccaagggcgctccccaggaagtggcagtcagtcaagtggatggcatgaagtggagccaggaatgccatctccaaccacactgaagaagtcggagaagtctggtttcagcagcccctccccttcacagacctcctccctgggaacggcgttcacacagcatcaccgacctgtcattacaggacccagagcaagtccgcatgcaacaccatcgactcttcatttcccgacatcacccattatccagcagcctgggccttacttctcacacccagccatccgctatcaccctcaggagacgctgaaagaatttgtccaacttgtctgccctgatgctggtcagcaggctggacaggtggggttcctcaatcccaatgggagcagccaaggcaaggtgcacaacccattccttcccaccccaatgttgccaccgccaccgccaccaccgatggccaggcctgtgcctctgccggtgccagacacaaagcctccaaccacgtcaacagaaggaggtgcagcctcccccacgtcaccaacctactcgacacccagcacctcccccgcaaaccgattcgtcagtgttggaccacgggatccaagctttgtaaatatccctcaacagacacagtcctggtacctgggataaaagttgcagcgtcccaccatccaccagacagaccacctgaccccttctcaactctgtaacatggacgcaacctcaacccagcgcagttacaacttcactatcagcggaaggggagaaaaaccgattcaaatcaacttgtacatggaaacagcaagcattatggtcaaacagcaaaggccataaccttttgggatttttttttttttaaaatactttagggactgttgtaatttctcatatggtgctggaaatggttgggctttgtaacatttgaagtgtttccatggtagcgtgagcattaggtgacgtggctagcggaggactacccttgctcactgacttcctgttgtaacacactttccttacggagcctggctgtttcacagtatttcatgaatttacccacacaggtgtgatcctccttgagcattgaggaggcacatggagaactaaatcttttgtagtagctgagatctgcaatatataacgggacagtcaaagggcaatgtttttctgtaacatattggaaaaagaaaatgcagttatattccttttttatttgttcctttagtttgttttggttcagcagtcagcagttaagtatataacatggcccgcaaggacaatgaatccactcacattgcagaacaattccgaaaatggcaaactactactactactgttcagttttttaaaagttttgaaatgctgcacttacatttaaaaaaacaacaacaacattttttcaacaatttcaacaatgacacaaaaattcacatggaaatggggaagatggtctgttttgacagaaactgacaggaatcaatcaaaacaatcgaattttgaattgagtaaagtgcaatttcattggatagctaaatatctttgtaagatagagattgttgaaaattctatttttgtttttctagtcctttcaccccaggactctaaattattggggtaaaaaacagccttgcaagaaaaaggggagctatttttgctttttatgttttttattgttaaacttgtatccctttaaaaactgaaggaaattaaaaaaaaaaaacaaaaaaacaaatctaatggtgcttttaccacaatatgttaactacattaaatgctaattaattattttctgttatcaaagcacatgactaaaatgaaatcatggtatctgttaattttataagctagaagtcactataatggattacgccaattctaaaaaattttacacctatctggcatcataggatttatcagttatcagacacctcattgtaccagagattgtccagaagttttaaagacctttgcatccctgaactgggctatgggaaataataatagtaataataataataataataatgatgaaaccaatactgacacaaatgctggtgcccattcagatcaagggtacttgttagggaaaaaaaaaaaagtttgcacccccaaacgtcctgtatcttatgaaaaaaaaaacaaaaaacaaaaacaaaaaaaaaacacaaaaaaccacagaaacaaaaacaaaaaaaagtgcaagtgatttttctaccagacagcgaagcacccctttgcttcccatgcgacttcaagaaggtttcctatactatacatatatatacgttctggttggcaagccctgctgatcagagaaagtctctgcatgttctagtgttagtaactaatttttatatagttaatgtaggataaagtagagtgcattaagacacaatattgtaatccctactctaggcacttgcctttaaactatgtttttcagcccttcagaagggttctactactgtcctatacaatcaagtaactgaaattcttgggaagacactttgctcctcatctttctccccgaaacaatgttgttttgttttgttttttttccttaatttgcacgaaaacaaaaattccatatcaatgtgccttgccctggatagcgattatttgtggaattgttgcacatgctcctctattgaaaggggtttttccctagtcaagcatttggagacactttttgtaaatgtgacttttatgtcagccatcgtcagtttcaacatctagaactaaatagaaagctagttgttccgcagataggagtagtctttattgtcctgtacggtcggtggcagtgctattctgagatctgtagatgcttagaatatcagtattttggatgttgctgcattttacaatttatttggagtcttcctttattttcccccagatatatgaaaatatgcaatacctgcttatatcatgtagaaaagcttagcaattattaatttttcttttatttttttttatttgaccaaagtcggtgctgcacttgacgcagtgtgttttaggtgtttgtctttgtacttttttgtgatttttgaatgcacgtgcgcaggaagggctcctcttagagaagcagtcaaactgtgaagcactaagctgaccctgcttcaagcaattttgtttttacaactgttcctttcacaagcaagccttaaaaaaaaaaaagacaacttcctttttcttcagctcccacaccccatttttcttagcagactgcagtcaatccacattcaataaaaagtatataatgcccatttttatatgcacgtttttaaacttccaagttctgaaaattgtttactggttatctctatttaaggaaaaaaaaataaaataaaacattttggattttcatatgtgtctgataagtggttgaatagtcgtttggcgctgttgtatggtgtgattgtcagtgtatggtgtcacttcctatagccagccagcatactttgccttcccctatagcacttagctgggcattactttattatgacatatgtgcactaaaaaatgaaaaaaaggaaaaaaagaaaaaaaaaaagaaaaaatagcagctttcagtgcttcacagtgaagggaaaaaagcctagacaaacattttgtcagaaccttgcaataagccaaggtattaccagtaaattggttgtatatacaataaaattgcacccttttttaaacaaaacaaactaagcaatagtttgggcagttttagttgtttttagtgagcatgttgtagtcatgactgcaaagagagagaataaactgcccgctcagaagatatgtaatttgtattgttgtatagttttattgattacactgatttattctaccctattttataatgcaggacttttgtaatgttgtttaaatgaggaaaaatttctgtcaaattagcctagtaaaatttctgatcgttcattataaaggcagcgttcatagaattgcttttctttctttttaccccccctttgggaactggatttaagtttaaaactttcctgtttcctttttttttttttttttgtaagtatttaaatacaattatttttttctctcaatggtatagcatattcctatgcttgagaagtataggtctactgaaaaaccattgtaaatggacgttacaggtatgctgtatttttgaaggtattttgttgtattaagtttgatgaagctaaaattagggaactctgaacagatttgcaggaaaaaatgttttaaaggctttaaaacattagggaggcagtctagggtgataacgaacaggggttaagtattaaatacacgaagttacatttttgttcatgtttcattgtccagaaagcagcaggaaactattcagttgtgatcaagcaggaaaaaagaaacaccaacagttgccagtgtttttgctttttagcttaaaagcatagtgaagatgcttgaggaagactttgctacctggggtgtgtagacagacagactgagagctatcagcatttgaaggcccagcccttgactctgagacacatttgaattttttctttcccatcaaatggcattaacaagattgggcaaagatgagtccctcaaatttctgtgttttttgtttgtttgtttgtttgttttttctttgggaactgaagtcagaggcacgaacactaactcttagcatttttctgtagactttttcttctggcccttgtccctgccagcaaaacgccccttttctgatcattcgtgcgcagagggcctcccagtaatgccacgctctccatgctagagagccttctctttcctctgaggtttgaactgatgttctgtgtcttcacaccctggcatgacagttacgtgtggtcagcccgctccccaggcccgtccctgccgccgccaggtgtgggctctaggcaggccgacaaggttacacctcccagagcttgtgatcttcattttctgacagtcaaagtgtgaaggaacccagacttccccgagccacggtgttcagtcagcccacaggaatatgcaagacccatctccaaaagtttgtctttgattttttccaagcccttagccccataagctttgaatcctgtagttacagtggcataaaggactgacaaaacctggataaggaaaaaccttttttttctatgaattttttttgttttttaggggaaagggattctaagaatgtcatttaatgtactttgcatcatgtctctagaaatatctttgtccatagtggtggtggagtctctctctctctctctctttttgtttgcttctgttttctttcttgtcttcattctttcttttcttttttatttctggtagcaggcctccatagaacaaatctaaaacacaaccaccatagtaatgtaaggagagcttcagtggcacctcaaaacccacccttcgagatctgtccaaagacagtctcagaaagctgcactgcccaccggctcagctttcattcaaaaaggcttccaaggccaattctgtcttgaagtcaatgcatgtatttactgtttgacagtaaacccgctctgccttctccacgtccaaggctgtgcattcgtctaattagcgtcgtgtatgttttccttttattttttccaataaaaaagcagtgggatgaaaattgctttgatatatagcaggtaacattgaagctattccatagcacttaactgtagtgaatactgtgtcaccaattttgaaatcaatttaatgtttaatgcaaatccattacatggtgctattataggctgacaaaatgatttacacaaatgtgacaacttgggctcaattcactctgctttccaacagtgtaaatgcatagcagtgtttatctgcatgagaactatgcactaatctatctgaagaaaaaaactatatcaactttggtatctactttccgtttacttcaatccttgcctttttggtcattgttataatgccagctttaggacagaaagaattataagaaaaccagcataatacctgatatattaaaatgtagtgcctgtgaaatctgtattatattgctcttctgaagtaagatttttctacaccggtagccttcgctgtctgtcagtcaggaccttctggtataggtgatgtaaaataaccgtacaatattaatgcatgcgattccataatgcttagtgaactgtatgaatattactcaaagttatgttagtctttttttccgacttggttcttgtcagctaggtttaaaggtatttcactgagaacgcaaattctgtcttttcttgatttcggctgttttcagtattttggaggtatacatttacttaaattcagtattactcgtgttttgtttttgtttttgttttttgttttctttttcctaggggacaagcatgggtgtttgatttcagaaatcagtacctggcgagatttttgtctcaaaacgactatttgaatttcaagaactgtgctgcgaagacactctgagaacatttgcaagtcaggggcattttccttgacccttgactgatgctatgcggagactgatacattttcttaatggacaatgttcaagccaggtacccatgcttgatctgtcttcacaccagacctcctcatattaaaaggaaaaataagaaaaaaaatgtaagaaatcacatggctatttagtttcatgcacagttgcaatattttcttcaaaaataaaactctgtacaaactttgggcccgattcataagaaaaagaagtttgctattaacacgggatttttttaatatactttttttggtctaaatttgaaattacttgcttcccaaattaaataaatttcatctcatttttttccctaaaccagcacccatctgccttttattccccaaagagttacctttcccagattagggggatggtatgtggggagcagatagcggaaatgcttagaaagataagggggaccacccacagctggtcgtgagaacagggagacagtgtgtgggggtgggacctcatctgtgtgcctggtatcctgagttttacatgtagatgcattcgcctatttgattcagaaaaataaactttcccaaaatgtgtctgaaccacaagagcatacagtggaagtgctacctctaatctaaccagagcaccttcatggtggaagacacccaccaggtcatacaatgtgaacttttgtatctctgcagtggtttcaaggacaaatagtgtccaatgtattgggccatttttcctgctgtttttatactcaacttctcaaaatgaaaaaagcttttatttttcctttgacttatttgtgttgttcttattttttaaatttttattttttgataatagtctgtaagttagcctttttgggttttttttttttttttttggcttttttttttgtttgtttttttttcttttgacattgcaaccgaaggtcataaggccgctagctccgctgggacagaggcttgagagaactaacggctcggtgccttctccctggtctcagaccatcgtctctgcactgcgaaggcatttggtagcctcgccactgagatactaactagacctagactaggagctttatcaggttctaggaggtcctttaggaagactctcaaaggcaaatccctgatcccccgccccacccttagccctgccctctcaccagagcaaaattcactggggacttttcccaccacacatggaaatctgtccactcggaatacctctgttttccatttcaaattgtagggggaggggatggaacacttccagtgatggtaagagatctgttatgaaacgaaacaccccccgtgttaataacttggtctgaaatctgtttttatgagccgggccccctgtgcctctagtatacttgtattgactctcatagttacccttttagttttactgtgttctgtgaaaatttgtaattggttgagaatcactgtgggcgtccattcttattcaactaaatctccacaggttttttgagctggtgtggattagtttaactcttgtattcaaccattagtgctaccaccttctcacattacaatacaattactggaagcaagtactgcatttcctatgcaacaaaaaaggaaaaataaaaaattgctaatgct

SEQ ID NO: 20532 - DNA, 1916 bp, Homo sapiens
  source 1..1916: mol_type = unassigned DNA
ttttttttttacccatgattccatatggtatggaccggactacatgttgccccacatgccactgcaaatgttttctcaattaggtgtcttatctcccgtgagttagcatcagatgaagcttgctgacagcgtaatggcagggaaagcttccgacggctccatcaaatggcagctctgctacgacatctcggccagaacttggtggatggatgaatttcatcctttcatcgaagcacttctgccccacgtccgagcctttgcctacacatggttcaacctgcaggcccgaaaacgaaaatacttcaaaaaacatgaaaagcgtatgtcaaaagaagaagagagagccgtgaaggatgaattgctaagtgaaaaaccagaggtcaagcagaagtgggcatctcgacttctggcaaagttgcggaaagatatccgacccgaatatcgagaggattttgttcttacagttacagggaaaaaacctccatgttgtgttctttccaacccagaccagaaaggcaagatgcgaagaattgactgcctccgccaggcagataaagtctggaggttggaccttgttatggtgattttgtttaaaggtattccgctggaaagtactgatggcgagcgccttgtaaagtccccacaatgctctaatccagggctctgtgtccaaccccatcacataggggtttctgttaaggaactcgatttatatttggcatactttgtgcatgcagcagattcaagtcaatctgaaagtcccagccagccaagtgacgctgacattaaggaccagccagaaaatggacatttgggcttccaggacagttttgtcacatcaggtgtttttagtgtcactgagctagtaagagtgtcacagacaccaatagctgcaggaactggcccaaatttttctctctcagatttggaaagttcttcatactacagcatgagtccaggagcaatgaggaggtctttacccagcacatcctctacgagctccacaaagcgcctcaagtctgtggaggatgaaatggacagtcctggtgaggagccattttatacaggccaagggcgctccccaggaagtggcagtcagtcaagtggatggcatgaagtggagccaggaatgccatctccaaccacactgaagaagtcggagaagtctggtttcagcagcccctccccttcacagacctcctccctgggaacggcgttcacacagcatcaccgacctgtcattacaggacccagagcaagtccgcatgcaacaccatcgactcttcatttcccgacatcacccattatccagcagcctgggccttacttctcacacccagccatccgctatcaccctcaggagacgctgaaagaatttgtccaacttgtctgccctgatgctggtcagcaggctggacaggtggggttcctcaatcccaatgggagcagccaaggcaaggtgcacaacccattccttcccaccccaatgttgccaccgccaccgccaccaccgatggccaggcctgtgcctctgccggtgccagacacaaagcctccaaccacgtcaacagaaggaggtgcagcctcccccacgtcaccaacctactcgacacccagcacctcccccgcaaaccgattcgtcagtgttggaccacgggatccaagctttgtaaatatccctcaacagacacagtcctggtacctgggataaaagttgcagcgtcccaccatccaccagacagaccacctgaccccttctcaactctgtaacatggacgcaacctcaacccagcgcagttacaacttcactatcagcggaaggggagaaaaaccgattcaaatcaacttgtacatggaaacagcaagcattatggtcaaacagcaaaggccataaccttttgggatttttttttttt

SEQ ID NO: 20533 - DNA, 9487 bp, Homo sapiens
  source 1..9487: mol_type = unassigned DNA
ggccgcggaggctcgggacccggctggccgcgcggcgccgcagccgccccctcccccacaccccctcccccccgcggcggcggcgcgagcgggcggcggctgtgcggtgcggtgcagagcggaggcggaggcgggcgcgcgggcagctcgcgggcacccggccgggccggcgcgggagcgggaaagggtgcgctatgcctttaacacccgcgtacagtaggcatgtatagtggagtgtagggaaactctaggcggggttaaagttcagctcatggagcggcaatagcgctggctggctggctgcagttgagccgacttggaaatgtgaacgcaagaagcaggcttgatttttttttctccccccttctctctctctctctctctctctcttcctctctccctctttctcctctctcacccacactcacgcacacctccaaaccgcacacccagacgcacacgcataccccagcgcccggcagttatgtattctccgctctgtctcacccaggatgaatttcatcctttcatcgaagcacttctgccccacgtccgagcctttgcctacacatggttcaacctgcaggcccgaaaacgaaaatacttcaaaaaacatgaaaagcgtatgtcaaaagaagaagagagagccgtgaaggatgaattgctaagtgaaaaaccagaggtcaagcagaagtgggcatctcgacttctggcaaagttgcggaaagatatccgacccgaatatcgagaggattttgttcttacagttacagggaaaaaacctccatgttgtgttctttccaacccagaccagaaaggcaagatgcgaagaattgactgcctccgccaggcagataaagtctggaggttggaccttgttatggtgattttgtttaaaggtattccgctggaaagtactgatggcgagcgccttgtaaagtccccacaatgctctaatccagggctctgtgtccaaccccatcacataggggtttctgttaaggaactcgatttatatttggcatactttgtgcatgcagcagattcaagtcaatctgaaagtcccagccagccaagtgacgctgacattaaggaccagccagaaaatggacatttgggcttccaggacagttttgtcacatcaggtgtttttagtgtcactgagctagtaagagtgtcacagacaccaatagctgcaggaactggcccaaatttttctctctcagatttggaaagttcttcatactacagcatgagtccaggagcaatgaggaggtctttacccagcacatcctctacgagctccacaaagcgcctcaagtctgtggaggatgaaatggacagtcctggtgaggagccattttatacaggccaagggcgctccccaggaagtggcagtcagtcaagtggatggcatgaagtggagccaggaatgccatctccaaccacactgaagaagtcggagaagtctggtttcagcagcccctccccttcacagacctcctccctgggaacggcgttcacacagcatcaccgacctgtcattacaggacccagagcaagtccgcatgcaacaccatcgactcttcatttcccgacatcacccattatccagcagcctgggccttacttctcacacccagccatccgctatcaccctcaggagacgctgaaagaatttgtccaacttgtctgccctgatgctggtcagcaggctggacaggtggggttcctcaatcccaatgggagcagccaaggcaaggtgcacaacccattccttcccaccccaatgttgccaccgccaccgccaccaccgatggccaggcctgtgcctctgccggtgccagacacaaagcctccaaccacgtcaacagaaggaggtgcagcctcccccacgtcaccaacctactcgacacccagcacctcccccgcaaaccgattcgtcagtgttggaccacgggatccaagctttgtaaatatccctcaacagacacagtcctggtacctgggataaaagttgcagcgtcccaccatccaccagacagaccacctgaccccttctcaactctgtaacatggacgcaacctcaacccagcgcagttacaacttcactatcagcggaaggggagaaaaaccgattcaaatcaacttgtacatggaaacagcaagcattatggtcaaacagcaaaggccataaccttttgggatttttttttttttaaaatactttagggactgttgtaatttctcatatggtgctggaaatggttgggctttgtaacatttgaagtgtttccatggtagcgtgagcattaggtgacgtggctagcggaggactacccttgctcactgacttcctgttgtaacacactttccttacggagcctggctgtttcacagtatttcatgaatttacccacacaggtgtgatcctccttgagcattgaggaggcacatggagaactaaatcttttgtagtagctgagatctgcaatatataacgggacagtcaaagggcaatgtttttctgtaacatattggaaaaagaaaatgcagttatattccttttttatttgttcctttagtttgttttggttcagcagtcagcagttaagtatataacatggcccgcaaggacaatgaatccactcacattgcagaacaattccgaaaatggcaaactactactactactgttcagttttttaaaagttttgaaatgctgcacttacatttaaaaaaacaacaacaacattttttcaacaatttcaacaatgacacaaaaattcacatggaaatggggaagatggtctgttttgacagaaactgacaggaatcaatcaaaacaatcgaattttgaattgagtaaagtgcaatttcattggatagctaaatatctttgtaagatagagattgttgaaaattctatttttgtttttctagtcctttcaccccaggactctaaattattggggtaaaaaacagccttgcaagaaaaaggggagctatttttgctttttatgttttttattgttaaacttgtatccctttaaaaactgaaggaaattaaaaaaaaaaaacaaaaaaacaaatctaatggtgcttttaccacaatatgttaactacattaaatgctaattaattattttctgttatcaaagcacatgactaaaatgaaatcatggtatctgttaattttataagctagaagtcactataatggattacgccaattctaaaaaattttacacctatctggcatcataggatttatcagttatcagacacctcattgtaccagagattgtccagaagttttaaagacctttgcatccctgaactgggctatgggaaataataatagtaataataataataataataatgatgaaaccaatactgacacaaatgctggtgcccattcagatcaagggtacttgttagggaaaaaaaaaaaagtttgcacccccaaacgtcctgtatcttatgaaaaaaaaaacaaaaaacaaaaacaaaaaaaaaacacaaaaaaccacagaaacaaaaacaaaaaaaagtgcaagtgatttttctaccagacagcgaagcacccctttgcttcccatgcgacttcaagaaggtttcctatactatacatatatatacgttctggttggcaagccctgctgatcagagaaagtctctgcatgttctagtgttagtaactaatttttatatagttaatgtaggataaagtagagtgcattaagacacaatattgtaatccctactctaggcacttgcctttaaactatgtttttcagcccttcagaagggttctactactgtcctatacaatcaagtaactgaaattcttgggaagacactttgctcctcatctttctccccgaaacaatgttgttttgttttgttttttttccttaatttgcacgaaaacaaaaattccatatcaatgtgccttgccctggatagcgattatttgtggaattgttgcacatgctcctctattgaaaggggtttttccctagtcaagcatttggagacactttttgtaaatgtgacttttatgtcagccatcgtcagtttcaacatctagaactaaatagaaagctagttgttccgcagataggagtagtctttattgtcctgtacggtcggtggcagtgctattctgagatctgtagatgcttagaatatcagtattttggatgttgctgcattttacaatttatttggagtcttcctttattttcccccagatatatgaaaatatgcaatacctgcttatatcatgtagaaaagcttagcaattattaatttttcttttatttttttttatttgaccaaagtcggtgctgcacttgacgcagtgtgttttaggtgtttgtctttgtacttttttgtgatttttgaatgcacgtgcgcaggaagggctcctcttagagaagcagtcaaactgtgaagcactaagctgaccctgcttcaagcaattttgtttttacaactgttcctttcacaagcaagccttaaaaaaaaaaaagacaacttcctttttcttcagctcccacaccccatttttcttagcagactgcagtcaatccacattcaataaaaagtatataatgcccatttttatatgcacgtttttaaacttccaagttctgaaaattgtttactggttatctctatttaaggaaaaaaaaataaaataaaacattttggattttcatatgtgtctgataagtggttgaatagtcgtttggcgctgttgtatggtgtgattgtcagtgtatggtgtcacttcctatagccagccagcatactttgccttcccctatagcacttagctgggcattactttattatgacatatgtgcactaaaaaatgaaaaaaaggaaaaaaagaaaaaaaaaaagaaaaaatagcagctttcagtgcttcacagtgaagggaaaaaagcctagacaaacattttgtcagaaccttgcaataagccaaggtattaccagtaaattggttgtatatacaataaaattgcacccttttttaaacaaaacaaactaagcaatagtttgggcagttttagttgtttttagtgagcatgttgtagtcatgactgcaaagagagagaataaactgcccgctcagaagatatgtaatttgtattgttgtatagttttattgattacactgatttattctaccctattttataatgcaggacttttgtaatgttgtttaaatgaggaaaaatttctgtcaaattagcctagtaaaatttctgatcgttcattataaaggcagcgttcatagaattgcttttctttctttttaccccccctttgggaactggatttaagtttaaaactttcctgtttcctttttttttttttttttgtaagtatttaaatacaattatttttttctctcaatggtatagcatattcctatgcttgagaagtataggtctactgaaaaaccattgtaaatggacgttacaggtatgctgtatttttgaaggtattttgttgtattaagtttgatgaagctaaaattagggaactctgaacagatttgcaggaaaaaatgttttaaaggctttaaaacattagggaggcagtctagggtgataacgaacaggggttaagtattaaatacacgaagttacatttttgttcatgtttcattgtccagaaagcagcaggaaactattcagttgtgatcaagcaggaaaaaagaaacaccaacagttgccagtgtttttgctttttagcttaaaagcatagtgaagatgcttgaggaagactttgctacctggggtgtgtagacagacagactgagagctatcagcatttgaaggcccagcccttgactctgagacacatttgaattttttctttcccatcaaatggcattaacaagattgggcaaagatgagtccctcaaatttctgtgttttttgtttgtttgtttgtttgttttttctttgggaactgaagtcagaggcacgaacactaactcttagcatttttctgtagactttttcttctggcccttgtccctgccagcaaaacgccccttttctgatcattcgtgcgcagagggcctcccagtaatgccacgctctccatgctagagagccttctctttcctctgaggtttgaactgatgttctgtgtcttcacaccctggcatgacagttacgtgtggtcagcccgctccccaggcccgtccctgccgccgccaggtgtgggctctaggcaggccgacaaggttacacctcccagagcttgtgatcttcattttctgacagtcaaagtgtgaaggaacccagacttccccgagccacggtgttcagtcagcccacaggaatatgcaagacccatctccaaaagtttgtctttgattttttccaagcccttagccccataagctttgaatcctgtagttacagtggcataaaggactgacaaaacctggataaggaaaaaccttttttttctatgaattttttttgttttttaggggaaagggattctaagaatgtcatttaatgtactttgcatcatgtctctagaaatatctttgtccatagtggtggtggagtctctctctctctctctctttttgtttgcttctgttttctttcttgtcttcattctttcttttcttttttatttctggtagcaggcctccatagaacaaatctaaaacacaaccaccatagtaatgtaaggagagcttcagtggcacctcaaaacccacccttcgagatctgtccaaagacagtctcagaaagctgcactgcccaccggctcagctttcattcaaaaaggcttccaaggccaattctgtcttgaagtcaatgcatgtatttactgtttgacagtaaacccgctctgccttctccacgtccaaggctgtgcattcgtctaattagcgtcgtgtatgttttccttttattttttccaataaaaaagcagtgggatgaaaattgctttgatatatagcaggtaacattgaagctattccatagcacttaactgtagtgaatactgtgtcaccaattttgaaatcaatttaatgtttaatgcaaatccattacatggtgctattataggctgacaaaatgatttacacaaatgtgacaacttgggctcaattcactctgctttccaacagtgtaaatgcatagcagtgtttatctgcatgagaactatgcactaatctatctgaagaaaaaaactatatcaactttggtatctactttccgtttacttcaatccttgcctttttggtcattgttataatgccagctttaggacagaaagaattataagaaaaccagcataatacctgatatattaaaatgtagtgcctgtgaaatctgtattatattgctcttctgaagtaagatttttctacaccggtagccttcgctgtctgtcagtcaggaccttctggtataggtgatgtaaaataaccgtacaatattaatgcatgcgattccataatgcttagtgaactgtatgaatattactcaaagttatgttagtctttttttccgacttggttcttgtcagctaggtttaaaggtatttcactgagaacgcaaattctgtcttttcttgatttcggctgttttcagtattttggaggtatacatttacttaaattcagtattactcgtgttttgtttttgtttttgttttttgttttctttttcctaggggacaagcatgggtgtttgatttcagaaatcagtacctggcgagatttttgtctcaaaacgactatttgaatttcaagaactgtgctgcgaagacactctgagaacatttgcaagtcaggggcattttccttgacccttgactgatgctatgcggagactgatacattttcttaatggacaatgttcaagccaggtacccatgcttgatctgtcttcacaccagacctcctcatattaaaaggaaaaataagaaaaaaaatgtaagaaatcacatggctatttagtttcatgcacagttgcaatattttcttcaaaaataaaactctgtacaaactttgggcccgattcataagaaaaagaagtttgctattaacacgggatttttttaatatactttttttggtctaaatttgaaattacttgcttcccaaattaaataaatttcatctcatttttttccctaaaccagcacccatctgccttttattccccaaagagttacctttcccagattagggggatggtatgtggggagcagatagcggaaatgcttagaaagataagggggaccacccacagctggtcgtgagaacagggagacagtgtgtgggggtgggacctcatctgtgtgcctggtatcctgagttttacatgtagatgcattcgcctatttgattcagaaaaataaactttcccaaaatgtgtctgaaccacaagagcatacagtggaagtgctacctctaatctaaccagagcaccttcatggtggaagacacccaccaggtcatacaatgtgaacttttgtatctctgcagtggtttcaaggacaaatagtgtccaatgtattgggccatttttcctgctgtttttatactcaacttctcaaaatgaaaaaagcttttatttttcctttgacttatttgtgttgttcttattttttaaatttttattttttgataatagtctgtaagttagcctttttgggttttttttttttttttttggcttttttttttgtttgtttttttttcttttgacattgcaaccgaaggtcataaggccgctagctccgctgggacagaggcttgagagaactaacggctcggtgccttctccctggtctcagaccatcgtctctgcactgcgaaggcatttggtagcctcgccactgagatactaactagacctagactaggagctttatcaggttctaggaggtcctttaggaagactctcaaaggcaaatccctgatcccccgccccacccttagccctgccctctcaccagagcaaaattcactggggacttttcccaccacacatggaaatctgtccactcggaatacctctgttttccatttcaaattgtagggggaggggatggaacacttccagtgatggtaagagatctgttatgaaacgaaacaccccccgtgttaataacttggtctgaaatctgtttttatgagccgggccccctgtgcctctagtatacttgtattgactctcatagttacccttttagttttactgtgttctgtgaaaatttgtaattggttgagaatcactgtgggcgtccattcttattcaactaaatctccacaggttttttgagctggtgtggattagtttaactcttgtattcaaccattagtgctaccaccttctcacattacaatacaattactggaagcaagtactgcatttcctatgcaacaaaaaaggaaaaataaaaaattgctaatgctatggaa

SEQ ID NO: 20534 - DNA, 9325 bp, Homo sapiens
  source 1..9325: mol_type = unassigned DNA
gtacaatccaaagcacgcaaggcaaaaccagagcgaatctgagaaccagccagcccgggttggatcgctttcaaaagagagagtgagagcgagcgagcgagcgagcgagagcgagacagtgagagagggagagagcgcgccttgcaattgcaaaagccttctgatttggagttaaaaaaaaaattctccaagaagcctgcaattggccaacagctttttaaaaaatctcttccgggttttcaacggttccaagtttatttagatattttttaaatgcaaaaaaaaggggacaacaaatgaagcaattcgtctgagcattttaaagtttctcacgtactctttttacattgcaatggatgaatttcatcctttcatcgaagcacttctgccccacgtccgagcctttgcctacacatggttcaacctgcaggcccgaaaacgaaaatacttcaaaaaacatgaaaagcgtatgtcaaaagaagaagagagagccgtgaaggatgaattgctaagtgaaaaaccagaggtcaagcagaagtgggcatctcgacttctggcaaagttgcggaaagatatccgacccgaatatcgagaggattttgttcttacagttacagggaaaaaacctccatgttgtgttctttccaacccagaccagaaaggcaagatgcgaagaattgactgcctccgccaggcagataaagtctggaggttggaccttgttatggtgattttgtttaaaggtattccgctggaaagtactgatggcgagcgccttgtaaagtccccacaatgctctaatccagggctctgtgtccaaccccatcacataggggtttctgttaaggaactcgatttatatttggcatactttgtgcatgcagcagattcaagtcaatctgaaagtcccagccagccaagtgacgctgacattaaggaccagccagaaaatggacatttgggcttccaggacagttttgtcacatcaggtgtttttagtgtcactgagctagtaagagtgtcacagacaccaatagctgcaggaactggcccaaatttttctctctcagatttggaaagttcttcatactacagcatgagtccaggagcaatgaggaggtctttacccagcacatcctctacgagctccacaaagcgcctcaagtctgtggaggatgaaatggacagtcctggtgaggagccattttatacaggccaagggcgctccccaggaagtggcagtcagtcaagtggatggcatgaagtggagccaggaatgccatctccaaccacactgaagaagtcggagaagtctggtttcagcagcccctccccttcacagacctcctccctgggaacggcgttcacacagcatcaccgacctgtcattacaggacccagagcaagtccgcatgcaacaccatcgactcttcatttcccgacatcacccattatccagcagcctgggccttacttctcacacccagccatccgctatcaccctcaggagacgctgaaagaatttgtccaacttgtctgccctgatgctggtcagcaggctggacaggtggggttcctcaatcccaatgggagcagccaaggcaaggtgcacaacccattccttcccaccccaatgttgccaccgccaccgccaccaccgatggccaggcctgtgcctctgccggtgccagacacaaagcctccaaccacgtcaacagaaggaggtgcagcctcccccacgtcaccaacctactcgacacccagcacctcccccgcaaaccgattcgtcagtgttggaccacgggatccaagctttgtaaatatccctcaacagacacagtcctggtacctgggataaaagttgcagcgtcccaccatccaccagacagaccacctgaccccttctcaactctgtaacatggacgcaacctcaacccagcgcagttacaacttcactatcagcggaaggggagaaaaaccgattcaaatcaacttgtacatggaaacagcaagcattatggtcaaacagcaaaggccataaccttttgggatttttttttttttaaaatactttagggactgttgtaatttctcatatggtgctggaaatggttgggctttgtaacatttgaagtgtttccatggtagcgtgagcattaggtgacgtggctagcggaggactacccttgctcactgacttcctgttgtaacacactttccttacggagcctggctgtttcacagtatttcatgaatttacccacacaggtgtgatcctccttgagcattgaggaggcacatggagaactaaatcttttgtagtagctgagatctgcaatatataacgggacagtcaaagggcaatgtttttctgtaacatattggaaaaagaaaatgcagttatattccttttttatttgttcctttagtttgttttggttcagcagtcagcagttaagtatataacatggcccgcaaggacaatgaatccactcacattgcagaacaattccgaaaatggcaaactactactactactgttcagttttttaaaagttttgaaatgctgcacttacatttaaaaaaacaacaacaacattttttcaacaatttcaacaatgacacaaaaattcacatggaaatggggaagatggtctgttttgacagaaactgacaggaatcaatcaaaacaatcgaattttgaattgagtaaagtgcaatttcattggatagctaaatatctttgtaagatagagattgttgaaaattctatttttgtttttctagtcctttcaccccaggactctaaattattggggtaaaaaacagccttgcaagaaaaaggggagctatttttgctttttatgttttttattgttaaacttgtatccctttaaaaactgaaggaaattaaaaaaaaaaaacaaaaaaacaaatctaatggtgcttttaccacaatatgttaactacattaaatgctaattaattattttctgttatcaaagcacatgactaaaatgaaatcatggtatctgttaattttataagctagaagtcactataatggattacgccaattctaaaaaattttacacctatctggcatcataggatttatcagttatcagacacctcattgtaccagagattgtccagaagttttaaagacctttgcatccctgaactgggctatgggaaataataatagtaataataataataataataatgatgaaaccaatactgacacaaatgctggtgcccattcagatcaagggtacttgttagggaaaaaaaaaaaagtttgcacccccaaacgtcctgtatcttatgaaaaaaaaaacaaaaaacaaaaacaaaaaaaaaacacaaaaaaccacagaaacaaaaacaaaaaaaagtgcaagtgatttttctaccagacagcgaagcacccctttgcttcccatgcgacttcaagaaggtttcctatactatacatatatatacgttctggttggcaagccctgctgatcagagaaagtctctgcatgttctagtgttagtaactaatttttatatagttaatgtaggataaagtagagtgcattaagacacaatattgtaatccctactctaggcacttgcctttaaactatgtttttcagcccttcagaagggttctactactgtcctatacaatcaagtaactgaaattcttgggaagacactttgctcctcatctttctccccgaaacaatgttgttttgttttgttttttttccttaatttgcacgaaaacaaaaattccatatcaatgtgccttgccctggatagcgattatttgtggaattgttgcacatgctcctctattgaaaggggtttttccctagtcaagcatttggagacactttttgtaaatgtgacttttatgtcagccatcgtcagtttcaacatctagaactaaatagaaagctagttgttccgcagataggagtagtctttattgtcctgtacggtcggtggcagtgctattctgagatctgtagatgcttagaatatcagtattttggatgttgctgcattttacaatttatttggagtcttcctttattttcccccagatatatgaaaatatgcaatacctgcttatatcatgtagaaaagcttagcaattattaatttttcttttatttttttttatttgaccaaagtcggtgctgcacttgacgcagtgtgttttaggtgtttgtctttgtacttttttgtgatttttgaatgcacgtgcgcaggaagggctcctcttagagaagcagtcaaactgtgaagcactaagctgaccctgcttcaagcaattttgtttttacaactgttcctttcacaagcaagccttaaaaaaaaaaaagacaacttcctttttcttcagctcccacaccccatttttcttagcagactgcagtcaatccacattcaataaaaagtatataatgcccatttttatatgcacgtttttaaacttccaagttctgaaaattgtttactggttatctctatttaaggaaaaaaaaataaaataaaacattttggattttcatatgtgtctgataagtggttgaatagtcgtttggcgctgttgtatggtgtgattgtcagtgtatggtgtcacttcctatagccagccagcatactttgccttcccctatagcacttagctgggcattactttattatgacatatgtgcactaaaaaatgaaaaaaaggaaaaaaagaaaaaaaaaaagaaaaaatagcagctttcagtgcttcacagtgaagggaaaaaagcctagacaaacattttgtcagaaccttgcaataagccaaggtattaccagtaaattggttgtatatacaataaaattgcacccttttttaaacaaaacaaactaagcaatagtttgggcagttttagttgtttttagtgagcatgttgtagtcatgactgcaaagagagagaataaactgcccgctcagaagatatgtaatttgtattgttgtatagttttattgattacactgatttattctaccctattttataatgcaggacttttgtaatgttgtttaaatgaggaaaaatttctgtcaaattagcctagtaaaatttctgatcgttcattataaaggcagcgttcatagaattgcttttctttctttttaccccccctttgggaactggatttaagtttaaaactttcctgtttcctttttttttttttttttgtaagtatttaaatacaattatttttttctctcaatggtatagcatattcctatgcttgagaagtataggtctactgaaaaaccattgtaaatggacgttacaggtatgctgtatttttgaaggtattttgttgtattaagtttgatgaagctaaaattagggaactctgaacagatttgcaggaaaaaatgttttaaaggctttaaaacattagggaggcagtctagggtgataacgaacaggggttaagtattaaatacacgaagttacatttttgttcatgtttcattgtccagaaagcagcaggaaactattcagttgtgatcaagcaggaaaaaagaaacaccaacagttgccagtgtttttgctttttagcttaaaagcatagtgaagatgcttgaggaagactttgctacctggggtgtgtagacagacagactgagagctatcagcatttgaaggcccagcccttgactctgagacacatttgaattttttctttcccatcaaatggcattaacaagattgggcaaagatgagtccctcaaatttctgtgttttttgtttgtttgtttgtttgttttttctttgggaactgaagtcagaggcacgaacactaactcttagcatttttctgtagactttttcttctggcccttgtccctgccagcaaaacgccccttttctgatcattcgtgcgcagagggcctcccagtaatgccacgctctccatgctagagagccttctctttcctctgaggtttgaactgatgttctgtgtcttcacaccctggcatgacagttacgtgtggtcagcccgctccccaggcccgtccctgccgccgccaggtgtgggctctaggcaggccgacaaggttacacctcccagagcttgtgatcttcattttctgacagtcaaagtgtgaaggaacccagacttccccgagccacggtgttcagtcagcccacaggaatatgcaagacccatctccaaaagtttgtctttgattttttccaagcccttagccccataagctttgaatcctgtagttacagtggcataaaggactgacaaaacctggataaggaaaaaccttttttttctatgaattttttttgttttttaggggaaagggattctaagaatgtcatttaatgtactttgcatcatgtctctagaaatatctttgtccatagtggtggtggagtctctctctctctctctctttttgtttgcttctgttttctttcttgtcttcattctttcttttcttttttatttctggtagcaggcctccatagaacaaatctaaaacacaaccaccatagtaatgtaaggagagcttcagtggcacctcaaaacccacccttcgagatctgtccaaagacagtctcagaaagctgcactgcccaccggctcagctttcattcaaaaaggcttccaaggccaattctgtcttgaagtcaatgcatgtatttactgtttgacagtaaacccgctctgccttctccacgtccaaggctgtgcattcgtctaattagcgtcgtgtatgttttccttttattttttccaataaaaaagcagtgggatgaaaattgctttgatatatagcaggtaacattgaagctattccatagcacttaactgtagtgaatactgtgtcaccaattttgaaatcaatttaatgtttaatgcaaatccattacatggtgctattataggctgacaaaatgatttacacaaatgtgacaacttgggctcaattcactctgctttccaacagtgtaaatgcatagcagtgtttatctgcatgagaactatgcactaatctatctgaagaaaaaaactatatcaactttggtatctactttccgtttacttcaatccttgcctttttggtcattgttataatgccagctttaggacagaaagaattataagaaaaccagcataatacctgatatattaaaatgtagtgcctgtgaaatctgtattatattgctcttctgaagtaagatttttctacaccggtagccttcgctgtctgtcagtcaggaccttctggtataggtgatgtaaaataaccgtacaatattaatgcatgcgattccataatgcttagtgaactgtatgaatattactcaaagttatgttagtctttttttccgacttggttcttgtcagctaggtttaaaggtatttcactgagaacgcaaattctgtcttttcttgatttcggctgttttcagtattttggaggtatacatttacttaaattcagtattactcgtgttttgtttttgtttttgttttttgttttctttttcctaggggacaagcatgggtgtttgatttcagaaatcagtacctggcgagatttttgtctcaaaacgactatttgaatttcaagaactgtgctgcgaagacactctgagaacatttgcaagtcaggggcattttccttgacccttgactgatgctatgcggagactgatacattttcttaatggacaatgttcaagccaggtacccatgcttgatctgtcttcacaccagacctcctcatattaaaaggaaaaataagaaaaaaaatgtaagaaatcacatggctatttagtttcatgcacagttgcaatattttcttcaaaaataaaactctgtacaaactttgggcccgattcataagaaaaagaagtttgctattaacacgggatttttttaatatactttttttggtctaaatttgaaattacttgcttcccaaattaaataaatttcatctcatttttttccctaaaccagcacccatctgccttttattccccaaagagttacctttcccagattagggggatggtatgtggggagcagatagcggaaatgcttagaaagataagggggaccacccacagctggtcgtgagaacagggagacagtgtgtgggggtgggacctcatctgtgtgcctggtatcctgagttttacatgtagatgcattcgcctatttgattcagaaaaataaactttcccaaaatgtgtctgaaccacaagagcatacagtggaagtgctacctctaatctaaccagagcaccttcatggtggaagacacccaccaggtcatacaatgtgaacttttgtatctctgcagtggtttcaaggacaaatagtgtccaatgtattgggccatttttcctgctgtttttatactcaacttctcaaaatgaaaaaagcttttatttttcctttgacttatttgtgttgttcttattttttaaatttttattttttgataatagtctgtaagttagcctttttgggttttttttttttttttttggcttttttttttgtttgtttttttttcttttgacattgcaaccgaaggtcataaggccgctagctccgctgggacagaggcttgagagaactaacggctcggtgccttctccctggtctcagaccatcgtctctgcactgcgaaggcatttggtagcctcgccactgagatactaactagacctagactaggagctttatcaggttctaggaggtcctttaggaagactctcaaaggcaaatccctgatcccccgccccacccttagccctgccctctcaccagagcaaaattcactggggacttttcccaccacacatggaaatctgtccactcggaatacctctgttttccatttcaaattgtagggggaggggatggaacacttccagtgatggtaagagatctgttatgaaacgaaacaccccccgtgttaataacttggtctgaaatctgtttttatgagccgggccccctgtgcctctagtatacttgtattgactctcatagttacccttttagttttactgtgttctgtgaaaatttgtaattggttgagaatcactgtgggcgtccattcttattcaactaaatctccacaggttttttgagctggtgtggattagtttaactcttgtattcaaccattagtgctaccaccttctcacattacaatacaattactggaagcaagtactgcatttcctatgcaacaaaaaaggaaaaataaaaaattgctaatgct

SEQ ID NO: 20535 - DNA, 1828 bp, Homo sapiens
  source 1..1828: mol_type = unassigned DNA
ctgcagttgagccgacttggaaatgtgaacgcaagaagcaggcttgatttttttttctccccccttctctctctctctctctctctctcttcctctctccctctttctcctctctcacccacactcacgcacacctccaaaccgcacacccagacgcacacgcataccccagcgcccggcagttatgtattctccgctctgtctcacccaggatgaatttcatcctttcatcgaagcacttctgccccacgtccgagcctttgcctacacatggttcaacctgcaggcccgaaaacgaaaatacttcaaaaaacatgaaaagcgtatgtcaaaagaagaagagagagccgtgaaggatgaattgctaagtgaaaaaccagaggtcaagcagaagtgggcatctcgacttctggcaaagttgcggaaagatatccgacccgaatatcgagaggattttgttcttacagttacagggaaaaaacctccatgttgtgttctttccaacccagaccagaaaggcaagatgcgaagaattgactgcctccgccaggcagataaagtctggaggttggaccttgttatggtgattttgtttaaaggtattccgctggaaagtactgatggcgagcgccttgtaaagtccccacaatgctctaatccagggctctgtgtccaaccccatcacataggggtttctgttaaggaactcgatttatatttggcatactttgtgcatgcagcagattcaagtcaatctgaaagtcccagccagccaagtgacgctgacattaaggaccagccagaaaatggacatttgggcttccaggacagttttgtcacatcaggtgtttttagtgtcactgagctagtaagagtgtcacagacaccaatagctgcaggaactggcccaaatttttctctctcagatttggaaagttcttcatactacagcatgagtccaggagcaatgaggaggtctttacccagcacatcctctacgagctccacaaagcgcctcaagtctgtggaggatgaaatggacagtcctggtgaggagccattttatacaggccaagggcgctccccaggaagtggcagtcagtcaagtggatggcatgaagtggagccaggaatgccatctccaaccacactgaagaagtcggagaagtctggtttcagcagcccctccccttcacagacctcctccctgggaacggcgttcacacagcatcaccgacctgtcattacaggacccagagcaagtccgcatgcaacaccatcgactcttcatttcccgacatcacccattatccagcagcctgggccttacttctcacacccagccatccgctatcaccctcaggagacgctgaaagaatttgtccaacttgtctgccctgatgctggtcagcaggctggacaggtggggttcctcaatcccaatgggagcagccaaggcaaggtgcacaacccattccttcccaccccaatgttgccaccgccaccgccaccaccgatggccaggcctgtgcctctgccggtgccagacacaaagcctccaaccacgtcaacagaaggaggtgcagcctcccccacgtcaccaatcctggtacctgggataaaagttgcagcgtcccaccatccaccagacagaccacctgaccccttctcaactctgtaacatggacgcaacctcaacccagcgcagttacaacttcactatcagcggaaggggagaaaaaccgattcaaatcaacttgtacatggaaacagcaagcattatggtcaaacagcaaaggccataaccttttgggattttttttttttt

SEQ ID NO: 20536 - DNA, 1274 bp, Homo sapiens
  source 1..1274: mol_type = unassigned DNA
gcccccctccccgccttttttgaaaaagcattttaccaccaaccaccaccccaatccaacccacaccgaaccttcgcgcaccccctacaccccaacaacaacaacaactgcaaaatagaaaacaaatccccaaacccaggcgaaaagcagccaacaccggcggcggcggcggcctcggcaagcacggccagcgcgctcggactgcaagagggttaaaagtgtagattggatttcacccctggaaatctagcacgccgagtgaacttgaatctttggctatttaaggaggactgggtttgttgtgaagttgcggtgatccagcgcagagccccgtcctgattgatcgcatcgcggggctcagatgactgtaaaatgaatagatgaaattcttgcttctcgaagattttcttgggcatctcccggaaagtgcgttttaaggcgaagtcatgatgtattctcccatctgtctcactcaggatgaatttcacccattcatcgaggcacttcttccacatgtccgtgcaattgcctatacttggttcaacctgcaggctcgaaaacgcaagtactttaaaaagcatgagaagcgaatgtcaaaggatgaagaaagagcagtcaaagatgagcttctcagtgaaaagcctgaaatcaaacagaagtgggcatccaggctccttgccaaactgcgcaaagatattcgccaggagtatcgagaggactttgtgctcaccgtgactggcaagaagcacccgtgctgtgtcttatccaatcccgaccagaagggtaagattaggagaatcgactgcctgcgacaggcagacaaagtctggcgtctggatctagtcatggtgatcctgttcaaaggcatccccttggaaagtaccgatggagagcggctcatgaaatccccacattgcacaaacccagcactttgtgtccagccacatcatatcacagtatcagttaaggagcttgatttgtttttggcatactacgtgcaggagcaaggtaagaatttcttttcttcaaataaatgcatcaagatatagatgtccttgcattaccaacaatccatagtaaaacaatcattttacaaagccgcataccaaaagtagactgaagtttgagctgtcacagatggtaggtcatttccaaacttggcctggtgggaggaaaaatggcctgcagatagccaggtgacagactgttacctgaggtttgttatataaatgtgggacttaataaactgctatgagctttattattcaaaaaaa

SEQ ID NO: 20537 - DNA, 840 bp, Homo sapiens
  source 1..840: mol_type = unassigned DNA
atgaacagcacactgaggaggacacaaaagaagtagacagaatctctgcctctgcttaggagtatgcaatttagttggggcgacaaaacttaaatgctagaaccaataaaagaagattacaaagcaactcgcaaattctggacaatcaggaagtccaagccacaatgatcctgccaagaatcctccaggttaccttgaggatagttttgtaaaatctggagtcttcaatgtatcagaacttgtaagagtatccagaacgcccataacccagggaactggagtcaacttcccaattggagaaatcccaagccaaccatactatcatgacatgaactcgggggtcaatcttcagaggtctctgtcttctccaccaagcagcaaaagacccaaaactatatccatagatgaaaatatggaaccaagtcctacaggagacttttacccctctccaagttcaccagctgctggaagtcgaacatggcacgaaagagatcaagatatgtcttctccgactactatgaagaagcctgaaaagccattgttcagctctgcatctccacaggattcttccccaagactgagcactttcccccagcaccaccatcccggaatacctggagttgcacacagtgtcatctcaactcgaactccacctccaccttcaccgttgccatttccaacacaagctatccttcctccagccccatcgagctacttttctcatccaacaatcagatatcctccccacctgaatcctcaggatactctgaagaactatgtaccttcttatgacccatccagtccacaaaccagccagtcctggtacctgggctagcttgg

SEQ ID NO: 20538 - DNA, 8159 bp, Homo sapiens
  source 1..8159: mol_type = unassigned DNA
tattgggcagtacaggtctagatgatcaaatgcctacactgaatgacttcatagaatatcactgttgagctgacaccgatctaaaagattcacatgtcggagcaagactgttagtggagtaaactcctcgagtgtacaggacccctttgttcttgttctattttgtttttaacagcttgctctgctccataaagatccatcagtcaccctcaaactcttcggaccttctgcctgttcattcctatgaagctgcgtttgctaaggtactcggtgacctggagcaaacattctaaaacagcgcaaatggcagaagcagagcctacaggcttcttgtcgggaatccgttcggagtatggaaagaatcccagtgtctgtggacttctgggttgtctgctgtgcagttctgaaatgtaaccctgggattcctaaaagaatgtcaactctgtgctttggattttctgatgaatttcacccattcatcgaggcacttcttccacatgtccgtgcaattgcctatacttggttcaacctgcaggctcgaaaacgcaagtactttaaaaagcatgagaagcgaatgtcaaaggatgaagaaagagcagtcaaagatgagcttctcagtgaaaagcctgaaatcaaacagaagtgggcatccaggctccttgccaaactgcgcaaagatattcgccaggagtatcgagaggactttgtgctcaccgtgactggcaagaagcacccgtgctgtgtcttatccaatcccgaccagaagggtaagattaggagaatcgactgcctgcgacaggcagacaaagtctggcgtctggatctagtcatggtgatcctgttcaaaggcatccccttggaaagtaccgatggagagcggctcatgaaatccccacattgcacaaacccagcactttgtgtccagccacatcatatcacagtatcagttaaggagcttgatttgtttttggcatactacgtgcaggagcaagattctggacaatcaggaagtccaagccacaatgatcctgccaagaatcctccaggttaccttgaggatagttttgtaaaatctggagtcttcaatgtatcagaacttgtaagagtatccagaacgcccataacccagggaactggagtcaacttcccaattggagaaatcccaagccaaccatactatcatgacatgaactcgggggtcaatcttcagaggtctctgtcttctccaccaagcagcaaaagacccaaaactatatccatagatgaaaatatggaaccaagtcctacaggagacttttacccctctccaagttcaccagctgctggaagtcgaacatggcacgaaagagatcaagatatgtcttctccgactactatgaagaagcctgaaaagccattgttcagctctgcatctccacaggattcttccccaagactgagcactttcccccagcaccaccatcccggaatacctggagttgcacacagtgtcatctcaactcgaactccacctccaccttcaccgttgccatttccaacacaagctatccttcctccagccccatcgagctacttttctcatccaacaatcagatatcctccccacctgaatcctcaggatactctgaagaactatgtaccttcttatgacccatccagtccacaaaccagccagtcctggtacctgggctagcttggttcctttccaagtgtcaaataggacacccatcttaccggccaatgtccaaaattacggtttgaacataattggagaacctttccttcaagcagaaacaagcaactgagggaaaaagaaacacaacaatagtttaagaaattttttttttaaataaaaaaaaaggaaaagaggaagactggacaaaacaacacaaaggcagaaaggaaagaaactgaagaaagaagataatagaccagcaattgcagcacttacaatcactaattcccttaaggttgaaactgtaatgacataaaaagggtcgatgatatttcactgatggtagatcgcagcccctgcaacgtagcctttgttacatgaagtccgctgggaaatagatgttctgtctctatgacaatatattttaactgactttctagatgccttaatatttgcatgataagctagttttattggtttagtattcttgttgtttacgcatggaatcactattcctggttatctcaccaacgaaggctaggaggcggcgtcagaggtgctgggtgacagagccatgagccagccattttataagcactctgatttctaaaagttaaaaaaaatatatgaaatctctgtagcctttagttatcagtacagatttattaaatttcggcccttaacccagccttttccagtgtgtaacccagtttgaaatcttaaaaaaagaaaaaatgaaaaaaaaaggaaaaaaagaaaaaaggaaaaaaacagtttgaacacaaaggctctatggaagaaatgcctctatgtaggtgaagtgttctctctgcatgcaacagtaaaaattaatataatattttccccacaaaagaaacacttaacagaggcaagtgcaatttataaatttatatctaaaggggaatcatgattataagtccttcagcccttggactctaaattgaggggattaaaaagaatttaaaataattttgaacgaatttattttcccctcagtttttgagggcattaaaaaggcattaaatcaagacaaatcatgtgcttgagaaaaataaaattaatgaaaacacagcacttatgttggtttagctgcagcctccttggaggtagaatttatttatttaaaattactggttgcatcaagaacccatagggtgtacaaaaggttctataaaatctgcattatagagacaaagaggcaggcaaatccatgtcacaagggtaaagcttacagtttacaaactgggaacgccagggtgtaggatataaaaacgcactcttgagaaaacaaatgtaatcagggtgctgaaaacttgcatggtgctttcagacattagccttgttcaacaaatttcttgtattgacagatccatagtgtgcatgggcagacacattttgcctctatgtctcttaaaattttaattaaaaatactctttccagtaatcctaatttgcacgaagatataatgtccacattacgtgccttgccttgaaatctaaaaaacaaaaaacaaaaaaaaaaaaacaaaaaaatacaacaaagtgacatcactacacttgttttgctgcatttattatcattttaaatctttaccatttttatgacaaaatattttgtactccagacgaagaaaaatgtgtgacatcatggattttttagacagttatacctttatctcacatttataaagcatatcatggctgtgtatagttgccgcttaaaaattgtaatcgaccagcaatattttcagtattttggtgtttttttctattaacctttcatgtttttcatcttccaattaatatttgggggggaggggtttcaaatttatacgaattatgcaataccaagttttgcctatgtaggtagtgcttttagctgtattggttattataggtaagtacacagatttaaaaaaaaaataatgtatgcttttttgtttgtttgtttgttttaattgaccaaagtgggtactgctatttttgcagtgtgatgaggtccttttgtgtactgagagatggacaggggattttttttaatatacatatatatatattctggggtgggtgggaggatttttaacactttgcagtgtagctgtgaagcagtgcaccctgagatgggcctgggctgcaaagcgactgttctgcctactgtgacaaacttcaacttacacaggttcccctctctaacttcccacctgggttgcaagctgaactcattactggttttcataacaacacaatagtaagaacaagcaaacacaacaaattctcctggaggcagacttggcttaaaaaggcagacttggcttggtgatagtttttcttgaaagttccagatccacagtggagagtgagcctgtctcatatttggcaaaaatatttgttgaaatgtccacataggggatgttggatgtttaacacttttgagagtttaacacatgaatattctttctcctagaaaacacattagacctgttggagggagtctcccgtattccttttctgccacttttcgtccccatttcatttcattaatgataggatatgatttacctgtgacttactacttcaaatggatggcagtgcacttggatttttttttaatatccagaagattgaacagagggttgctattgttgaatgtatttggactgatagattaaaatcaaagttcaatttttaaggaacaaaaaagtaaatcctgttttcattttatctccccttttaaaactgagaaccagagcagaagggaaatatagaattttaagcaattaatcttcctgtggatgaattaaacccattagatgctgatgggatttttttaaggaatggtaccttaactatatatttgatttcgtttcccctgagggctagaggctgaatggaggctggttttattttgcctttccctcaccgcccagtcccattgagtgtattcattactagaaggaaaatctttcagaattggtgacacatggtaggctgtcttaaggagtcccctggcccccttcccctaggccatggcctaataaaataaactgtcaattgttctcacagcatatcatttaataatgaatactttagaacaatgcttatgggctggagaattgtatttgattagcccattcagtttgatagcccaaatgctgaacagcacagcgggatcctagcagtgcaagttcaaaagtaagtccaatcatttctgtgatactcgccctggtagcaaacagatcatctcagccaagctcttcatgtatctttgacctattaggtgaacaaatgaacctcacaggacacacagtattttttaaaggcagactcgctctcttttttgccagtgagcagttctagctaaccaagttacacactgtgggtattcctgcctgcctcttgaatacaaaggcctagttcaagtgttgctttttttatttcaaatcaattttttcttctttcctttttgagataaaactattaaaagtactactatatatataaaatctcaaatcaacttttcggcctcctcctcgtgtaccaggaagtatattctgacgaagggccccacttttgcaggtcttgcacgcccctcccttacccagaactgcagagcttcaggatggcgaaggtcacccaagggcatgagtagggagtggtgtctccaaccatcagttccgtggcactgttcagcctttgtgtgctgccctgccacccaccactcacagtgcctctgaagcgtgttacccctggagtgacgtgagcatttgaggcttgtctaaggaaaaaaataaaaggcagtgaaggagactgtacataaagacatggcaaaaatcttaattatagcaatatagttatcgggtaatgttcgggtgggcagctccattaaaaaatatgtgaatgaatctgtgaagctgcaagtagcgagaagagcgaaaggtcttcttaatgaaccgcctaccttgtagacagtaatttgtacactgtatagttttgttaagaattttttttaaattaaaattcccatgtttgtaaagctaactttttaacaattataatggaactatatgttgtttccatttttaaagtaaacaagaatattccttgtttagagactggacttgagttaaaactctccagtctcttaagttatgtattaaaaagaaaatctgtccatgttaggagttatttcacagattcctgtgcttgaaaagcataggatactaatcctttaaaaaagtgtaaatggagaaaagttatattttatgaaggttattttgttgtatttagtattggaaaagttggtttccagagcatttcagaatgtcgaagcaccactgtctttttattagtatatacggcctttagcaaaagtttttgtgattgttacgtgatggtatttaaggttaagtttcacagagcattcaggataggcagaaaactaaaacagtgctatgtctcacataacgtgtcctcagggagcagaatcttggatttgtgacttgtagcttcataaggactcaacgaaagagattgcacagggacatcttcagcggtgtgacagcaggacatgttctttacctagattcaaattctatgtactgtgtgaaatgatgaaggctgcagaaagttatcccatattcagtgtacagtattcatttttaatgaaacaactctacaatattgctggcagataggccccaagcatgacattcaatatagtttacatgttcctgtcaaggtcttttgttaacattaaccagctgcatgctttctggactttaagaaattgggtttctatagaaaactttttttttttttttttttttaatgtgcaggctattcaagttcaatagtaaaagctcaaaaatgaatgttctactccatgctgaaggagctgaaagctgccttcttcatattttgcactttctggtagttcccctgttttttctaattccctaaaattgtgtgggtggagtggagccctgcagttggggggtaacatggaccactgattttgccctttgaccctgcacaatgacctttgcatcagccaaactcattgccatgacaactctttgtactgtgtccgtgccacagatctgttggtcacattgttaatagtaaaggggacaagttggagacggtcaatttttacattttttgttgcaattttttcttcaatggttgtaagtagtttttttttttttttaataataaaagggttcactagttaatactctagaaatatctgtgtgttgcaattcaaatgtatgttgagattgtgaaaagcgcttcagtgccactagcttaccggtacactagactaagcccttgatgacttattgcatgatacagtaccaggaacaacaggtggcctaaatacatgaaaagcagtgtaagctagtgacactaaagccagtcttgtattactgtatttttgacagaatggttttgaaaactgtgctacagggactgatgtggcaaatatatctctttatgcagaaggaagtctttttttttcttttttttttttttaagaagtatggctttttatgcatccttcatcgagggcattgaagttgcatggactgataaaagttgatgcaaaacaagaaagaaacaaacaaaaaaaaaaaaccagcaaaatgtttaccaaaaaactcaaacaaatgagcagtgcctgttcaatttcacagtctctgttgagttcagttgtaaatatgtttcaaatgacattttcttgggaaaaaaaatctctacaacattgtagaatgtgaggggtaactacatcccaggcataggtttctcaaagctgcagtagattatgtcttcatcaagctgttaatttgtgcttatatcatatagaacttttagcatcctgggaagagctgcccccacctcaatgatatttctctgagaacaacttttgtaggactgtgtgtttctttagatacatttagtacaactgtaggtgacgagtagtcagttattgcttgctagctacacaccagggttgatccattttaaaacttttggcattttgtcctcatgggccataaatacagaaccttgtattttaattaaatttttttacaaaaggaggcacatgcacaatctccatgtaacaaacctttagcagtaggatgtattatacgacagttacttaatttctagagttcaggcctctgggatcaaccccagactgggccagaatgttagtgaaggttttattgtgcccggttggaggataacgttctttgggtactttttgtgggttgcaaatgaactcaattgccacaagttttaaactggtgtaaatcaagcttgacttaatgtgattgttactgttatatccagcctatactgctagcagctgctcatactgcagtcaattactggaagcggatatatttcctatgcaaaaactgtttaaacaataaaatgagctatgctacagactctg

SEQ ID NO: 20539 - DNA, 2381 bp, Homo sapiens
  source 1..2381: mol_type = unassigned DNA
ctgggtttgttgtgaagttgcggtgatccagcgcagagccccgtcctgattgatcgcatcgcggggctcagatgactgtaaaatgaatagatgaaattcttgcttctcgaagattttcttgggcatctcccggaaagtgcgttttaaggcgaagtcatgatgtattctcccatctgtctcactcaggatgaatttcacccattcatcgaggcacttcttccacatgtccgtgcaattgcctatacttggttcaacctgcaggctcgaaaacgcaagtactttaaaaagcatgagaagcgaatgtcaaaggatgaagaaagagcagtcaaagatgagcttctcagtgaaaagcctgaaatcaaacagaagtgggcatccaggctccttgccaaactgcgcaaagatattcgccaggagtatcgagaggactttgtgctcaccgtgactggcaagaagcacccgtgctgtgtcttatccaatcccgaccagaagggtaagattaggagaatcgactgcctgcgacaggcagacaaagtctggcgtctggatctagtcatggtgatcctgttcaaaggcatccccttggaaagtaccgatggagagcggctcatgaaatccccacattgcacaaacccagcactttgtgtccagccacatcatatcacagtatcagttaaggagcttgatttgtttttggcatactacgtgcaggagcaagattctggacaatcaggaagtccaagccacaatgatcctgccaagaatcctccaggttaccttgaggatagttttgtaaaatctggagtcttcaatgtatcagaacttgtaagagtatccagaacgcccataacccagggaactggagtcaacttcccaattggagaaatcccaagccaaccatactatcatgacatgaactcgggggtcaatcttcagaggtctctgtcttctccaccaagcagcaaaagacccaaaactatatccatagatgaaaatatggaaccaagtcctacaggagacttttacccctctccaagttcaccagctgctggaagtcgaacatggcacgaaagagatcaagatatgtcttctccgactactatgaagaagcctgaaaagccattgttcagctctgcatctccacaggattcttccccaagactgagcactttcccccagcaccaccatcccggaatacctggagttgcacacagtgtcatctcaactcgaactccacctccaccttcaccgttgccatttccaacacaagctatccttcctccagccccatcgagctacttttctcatccaacaatcagatatcctccccacctgaatcctcaggatactctgaagaactatgtaccttcttatgacccatccagtccacaaaccagccagcctaacggcagtggtcaagtagtagggaaagtgcctggccatttcactcctgtcttggcaccctctccccatcccagtgcagtgcgacctgtgaccctgagcatgacagatactaaacccatcactacatccactgaagcctacacagcctcaggcacatctcaagccaatcgatatgtgggactaagcccaagagacccatccttcctacatcagcaacagtcctggtacctgggctagcttggttcctttccaagtgtcaaataggacacccatcttaccggccaatgtccaaaattacggtttgaacataattggagaacctttccttcaagcagaaacaagcaactgagggaaaaagaaacacaacaatagtttaagaaattttttttttaaataaaaaaaaaggaaaagaggaagactggacaaaacaacacaaaggcagaaaggaaagaaactgaagaaagaagataatagaccagcaattgcagcacttacaatcactaattcccttaaggttgaaactgtaatgacataaaaagggtcgatgatatttcactgatggtagatcgcagcccctgcaacgtagcctttgttacatgaagtccgctgggaaatagatgttctgtctctatgacaatatattttaactgactttctagatgccttaatatttgcatgataagctagttttattggtttagtattcttgttgtttacgcatggaatcactattcctggttatctcaccaacgaaggctaggaggcggcgtcagaggtgctgggtgacagagccatgagccagccattttataagcactctgatttctaaaagttaaaaaaaatatatgaaatctctgtagcctttagttatcagtacagatttattaaatttcggcccttaacccagccttttccagtgtgtaacccagtttgaaatcttaaaaaaagaaaaaatgaaaaaaaaaggaaaaaaagaa

SEQ ID NO: 20540 - DNA, 8198 bp, Homo sapiens
  source 1..8198: mol_type = unassigned DNA
gcccgctcgccctcctgcgccctcccgcgcccccctccccgccttttttgaaaaagcattttaccaccaaccaccaccccaatccaacccacaccgaaccttcgcgcaccccctacaccccaacaacaacaacaactgcaaaatagaaaacaaatccccaaacccaggcgaaaagcagccaacaccggcggcggcggcggcctcggcaagcacggccagcgcgctcggactgcaagagggttaaaagtgtagattggatttcacccctggaaatctagcacgccgagtgaacttgaatctttggctatttaaggaggactgggtttgttgtgaagttgcggtgatccagcgcagagccccgtcctgattgatcgcatcgcggggctcagatgactgtaaaatgaatagatgaaattcttgcttctcgaagattttcttgggcatctcccggaaagtgcgttttaaggcgaagtcatgatgtattctcccatctgtctcactcaggatgaatttcacccattcatcgaggcacttcttccacatgtccgtgcaattgcctatacttggttcaacctgcaggctcgaaaacgcaagtactttaaaaagcatgagaagcgaatgtcaaaggatgaagaaagagcagtcaaagatgagcttctcagtgaaaagcctgaaatcaaacagaagtgggcatccaggctccttgccaaactgcgcaaagatattcgccaggagtatcgagaggactttgtgctcaccgtgactggcaagaagcacccgtgctgtgtcttatccaatcccgaccagaagggtaagattaggagaatcgactgcctgcgacaggcagacaaagtctggcgtctggatctagtcatggtgatcctgttcaaaggcatccccttggaaagtaccgatggagagcggctcatgaaatccccacattgcacaaacccagcactttgtgtccagccacatcatatcacagtatcagttaaggagcttgatttgtttttggcatactacgtgcaggagcaagattctggacaatcaggaagtccaagccacaatgatcctgccaagaatcctccaggttaccttgaggatagttttgtaaaatctggagtcttcaatgtatcagaacttgtaagagtatccagaacgcccataacccagggaactggagtcaacttcccaattggagaaatcccaagccaaccatactatcatgacatgaactcgggggtcaatcttcagaggtctctgtcttctccaccaagcagcaaaagacccaaaactatatccatagatgaaaatatggaaccaagtcctacaggagacttttacccctctccaagttcaccagctgctggaagtcgaacatggcacgaaagagatcaagatatgtcttctccgactactatgaagaagcctgaaaagccattgttcagctctgcatctccacaggattcttccccaagactgagcactttcccccagcaccaccatcccggaatacctggagttgcacacagtgtcatctcaactcgaactccacctccaccttcaccgttgccatttccaacacaagctatccttcctccagccccatcgagctacttttctcatccaacaatcagatatcctccccacctgaatcctcaggatactctgaagaactatgtaccttcttatgacccatccagtccacaaaccagccagtcctggtacctgggctagcttggttcctttccaagtgtcaaataggacacccatcttaccggccaatgtccaaaattacggtttgaacataattggagaacctttccttcaagcagaaacaagcaactgagggaaaaagaaacacaacaatagtttaagaaattttttttttaaataaaaaaaaaggaaaagaggaagactggacaaaacaacacaaaggcagaaaggaaagaaactgaagaaagaagataatagaccagcaattgcagcacttacaatcactaattcccttaaggttgaaactgtaatgacataaaaagggtcgatgatatttcactgatggtagatcgcagcccctgcaacgtagcctttgttacatgaagtccgctgggaaatagatgttctgtctctatgacaatatattttaactgactttctagatgccttaatatttgcatgataagctagttttattggtttagtattcttgttgtttacgcatggaatcactattcctggttatctcaccaacgaaggctaggaggcggcgtcagaggtgctgggtgacagagccatgagccagccattttataagcactctgatttctaaaagttaaaaaaaatatatgaaatctctgtagcctttagttatcagtacagatttattaaatttcggcccttaacccagccttttccagtgtgtaacccagtttgaaatcttaaaaaaagaaaaaatgaaaaaaaaaggaaaaaaagaaaaaaggaaaaaaacagtttgaacacaaaggctctatggaagaaatgcctctatgtaggtgaagtgttctctctgcatgcaacagtaaaaattaatataatattttccccacaaaagaaacacttaacagaggcaagtgcaatttataaatttatatctaaaggggaatcatgattataagtccttcagcccttggactctaaattgaggggattaaaaagaatttaaaataattttgaacgaatttattttcccctcagtttttgagggcattaaaaaggcattaaatcaagacaaatcatgtgcttgagaaaaataaaattaatgaaaacacagcacttatgttggtttagctgcagcctccttggaggtagaatttatttatttaaaattactggttgcatcaagaacccatagggtgtacaaaaggttctataaaatctgcattatagagacaaagaggcaggcaaatccatgtcacaagggtaaagcttacagtttacaaactgggaacgccagggtgtaggatataaaaacgcactcttgagaaaacaaatgtaatcagggtgctgaaaacttgcatggtgctttcagacattagccttgttcaacaaatttcttgtattgacagatccatagtgtgcatgggcagacacattttgcctctatgtctcttaaaattttaattaaaaatactctttccagtaatcctaatttgcacgaagatataatgtccacattacgtgccttgccttgaaatctaaaaaacaaaaaacaaaaaaaaaaaaacaaaaaaatacaacaaagtgacatcactacacttgttttgctgcatttattatcattttaaatctttaccatttttatgacaaaatattttgtactccagacgaagaaaaatgtgtgacatcatggattttttagacagttatacctttatctcacatttataaagcatatcatggctgtgtatagttgccgcttaaaaattgtaatcgaccagcaatattttcagtattttggtgtttttttctattaacctttcatgtttttcatcttccaattaatatttgggggggaggggtttcaaatttatacgaattatgcaataccaagttttgcctatgtaggtagtgcttttagctgtattggttattataggtaagtacacagatttaaaaaaaaaataatgtatgcttttttgtttgtttgtttgttttaattgaccaaagtgggtactgctatttttgcagtgtgatgaggtccttttgtgtactgagagatggacaggggattttttttaatatacatatatatatattctggggtgggtgggaggatttttaacactttgcagtgtagctgtgaagcagtgcaccctgagatgggcctgggctgcaaagcgactgttctgcctactgtgacaaacttcaacttacacaggttcccctctctaacttcccacctgggttgcaagctgaactcattactggttttcataacaacacaatagtaagaacaagcaaacacaacaaattctcctggaggcagacttggcttaaaaaggcagacttggcttggtgatagtttttcttgaaagttccagatccacagtggagagtgagcctgtctcatatttggcaaaaatatttgttgaaatgtccacataggggatgttggatgtttaacacttttgagagtttaacacatgaatattctttctcctagaaaacacattagacctgttggagggagtctcccgtattccttttctgccacttttcgtccccatttcatttcattaatgataggatatgatttacctgtgacttactacttcaaatggatggcagtgcacttggatttttttttaatatccagaagattgaacagagggttgctattgttgaatgtatttggactgatagattaaaatcaaagttcaatttttaaggaacaaaaaagtaaatcctgttttcattttatctccccttttaaaactgagaaccagagcagaagggaaatatagaattttaagcaattaatcttcctgtggatgaattaaacccattagatgctgatgggatttttttaaggaatggtaccttaactatatatttgatttcgtttcccctgagggctagaggctgaatggaggctggttttattttgcctttccctcaccgcccagtcccattgagtgtattcattactagaaggaaaatctttcagaattggtgacacatggtaggctgtcttaaggagtcccctggcccccttcccctaggccatggcctaataaaataaactgtcaattgttctcacagcatatcatttaataatgaatactttagaacaatgcttatgggctggagaattgtatttgattagcccattcagtttgatagcccaaatgctgaacagcacagcgggatcctagcagtgcaagttcaaaagtaagtccaatcatttctgtgatactcgccctggtagcaaacagatcatctcagccaagctcttcatgtatctttgacctattaggtgaacaaatgaacctcacaggacacacagtattttttaaaggcagactcgctctcttttttgccagtgagcagttctagctaaccaagttacacactgtgggtattcctgcctgcctcttgaatacaaaggcctagttcaagtgttgctttttttatttcaaatcaattttttcttctttcctttttgagataaaactattaaaagtactactatatatataaaatctcaaatcaacttttcggcctcctcctcgtgtaccaggaagtatattctgacgaagggccccacttttgcaggtcttgcacgcccctcccttacccagaactgcagagcttcaggatggcgaaggtcacccaagggcatgagtagggagtggtgtctccaaccatcagttccgtggcactgttcagcctttgtgtgctgccctgccacccaccactcacagtgcctctgaagcgtgttacccctggagtgacgtgagcatttgaggcttgtctaaggaaaaaaataaaaggcagtgaaggagactgtacataaagacatggcaaaaatcttaattatagcaatatagttatcgggtaatgttcgggtgggcagctccattaaaaaatatgtgaatgaatctgtgaagctgcaagtagcgagaagagcgaaaggtcttcttaatgaaccgcctaccttgtagacagtaatttgtacactgtatagttttgttaagaattttttttaaattaaaattcccatgtttgtaaagctaactttttaacaattataatggaactatatgttgtttccatttttaaagtaaacaagaatattccttgtttagagactggacttgagttaaaactctccagtctcttaagttatgtattaaaaagaaaatctgtccatgttaggagttatttcacagattcctgtgcttgaaaagcataggatactaatcctttaaaaaagtgtaaatggagaaaagttatattttatgaaggttattttgttgtatttagtattggaaaagttggtttccagagcatttcagaatgtcgaagcaccactgtctttttattagtatatacggcctttagcaaaagtttttgtgattgttacgtgatggtatttaaggttaagtttcacagagcattcaggataggcagaaaactaaaacagtgctatgtctcacataacgtgtcctcagggagcagaatcttggatttgtgacttgtagcttcataaggactcaacgaaagagattgcacagggacatcttcagcggtgtgacagcaggacatgttctttacctagattcaaattctatgtactgtgtgaaatgatgaaggctgcagaaagttatcccatattcagtgtacagtattcatttttaatgaaacaactctacaatattgctggcagataggccccaagcatgacattcaatatagtttacatgttcctgtcaaggtcttttgttaacattaaccagctgcatgctttctggactttaagaaattgggtttctatagaaaactttttttttttttttttttttaatgtgcaggctattcaagttcaatagtaaaagctcaaaaatgaatgttctactccatgctgaaggagctgaaagctgccttcttcatattttgcactttctggtagttcccctgttttttctaattccctaaaattgtgtgggtggagtggagccctgcagttggggggtaacatggaccactgattttgccctttgaccctgcacaatgacctttgcatcagccaaactcattgccatgacaactctttgtactgtgtccgtgccacagatctgttggtcacattgttaatagtaaaggggacaagttggagacggtcaatttttacattttttgttgcaattttttcttcaatggttgtaagtagtttttttttttttttaataataaaagggttcactagttaatactctagaaatatctgtgtgttgcaattcaaatgtatgttgagattgtgaaaagcgcttcagtgccactagcttaccggtacactagactaagcccttgatgacttattgcatgatacagtaccaggaacaacaggtggcctaaatacatgaaaagcagtgtaagctagtgacactaaagccagtcttgtattactgtatttttgacagaatggttttgaaaactgtgctacagggactgatgtggcaaatatatctctttatgcagaaggaagtctttttttttcttttttttttttttaagaagtatggctttttatgcatccttcatcgagggcattgaagttgcatggactgataaaagttgatgcaaaacaagaaagaaacaaacaaaaaaaaaaaaccagcaaaatgtttaccaaaaaactcaaacaaatgagcagtgcctgttcaatttcacagtctctgttgagttcagttgtaaatatgtttcaaatgacattttcttgggaaaaaaaatctctacaacattgtagaatgtgaggggtaactacatcccaggcataggtttctcaaagctgcagtagattatgtcttcatcaagctgttaatttgtgcttatatcatatagaacttttagcatcctgggaagagctgcccccacctcaatgatatttctctgagaacaacttttgtaggactgtgtgtttctttagatacatttagtacaactgtaggtgacgagtagtcagttattgcttgctagctacacaccagggttgatccattttaaaacttttggcattttgtcctcatgggccataaatacagaaccttgtattttaattaaatttttttacaaaaggaggcacatgcacaatctccatgtaacaaacctttagcagtaggatgtattatacgacagttacttaatttctagagttcaggcctctgggatcaaccccagactgggccagaatgttagtgaaggttttattgtgcccggttggaggataacgttctttgggtactttttgtgggttgcaaatgaactcaattgccacaagttttaaactggtgtaaatcaagcttgacttaatgtgattgttactgttatatccagcctatactgctagcagctgctcatactgcagtcaattactggaagcggatatatttcctatgcaaaaactgtttaaacaataaaatgagctatgctacaga

SEQ ID NO: 20541 - DNA, 2869 bp, Homo sapiens
  source 1..2869: mol_type = unassigned DNA
ccgggatcctgccgcagtgcttggggctgtaaccttgaactttcccagcgcggtgacacattctccccgctctccctcccgcccgcccgctcgccctcctgcgccctcccgcgcccccctccccgccttttttgaaaaagcattttaccaccaaccaccaccccaatccaacccacaccgaaccttcgcgcaccccctacaccccaacaacaacaacaactgcaaaatagaaaacaaatccccaaacccaggcgaaaagcagccaacaccggcggcggcggcggcctcggcaagcacggccagcgcgctcggactgcaagagggttaaaagtgtagattggatttcacccctggaaatctagcacgccgagtgaacttgaatctttggctatttaaggaggactgggtttgttgtgaagttgcggtgatccagcgcagagccccgtcctgattgatcgcatcgcggggctcagatgactgtaaaatgaatagatgaaattcttgcttctcgaagattttcttgggcatctcccggaaagtgcgttttaaggcgaagtcatgatgtattctcccatctgtctcactcaggatgaatttcacccattcatcgaggcacttcttccacatgtccgtgcaattgcctatacttggttcaacctgcaggctcgaaaacgcaagtactttaaaaagcatgagaagcgaatgtcaaaggatgaagaaagagcagtcaaagatgagcttctcagtgaaaagcctgaaatcaaacagaagtgggcatccaggctccttgccaaactgcgcaaagatattcgccaggagtatcgagaggactttgtgctcaccgtgactggcaagaagcacccgtgctgtgtcttatccaatcccgaccagaagggtaagattaggagaatcgactgcctgcgacaggcagacaaagtctggcgtctggatctagtcatggtgatcctgttcaaaggcatccccttggaaagtaccgatggagagcggctcatgaaatccccacattgcacaaacccagcactttgtgtccagccacatcatatcacagtatcagttaaggagcttgatttgtttttggcatactacgtgcaggagcaagattctggacaatcaggaagtccaagccacaatgatcctgccaagaatcctccaggttaccttgaggatagttttgtaaaatctggagtcttcaatgtatcagaacttgtaagagtatccagaacgcccataacccagggaactggagtcaacttcccaattggagaaatcccaagccaaccatactatcatgacatgaactcgggggtcaatcttcagaggtctctgtcttctccaccaagcagcaaaagacccaaaactatatccatagatgaaaatatggaaccaagtcctacaggagacttttacccctctccaagttcaccagctgctggaagtcgaacatggcacgaaagagatcaagatatgtcttctccgactactatgaagaagcctgaaaagccattgttcagctctgcatctccacaggattcttccccaagactgagcactttcccccagcaccaccatcccggaatacctggagttgcacacagtgtcatctcaactcgaactccacctccaccttcaccgttgccatttccaacacaagctatccttcctccagccccatcgagctacttttctcatccaacaatcagatatcctccccacctgaatcctcaggatactctgaagaactatgtaccttcttatgacccatccagtccacaaaccagccagcctaacggcagtggtcaagtagtagggaaagtgcctggccatttcactcctgtcttggcaccctctccccatcccagtgcagtgcgacctgtgaccctgagcatgacagatactaaacccatcactacatccactgaagcctacacagcctcaggcacatctcaagccaatcgatatgtgggactaagcccaagagacccatccttcctacatcagcaacagctgaggatttgtgactggaccatgaatcaaaacggcaggcatttataccccagtaccagtgaggatacattgggaattacttggcaaagtcctggtacctgggctagcttggttcctttccaagtgtcaaataggacacccatcttaccggccaatgtccaaaattacggtttgaacataattggagaacctttccttcaagcagaaacaagcaactgagggaaaaagaaacacaacaatagtttaagaaattttttttttaaataaaaaaaaaggaaaagaggaagactggacaaaacaacacaaaggcagaaaggaaagaaactgaagaaagaagataatagaccagcaattgcagcacttacaatcactaattcccttaaggttgaaactgtaatgacataaaaagggtcgatgatatttcactgatggtagatcgcagcccctgcaacgtagcctttgttacatgaagtccgctgggaaatagatgttctgtctctatgacaatatattttaactgactttctagatgccttaatatttgcatgataagctagttttattggtttagtattcttgttgtttacgcatggaatcactattcctggttatctcaccaacgaaggctaggaggcggcgtcagaggtgctgggtgacagagccatgagccagccattttataagcactctgatttctaaaagttaaaaaaaatatatgaaatctctgtagcctttagttatcagtacagatttattaaatttcggcccttaacccagccttttccagtgtgtaacccagtttgaaatcttaaaaaaagaaaaaatgaaaaaaaaaggaaaaaaa

SEQ ID NO: 20542 - DNA, 3129 bp, Homo sapiens
  source 1..3129: mol_type = unassigned DNA
tcgagcggggtccagagggtggaaccggtgaatttttcaacttccaagttttgcaacgaaagaaagcaagagagggagggaaaaaaaagagcctagagcagaaaagagaggagtttggagccgagcgggagagcgggatttatcgtttggaatttttcaggagatcgttttgatacccctgggctctgggcagcggcggcaacagcagcctccacgctcggccgggtcagacgcggggcgaggcgggcgggcgggcggccgggcgccgaagacccggcgcgggcggcggcggctgctgctgccggggaccacgcgccgcgagcctcttccgccccagagatcagcgctcgcgccccctccctcaccccggcctctcccttctcccccatcccaccccgcccccaccccggccctctcccgcgcgcgccccgccacccgcgcgcactcgctcacgctgcccctcgcgcacacacatggtcggctcgcggcaaagtttcgcctgcgatcaccactccgggatcctgccgcagtgcttggggctgtaaccttgaactttcccagcgcggtgacacattctccccgctctccctcccgcccgcccgctcgccctcctgcgccctcccgcgcccccctccccgccttttttgaaaaagcattttaccaccaaccaccaccccaatccaacccacaccgaaccttcgcgcaccccctacaccccaacaacaacaacaactgcaaaatagaaaacaaatccccaaacccaggcgaaaagcagccaacaccggcggcggcggcggcctcggcaagcacggccagcgcgctcggactgcaagagggttaaaagtgtagattggatttcacccctggaaatctagcacgccgagtgaacttgaatctttggctatttaaggaggactgggtttgttgtgaagttgcggtgatccagcgcagagccccgtcctgattgatcgcatcgcggggctcagatgactgtaaaatgaatagatgaaattcttgcttctcgaagattttcttgggcatctcccggaaagtgcgttttaaggcgaagtcatgatgtattctcccatctgtctcactcaggatgaatttcacccattcatcgaggcacttcttccacatgtccgtgcaattgcctatacttggttcaacctgcaggctcgaaaacgcaagtactttaaaaagcatgagaagcgaatgtcaaaggatgaagaaagagcagtcaaagatgagcttctcagtgaaaagcctgaaatcaaacagaagtgggcatccaggctccttgccaaactgcgcaaagatattcgccaggagtatcgagaggactttgtgctcaccgtgactggcaagaagcacccgtgctgtgtcttatccaatcccgaccagaagggtaagattaggagaatcgactgcctgcgacaggcagacaaagtctggcgtctggatctagtcatggtgatcctgttcaaaggcatccccttggaaagtaccgatggagagcggctcatgaaatccccacattgcacaaacccagcactttgtgtccagccacatcatatcacagtatcagttaaggagcttgatttgtttttggcatactacgtgcaggagcaagattctggacaatcaggaagtccaagccacaatgatcctgccaagaatcctccaggttaccttgaggatagttttgtaaaatctggagtcttcaatgtatcagaacttgtaagagtatccagaacgcccataacccagggaactggagtcaacttcccaattggagaaatcccaagccaaccatactatcatgacatgaactcgggggtcaatcttcagaggtctctgtcttctccaccaagcagcaaaagacccaaaactatatccatagatgaaaatatggaaccaagtcctacaggagacttttacccctctccaagttcaccagctgctggaagtcgaacatggcacgaaagagatcaagatatgtcttctccgactactatgaagaagcctgaaaagccattgttcagctctgcatctccacaggattcttccccaagactgagcactttcccccagcaccaccatcccggaatacctggagttgcacacagtgtcatctcaactcgaactccacctccaccttcaccgttgccatttccaacacaagctatccttcctccagccccatcgagctacttttctcatccaacaatcagatatcctccccacctgaatcctcaggatactctgaagaactatgtaccttcttatgacccatccagtccacaaaccagccagctgaggatttgtgactggaccatgaatcaaaacggcaggcatttataccccagtaccagtgaggatacattgggaattacttggcaaagtcctggtacctgggctagcttggttcctttccaagtgtcaaataggacacccatcttaccggccaatgtccaaaattacggtttgaacataattggagaacctttccttcaagcagaaacaagcaactgagggaaaaagaaacacaacaatagtttaagaaattttttttttaaataaaaaaaaaggaaaagaggaagactggacaaaacaacacaaaggcagaaaggaaagaaactgaagaaagaagataatagaccagcaattgcagcacttacaatcactaattcccttaaggttgaaactgtaatgacataaaaagggtcgatgatatttcactgatggtagatcgcagcccctgcaacgtagcctttgttacatgaagtccgctgggaaatagatgttctgtctctatgacaatatattttaactgactttctagatgccttaatatttgcatgataagctagttttattggtttagtattcttgttgtttacgcatggaatcactattcctggttatctcaccaacgaaggctaggaggcggcgtcagaggtgctgggtgacagagccatgagccagccattttataagcactctgatttctaaaagttaaaaaaaatatatgaaatctctgtagcctttagttatcagtacagatttattaaatttcggcccttaacccagccttttccagtgtgtaacccagtttgaaatcttaaa

SEQ ID NO: 20543 - DNA, 3318 bp, Homo sapiens
  source 1..3318: mol_type = unassigned DNA
aagcaagagagggagggaaaaaaaagagcctagagcagaaaagagaggagtttggagccgagcgggagagcgggatttatcgtttggaatttttcaggagatcgttttgatacccctgggctctgggcagcggcggcaacagcagcctccacgctcggccgggtcagacgcggggcgaggcgggcgggcgggcggccgggcgccgaagacccggcgcgggcggcggcggctgctgctgccggggaccacgcgccgcgagcctcttccgccccagagatcagcgctcgcgccccctccctcaccccggcctctcccttctcccccatcccaccccgcccccaccccggccctctcccgcgcgcgccccgccacccgcgcgcactcgctcacgctgcccctcgcgcacacacatggtcggctcgcggcaaagtttcgcctgcgatcaccactccgggatcctgccgcagtgcttggggctgtaaccttgaactttcccagcgcggtgacacattctccccgctctccctcccgcccgcccgctcgccctcctgcgccctcccgcgcccccctccccgccttttttgaaaaagcattttaccaccaaccaccaccccaatccaacccacaccgaaccttcgcgcaccccctacaccccaacaacaacaacaactgcaaaatagaaaacaaatccccaaacccaggcgaaaagcagccaacaccggcggcggcggcggcctcggcaagcacggccagcgcgctcggactgcaagagggttaaaagtgtagattggatttcacccctggaaatctagcacgccgagtgaacttgaatctttggctatttaaggaggactgggtttgttgtgaagttgcggtgatccagcgcagagccccgtcctgattgatcgcatcgcggggctcagatgactgtaaaatgaatagatgaaattcttgcttctcgaagattttcttgggcatctcccggaaagtgcgttttaaggcgaagtcatgatgtattctcccatctgtctcactcaggatgaatttcacccattcatcgaggcacttcttccacatgtccgtgcaattgcctatacttggttcaacctgcaggctcgaaaacgcaagtactttaaaaagcatgagaagcgaatgtcaaaggatgaagaaagagcagtcaaagatgagcttctcagtgaaaagcctgaaatcaaacagaagtgggcatccaggctccttgccaaactgcgcaaagatattcgccaggagtatcgagaggactttgtgctcaccgtgactggcaagaagcacccgtgctgtgtcttatccaatcccgaccagaagggtaagattaggagaatcgactgcctgcgacaggcagacaaagtctggcgtctggatctagtcatggtgatcctgttcaaaggcatccccttggaaagtaccgatggagagcggctcatgaaatccccacattgcacaaacccagcactttgtgtccagccacatcatatcacagtatcagttaaggagcttgatttgtttttggcatactacgtgcaggagcaagattctggacaatcaggaagtccaagccacaatgatcctgccaagaatcctccaggttaccttgaggatagttttgtaaaatctggagtcttcaatgtatcagaacttgtaagagtatccagaacgcccataacccagggaactggagtcaacttcccaattggagaaatcccaagccaaccatactatcatgacatgaactcgggggtcaatcttcagaggtctctgtcttctccaccaagcagcaaaagacccaaaactatatccatagatgaaaatatggaaccaagtcctacaggagacttttacccctctccaagttcaccagctgctggaagtcgaacatggcacgaaagagatcaagatatgtcttctccgactactatgaagaagcctgaaaagccattgttcagctctgcatctccacaggattcttccccaagactgagcactttcccccagcaccaccatcccggaatacctggagttgcacacagtgtcatctcaactcgaactccacctccaccttcaccgttgccatttccaacacaagctatccttcctccagccccatcgagctacttttctcatccaacaatcagatatcctccccacctgaatcctcaggatactctgaagaactatgtaccttcttatgacccatccagtccacaaaccagccagcctaacggcagtggtcaagtagtagggaaagtgcctggccatttcactcctgtcttggcaccctctccccatcccagtgcagtgcgacctgtgaccctgagcatgacagatactaaacccatcactacatccactgaaggtgaggcagcttcacctacagcaaccacctacacagcctcaggcacatctcaagccaatcgatatgtgggactaagcccaagagacccatccttcctacatcagcaacagctgaggatttgtgactggaccatgaatcaaaacggcaggcatttataccccagtaccagtgaggatacattgggaattacttggcaaagtcctggtacctgggctagcttggttcctttccaagtgtcaaataggacacccatcttaccggccaatgtccaaaattacggtttgaacataattggagaacctttccttcaagcagaaacaagcaactgagggaaaaagaaacacaacaatagtttaagaaattttttttttaaataaaaaaaaaggaaaagaggaagactggacaaaacaacacaaaggcagaaaggaaagaaactgaagaaagaagataatagaccagcaattgcagcacttacaatcactaattcccttaaggttgaaactgtaatgacataaaaagggtcgatgatatttcactgatggtagatcgcagcccctgcaacgtagcctttgttacatgaagtccgctgggaaatagatgttctgtctctatgacaatatattttaactgactttctagatgccttaatatttgcatgataagctagttttattggtttagtattcttgttgtttacgcatggaatcactattcctggttatctcaccaacgaaggctaggaggcggcgtcagaggtgctgggtgacagagccatgagccagccattttataagcactctgatttctaaaagttaaaaaaaatatatgaaatctctgtagcctttagttatcagtacagatttattaaatttcggcccttaacccagccttttccagtgtgtaacccagtttgaaatcttaaaaaa

SEQ ID NO: 20544 - DNA, 1855 bp, Homo sapiens
  source 1..1855: mol_type = unassigned DNA
acagccatgaacagcacactgaggaggacacaaaagaagtagacagaatctctgcctctgcttaggagtatgcaatttagttggggcgacaaaacttaaatgctagaaccaataaaagaagattacaaagcaactcgcaaattctggacaatcaggaagtccaagccacaatgatcctgccaagaatcctccaggttaccttgaggatagttttgtaaaatctggagtcttcaatgtatcagaacttgtaagagtatccagaacgcccataacccagggaactggagtcaacttcccaattggagaaatcccaagccaaccatactatcatgacatgaactcgggggtcaatcttcagaggtctctgtcttctccaccaagcagcaaaagacccaaaactatatccatagatgaaaatatggaaccaagtcctacaggagacttttacccctctccaagttcaccagctgctggaagtcgaacatggcacgaaagagatcaagatatgtcttctccgactactatgaagaagcctgaaaagccattgttcagctctgcatctccacaggattcttccccaagactgagcactttcccccagcaccaccatcccggaatacctggagttgcacacagtgtcatctcaactcgaactccacctccaccttcaccgttgccatttccaacacaagctatccttcctccagccccatcgagctacttttctcatccaacaatcagatatcctccccacctgaatcctcaggatactctgaagaactatgtaccttcttatgacccatccagtccacaaaccagccagcctaacggcagtggtcaagtagtagggaaagtgcctggccatttcactcctgtcttggcaccctctccccatcccagtgcagtgcgacctgtgaccctgagcatgacagatactaaacccatcactacatccactgaagcctacacagcctcaggcacatctcaagccaatcgatatgtgggactaagcccaagagacccatccttcctacatcagcaacagctgaggatttgtgactggaccatgaatcaaaacggcaggcatttataccccagtaccagtgaggatacattgggaattacttggcaaagtcctggtacctgggctagcttggttcctttccaagtgtcaaataggacacccatcttaccggccaatgtccaaaattacggtttgaacataattggagaacctttccttcaagcagaaacaagcaactgagggaaaaagaaacacaacaatagtttaagaaattttttttttaaataaaaaaaaaggaaaagaggaagactggacaaaacaacacaaaggcagaaaggaaagaaactgaagaaagaagataatagaccagcaattgcagcacttacaatcactaattcccttaaggttgaaactgtaatgacataaaaagggtcgatgatatttcactgatggtagatcgcagcccctgcaacgtagcctttgttacatgaagtccgctgggaaatagatgttctgtctctatgacaatatattttaactgactttctagatgccttaatatttgcatgataagctagttttattggtttagtattcttgttgtttacgcatggaatcactattcctggttatctcaccaacgaaggctaggaggcggcgtcagaggtgctgggtgacagagccatgagccagccattttataagcactctgatttctaaaagttaaaaaaaatatatgaaatctctgtagcctttagttatcagtacagatttattaaatttcggcccttaacccagccttttccagtgtgtaacccagtttgaaatctt

SEQ ID NO: 20545 - DNA, 2363 bp, Homo sapiens
  source 1..2363: mol_type = unassigned DNA
atgtattcgtccccgctctgcctcacccaggatgagttccacccgttcatcgaggccctgctgcctcacgtccgcgccttcgcctacacctggttcaacctgcaggcgcggaagcgcaagtacttcaagaagcacgagaagcggatgtcgaaggacgaggagcgtgcggtcaaggacgagctgctgggcgagaagcccgaggtcaagcagaagtgggcgtcgcggctgctggccaagctgcgcaaggacatccggcccgagtgccgcgaggacttcgtgctgagcatcaccggcaagaaggcgccgggctgcgtgctctccaaccccgaccagaagggcaagatgcggcgcatcgactgtctccggcaggcggacaaggtgtggcggctggacctggtcatggtcatcctgttcaagggcatcccgctggagagcaccgacggcgagcgcctggtcaaggctgcgcagtgcggtcacccggtcctgtgcgtgcagccgcaccacattggcgtggccgtcaaggagctggacctctacctggcctacttcgtgcgtgagcgagatgcagagcaaagcggcagtccccggacagggatgggctctgaccaggaggacagcaagcccatcacgctggacacgaccgacttccaggagagctttgtcacctccggcgtgttcagcgtcactgagctcatccaagtgtcccggacacccgtggtgactggaacaggacccaacttctccctgggggagctgcaggggcacctggcatacgacctgaacccagccagcactggcctcagaagaacgctgcccagcacctcctccagtgggagcaagcggcacaaatcgggctcgatggaggaagacgtggacacgagccctggcggcgattactacacttcgcccagctcgcccacgagtagcagccgcaactggacggaggacatggaaggaggcatctcgtccccggtgaagaagacagagatggacaagtcaccattcaacagcccgtccccccaggactctccccgcctctccagcttcacccagcaccaccggcccgtcatcgccgtgcacagcgggatcgcccggagcccacacccgtcctccgctctgcatttccctacgacgtccatcctaccccagacggcctccacctacttcccccacacggccatccgctacccacctcatctcaacccccaggacccgctcaaagatcttgtctcgctggcctgcgacccagccagccagcaacctggaccgttaaatggaagtggtcagctcaaaatgcccagccactgcctttctgctcagatgctggcacctccgcccccggggctgccacggctggcgctcccccctgccaccaaacccgccaccacctccgagggaggagccacgtcgccgacctcgccttcctactctccgcccgacacgtcccctgcaaaccgttcctttgtgggattaggaccaagggatcctgcgggcatttatcaggcacagtcctggtatctgggatagcaaaggtcttcttccctcgccccttctccatcgtcccaggaatcccagggggcagcacagccggcccccggcccacgttttcggtggaaaattagagtgaacaagaacacccctgccgactcccagcccggccaaaaagacaaaacacatagacgcacacactcaggaggaaaagaaaaaacaaaggcagaagaagaagaagaagaaataaaaacccacccaagcaagaagacaaaaggtaaagacgcaacgtttccaactctcgggacgccaaggccgcaggactggagggccaggccccgccacccccacgggagacccgggacagggcgtcttcctaagttattcatctcctctccgcctgctgctcgggaaggacagacgccggccgcccgcccgcgccccggaggccctggctctgtccggagaccaggtgagcacagcctggagcctgtgcccagggccgacaggcgcgacacccagcaaggccacctctccccgggcccccgcgcctctgccggacacggaccggcccctcagcccccaccgaggacgcagccactggggggaaagggagacacagcggaccccggccgggcagcggagaccgcagaggcgggcagggtggggcaggcgagtggtgtcgcgggggtgcgtggcgcttgcgagccctggccaggggaggaagtgaggcccaggcacctgctgcccctcgagggggccctgcctgccgcggggcctccccacaagcccctcccaaagcgccggccgactcgctgtctcgctggggactctttcagccctcgcgcccgcccgtttgggaggagaagtctcta

SEQ ID NO: 20546 - DNA, 2185 bp, Homo sapiens
  source 1..2185: mol_type = unassigned DNA
aatgactcagtaagttcagcgcgcccgctccggccggccctgcgcctcccgccgcgcccgggatgtattcgtccccgctctgcctcacccaggatgagttccacccgttcatcgaggccctgctgcctcacgtccgcgccttcgcctacacctggttcaacctgcaggcgcggaagcgcaagtacttcaagaagcacgagaagcggatgtcgaaggacgaggagcgtgcggtcaaggacgagctgctgggcgagaagcccgaggtcaagcagaagtgggcgtcgcggctgctggccaagctgcgcaaggacatccggcccgagtgccgcgaggacttcgtgctgagcatcaccggcaagaaggcgccgggctgcgtgctctccaaccccgaccagaagggcaagatgcggcgcatcgactgtctccggcaggcggacaaggtgtggcggctggacctggtcatggtcatcctgttcaagggcatcccgctggagagcaccgacggcgagcgcctggtcaaggctgcgcagtgcggtcacccggtcctgtgcgtgcagccgcaccacattggcgtggccgtcaaggagctggacctctacctggcctacttcgtgcgtgagcgagatgcagagcaaagcggcagtccccggacagggatgggctctgaccaggaggacagcaagcccatcacgctggacacgaccgacttccaggagagctttgtcacctccggcgtgttcagcgtcactgagctcatccaagtgtcccggacacccgtggtgactggaacaggacccaacttctccctgggggagctgcaggggcacctggcatacgacctgaacccagccagcactggcctcagaagaacgctgcccagcacctcctccagtgggagcaagcggcacaaatcgggctcgatggaggaagacgtggacacgagccctggcggcgattactacacttcgcccagctcgcccacgagtagcagccgcaactggacggaggacatggaaggaggcatctcgtccccggtgaagaagacagagatggacaagtcaccattcaacagcccgtccccccaggactctccccgcctctccagcttcacccagcaccaccggcccgtcatcgccgtgcacagcgggatcgcccggagcccacacccgtcctccgctctgcatttccctacgacgtccatcctaccccagacggcctccacctacttcccccacacggccatccgctacccacctcatctcaacccccaggacccgctcaaagatcttgtctcgctggcctgcgacccagccagccagcaacctggaccgtcctggtatctgggatagcaaaggtcttcttccctcgccccttctccatcgtcccaggaatcccagggggcagcacagccggcccccggcccacgttttcggtggaaaattagagtgaacaagaacacccctgccgactcccagcccggccaaaaagacaaaacacatagacgcacacactcaggaggaaaagaaaaaacaaaggcagaagaagaagaagaagaaataaaaacccacccaagcaagaagacaaaaggtaaagacgcaacgtttccaactctcgggacgccaaggccgcaggactggagggccaggccccgccacccccacgggagacccgggacagggcgtcttcctaagttattcatctcctctccgcctgctgctcgggaaggacagacgccggccgcccgcccgcgccccggaggccctggctctgtccggagaccaggtgagcacagcctggagcctgtgcccagggccgacaggcgcgacacccagcaaggccacctctccccgggcccccgcgcctctgccggacacggaccggcccctcagcccccaccgaggacgcagccactggggggaaagggagacacagcggaccccggccgggcagcggagaccgcagaggcgggcagggtggggcaggcgagtggtgtcgcgggggtgcgtggcgcttgcgagccctggccaggggaggaagtgaggcccaggcacctgctgcccctcgagggggccctgcctgccgcggggcctccccacaagcccctcccaaagcgccggccgactcgctgtctcgctggggactctttcagccctcgcgcccgcccgtttgggaggagaagtctcta

SEQ ID NO: 20547 - DNA, 1586 bp, Homo sapiens
  source 1..1586: mol_type = unassigned DNA
aatgactcagtaagttcagcgcgcccgctccggccggccctgcgcctcccgccgcgcccgggatgtattcgtccccgctctgcctcacccaggatgagttccacccgttcatcgaggccctgctgcctcacgtccgcgccttcgcctacacctggttcaacctgcaggcgcggaagcgcaagtacttcaagaagcacgagaagcggatgtcgaaggacgaggagcgtgcggtcaaggacgagctgctgggcgagaagcccgaggtcaagcagaagtgggcgtcgcggctgctggccaagctgcgcaaggacatccggcccgagtgccgcgaggacttcgtgctgagcatcaccggcaagaaggcgccgggctgcgtgctctccaaccccgaccagaagggcaagatgcggcgcatcgactgtctccggcaggcggacaaggtgtggcggctggacctggtcatggtcatcctgttcaagggcatcccgctggagagcaccgacggcgagcgcctggtcaaggctgcgcagtgcggtcacccggtcctgtgcgtgcagccgcaccacattggcgtggccgtcaaggagctggacctctacctggcctacttcgtgcgtgagcgagatgcagagcaaagcggcagtccccggacagggatgggctctgaccaggaggacagcaagcccatcacgctggacacgaccgacttccaggagagctttgtcacctccggcgtgttcagcgtcactgagctcatccaagtgtcccggacacccgtggtgactggaacaggacccaacttctccctgggggagctgcaggggcacctggcatacgacctgaacccagccagcactggcctcagaagaacgctgcccagcacctcctccagtgggagcaagcggcacaaatcgggctcgatggaggaagacgtggacacgagccctggcggcgattactacacttcgcccagctcgcccacgagtagcagccgcaactggacggaggacatggaaggaggcatctcgtccccggtgaagaagacagagatggacaagtcaccattcaacagcccgtccccccaggactctccccgcctctccagcttcacccagcaccaccggcccgtcatcgccgtgcacagcgggatcgcccggagcccacacccgtcctccgctctgcatttccctacgacgtccatcctaccccagacggcctccacctacttcccccacacggccatccgctacccacctcatctcaacccccaggacccgctcaaagatcttgtctcgctggcctgcgacccagccagccagcaacctggaccgttaaatggaagtggtcagctcaaaatgcccagccactgcctttctgctcagatgctggcacctccgcccccggggctgccacggctggcgctcccccctgccaccaaacccgccaccacctccgagggaggagccacgtcgccgacctcgccttcctactctccgcccgacacgtcccctgcaaaccgttcctttgtgggattaggaccaagggatcctgcgggcatttatcaggcacagtcctggggggatggg

SEQ ID NO: 20548 - DNA, 2175 bp, Homo sapiens
  source 1..2175: mol_type = unassigned DNA
ccccccctcgccggggaccgagcgcgctcgctccggcgccggcctcgcctcctcgcagcagcgccatggatgagttccacccgttcatcgaggccctgctgcctcacgtccgcgccttcgcctacacctggttcaacctgcaggcgcggaagcgcaagtacttcaagaagcacgagaagcggatgtcgaaggacgaggagcgtgcggtcaaggacgagctgctgggcgagaagcccgaggtcaagcagaagtgggcgtcgcggctgctggccaagctgcgcaaggacatccggcccgagtgccgcgaggacttcgtgctgagcatcaccggcaagaaggcgccgggctgcgtgctctccaaccccgaccagaagggcaagatgcggcgcatcgactgtctccggcaggcggacaaggtgtggcggctggacctggtcatggtcatcctgttcaagggcatcccgctggagagcaccgacggcgagcgcctggtcaaggctgcgcagtgcggtcacccggtcctgtgcgtgcagccgcaccacattggcgtggccgtcaaggagctggacctctacctggcctacttcgtgcgtgagcgagacacgaccgacttccaggagagctttgtcacctccggcgtgttcagcgtcactgagctcatccaagtgtcccggacacccgtggtgactggaacaggacccaacttctccctgggggagctgcaggggcacctggcatacgacctgaacccagccagcactggcctcagaagaacgctgcccagcacctcctccagtgggagcaagcggcacaaatcgggctcgatggaggaagacgtggacacgagccctggcggcgattactacacttcgcccagctcgcccacgagtagcagccgcaactggacggaggacatggaaggaggcatctcgtccccggtgaagaagacagagatggacaagtcaccattcaacagcccgtccccccaggactctccccgcctctccagcttcacccagcaccaccggcccgtcatcgccgtgcacagcgggatcgcccggagcccacacccgtcctccgctctgcatttccctacgacgtccatcctaccccagacggcctccacctacttcccccacacggccatccgctacccacctcatctcaacccccaggacccgctcaaagatcttgtctcgctggcctgcgacccagccagccagcaacctggaccgcctactctccgcccgacacgtcccctgcaaaccgttcctttgtgggattaggaccaagggatcctgcgggcatttatcaggcacagtcctggtatctgggatagcaaaggtcttcttccctcgccccttctccatcgtcccaggaatcccagggggcagcacagccggcccccggcccacgttttcggtggaaaattagagtgaacaagaacacccctgccgactcccagcccggccaaaaagacaaaacacatagacgcacacactcaggaggaaaagaaaaaacaaaggcagaagaagaagaagaagaaataaaaacccacccaagcaagaagacaaaaggtaaagacgcaacgtttccaactctcgggacgccaaggccgcaggactggagggccaggccccgccacccccacgggagacccgggacagggcgtcttcctaagttattcatctcctctccgcctgctgctcgggaaggacagacgccggccgcccgcccgcgccccggaggccctggctctgtccggagaccaggtgagcacagcctggagcctgtgcccagggccgacaggcgcgacacccagcaaggccacctctccccgggcccccgcgcctctgccggacacggaccggcccctcagcccccaccgaggacgcagccactggggggaaagggagacacagcggaccccggccgggcagcggagaccgcagaggcgggcagggtggggcaggcgagtggtgtcgcgggggtgcgtggcgcttgcgagccctggccaggggaggaagtgaggcccaggcacctgctgcccctcgagggggccctgcctgccgcggggcctccccacaagcccctcccaaagcgccggccgactcgctgtctcgctggggactctttcagccctcgcgcccgcccgtttgggaggagaagtctcta

SEQ ID NO: 20549 - DNA, 2247 bp, Homo sapiens
  source 1..2247: mol_type = unassigned DNA
ccccccctcgccggggaccgagcgcgctcgctccggcgccggcctcgcctcctcgcagcagcgccatggatgagttccacccgttcatcgaggccctgctgcctcacgtccgcgccttcgcctacacctggttcaacctgcaggcgcggaagcgcaagtacttcaagaagcacgagaagcggatgtcgaaggacgaggagcgtgcggtcaaggacgagctgctgggcgagaagcccgaggtcaagcagaagtgggcgtcgcggctgctggccaagctgcgcaaggacatccggcccgagtgccgcgaggacttcgtgctgagcatcaccggcaagaaggcgccgggctgcgtgctctccaaccccgaccagaagggcaagatgcggcgcatcgactgtctccggcaggcggacaaggtgtggcggctggacctggtcatggtcatcctgttcaagggcatcccgctggagagcaccgacggcgagcgcctggtcaaggctgcgcagtgcggtcacccggtcctgtgcgtgcagccgcaccacattggcgtggccgtcaaggagctggacctctacctggcctacttcgtgcgtgagcgagatgcagagcaaagcggcagtccccggacagggatgggctctgaccaggaggacagcaagcccatcacgctggacacgaccgacttccaggagagctttgtcacctccggcgtgttcagcgtcactgagctcatccaagtgtcccggacacccgtggtgactggaacaggacccaacttctccctgggggagctgcaggggcacctggcatacgacctgaacccagccagcactggcctcagaagaacgctgcccagcacctcctccagtgggagcaagcggcacaaatcgggctcgatggaggaagacgtggacacgagccctggcggcgattactacacttcgcccagctcgcccacgagtagcagccgcaactggacggaggacatggaaggaggcatctcgtccccggtgaagaagacagagatggacaagtcaccattcaacagcccgtccccccaggactctccccgcctctccagcttcacccagcaccaccggcccgtcatcgccgtgcacagcgggatcgcccggagcccacacccgtcctccgctctgcatttccctacgacgtccatcctaccccagacggcctccacctacttcccccacacggccatccgctacccacctcatctcaacccccaggacccgctcaaagatcttgtctcgctggcctgcgacccagccagccagcaacctggaccgcctactctccgcccgacacgtcccctgcaaaccgttcctttgtgggattaggaccaagggatcctgcgggcatttatcaggcacagtcctggtatctgggatagcaaaggtcttcttccctcgccccttctccatcgtcccaggaatcccagggggcagcacagccggcccccggcccacgttttcggtggaaaattagagtgaacaagaacacccctgccgactcccagcccggccaaaaagacaaaacacatagacgcacacactcaggaggaaaagaaaaaacaaaggcagaagaagaagaagaagaaataaaaacccacccaagcaagaagacaaaaggtaaagacgcaacgtttccaactctcgggacgccaaggccgcaggactggagggccaggccccgccacccccacgggagacccgggacagggcgtcttcctaagttattcatctcctctccgcctgctgctcgggaaggacagacgccggccgcccgcccgcgccccggaggccctggctctgtccggagaccaggtgagcacagcctggagcctgtgcccagggccgacaggcgcgacacccagcaaggccacctctccccgggcccccgcgcctctgccggacacggaccggcccctcagcccccaccgaggacgcagccactggggggaaagggagacacagcggaccccggccgggcagcggagaccgcagaggcgggcagggtggggcaggcgagtggtgtcgcgggggtgcgtggcgcttgcgagccctggccaggggaggaagtgaggcccaggcacctgctgcccctcgagggggccctgcctgccgcggggcctccccacaagcccctcccaaagcgccggccgactcgctgtctcgctggggactctttcagccctcgcgcccgcccgtttgggaggagaagtctcta

SEQ ID NO: 20550 - DNA, 2401 bp, Homo sapiens
  source 1..2401: mol_type = unassigned DNA
ccccccctcgccggggaccgagcgcgctcgctccggcgccggcctcgcctcctcgcagcagcgccatggatgagttccacccgttcatcgaggccctgctgcctcacgtccgcgccttcgcctacacctggttcaacctgcaggcgcggaagcgcaagtacttcaagaagcacgagaagcggatgtcgaaggacgaggagcgtgcggtcaaggacgagctgctgggcgagaagcccgaggtcaagcagaagtgggcgtcgcggctgctggccaagctgcgcaaggacatccggcccgagtgccgcgaggacttcgtgctgagcatcaccggcaagaaggcgccgggctgcgtgctctccaaccccgaccagaagggcaagatgcggcgcatcgactgtctccggcaggcggacaaggtgtggcggctggacctggtcatggtcatcctgttcaagggcatcccgctggagagcaccgacggcgagcgcctggtcaaggctgcgcagtgcggtcacccggtcctgtgcgtgcagccgcaccacattggcgtggccgtcaaggagctggacctctacctggcctacttcgtgcgtgagcgagatgcagagcaaagcggcagtccccggacagggatgggctctgaccaggaggacagcaagcccatcacgctggacacgaccgacttccaggagagctttgtcacctccggcgtgttcagcgtcactgagctcatccaagtgtcccggacacccgtggtgactggaacaggacccaacttctccctgggggagctgcaggggcacctggcatacgacctgaacccagccagcactggcctcagaagaacgctgcccagcacctcctccagtgggagcaagcggcacaaatcgggctcgatggaggaagacgtggacacgagccctggcggcgattactacacttcgcccagctcgcccacgagtagcagccgcaactggacggaggacatggaaggaggcatctcgtccccggtgaagaagacagagatggacaagtcaccattcaacagcccgtccccccaggactctccccgcctctccagcttcacccagcaccaccggcccgtcatcgccgtgcacagcgggatcgcccggagcccacacccgtcctccgctctgcatttccctacgacgtccatcctaccccagacggcctccacctacttcccccacacggccatccgctacccacctcatctcaacccccaggacccgctcaaagatcttgtctcgctggcctgcgacccagccagccagcaacctggaccgttaaatggaagtggtcagctcaaaatgcccagccactgcctttctgctcagatgctggcacctccgcccccggggctgccacggctggcgctcccccctgccaccaaacccgccaccacctccgagggaggagccacgtcgccgacctcgccttcctactctccgcccgacacgtcccctgcaaaccgttcctttgtgggattaggaccaagggatcctgcgggcatttatcaggcacagtcctggtatctgggatagcaaaggtcttcttccctcgccccttctccatcgtcccaggaatcccagggggcagcacagccggcccccggcccacgttttcggtggaaaattagagtgaacaagaacacccctgccgactcccagcccggccaaaaagacaaaacacatagacgcacacactcaggaggaaaagaaaaaacaaaggcagaagaagaagaagaagaaataaaaacccacccaagcaagaagacaaaaggtaaagacgcaacgtttccaactctcgggacgccaaggccgcaggactggagggccaggccccgccacccccacgggagacccgggacagggcgtcttcctaagttattcatctcctctccgcctgctgctcgggaaggacagacgccggccgcccgcccgcgccccggaggccctggctctgtccggagaccaggtgagcacagcctggagcctgtgcccagggccgacaggcgcgacacccagcaaggccacctctccccgggcccccgcgcctctgccggacacggaccggcccctcagcccccaccgaggacgcagccactggggggaaagggagacacagcggaccccggccgggcagcggagaccgcagaggcgggcagggtggggcaggcgagtggtgtcgcgggggtgcgtggcgcttgcgagccctggccaggggaggaagtgaggcccaggcacctgctgcccctcgagggggccctgcctgccgcggggcctccccacaagcccctcccaaagcgccggccgactcgctgtctcgctggggactctttcagccctcgcgcccgcccgtttgggaggagaagtctcta

SEQ ID NO: 20551 - DNA, 8068 bp, Homo sapiens
  source 1..8068: mol_type = unassigned DNA
gctcgctccctcccccgcgcgccctccctcgccgcctcctcccgccgcctgcggcccccccctcgccggggaccgagcgcgctcgctccggcgccggcctcgcctcctcgcagcagcgccatggatgagttccacccgttcatcgaggccctgctgcctcacgtccgcgccttcgcctacacctggttcaacctgcaggcgcggaagcgcaagtacttcaagaagcacgagaagcggatgtcgaaggacgaggagcgtgcggtcaaggacgagctgctgggcgagaagcccgaggtcaagcagaagtgggcgtcgcggctgctggccaagctgcgcaaggacatccggcccgagtgccgcgaggacttcgtgctgagcatcaccggcaagaaggcgccgggctgcgtgctctccaaccccgaccagaagggcaagatgcggcgcatcgactgtctccggcaggcggacaaggtgtggcggctggacctggtcatggtcatcctgttcaagggcatcccgctggagagcaccgacggcgagcgcctggtcaaggctgcgcagtgcggtcacccggtcctgtgcgtgcagccgcaccacattggcgtggccgtcaaggagctggacctctacctggcctacttcgtgcgtgagcgagatgcagagcaaagcggcagtccccggacagggatgggctctgaccaggaggacagcaagcccatcacgctggacacgaccgacttccaggagagctttgtcacctccggcgtgttcagcgtcactgagctcatccaagtgtcccggacacccgtggtgactggaacaggacccaacttctccctgggggagctgcaggggcacctggcatacgacctgaacccagccagcactggcctcagaagaacgctgcccagcacctcctccagtgggagcaagcggcacaaatcgggctcgatggaggaagacgtggacacgagccctggcggcgattactacacttcgcccagctcgcccacgagtagcagccgcaactggacggaggacatggaaggaggcatctcgtccccggtgaagaagacagagatggacaagtcaccattcaacagcccgtccccccaggactctccccgcctctccagcttcacccagcaccaccggcccgtcatcgccgtgcacagcgggatcgcccggagcccacacccgtcctccgctctgcatttccctacgacgtccatcctaccccagacggcctccacctacttcccccacacggccatccgctacccacctcatctcaacccccaggacccgctcaaagatcttgtctcgctggcctgcgacccagccagccagcaacctggaccgttaaatggaagtggtcagctcaaaatgcccagccactgcctttctgctcagatgctggcacctccgcccccggggctgccacggctggcgctcccccctgccaccaaacccgccaccacctccgagggaggagccacgtcgccgacctcgccttcctactctccgcccgacacgtcccctgcaaaccgttcctttgtgggattaggaccaagggatcctgcgggcatttatcaggcacagtcctggtatctgggatagcaaaggtcttcttccctcgccccttctccatcgtcccaggaatcccagggggcagcacagccggcccccggcccacgttttcggtggaaaattagagtgaacaagaacacccctgccgactcccagcccggccaaaaagacaaaacacatagacgcacacactcaggaggaaaagaaaaaacaaaggcagaagaagaagaagaagaaataaaaacccacccaagcaagaagacaaaaggtaaagacgcaacgtttccaactctcgggacgccaaggccgcaggactggagggccaggccccgccacccccacgggagacccgggacagggcgtcttcctaagttattcatctcctctccgcctgctgctcgggaaggacagacgccggccgcccgcccgcgccccggaggccctggctctgtccggagaccaggtgagcacagcctggagcctgtgcccagggccgacaggcgcgacacccagcaaggccacctctccccgggcccccgcgcctctgccggacacggaccggcccctcagcccccaccgaggacgcagccactggggggaaagggagacacagcggaccccggccgggcagcggagaccgcagaggcgggcagggtggggcaggcgagtggtgtcgcgggggtgcgtggcgcttgcgagccctggccaggggaggaagtgaggcccaggcacctgctgcccctcgagggggccctgcctgccgcggggcctccccacaagcccctcccaaagcgccggccgactcgctgtctcgctggggactctttcagccctcgcgcccgcccgtttgggaggagaagtctctatgcaattggccccggcccctccaccccccacccccggcataggaggcccccccacctcgcccggctcacacccccaaagggagggacccacattgcacacactgtaagaaatgcactttccgaggaaggggatgggggagcccggacacccagagctccccgagttgggggtgcccgtctggagcgcccccgtcagcccctggcggtgggaggtgagagcgagtggtttaagtgcctgattaccaccacccgcccccccctttgtccagctgggacacggaatggccgcgggcctcctccccctcccctccagcctctccaccagcccctccagtcaaccctcatcgccgtgcccccccagagctagagagatggggcccctgcgtggcccgaggggcagagctgggcgtcacttcgcaagcgtcctgccctgccggggcgcgggggtgggctctggggaagccggtgcgccccccacgcctccgctgccagtgccttacattctggagcgacccccctccctggtgcctcccagcgaagggggaccgccgtttgcactttcatcgcctaccccgacgcggggcccagctgcgggacgtgcatcacggctgggcccccagaggagagaggaggccgacgccagcggtccccgctcggaacggggagggttttcggggggttcggcgtcgcaccttggggccccccgcagccgtgtagggggcctcccatctgctaagcgtttttccgttgagccgctccaaaaacactaagctggggacgccaggtgcccccccaccccggctccctggccctatccacacctccacccccaccccaggatcgccatctttaggggaggcctgggagggggtgttaggtgttttagggccaccgagctcaaacacaaggacccctccccggcccacccagcccagccccaactgacctccatgcctagggaaaaactccccccaccactgccccctcccccgacccaggccaaagccagggcaggtctccgggtctcacctgctcctagcctcacccccctgcccccgaaaaccagactctcctcccaaactagcctcaggagcttggcgaacccgctcgctcctaaagagaaagacccaggaccctcccccatcacccccaagagaggttcgccatcctctggcctcgagcccttggtccctccgtccgtctgtcctcggggcccgctcccccggtggcccttggggatcaaagcgtgggccgctctccgggagggcgggcgggggagggggtggtcgggttgtgccattggggtgtccggaagcttctcagccagggtgggggtcgtggagtgggggagggaggccagccgggctccagaggggtcagggcgcgacgagaaccaactctttacctaactttgcatggtgcttagtcaaggactcctgcgacctggctcccgaggtcagctggcggcgctgacacacatgcatggcagactatccctggctctatctccctgttcctcgccccctccaccccccacttcctctttaaaaaaaaaaaaaaaaaaaaaaagatacaagaaaaacctttaaaaaaattccatgtttcctaatttgcacgaaattttctaccacaagatgtgccttgccttccgagaataagtattacctttaaacaatatcagcgcacacacatagctgcatgttctgctcgtgtagtttaaaaaaaaaaagacaaaacagtgacatgaaataaaaaataaaaattgaaaagggatgtatttctatttgtaaaaaaaataaaataaaaaataagaaagtgagaatctaaaaaaaaaaaaaaaaaaaaaaaaggaagaaaaaccacgctaaaaatcaagccactgaaaacaattgcccccaggtctacccagcccctggctgtccttggtcctgtctcccctcctgctgtattcaggggtgccccctggtgctcagcctctaccacccccaaccctgctcttgggtacccagaggggtcatttctgaatcccttgcccagaggacagacctccggggcccatcttggccctgggaaagggctctcctctctgattggtccctaggccacgggccggcccccagacaccattcaccgacccactgcaggctgtcctccaaccatggggtggccactccacccgcagccagactccccgctccccacttttcatgcaggctggcatacccctggctcagggtcaaatgctgttccacacccacctcagaggcaccccctctcccctgccccgtgcatccccacccttcttgccaaaggacctcttttcccctatccagagaccaccccaggtggcattctctcccaccttctcctttgtcccccatcccctgtctctgtcttccagctgtgaatatgaagggtatcctgtatgaaacaaaaacaaaacctgatatatgcaatatctgtctgtctgtctgtacccatgggcctggctcagccattggaggcccagccgagggtccggcagggcacagggacagccaggtggcaccgagtcacaggctgtggtccggtggctgagcatgctgttgtcttgtccttgattttattttcttttgttctttttttttttcttttctttttgtttttaactccagcttcctttgctttttacttgaccaaagctaagacaatagccagatggttagtggggcagccaggcagggaggacccagggctgggattctccaaccttaggccattcctgcagccctcaccacctccagcccctccaagcatctcgtgtagggacccacgcagatggtcccattcattcactattgcccccaaccccgggattttgggtggtctccacagccaccatcatacactcatcccgtgttttcttccaaaaagtcacctcagcagcctccccaggcgatacagagggagagcccagaccaccacagctggccacgacattgcccttaagtaatatgcattggccagagagcccgggctggctgtgcacagcattcatgtagctgatttctagctttttttttttttctgccccactcctgagcaaatctgtcttgccaaggaactaggagcaaccggaggcaaagggagtgggtggccccatcactattgggaccatcgcgtccctgcacagcccacacccgggggcccagagtcctgggctggacgccacccttctcaccccgagcttgcctccttggctcacttggcaccttggctgagtacagcaggcaaaagcccataccaggcagcatgttgtggatggtttagttctccccgcctccctgtttcttggaaaagctacagggtccctgtagggcaaaattcccaggcgccttgctgcagacagagtaagacaaaaacaccaggaagcaggattccgtgcccatctctgcagtttgggttcacaaaagggggtgccgtcatccctgggtggaggagggagtgttggttttttgtttttgtttttttaacatgtatgaaactgacatcttctcaaatcttgttccacccccctctggaagcccccatcacccacccctgctatggacaccacacctatgccaggcccccccccccaccccagtctcattctggggtctgcccatgctgtgggaaagaatagggaggcctcccaaatatatgcaaattgtccccattccgtgggggcacctgacaatgacccgggtggagatggggcatggaggagtaggaagacccagccctatttgactggggagaggaggatctggagtccttcatgcccaggtctggaacccaggttctgaccccagggccccaccctgggctggacaatcagatcccaaaggaatgccaaaggggactcggttgggagagccgcttaggggccagacctgggtccccctgcaggtccccaggcagcagacaattccaccttccctgccccaggaccttgagagacagcagcattccaggcacagacagacttggctgcaccccactgtcccttgcaagacaggttctggagccaggagcaactgtccagccctccagaagagacagcaagcagcccccctacccactctggcctccccaatggtactttgacctccagtgtagggctatactatacatatatatatatatatatatatatatatataattttggaatttgtttctcataatacagaatatatagtggctaccttgtatcttggtctggattctctctctgagaccccggattttactttctctttggagggcgctgggacatacatctctcaatccagcttcctccgcatcctcccatcttgccccatttctgccacgtcagacacttcctgagagtctcaccttcaaaatgacaccgctgcccatccattgctcaatggtacagagtgtggggtcagtccaccacccttgacctcccggcagggcaaggtgaggaggcggacccaaagcagtaccagcaggacttgttgccagtgataccaaaacagacttttcccaagcagtgcctcacatgtctgctggtgtggctttgggattctcctgccccacccccccgtccatggcagccccctccccaaggctttgctcacacctgagacaggaaggaggaaggggatccaataggaatatgggccccggaggggaagtcatgcacccccaagccaccaccccccagccttccacgcacatctcctggctggaagagagccctccaaaaaggggacacaggctgccccggcccctcaactgcatccacaccccatcctctcatcttgggtcccagccaggcccccccaaaaccaaagccccctcaagtcctggggtcccagcctgtgcccccagcttcctgcccacccagccctgagcattctcacacagagaaagaacaagcaagggctccagggggacaggatggggcagggcatacagtggggggtgggggggcagctgggaggagggagggacaaaacaaaacattttcctttgggttttttttttctttcttttttctcccctttactctttgggtggtgttgcttttcctttccttttccctttgagatttttttgttgttgtttcctttttgtattttactgatatcaccaggatagtttactctccttctagctttctgcttaccgcacactggataacacacacatacacacccacaaaaatgctcatgaacccaatccggagaaggttccagcaggtcccccaccctcccctcctcctcctacttctcctcttgacagcgaggacaggagggggacaaggggacacctgggcagacccgccggctctccccccaccccaccccgcccctcacatcatactccaatcataaccttgtatattatgcagtcattttggttttcgcggacgcgcctacctaagtaccatttacagaaagtgactctggctgtcattattttgtttatttgttccctatgcaaaaaaaaaatgaaaatgaaaaaagggggattccataaaagattcaataaaagacaaacaaaaaaaaaagaaaaaagaaaaaaatgtataaaaattaaacaagctatgcttcgactctt

SEQ ID NO: 20552 - DNA, 1727 bp, Homo sapiens
  source 1..1727: mol_type = unassigned DNA
cagacggacactgtgccggggcgagctgacaggagttcacggctgcgatagaacatggagatgtcatgggcgcgacagagcctggcggggataccagcagcgatgagttccacccgttcatcgaggcactgctgcctcacgtccgcgctttctcctacacctggttcaacctgcaggcgcggaagcgcaagtacttcaagaagcatgaaaagcggatgtcgaaggacgaggagcgggcggtgaaggacgagctgctgggcgagaagcccgagatcaagcagaagtgggcatcccggctgctggccaagctgcgcaaggacatccggcccgagttccgcgaggacttcgtgctgaccatcacgggcaagaagcccccctgctgcgtgctctccaaccccgaccagaagggcaagatccggcggattgactgcctgcgccaggctgacaaggtgtggcggctggacctggtcatggtgattttgtttaaggggatccccctggaaagtactgatggggagcggctctacaagtcgcctcagtgctcgaaccccggcctgtgcgtccagccacatcacattggagtcacaatcaaagaactggatctttatctggcttactttgtccacactccggaatccggacaatcagatagttcaaaccagcaaggagatgcggacatcaaaccactgcccaacgggcacttaagtttccaggactgttttgtgacttccggggtctggaatgtgacggagctggtgagagtatcacagactcctgttgcaacagcatcagggcccaacttctccctggcggacctggagagtcccagctactacaacatcaaccaggtgaccctggggcggcggtccatcacctcccctccttccaccagcaccaccaagcgccccaagtccatcgatgacagtgagatggagagccctgttgatgacgtgttctatcccgggacaggccgttccccagcagctggcagcagccagtccagcgggtggcccaacgatgtggatgcagggagcccccgggccacagcatcagccctgcacttcccctccacgtccatcatccagcagtcgagcccgtatttcacgcacccgaccatccgctaccaccaccaccacgggcaggactcactgaaggagtttgtgcagtttgtgtgctcggatggctcgggccaggccaccggacagcattcgcaacgacaggcgcctcctctgccaaccggtttgtcagcatcggaccccgggacggcaactttctgaacatcccacagcagtctcagtcctggttcctctgataagatcgacaaaagaaacaacaaaatgagaagaagaggttcctcgaaaggggggagaagaaattttgagaatggaaaaatcccccagcccagcccagccccaccgaaaagcaaaaattacacgtcgtcagccactcagcccttctctcctccagcccggggacccccgcgggccccagaagcagcccagttctcagagagcccttggaaggggtctcggtggagctgtgcaccagcagccaagcagaaagaaacacgcgacatggactctgtcaagtagaggacagaaagcaagaaaggatgcagaactgccttcctccccctgaccccgccccgcccccgtcactgcgcttctgttataccatctttgcctgactctctccggcttctccattgaatggctaatgtgtatgtg

SEQ ID NO: 20553 - DNA, 5530 bp, Homo sapiens
  source 1..5530: mol_type = unassigned DNA
atgctcccggcttgccgcctgcaggatgagttccacccgttcatcgaggcactgctgcctcacgtccgcgctttctcctacacctggttcaacctgcaggcgcggaagcgcaagtacttcaagaagcatgaaaagcggatgtcgaaggacgaggagcgggcggtgaaggacgagctgctgggcgagaagcccgagatcaagcagaagtgggcatcccggctgctggccaagctgcgcaaggacatccggcccgagttccgcgaggacttcgtgctgaccatcacgggcaagaagcccccctgctgcgtgctctccaaccccgaccagaagggcaagatccggcggattgactgcctgcgccaggctgacaaggtgtggcggctggacctggtcatggtgattttgtttaaggggatccccctggaaagtactgatggggagcggctctacaagtcgcctcagtgctcgaaccccggcctgtgcgtccagccacatcacattggagtcacaatcaaagaactggatctttatctggcttactttgtccacactccggaatccggacaatcagatagttcaaaccagcaaggagatgcggacatcaaaccactgcccaacgggcacttaagtttccaggactgttttgtgacttccggggtctggaatgtgacggagctggtgagagtatcacagactcctgttgcaacagcatcagggcccaacttctccctggcggacctggagagtcccagctactacaacatcaaccaggtgaccctggggcggcggtccatcacctcccctccttccaccagcaccaccaagcgccccaagtccatcgatgacagtgagatggagagccctgttgatgacgtgttctatcccgggacaggccgttccccagcagctggcagcagccagtccagcgggtggcccaacgatgtggatgcagggagcccccgggccacagcatcagccctgcacttcccctccacgtccatcatccagcagtcgagcccgtatttcacgcacccgaccatccgctaccaccaccaccacgggcaggactcactgaaggagtttgtgcagtttgtgtgctcggatggctcgggccaggccaccggacagcccaacggtagcggccagggcaaagtcccggggtcatttttgctaccgccgccgcctccagtggccagacctgtgccccttcctatgcctgattccaaatccaccagcactgccccagacggcgccgccttgactcctccatcaccttcattcgcaacgacaggcgcctcctctgccaaccggtttgtcagcatcggaccccgggacggcaactttctgaacatcccacagcagtctcagtcctggttcctctgataagatcgacaaaagaaacaacaaaatgagaagaagaggttcctcgaaaggggggagaagaaattttgagaatggaaaaatcccccagcccagcccagccccaccgaaaagcaaaaattacacgtcgtcagccactcagcccttctctcctccagcccggggacccccgcgggccccagaagcagcccagttctcagagagcccttggaaggggtctcggtggagctgtgcaccagcagccaagcagaaagaaacacgcgacatggactctgtcaagtagaggacagaaagcaagaaaggatgcagaactgccttcctccccctgaccccgccccggccttctggggaaggaacaaagtccccaaacaaagcaaccagcacaattctgaaggggcctggcctccaccctcaccccttcctaggggaaccccaccctccacacagccggagctgccctagggagcctggagggccagcttgtaaagatgatggggtttagatccctcaggctctcccctccagactccgcccttccctccctccctccctccctccctctctgccaaggctccagcttcttcccccagctgctcccgaccaggagggggagagcagcctccacttaccccaccccacccttgggctaaaagcccccaggcgggcagggggtgacccctggagctagttgcgtgtcccagaatggagggtgttctgacaccccaccctgagccgcaagagcagtcctggggccctggacccctctgtacagtccgtaggaaaaagtcggaatgctctcgacggcctcgtcccagcctgggacaggccccctttcccctctctctgcaggccaggagggcctccttcctgccacgagggaggggagtcgggccccaggtcgcccccgcccccagccctgcatgcaggtgccctcgctccgccccatcagttcctgcccctgcccctcatgcagactgccctgctggggccgggccggagggtggagcagaaaggggaccccggagccgagcgaggaggaccaggcagccgccgctgccgcgctaagccaccacctgcgcttaggtaggcgtcctgctcgccgactttcagttccttgggagggtgttgggtgtcgtccttttcaaaagtgttttggagctttctgtgccccccgactttcccccgcctccccgccccccacgtggccacttttctctggattttagctgtaatgtctttactctttatttaggggtggggcattcattgtttgggtcttttgctgttggaatgggaactcctcctccatttgagcaacttgggaacaatttggtaacacaccacaggaagtagctctcccccccagccccctcctccctcaagggagggttggggggcctgtccagagggtcttcagaagcccccctgggagggaggggaggatgagcacgcccagctcccctccagggtgtgacttggcccctctggcttgtctttctgtgccttactcctcctcctgcgtctcccgttcctggccccttcttgagtccttgtgcctctctctttctctctctttcttaattgtatgaaaacacaaagcacaggtcaggatcctctgagagaaaatcaacattgcaccacgtaggggtgggctatgggctgtatttattgtgaatctagtttgtgaggctgtggccccgagctggcggagggagggaagaggagggagtgacgggaggggaggaggtcagcgacctggggccgtagcggcaggcgaacggtgcctgctacccagctggaagccacaaggtggctggctccaggggcggcttttgttggaagttgagtgaagccctccccctgtcctcagcgtgcagccctagaggaccccagggctgaggggcagtggatcctgcgggagtctcccggggcgtggggagtaaggccccgggggtggggggccgggtgggccgggcgtgacgcgcggtcaaagtgcaatgatttttcagttcggttggctaaacagggtcagagctgagagcgaagcagaaggggctccctgtccggcccacgtgccctttccctcgacgacagtcgagggctcgggctctgtgggactgtgggagctagggtctgcggggcgcctgcccgggcgaggtcggaagctgcaggccagctgggcccgggccggagcgtgcccggcggggctgcccgggcgggcagggggtgggggctgctcctttcccaagtggtgttgtgaggggcaatgagggcaacaggagatgtggggacgtgttaggagagaaaaaaaaaaaaacaaaaatatatatgggggaaattaacttttttttttcattgaaccaagtgcaatgcatcagagagttttcctatctttgtatgttaagagattaagaaaaaaaaattctatttttgttgtaatgtcctcgcggctctggggacgctaaaagaaccgggcctgccccgccctgcgcggggataacgaaagctgagtgtttttcccttttttttgttcgtttttagtttttttttttttaagtcgttttcctgcgttgacgaggatgatctggggtttttatttgtttcgtcgttcgttctgtttcggtgggagggctgaaggaaacgttcacattttagagtttaaaaaaaacacctcgacatttaaaaaatcaaccaacacaagatcaaaaaggaaaaggacgagagaaaaattatttttaagataattaaacataaaaccctggtgcttcttacattataaagtacgttttaaagaacccacaaactattatacataagtttatgaatcaattaaatatcctgcacttgttaggaatacgcatatcccttctttgttgagtttaacggaacgggacagcggcgtgcccccggcggctggactgctccggccgcgggtctccccgggcgcccctccctggggcccagcacccctcctcgccccatccccgtccgggtacgggggcgcggcaggggtccccggcccctcccccgcagaggtcaatgccaacgaacaaacgtcccctccctccctccctctccgccccgagcgcccttctttgagccagacgccaacttgaccctcaccagcattatcaggagcgcgctcagcaagttggtagtttcctcccccctttcccggcgcccctcccgcccccattcaacatctctcatcctatccccgaccccctccggggaacaccgggaaggctcgacgctccaggacaggaccagccacgcagacaggtcgatttgcccaggcccgcgcccgcacgcacgcacgcacacggccccgcacacagccccgccccaccccgcaaccagccctgtcgactgccttatacacccgcccccgcgctggccggccgacctagtgccttgttctcacccccgtgctggcggagcggacgccgcgctctgggtcccagaggggccgggtggctcagacgacccaccactcccccaccctgaccgtgctgaacagacccccccacacgagagaaaataaaggagcaataaagtcacgagaactttcgtcccccaatcgagagcccgaggggcaccccagccccgcctctgctcccccccaccccacccaccctcggggcgcccccctccccccgcaagccagcctgggccagccccgcttcggcccctcccgggagatccgtgcgcccgaccagcaccagcatcgcggaccgcaaaggccgcccgtcccgtcaaacaagtttcttcttaggctaagaaacgcagtatatacgagtatctctatatatagtactaatggatttggtgtgcttcccccttagcgtccccctccctctgctcctcctccttcagcctggtctccccctcttctctgccctccacccccgtctctgcactgagatacataagaaacaagggtagtttactgtctgttttgttttctgggttttcagtgtcctagcggaatgcaagtaggcagccagcccgtctgttccctctccgccccgccccgccccgcccccgtcactgcgcttctgttataccatctttgcctgactctctccggcttctccattgaatggctaatgtgtatgtgaaataaagaaataaagaaaaacaaacgcga

SEQ ID NO: 20554 - DNA, 5576 bp, Homo sapiens
  source 1..5576: mol_type = unassigned DNA
gcggccgccgcctgccgggcctcccctcgccgcggccggccgccgcgctcccgcccgggcgcccagctatgtactccccgtactgcctcacccaggatgagttccacccgttcatcgaggcactgctgcctcacgtccgcgctttctcctacacctggttcaacctgcaggcgcggaagcgcaagtacttcaagaagcatgaaaagcggatgtcgaaggacgaggagcgggcggtgaaggacgagctgctgggcgagaagcccgagatcaagcagaagtgggcatcccggctgctggccaagctgcgcaaggacatccggcccgagttccgcgaggacttcgtgctgaccatcacgggcaagaagcccccctgctgcgtgctctccaaccccgaccagaagggcaagatccggcggattgactgcctgcgccaggctgacaaggtgtggcggctggacctggtcatggtgattttgtttaaggggatccccctggaaagtactgatggggagcggctctacaagtcgcctcagtgctcgaaccccggcctgtgcgtccagccacatcacattggagtcacaatcaaagaactggatctttatctggcttactttgtccacactccggaatccggacaatcagatagttcaaaccagcaaggagatgcggacatcaaaccactgcccaacgggcacttaagtttccaggactgttttgtgacttccggggtctggaatgtgacggagctggtgagagtatcacagactcctgttgcaacagcatcagggcccaacttctccctggcggacctggagagtcccagctactacaacatcaaccaggtgaccctggggcggcggtccatcacctcccctccttccaccagcaccaccaagcgccccaagtccatcgatgacagtgagatggagagccctgttgatgacgtgttctatcccgggacaggccgttccccagcagctggcagcagccagtccagcgggtggcccaacgatgtggatgcaggcccggcttctctaaagaagtcaggaaagctggacttctgcagtgccctctcctctcagggcagctccccgcgcatggctttcacccaccacccgctgcctgtgcttgctggagtcagaccagggagcccccgggccacagcatcagccctgcacttcccctccacgtccatcatccagcagtcgagcccgtatttcacgcacccgaccatccgctaccaccaccaccacgggcaggactcactgaaggagtttgtgcagtttgtgtgctcggatggctcgggccaggccaccggacagcattcgcaacgacaggcgcctcctctgccaaccggtttgtcagcatcggaccccgggacggcaactttctgaacatcccacagcagtctcagtcctggttcctctgataagatcgacaaaagaaacaacaaaatgagaagaagaggttcctcgaaaggggggagaagaaattttgagaatggaaaaatcccccagcccagcccagccccaccgaaaagcaaaaattacacgtcgtcagccactcagcccttctctcctccagcccggggacccccgcgggccccagaagcagcccagttctcagagagcccttggaaggggtctcggtggagctgtgcaccagcagccaagcagaaagaaacacgcgacatggactctgtcaagtagaggacagaaagcaagaaaggatgcagaactgccttcctccccctgaccccgccccggccttctggggaaggaacaaagtccccaaacaaagcaaccagcacaattctgaaggggcctggcctccaccctcaccccttcctaggggaaccccaccctccacacagccggagctgccctagggagcctggagggccagcttgtaaagatgatggggtttagatccctcaggctctcccctccagactccgcccttccctccctccctccctccctccctctctgccaaggctccagcttcttcccccagctgctcccgaccaggagggggagagcagcctccacttaccccaccccacccttgggctaaaagcccccaggcgggcagggggtgacccctggagctagttgcgtgtcccagaatggagggtgttctgacaccccaccctgagccgcaagagcagtcctggggccctggacccctctgtacagtccgtaggaaaaagtcggaatgctctcgacggcctcgtcccagcctgggacaggccccctttcccctctctctgcaggccaggagggcctccttcctgccacgagggaggggagtcgggccccaggtcgcccccgcccccagccctgcatgcaggtgccctcgctccgccccatcagttcctgcccctgcccctcatgcagactgccctgctggggccgggccggagggtggagcagaaaggggaccccggagccgagcgaggaggaccaggcagccgccgctgccgcgctaagccaccacctgcgcttaggtaggcgtcctgctcgccgactttcagttccttgggagggtgttgggtgtcgtccttttcaaaagtgttttggagctttctgtgccccccgactttcccccgcctccccgccccccacgtggccacttttctctggattttagctgtaatgtctttactctttatttaggggtggggcattcattgtttgggtcttttgctgttggaatgggaactcctcctccatttgagcaacttgggaacaatttggtaacacaccacaggaagtagctctcccccccagccccctcctccctcaagggagggttggggggcctgtccagagggtcttcagaagcccccctgggagggaggggaggatgagcacgcccagctcccctccagggtgtgacttggcccctctggcttgtctttctgtgccttactcctcctcctgcgtctcccgttcctggccccttcttgagtccttgtgcctctctctttctctctctttcttaattgtatgaaaacacaaagcacaggtcaggatcctctgagagaaaatcaacattgcaccacgtaggggtgggctatgggctgtatttattgtgaatctagtttgtgaggctgtggccccgagctggcggagggagggaagaggagggagtgacgggaggggaggaggtcagcgacctggggccgtagcggcaggcgaacggtgcctgctacccagctggaagccacaaggtggctggctccaggggcggcttttgttggaagttgagtgaagccctccccctgtcctcagcgtgcagccctagaggaccccagggctgaggggcagtggatcctgcgggagtctcccggggcgtggggagtaaggccccgggggtggggggccgggtgggccgggcgtgacgcgcggtcaaagtgcaatgatttttcagttcggttggctaaacagggtcagagctgagagcgaagcagaaggggctccctgtccggcccacgtgccctttccctcgacgacagtcgagggctcgggctctgtgggactgtgggagctagggtctgcggggcgcctgcccgggcgaggtcggaagctgcaggccagctgggcccgggccggagcgtgcccggcggggctgcccgggcgggcagggggtgggggctgctcctttcccaagtggtgttgtgaggggcaatgagggcaacaggagatgtggggacgtgttaggagagaaaaaaaaaaaaacaaaaatatatatgggggaaattaacttttttttttcattgaaccaagtgcaatgcatcagagagttttcctatctttgtatgttaagagattaagaaaaaaaaattctatttttgttgtaatgtcctcgcggctctggggacgctaaaagaaccgggcctgccccgccctgcgcggggataacgaaagctgagtgtttttcccttttttttgttcgtttttagtttttttttttttaagtcgttttcctgcgttgacgaggatgatctggggtttttatttgtttcgtcgttcgttctgtttcggtgggagggctgaaggaaacgttcacattttagagtttaaaaaaaacacctcgacatttaaaaaatcaaccaacacaagatcaaaaaggaaaaggacgagagaaaaattatttttaagataattaaacataaaaccctggtgcttcttacattataaagtacgttttaaagaacccacaaactattatacataagtttatgaatcaattaaatatcctgcacttgttaggaatacgcatatcccttctttgttgagtttaacggaacgggacagcggcgtgcccccggcggctggactgctccggccgcgggtctccccgggcgcccctccctggggcccagcacccctcctcgccccatccccgtccgggtacgggggcgcggcaggggtccccggcccctcccccgcagaggtcaatgccaacgaacaaacgtcccctccctccctccctctccgccccgagcgcccttctttgagccagacgccaacttgaccctcaccagcattatcaggagcgcgctcagcaagttggtagtttcctcccccctttcccggcgcccctcccgcccccattcaacatctctcatcctatccccgaccccctccggggaacaccgggaaggctcgacgctccaggacaggaccagccacgcagacaggtcgatttgcccaggcccgcgcccgcacgcacgcacgcacacggccccgcacacagccccgccccaccccgcaaccagccctgtcgactgccttatacacccgcccccgcgctggccggccgacctagtgccttgttctcacccccgtgctggcggagcggacgccgcgctctgggtcccagaggggccgggtggctcagacgacccaccactcccccaccctgaccgtgctgaacagacccccccacacgagagaaaataaaggagcaataaagtcacgagaactttcgtcccccaatcgagagcccgaggggcaccccagccccgcctctgctcccccccaccccacccaccctcggggcgcccccctccccccgcaagccagcctgggccagccccgcttcggcccctcccgggagatccgtgcgcccgaccagcaccagcatcgcggaccgcaaaggccgcccgtcccgtcaaacaagtttcttcttaggctaagaaacgcagtatatacgagtatctctatatatagtactaatggatttggtgtgcttcccccttagcgtccccctccctctgctcctcctccttcagcctggtctccccctcttctctgccctccacccccgtctctgcactgagatacataagaaacaagggtagtttactgtctgttttgttttctgggttttcagtgtcctagcggaatgcaagtaggcagccagcccgtctgttccctctccgccccgccccgccccgcccccgtcactgcgcttctgttataccatctttgcctgactctctccggcttctccattgaatggctaatgtgtatgtgaaataaagaaataaagaaaaacaaacgcga

SEQ ID NO: 20555 - DNA, 5724 bp, Homo sapiens
  source 1..5724: mol_type = unassigned DNA
gcggccgccgcctgccgggcctcccctcgccgcggccggccgccgcgctcccgcccgggcgcccagctatgtactccccgtactgcctcacccaggatgagttccacccgttcatcgaggcactgctgcctcacgtccgcgctttctcctacacctggttcaacctgcaggcgcggaagcgcaagtacttcaagaagcatgaaaagcggatgtcgaaggacgaggagcgggcggtgaaggacgagctgctgggcgagaagcccgagatcaagcagaagtgggcatcccggctgctggccaagctgcgcaaggacatccggcccgagttccgcgaggacttcgtgctgaccatcacgggcaagaagcccccctgctgcgtgctctccaaccccgaccagaagggcaagatccggcggattgactgcctgcgccaggctgacaaggtgtggcggctggacctggtcatggtgattttgtttaaggggatccccctggaaagtactgatggggagcggctctacaagtcgcctcagtgctcgaaccccggcctgtgcgtccagccacatcacattggagtcacaatcaaagaactggatctttatctggcttactttgtccacactccggaatccggacaatcagatagttcaaaccagcaaggagatgcggacatcaaaccactgcccaacgggcacttaagtttccaggactgttttgtgacttccggggtctggaatgtgacggagctggtgagagtatcacagactcctgttgcaacagcatcagggcccaacttctccctggcggacctggagagtcccagctactacaacatcaaccaggtgaccctggggcggcggtccatcacctcccctccttccaccagcaccaccaagcgccccaagtccatcgatgacagtgagatggagagccctgttgatgacgtgttctatcccgggacaggccgttccccagcagctggcagcagccagtccagcgggtggcccaacgatgtggatgcaggcccggcttctctaaagaagtcaggaaagctggacttctgcagtgccctctcctctcagggcagctccccgcgcatggctttcacccaccacccgctgcctgtgcttgctggagtcagaccagggagcccccgggccacagcatcagccctgcacttcccctccacgtccatcatccagcagtcgagcccgtatttcacgcacccgaccatccgctaccaccaccaccacgggcaggactcactgaaggagtttgtgcagtttgtgtgctcggatggctcgggccaggccaccggacagcccaacggtagcggccagggcaaagtcccggggtcatttttgctaccgccgccgcctccagtggccagacctgtgccccttcctatgcctgattccaaatccaccagcactgccccagacggcgccgccttgactcctccatcaccttcattcgcaacgacaggcgcctcctctgccaaccggtttgtcagcatcggaccccgggacggcaactttctgaacatcccacagcagtctcagtcctggttcctctgataagatcgacaaaagaaacaacaaaatgagaagaagaggttcctcgaaaggggggagaagaaattttgagaatggaaaaatcccccagcccagcccagccccaccgaaaagcaaaaattacacgtcgtcagccactcagcccttctctcctccagcccggggacccccgcgggccccagaagcagcccagttctcagagagcccttggaaggggtctcggtggagctgtgcaccagcagccaagcagaaagaaacacgcgacatggactctgtcaagtagaggacagaaagcaagaaaggatgcagaactgccttcctccccctgaccccgccccggccttctggggaaggaacaaagtccccaaacaaagcaaccagcacaattctgaaggggcctggcctccaccctcaccccttcctaggggaaccccaccctccacacagccggagctgccctagggagcctggagggccagcttgtaaagatgatggggtttagatccctcaggctctcccctccagactccgcccttccctccctccctccctccctccctctctgccaaggctccagcttcttcccccagctgctcccgaccaggagggggagagcagcctccacttaccccaccccacccttgggctaaaagcccccaggcgggcagggggtgacccctggagctagttgcgtgtcccagaatggagggtgttctgacaccccaccctgagccgcaagagcagtcctggggccctggacccctctgtacagtccgtaggaaaaagtcggaatgctctcgacggcctcgtcccagcctgggacaggccccctttcccctctctctgcaggccaggagggcctccttcctgccacgagggaggggagtcgggccccaggtcgcccccgcccccagccctgcatgcaggtgccctcgctccgccccatcagttcctgcccctgcccctcatgcagactgccctgctggggccgggccggagggtggagcagaaaggggaccccggagccgagcgaggaggaccaggcagccgccgctgccgcgctaagccaccacctgcgcttaggtaggcgtcctgctcgccgactttcagttccttgggagggtgttgggtgtcgtccttttcaaaagtgttttggagctttctgtgccccccgactttcccccgcctccccgccccccacgtggccacttttctctggattttagctgtaatgtctttactctttatttaggggtggggcattcattgtttgggtcttttgctgttggaatgggaactcctcctccatttgagcaacttgggaacaatttggtaacacaccacaggaagtagctctcccccccagccccctcctccctcaagggagggttggggggcctgtccagagggtcttcagaagcccccctgggagggaggggaggatgagcacgcccagctcccctccagggtgtgacttggcccctctggcttgtctttctgtgccttactcctcctcctgcgtctcccgttcctggccccttcttgagtccttgtgcctctctctttctctctctttcttaattgtatgaaaacacaaagcacaggtcaggatcctctgagagaaaatcaacattgcaccacgtaggggtgggctatgggctgtatttattgtgaatctagtttgtgaggctgtggccccgagctggcggagggagggaagaggagggagtgacgggaggggaggaggtcagcgacctggggccgtagcggcaggcgaacggtgcctgctacccagctggaagccacaaggtggctggctccaggggcggcttttgttggaagttgagtgaagccctccccctgtcctcagcgtgcagccctagaggaccccagggctgaggggcagtggatcctgcgggagtctcccggggcgtggggagtaaggccccgggggtggggggccgggtgggccgggcgtgacgcgcggtcaaagtgcaatgatttttcagttcggttggctaaacagggtcagagctgagagcgaagcagaaggggctccctgtccggcccacgtgccctttccctcgacgacagtcgagggctcgggctctgtgggactgtgggagctagggtctgcggggcgcctgcccgggcgaggtcggaagctgcaggccagctgggcccgggccggagcgtgcccggcggggctgcccgggcgggcagggggtgggggctgctcctttcccaagtggtgttgtgaggggcaatgagggcaacaggagatgtggggacgtgttaggagagaaaaaaaaaaaaacaaaaatatatatgggggaaattaacttttttttttcattgaaccaagtgcaatgcatcagagagttttcctatctttgtatgttaagagattaagaaaaaaaaattctatttttgttgtaatgtcctcgcggctctggggacgctaaaagaaccgggcctgccccgccctgcgcggggataacgaaagctgagtgtttttcccttttttttgttcgtttttagtttttttttttttaagtcgttttcctgcgttgacgaggatgatctggggtttttatttgtttcgtcgttcgttctgtttcggtgggagggctgaaggaaacgttcacattttagagtttaaaaaaaacacctcgacatttaaaaaatcaaccaacacaagatcaaaaaggaaaaggacgagagaaaaattatttttaagataattaaacataaaaccctggtgcttcttacattataaagtacgttttaaagaacccacaaactattatacataagtttatgaatcaattaaatatcctgcacttgttaggaatacgcatatcccttctttgttgagtttaacggaacgggacagcggcgtgcccccggcggctggactgctccggccgcgggtctccccgggcgcccctccctggggcccagcacccctcctcgccccatccccgtccgggtacgggggcgcggcaggggtccccggcccctcccccgcagaggtcaatgccaacgaacaaacgtcccctccctccctccctctccgccccgagcgcccttctttgagccagacgccaacttgaccctcaccagcattatcaggagcgcgctcagcaagttggtagtttcctcccccctttcccggcgcccctcccgcccccattcaacatctctcatcctatccccgaccccctccggggaacaccgggaaggctcgacgctccaggacaggaccagccacgcagacaggtcgatttgcccaggcccgcgcccgcacgcacgcacgcacacggccccgcacacagccccgccccaccccgcaaccagccctgtcgactgccttatacacccgcccccgcgctggccggccgacctagtgccttgttctcacccccgtgctggcggagcggacgccgcgctctgggtcccagaggggccgggtggctcagacgacccaccactcccccaccctgaccgtgctgaacagacccccccacacgagagaaaataaaggagcaataaagtcacgagaactttcgtcccccaatcgagagcccgaggggcaccccagccccgcctctgctcccccccaccccacccaccctcggggcgcccccctccccccgcaagccagcctgggccagccccgcttcggcccctcccgggagatccgtgcgcccgaccagcaccagcatcgcggaccgcaaaggccgcccgtcccgtcaaacaagtttcttcttaggctaagaaacgcagtatatacgagtatctctatatatagtactaatggatttggtgtgcttcccccttagcgtccccctccctctgctcctcctccttcagcctggtctccccctcttctctgccctccacccccgtctctgcactgagatacataagaaacaagggtagtttactgtctgttttgttttctgggttttcagtgtcctagcggaatgcaagtaggcagccagcccgtctgttccctctccgccccgccccgccccgcccccgtcactgcgcttctgttataccatctttgcctgactctctccggcttctccattgaatggctaatgtgtatgtgaaataaagaaataaagaaaaacaaacgcga

SEQ ID NO: 20556 - DNA, 1688 bp, Homo sapiens
  source 1..1688: mol_type = unassigned DNA
agacggacactgtgccggggcgagctgacaggagttcacggctgcgatagaacatggagatgtcatgggcgcgacagagcctggcggggataccagcagcgtgtgatgagttccacccgttcatcgaggcactgctgcctcacgtccgcgctttctcctacacctggttcaacctgcaggcgcggaagcgcaagtacttcaagaagcatgaaaagcggatgtcgaaggacgaggagcgggcggtgaaggacgagctgctgggcgagaagcccgagatcaagcagaagtgggcatcccggctgctggccaagctgcgcaaggacatccggcccgagttccgcgaggacttcgtgctgaccatcacgggcaagaagcccccctgctgcgtgctctccaaccccgaccagaagggcaagatccggcggattgactgcctgcgccaggctgacaaggtgtggcggctggacctggtcatggtgattttgtttaaggggatccccctggaaagtactgatggggagcggctctacaagtcgcctcagtgctcgaaccccggcctgtgcgtccagccacatcacattggagtcacaatcaaagaactggatctttatctggcttactttgtccacactccggaatccggacaatcagatagttcaaaccagcaaggagatgcggacatcaaaccactgcccaacgggcacttaagtttccaggactgttttgtgacttccggggtctggaatgtgacggagctggtgtatcacagactcctgttgcaacagcatcagggcccaacttctccctggcggacctggagagtcccagctactacaacatcaaccaggtgaccctggggcggcggtccatcacctcccctccttccaccagcaccaccaagcgccccaagtccatcgatgacagtgagatggagagccctgttgatgacgtgttctatcccgggacaggccgttccccagcagctggcagcagccagtccagcgggtggcccaacgatgtggatgcaggcccggcttctctaaagaagtcaggaaagctggacttctgcagtgccctctcctctcagggcagctccccgcgcatggctttcacccaccacccgctgcctgtgcttgctggagtcagaccagggagcccccgggccacagcatcagccctgcacttcccctccacgtccatcatccagcagtcgagcccgtatttcacgcacccgaccatccgctaccaccaccaccacgggcaggactcactgaaggagtttgtgcagtttgtgtgctcggatggctcgggccaggccaccggacagcccaacggtagcggccagggcaaagtcccggggtcatttttgctaccgccgccgcctccagtggccagacctgtgccccttcctatgcctgattccaaatccaccagcactgccccagacggcgccgccttgactcctccatcaccttcattcgcaacgacaggcgcctcctctgccaaccggtttgtcagcatcggaccccgggacggcaactttctgaacatcccacagcagtctcagtcctggttcctctgataagatcgacaaaagaaacaacaaaatgagaagaagaggttcctcgaaaggggggagaagaaattttgagaatggaaaaatcccccagcccagcccagccccaccg

SEQ ID NO: 20557 - DNA, 1188 bp, Homo sapiens
  source 1..1188: mol_type = unassigned DNA
ccggcaaagcccagctacaggcgggcgactgcggggggcccctgaggcggcgggggccatggctggggtcgcgtgcttgggaaaagctgccgacgcagatgaatggtgcgacagcggcctgggctccctgggtccggacgcagcggcccccggaggacctgggttgggcgcggagttgggcccggggctgtcgtgggctcccctcgtcttcggctacgtcactgaggatggggacacggcactgcacttggctgtgattcatcagcatgaacccttcctggattttcttctaggcttctcggccggcactgagtacatggacctgcagaatgacctaggccagacagccctgcacctggcagccatcctgggggagacatccacggtggagaagctgtacgcagcaggcgccgggctgtgtgtggcggagcgtaggggccacacggcgctgcacctggcctgccgtgtgggggcacacgcctgtgcccgtgccctgcttcagccccgcccccggcgccccagggaagcccccgacacctacctcgctcagggccctgaccgtactcccgacaccaaccatacccctgtcgccttgtaccccgattccgacttggagaaggaagaagaggagagtgaggaggactggaagctgcagctggaggctgaaaactacgagggccacaccccactccacgtggccgttatccacaaagatgtggagatggtccggctgctccgagatgctggagctgaccttgacaaaccggagcccacgtgcggccggagcccccttcatttggcagtggaggcccaggcagccgatgtgctggagcttctcctgagggcaggcgcgaaccctgctgcccgcatgtacggtggccgcaccccactcggcagtgccatgctccggcccaaccccatcctcgcccgcctcctccgtgcacacggagcccctgagcccgagggcgaggacgagaaatccggcccctgcagcagcagtagcgacagcgacagcggagacgagggcgatgaatacgacgacattgtggttcacagcagccgcagccaaacccggctgcctcccaccccagcctcaaaacctcttcctgacgacccccgccccgtgtgatttgtttcattgttaatataatttccagtttaataaacaaaaccctagttctgacaacc

SEQ ID NO: 20558 - DNA, 2203 bp, Homo sapiens
  source 1..2203: mol_type = unassigned DNA
ccggcaaagcccagctacaggcgggcgactgcggggggcccctgaggcggcgggggccatggctggggtcgcgtgcttgggaaaagctgccgacgcagatgaatggtgcgacagcggcctgggctccctgggtccggacgcagcggcccccggaggacctgggttgggcgcggagttgggcccggggctgtcgtgggctcccctcgtcttcggctacgtcactgaggatggggacacgcttctcggccggcactgagtacatggacctgcagaatgacctaggccagacagccctgcacctggcagccatcctgggggagacatccacggtggagaagctgtacgcagcaggcgccgggctgtgtgtggcggagcgtaggggccacacggcgctgcacctggcctgccgtgtgggggcacacgcctgtgcccgtgccctgcttcagccccgcccccggcgccccagggaagcccccgacacctacctcgctcagggccctgaccgtactcccgacaccaaccatacccctgtcgccttgtaccccgattccgacttggagaaggaagaagaggagagtgaggaggactggaagctgcagctggaggctgaaaactacgagggccacaccccactccacgtggccgttatccacaaagatgtggagatggtccggctgctccgagatgctggagctgaccttgacaaaccggagcccacgtgcggccggagcccccttcatttggcagtggaggcccaggcagccgatgtgctggagcttctcctgagggcaggcgcgaaccctgctgcccgcatgtacggtggccgcaccccactcggcagtgccatgctccggcccaaccccatcctcgcccgcctcctccgtgcacacggagcccctgagcccgagggcgaggacgagaaatccggcccctgcagcagcagtagcgacagcgacagcggagacgagggcgtgagtcaggaggagagacagggcagcccagctggggggtcaggatagaccggcaggcaagaagcccaagaagataattaggcaccgaccttgggctgctgttagagaactcaggcagcagcgccagtgacacggggcactagtcaggagagacctggacaggggtggtgggaagagcttgggcagaagtggctgaaaaactaaggcagtggcaaaggtagaactcaggcaggggtggagaaaaggcgttggtcgcagtgattggtgaacacagcgggggtgggtggtagcgctgggggtgattttaggcagcaagaattggagaactcacactgcgaaaagaaaaccttgggtggcagtgatttgaacaccggcagtgctggggcaggacccgagccagcggtggggagagatatagtcagagaacccagcaatacagatccgtccttgggcaaggcgcggtgctggatgatgggtgcggaggaatttgggtaaaggcagagggaaggggtggaggagggccagctcagttgccgaaactctggagtggcggctggctagaaattggtctgtagaaatgaccttgaaaatggagttctggccaggtgcggtggctcacgcctgtaatcccagcactttgggaggccgaggcaggcagatcacgaggtcaggagttcgagaccagcctggccaacatggcaagaccctgtctctactaaaaatacaaaaattagctgggcgtggtggcgcatgcctataatcccagctacttgggaggctgaggtaggagaattgcttgaacctgggaggtggaggttgcagtgaacctagatcacgccactgcattccagcctgggcaacagagcgagactccatcttaaaaaaaaaaaaaaaaaaaagaaagaaaagaaaatggagttctgagagctaggaaactgggaggttgagccaggagcaggggaacttgggctttgaggcgagacctaattcttagggtgctctatgaggacatgggtggtgggcaaagtgacagccgcctgagcccctctgcctggtcccctttgcccccaggatgaatacgacgacattgtggttcacagcagccgcagccaaacccggctgcctcccaccccagcctcaaaacctcttcctgacgacccccgccccgtgtgatttgtttcattgttaatataatttccagtttaataaacaaaaccctagttctgacaacc

SEQ ID NO: 20559 - DNA, 2272 bp, Homo sapiens
  source 1..2272: mol_type = unassigned DNA
ctccagaactcccggcaaagcccagctacaggcgggcgactgcggggggcccctgaggcggcgggggccatggctggggtcgcgtgcttgggaaaagctgccgacgcagatgaatggtgcgacagcggcctgggctccctgggtccggacgcagcggcccccggaggacctgggttgggcgcggagttgggcccggggctgtcgtgggctcccctcgtcttcggctacgtcactgaggatggggacacggcactgcacttggctgtgattcatcagcatgaacccttcctggattttcttctaggcttctcggccggcactgagtacatggacctgcagaatgacctaggccagacagccctgcacctggcagccatcctgggggagacatccacggtggagaagctgtacgcagcaggcgccgggctgtgtgtggcggagcgtaggggccacacggcgctgcacctggcctgccgtgtgggggcacacgcctgtgcccgtgccctgcttcagccccgcccccggcgccccagggaagcccccgacacctacctcgctcagggccctgaccgtactcccgacaccaaccatacccctgtcgccttgtaccccgattccgacttggagaaggaagaagaggagagtgaggaggactggaagctgcagctggaggctgaaaactacgagggccacaccccactccacgtggccgttatccacaaagatgtggagatggtccggctgctccgagatgctggagctgaccttgacaaaccggagcccacgtgcggccggagcccccttcatttggcagtggaggcccaggcagccgatgtgctggagcttctcctgagggcaggcgcgaaccctgctgcccgcatgtacggtggccgcaccccactcggcagtgccatgctccggcccaaccccatcctcgcccgcctcctccgtgcacacggagcccctgagcccgagggcgaggacgagaaatccggcccctgcagcagcagtagcgacagcgacagcggagacgagggcgtgagtcaggaggagagacagggcagcccagctggggggtcaggatagaccggcaggcaagaagcccaagaagataattaggcaccgaccttgggctgctgttagagaactcaggcagcagcgccagtgacacggggcactagtcaggagagacctggacaggggtggtgggaagagcttgggcagaagtggctgaaaaactaaggcagtggcaaaggtagaactcaggcaggggtggagaaaaggcgttggtcgcagtgattggtgaacacagcgggggtgggtggtagcgctgggggtgattttaggcagcaagaattggagaactcacactgcgaaaagaaaaccttgggtggcagtgatttgaacaccggcagtgctggggcaggacccgagccagcggtggggagagatatagtcagagaacccagcaatacagatccgtccttgggcaaggcgcggtgctggatgatgggtgcggaggaatttgggtaaaggcagagggaaggggtggaggagggccagctcagttgccgaaactctggagtggcggctggctagaaattggtctgtagaaatgaccttgaaaatggagttctggccaggtgcggtggctcacgcctgtaatcccagcactttgggaggccgaggcaggcagatcacgaggtcaggagttcgagaccagcctggccaacatggcaagaccctgtctctactaaaaatacaaaaattagctgggcgtggtggcgcatgcctataatcccagctacttgggaggctgaggtaggagaattgcttgaacctgggaggtggaggttgcagtgaacctagatcacgccactgcattccagcctgggcaacagagcgagactccatcttaaaaaaaaaaaaaaaaaaaagaaagaaaagaaaatggagttctgagagctaggaaactgggaggttgagccaggagcaggggaacttgggctttgaggcgagacctaattcttagggtgctctatgaggacatgggtggtgggcaaagtgacagccgcctgagcccctctgcctggtcccctttgcccccaggatgaatacgacgacattgtggttcacagcagccgcagccaaacccggctgcctcccaccccagcctcaaaacctcttcctgacgacccccgccccgtgtgatttgtttcattgttaatataatttccagtttaataaacaaaaccctagttctgacaaccag

SEQ ID NO: 20560 - DNA, 2058 bp, Homo sapiens
  source 1..2058: mol_type = unassigned DNA
gtactggcccgcgccgtccgcccgccgacagctccctgagccagcccgggaggcagccgcgcgcagcgagccggtggcgcaggtgtcggggtcctcgagcgcccagcctgggagcatgattgtggacaagctgctggacgacagccgcggcggagaggggctgcgggacgcggcgggcggctgcggcctcatgaccagcccgctcaacctgagctacttctacggcgcgtcgccgcccgccgccgccccgggcgcctgcgacgccagctgctcggtcttgggcccctcggcgcccggctcgcccggctccgactcctccgacttctcctctgcctcgtcggtgtcctcctgcggcgccgtggagtcccggtcgagaggcggcgcccgcgccgagcgccagccagttgagccccatatgggggttggcaggcagcagagaggcccctttcaaggtgttcgggtaaagaactcagtgaaggaactcctgttgcacatccgaagtcataaacagaaggcttctggccaagctgtggatgattttaagacacaaggtgtgaacatagaacagttcagagaattgaagaacacagtatcatacagtgggaaaaggaaagggcccgattcgttgtctgatggacctgcttgcaaaaggccagctctgttgcattcccaatttttgacaccacctcaaacaccaacgcccggggagagcatggaagatgttcatctcaatgaacccaaacaggagagcagtgctgatctgcttcagaacattatcaacattaagaatgaatgcagccccgtttccctgaacacagttcaaacttcctccagtgttcagcagcaaaatgatgctcacttgcacagcttcagcatgatgcccagcagcgcctgtgaggccatggtggggcacgagatggcctctgactcttcaaacacttcactgccattctcaaacatgggaaatccaatgaacaccacacagttagggaaatcactttttcagtggcaggtggagcaggaagaaagcaaattggcaaatatttcccaagaccagtttctttcaaaggatgcagatggtgacacgttccttcatattgctgttgcccaagggagaagggcactttcctatgttcttgcaagaaagatgaatgcacttcacatgctggatattaaagagcacaatggacagagtgcctttcaggtggcagtggctgccaatcagcatctcattgtgcaggatctggtgaacatcggggcacaggtgaacaccacagactgctggggaagaacacctctgcatgtgtgtgctgagaagggccactcccaggtgcttcaggcgattcagaagggagcagtgggaagtaatcagtttgtggatcttgaggcaactaactatgatggcctgactccccttcactgtgcagtcatagcccacaatgctgtggtccatgaactccagagaaatcaacagcctcattcacctgaagttcaggagcttttactgaagaataagagtctggttgataccattaagtgcctaattcaaatgggagcagcggtggaagcgaaggatcgcaaaagtggccgcacagccctgcatttggcagctgaagaagcaaatctggaactcattcgcctctttttggagctgcccagttgcctgtcttttgtgaatgcaaaggcttacaatggcaacactgccctccatgttgctgccagcttgcagtatcggttgacacaattagatgctgtccgcctgttgatgaggaagggagcagacccaagtactcggaacttggagaacgaacagccagtgcatttggttcccgatggccctgtgggagaacagatccgacgtatcctgaagggaaagtccattcagcagagagctccaccgtattagctccattagcttggagcctggctagcaacactcactgtcagttaggcagtcctgatgtatctgtacatagaccatttgccttatattggcaaatgtaagttgtttctatgaaacaaacatatttagttcactattatatagtgggttatatt

SEQ ID NO: 20561 - DNA, 3923 bp, Homo sapiens
  source 1..3923: mol_type = unassigned DNA
gtactggcccgcgccgtccgcccgccgacagctccctgagccagcccgggaggcagccgcgcgcagcgagccggtggcgcaggtgtcggggtcctcgagcgcccagcctgggagcatgattgtggacaagctgctggacgacagccgcggcggagaggggctgcgggacgcggcgggcggctgcggcctcatgaccagcccgctcaacctgagctacttctacggcgcgtcgccgcccgccgccgccccgggcgcctgcgacgccagctgctcggtcttgggcccctcggcgcccggctcgcccggctccgactcctccgacttctcctctgcctcgtcggtgtcctcctgcggcgccgtggagtcccggtcgagaggcggcgcccgcgccgagcgccagccagttgagccccatatgggggttggcaggcagcagagaggcccctttcaaggtgttcgggtaaagaactcagtgaaggaactcctgttgcacatccgaagtcataaacagaaggcttctggccaagctgtggatgattttaagacacaaggtgtgaacatagaacagttcagagaattgaagaacacagtatcatacagtgggaaaaggaaagggcccgattcgttgtctgatggacctgcttgcaaaaggccagctctgttgcattcccaatttttgacaccacctcaaacaccaacgcccggggagagcatggaagatgttcatctcaatgaacccaaacaggagagcagtgctgatctgcttcagaacattatcaacattaagaatgaatgcagccccgtttccctgaacacagttcaagttagctggctgaaccccgtggtggtccctcagagctcccccgcagagcagtgtcaggacttccatggagggcaggtcttttctccacctcagaaatgccaaccattccaagtcaggggctcccaacaaatgatagaccaggcttccctgtaccagtattctccacagaaccagcatgtagagcagcagccacactacacccacaaaccaactctggaatacagtccttttcccatacctccccagtcccccgcttatgaaccaaacctctttgatggtccagaatcacagttttgcccaaaccaaagcttagtttcccttcttggtgatcaaagggaatctgagaatattgctaatcccatgcagacttcctccagtgttcagcagcaaaatgatgctcacttgcacagcttcagcatgatgcccagcagcgcctgtgaggccatggtggggcacgagatggcctctgactcttcaaacacttcactgccattctcaaacatgggaaatccaatgaacaccacacagttagggaaatcactttttcagtggcaggtggagcaggaagaaagcaaattggcaaatatttcccaagaccagtttctttcaaaggatgcagatggtgacacgttccttcatattgctgttgcccaagggagaagggcactttcctatgttcttgcaagaaagatgaatgcacttcacatgctggatattaaagagcacaatggacagagtgcctttcaggtggcagtggctgccaatcagcatctcattgtgcaggatctggtgaacatcggggcacaggtgaacaccacagactgctggggaagaacacctctgcatgtgtgtgctgagaagggccactcccaggtgcttcaggcgattcagaagggagcagtgggaagtaatcagtttgtggatcttgaggcaactaactatgatggcctgactccccttcactgtgcagtcatagcccacaatgctgtggtccatgaactccagagaaatcaacagcctcattcacctgaagttcaggagcttttactgaagaataagagtctggttgataccattaagtgcctaattcaaatgggagcagcggtggaagcgaaggatcgcaaaagtggccgcacagccctgcatttggcagctgaagaagcaaatctggaactcattcgcctctttttggagctgcccagttgcctgtcttttgtgaatgcaaaggcttacaatggcaacactgccctccatgttgctgccagcttgcagtatcggttgacacaattagatgctgtccgcctgttgatgaggaagggagcagacccaagtactcggaacttggagaacgaacagccagtgcatttggttcccgatggccctgtgggagaacagatccgacgtatcctgaagggaaagtccattcagcagagagctccaccgtattagctccattagcttggagcctggctagcaacactcactgtcagttaggcagtcctgatgtatctgtacatagaccatttgccttatattggcaaatgtaagttgtttctatgaaacaaacatatttagttcactattatatagtgggttatattaaaagaaaagaagaaaaatatctaatttctcttggcagatttgcatatttcatacccaggtatctgggatctagacatctgaatttgatctcaatggtaacattgccttcaattaacagtagcttttgagtaggaaaggactttgatttgtggcacaaaacattattaatatagctattgacagtttcaaagcaggtaaattgtaaatgtttctttaagaaaaagcatgtgaaaggaaaaaggtaaatacagcattgaggcttcatttggccttagtccctgggagttactggcgttggacaggcttcagtcattggactagatgaaaggtgtccatggttagaatttgatctttgcaaactgtatataattgttatttttgtccttaaaaatattgtacatacttggttgttaacatggtcatatttgaaatgtataagtccataaaatagaaaagaacaagtgaattgttgctatttaaaaaaattttacaattcttactaaggagtttttattgtgtaatcactaagtctttgtagataaagcagatggggagttacggagttgttcctttactggctgaaagatatattcgaattgtaaagatgctttttctcatgcattgaaattatacattatttgtagggaattgcatgcttttttttttttttctcccgagacagggtcttgctctggcgcccaggctggagtacagtggcatgatcttggctcacttcagccttgacttgggctcaagtgatcctcctacctgagccttctgagtaactggaactacaggtgtgcactcctcgcctggctaattttttattttttgtacaggcaggatcttgccaccttgcccaggctggtcttgaactcctgagctcatgccatctgcctgccttagtctcccaaaatgctgggattacaggagtgagccaccatgcccggctggcagttgcatggaagagaacacctctttatggcttaccctctagaatttctaatttatgtgttctgttgaaatttttgtttttttacctttattgaaacaacaaaaagtcagtattgaaacatatcttcctgttttctgttgtcaaatgatgataatgtgccatgatgttttatatatatcattcagaaaaagttttattttttaataacattctattaacattattttgcttgccgctggcatgcctgaggaatgtatttggctttgattacacactaagtttttgtaataaatttgactcattaaaaaccttttttttttaaaaaaaaaaaaaaagaaaatctcattagtgaacttatctttgcagctgagtacttaaattctttttaaaaagataccctttggattgatcacattgtttgacccagtatgtcttgtagacacgttagttataatcaccttgtatctctaaatatggtgtgatatgaaccagtccattcacattggaaaaactgatggttttaaataaactaattcactaata

SEQ ID NO: 20562 - DNA, 3787 bp, Homo sapiens
  source 1..3787: mol_type = unassigned DNA
ctcttgccacgaggtcagacggcgagttcttagagaaaaaggctgcttagctgctgcttatcatgtaacctcaaaaggaaactgatcgtctttctcatgctgtcacgtacttgggttattatcgctgattacagctggaaacaattgatttgctcttacgtatttgtgtgacttgactcttcaaacacaaaggttaacaggaagatctcgagggccctggctgaacttcaccttttggctttcttggcctgatgctgaactctcgaggttgagccccatatgggggttggcaggcagcagagaggcccctttcaaggtgttcgggtaaagaactcagtgaaggaactcctgttgcacatccgaagtcataaacagaaggcttctggccaagctgtggatgattttaagacacaaggtgtgaacatagaacagttcagagaattgaagaacacagtatcatacagtgggaaaaggaaagggcccgattcgttgtctgatggacctgcttgcaaaaggccagctctgttgcattcccaatttttgacaccacctcaaacaccaacgcccggggagagcatggaagatgttcatctcaatgaacccaaacaggagagcagtgctgatctgcttcagaacattatcaacattaagaatgaatgcagccccgtttccctgaacacagttcaagttagctggctgaaccccgtggtggtccctcagagctcccccgcagagcagtgtcaggacttccatggagggcaggtcttttctccacctcagaaatgccaaccattccaagtcaggggctcccaacaaatgatagaccaggcttccctgtaccagtattctccacagaaccagcatgtagagcagcagccacactacacccacaaaccaactctggaatacagtccttttcccatacctccccagtcccccgcttatgaaccaaacctctttgatggtccagaatcacagttttgcccaaaccaaagcttagtttcccttcttggtgatcaaagggaatctgagaatattgctaatcccatgcagacttcctccagtgttcagcagcaaaatgatgctcacttgcacagcttcagcatgatgcccagcagcgcctgtgaggccatggtggggcacgagatggcctctgactcttcaaacacttcactgccattctcaaacatgggaaatccaatgaacaccacacagttagggaaatcactttttcagtggcaggtggagcaggaagaaagcaaattggcaaatatttcccaagaccagtttctttcaaaggatgcagatggtgacacgttccttcatattgctgttgcccaagggagaagggcactttcctatgttcttgcaagaaagatgaatgcacttcacatgctggatattaaagagcacaatggacagagtgcctttcaggtggcagtggctgccaatcagcatctcattgtgcaggatctggtgaacatcggggcacaggtgaacaccacagactgctggggaagaacacctctgcatgtgtgtgctgagaagggccactcccaggtgcttcaggcgattcagaagggagcagtgggaagtaatcagtttgtggatcttgaggcaactaactatgatggcctgactccccttcactgtgcagtcatagcccacaatgctgtggtccatgaactccagagaaatcaacagcctcattcacctgaagttcaggagcttttactgaagaataagagtctggttgataccattaagtgcctaattcaaatgggagcagcggtggaagcgaaggatcgcaaaagtggccgcacagccctgcatttggcagctgaagaagcaaatctggaactcattcgcctctttttggagctgcccagttgcctgtcttttgtgaatgcaaaggcttacaatggcaacactgccctccatgttgctgccagcttgcagtatcggttgacacaattagatgctgtccgcctgttgatgaggaagggagcagacccaagtactcggaacttggagaacgaacagccagtgcatttggttcccgatggccctgtgggagaacagatccgacgtatcctgaagggaaagtccattcagcagagagctccaccgtattagctccattagcttggagcctggctagcaacactcactgtcagttaggcagtcctgatgtatctgtacatagaccatttgccttatattggcaaatgtaagttgtttctatgaaacaaacatatttagttcactattatatagtgggttatattaaaagaaaagaagaaaaatatctaatttctcttggcagatttgcatatttcatacccaggtatctgggatctagacatctgaatttgatctcaatggtaacattgccttcaattaacagtagcttttgagtaggaaaggactttgatttgtggcacaaaacattattaatatagctattgacagtttcaaagcaggtaaattgtaaatgtttctttaagaaaaagcatgtgaaaggaaaaaggtaaatacagcattgaggcttcatttggccttagtccctgggagttactggcgttggacaggcttcagtcattggactagatgaaaggtgtccatggttagaatttgatctttgcaaactgtatataattgttatttttgtccttaaaaatattgtacatacttggttgttaacatggtcatatttgaaatgtataagtccataaaatagaaaagaacaagtgaattgttgctatttaaaaaaattttacaattcttactaaggagtttttattgtgtaatcactaagtctttgtagataaagcagatggggagttacggagttgttcctttactggctgaaagatatattcgaattgtaaagatgctttttctcatgcattgaaattatacattatttgtagggaattgcatgcttttttttttttttctcccgagacagggtcttgctctggcgcccaggctggagtacagtggcatgatcttggctcacttcagccttgacttgggctcaagtgatcctcctacctgagccttctgagtaactggaactacaggtgtgcactcctcgcctggctaattttttattttttgtacaggcaggatcttgccaccttgcccaggctggtcttgaactcctgagctcatgccatctgcctgccttagtctcccaaaatgctgggattacaggagtgagccaccatgcccggctggcagttgcatggaagagaacacctctttatggcttaccctctagaatttctaatttatgtgttctgttgaaatttttgtttttttacctttattgaaacaacaaaaagtcagtattgaaacatatcttcctgttttctgttgtcaaatgatgataatgtgccatgatgttttatatatatcattcagaaaaagttttattttttaataacattctattaacattattttgcttgccgctggcatgcctgaggaatgtatttggctttgattacacactaagtttttgtaataaatttgactcattaaaaaccttttttttttaaaaaaaaaaaaaaagaaaatctcattagtgaacttatctttgcagctgagtacttaaattctttttaaaaagataccctttggattgatcacattgtttgacccagtatgtcttgtagacacgttagttataatcaccttgtatctctaaatatggtgtgatatgaaccagtccattcacattggaaaaactgatggttttaaataaactaattcactaata

SEQ ID NO: 20563 - DNA, 1338 bp, Homo sapiens
  source 1..1338: mol_type = unassigned DNA
tcctcttgccacgaggtcagacggcgagttcttagagaaaaaggctgcttagctgctgcttatcatgtaacctcaaaaggaaactgatcgtctttctcatgctgtcacgtacttgggttattatcgctgattacagctggaaacaattgatttgctcttacgtatttgtgtgacttgactcttcaaacacaaaggttaacaggaagatctcgagggccctggctgaacttcaccttttggctttcttggcctgatgctgaactctcgaggttcgggatgttgcctaaaaccgtcgacaaacgctatgtttgagaagggaggctacgctggggcgccggaggagacaggcccttaagaaccttccagagatgccttaactgggctaacagctcgccgcgccggggcaggcagaggggtgcggggcgcgctccttccaggacttgccagtccccaagaaccaggccaaccggttccctccactgactcccgcctccctctgcaggcccagccctgcgccgcgcgccctctccccgggcgcccaggcccggcgggggcctagagggcagggatggcccgggcgagggacggggtcccggaggcgggaggcgggaggcgggaggcgggaagcgggaggctggaagccgcgcgctgtcggggtttcccggtgaagggcaggcaaacaaccggtcggtctgggcggagccgggcgggcggggcgagggcggagggcggagggcgcattgcctcatcctgtacattttactggaaatcggacgcatccggaggaggggctgggaggcggcccgggcaccgccaatggccgggccgggcgccggggaggtcggcgagcgctgcggcccgttaaataccctggcagtcccgcgccgcgcccgtactggcccgcgccgtccgcccgccgacagctccctgagccagcccgggaggcagccgcgcgcagcgagccggtggcgcaggtgtcggggtcctcgagcgcccagcctgggagcatgattgtggacaagctgctggacgacagccgcggcggagaggggctgcgggacgcggcgggcggctgcggcctcatgaccagcccgctcaacctgagctacttctacggcgcgtcgccgcccgccgccgccccgggcgcctgcgacgccagctgctcggtcttgggcccctcggcgcccggctcgcccggctccgactcctccgacttctcctctgcctcgtcggtgtcctcctgcggcgccgtggagtcccggtcgagaggcggcgcccgcgccgagcgccagccagttgagccccatatgggggttggcaggcagcagagaggcccct

SEQ ID NO: 20564 - DNA, 2006 bp, Homo sapiens
  source 1..2006: mol_type = unassigned DNA
ctcttgccacgaggtcagacggcgagttcttagagaaaaaggctgcttagctgctgcttatcatgtaacctcaaaaggaaactgatcgtctttctcatgctgtcacgtacttgggttattatcgctgattacagctggaaacaattgatttgctcttacgtatttgtgtgacttgactcttcaaacacaaagttgagccccatatgggggttggcaggcagcagagaggcccctttcaaggtgttcgggtaaagaactcagtgaaggaactcctgttgcacatccgaagtcataaacagaaggcttctggccaagctgtggatgattttaagacacaaggtgtgaacatagaacagttcagagaattgaagaacacagtatcatacagtgggaaaaggaaagggcccgattcgttgtctgatggacctgcttgcaaaaggccagctctgttgcattcccaatttttgacaccacctcaaacaccaacgcccggggagagcatggaagatgttcatctcaatgaacccaaacaggagagcagtgctgatctgcttcagaacattatcaacattaagaatgaatgcagccccgtttccctgaacacagttcaagttagctggctgaaccccgtggtggtccctcagagctcccccgcagagcagtgtcaggacttccatggagggcaggtcttttctccacctcagaaatgccaaccattccaagtcaggggctcccaacaaatgatagaccaggcttccctgtaccagtattctccacagaaccagcatgtagagcagcagccacactacacccacaaaccaactctggaatacagtccttttcccatacctccccagtcccccgcttatgaaccaaacctctttgatggtccagaatcacagttttgcccaaaccaaagcttagtttcccttcttggtgatcaaagggaatctgagaatattgctaatcccatgcagacttcctccagtgttcagcagcaaaatgatgctcacttgcacagcttcagcatgatgcccagcagcgcctgtgaggccatggtggggcacgagatggcctctgactcttcaaacacttcactgccattctcaaacatgggaaatccaatgaacaccacacagttagggaaatcactttttcagtggcaggtggagcaggaagaaagcaaattggcaaatatttcccaagaccagtttctttcaaaggatgcagatggtgacacgttccttcatattgctgttgcccaagggagaagggcactttcctatgttcttgcaagaaagatgaatgcacttcacatgctggatattaaagagcacaatggacagagtgcctttcaggtggcagtggctgccaatcagcatctcattgtgcaggatctggtgaacatcggggcacaggtgaacaccacagactgctggggaagaacacctctgcatgtgtgtgctgagaagggccactcccaggtgcttcaggcgattcagaagggagcagtgggaagtaatcagtttgtggatcttgaggcaactaactatgatggcctgactccccttcactgtgcagtcatagcccacaatgctgtggtccatgaactccagagaaatcaacagcctcattcacctgaagttcaggagcttttactgaagaataagagtctggttgataccattaagtgcctaattcaaatgggagcagcggtggaagcgaaggatcgcaaaagtggccgcacagccctgcatttggcagctgaagaagcaaatctggaactcattcgcctctttttggagctgcccagttgcctgtcttttgtgaatgcaaaggcttacaatggcaacactgccctccatgttgctgccagcttgcagtatcggttgacacaattagatgctgtccgcctgttgatgaggaagggagcagacccaagtactcggaacttggagaacgaacagccagtgcatttggttcccgatggccctgtgggagaacag

SEQ ID NO: 20565 - DNA, 564 bp, Homo sapiens
  source 1..564: mol_type = unassigned DNA
gatgtaggtgtaattttcttcttgtgaatattttagtggaaagctgtagcagaggataagggtttgggaatagcgttaaaggtcatgacttatttctcagtttttatggaatttttcagtaaaaagacttgaccgtcaaagaaaaggaaactgctgttatcaagttgagccccatatgggggttggcaggcagcagagaggcccctttcaaggtgttcgggtaaagaactcagtgaaggaactcctgttgcacatccgaagtcataaacagaaggcttctggccaagctgtggatgattttaagacacaaggtgtgaacatagaacagttcagagaattgaagaacacagtatcatacagtgggaaaaggaaagggcccgattcgttgtctgatggacctgcttgcaaaaggccagctctgttgcattcccaatttttgacaccacctcaaacaccaacgcccggggagagcatggaagatgttcatctcaatgaacccaaacaggagagcagtgctgatctgcttcagaacattatcaacattaagaatgaatgcagccccgt

SEQ ID NO: 20566 - DNA, 1401 bp, Homo sapiens
  source 1..1401: mol_type = unassigned DNA
ccgcctcccgtctccgagcttcttaaacacaggccttgggcctacggctctgggggtacttgggggggcgggggcaggtctgatgagtaacccctccccccaggttccagaggaagaagcctccacatctgtctgccggcccaagagttccatggcctccacttcccgccgccaacgccgagaacgtcgctttcgtcgttacttgtctgcaggacggctggtccgggcccaggccctcctccagcgacacccaggcctcgatgtagatgctgggcagcccccaccactgcaccgggcctgtgcccgccacgatgcccctgccctgtgcctgctgcttcggctcggggctgaccctgcccaccaggaccgccatggggacacggcactgcatgctgctgcccgccagggcccagatgcctacaccgatttcttcctcccgctgctaagccgctgtccctccgccatgggaataaagaataaggatggggagacccctggccaaattttgggctggggacccccctgggattctgctgaagaggaggaagaagatgatgcctccaaggagcgggaatggagacagaagctccagggtgatgcctcccatgaaacccaggaacctgagtccttctcagcctggtcagatcgcctggcccgggaacatgcccagaagtgccagcagcagcagcgagaagcagagggatcccgtcgacccccacgtgctgagggctccagccagagctggcgacagcaggaggaggagcagcggctcttcagggagcgagcccgggccaaggaggaagagctgcgtgagagccgagccaggagggcgcaggaggctctaggggaccgagaacccaagccaaccagggccgggcccagggaagagcaccccagaggagcggggaggggcagcctctggcgatttggtgatgtgccctggccctgccctgggggaggggacccagaggccatggctgcagccctggtggccaggggcccccctttggaggaacagggggctctgaggaggtacttgagggtccagcaggtccgctggcaccctgaccgcttcctgcagcgattccgaagccagattgagacctgggagctgggccgtgtgatgggagcagtgacagccctttctcaggccctgaatcgccatgcagaggccctcaagtgaccctagggaagaagcaagaaacttcggggctgcagcctcaggatgaggcagaaggaagggtaagggaaaggatggggaccacaaggaagagccaggtgctgctcagcagaggatatgggtgggagcgaaagttgtaacaagtgggggtggggggtgcgggccgccaccactgctccttgactctgccgtttcctaataagacctggttccacatctca

SEQ ID NO: 20567 - DNA, 1411 bp, Homo sapiens
  source 1..1411: mol_type = unassigned DNA
agggatgaggcaggggcggagacgggggagtactgaggtgagagaaggagaacttgattggtggtaacagaggaagcataaagggttgtgaatgcggtgaaaagcccaagagttccatggcctccacttcccgccgccaacgccgagaacgtcgctttcgtcgttacttgtctgcaggacggctggtccgggcccaggccctcctccagcgacacccaggcctcgatgtagatgctgggcagcccccaccactgcaccgggcctgtgcccgccacgatgcccctgccctgtgcctgctgcttcggctcggggctgaccctgcccaccaggaccgccatggggacacggcactgcatgctgctgcccgccagggcccagatgcctacaccgatttcttcctcccgctgctaagccgctgtccctccgccatgggaataaagaataaggatggggagacccctggccaaattttgggctggggacccccctgggattctgctgaagaggaggaagaagatgatgcctccaaggagcgggaatggagacagaagctccagggtgagctggaggacgagtggcaggaagtcatggggaggtttgaaggtgatgcctcccatgaaacccaggaacctgagtccttctcagcctggtcagatcgcctggcccgggaacatgcccagaagtgccagcagcagcagcgagaagcagagggatcccgtcgacccccacgtgctgagggctccagccagagctggcgacagcaggaggaggagcagcggctcttcagggagcgagcccgggccaaggaggaagagctgcgtgagagccgagccaggagggcgcaggaggctctaggggaccgagaacccaagccaaccagggccgggcccagggaagagcaccccagaggagcggggaggggcagcctctggcgatttggtgatgtgccctggccctgccctgggggaggggacccagaggccatggctgcagccctggtggccaggggcccccctttggaggaacagggggctctgaggaggtacttgagggtccagcaggtccgctggcaccctgaccgcttcctgcagcgattccgaagccagattgagacctgggagctgggccgtgtgatgggagcagtgacagccctttctcaggccctgaatcgccatgcagaggccctcaagtgaccctagggaagaagcaagaaacttcggggctgcagcctcaggatgaggcagaaggaagggtaagggaaaggatggggaccacaaggaagagccaggtgctgctcagcagaggatatgggtgggagcgaaagttgtaacaagtgggggtggggggtgcgggccgccaccactgctccttgactctgccgtttcctaataagacctggttccacatctca

SEQ ID NO: 20568 - DNA, 1478 bp, Homo sapiens
  source 1..1478: mol_type = unassigned DNA
atttcctccagcctggagtgtctccgcccttcccgcctcccgtctccgagcttcttaaacacaggccttgggcctacggctctgggggtacttgggggggcgggggcaggtctgatgagtaacccctccccccaggttccagaggaagaagcctccacatctgtctgccggcccaagagttccatggcctccacttcccgccgccaacgccgagaacgtcgctttcgtcgttacttgtctgcaggacggctggtccgggcccaggccctcctccagcgacacccaggcctcgatgtagatgctgggcagcccccaccactgcaccgggcctgtgcccgccacgatgcccctgccctgtgcctgctgcttcggctcggggctgaccctgcccaccaggaccgccatggggacacggcactgcatgctgctgcccgccagggcccagatgcctacaccgatttcttcctcccgctgctaagccgctgtccctccgccatgggaataaagaataaggatggggagacccctggccaaattttgggctggggacccccctgggattctgctgaagaggaggaagaagatgatgcctccaaggagcgggaatggagacagaagctccagggtgagctggaggacgagtggcaggaagtcatggggaggtttgaaggtgatgcctcccatgaaacccaggaacctgagtccttctcagcctggtcagatcgcctggcccgggaacatgcccagaagtgccagcagcagcagcgagaagcagagggatcccgtcgacccccacgtgctgagggctccagccagagctggcgacagcaggaggaggagcagcggctcttcagggagcgagcccgggccaaggaggaagagctgcgtgagagccgagccaggagggcgcaggaggctctaggggaccgagaacccaagccaaccagggccgggcccagggaagagcaccccagaggagcggggaggggcagcctctggcgatttggtgatgtgccctggccctgccctgggggaggggacccagaggccatggctgcagccctggtggccaggggcccccctttggaggaacagggggctctgaggaggtacttgagggtccagcaggtccgctggcaccctgaccgcttcctgcagcgattccgaagccagattgagacctgggagctgggccgtgtgatgggagcagtgacagccctttctcaggccctgaatcgccatgcagaggccctcaagtgaccctagggaagaagcaagaaacttcggggctgcagcctcaggatgaggcagaaggaagggtaagggaaaggatggggaccacaaggaagagccaggtgctgctcagcagaggatatgggtgggagcgaaagttgtaacaagtgggggtggggggtgcgggccgccaccactgctccttgactctgccgtttcctaataagacctggttccacatctca

SEQ ID NO: 20569 - DNA, 1401 bp, Homo sapiens
  source 1..1401: mol_type = unassigned DNA
ccgcctcccgtctccgagcttcttaaacacaggccttgggcctacggctctgggggtacttgggggggcgggggcaggtctgatgagtaacccctccccccaggttccagaggaagaagcctccacatctgtctgccggcccaagagttccatggcctccacttcccgccgccaacgccgagaacgtcgctttcgtcgttacttgtctgcaggacggctggtccgggcccaggccctcctccagcgacacccaggcctcgatgtagatgctgggcagcccccaccactgcaccgggcctgtgcccgccacgatgcccctgccctgtgcctgctgcttcggctcggggctgaccctgcccaccaggaccgccatggggacacggcactgcatgctgctgcccgccagggcccagatgcctacaccgatttcttcctcccgctgctaagccgctgtccctccgccatgggaataaagaataaggatggggagacccctggccaaattttgggctggggacccccctgggattctgctgaagaggaggaagaagatgatgcctccaaggagcgggaatggagacagaagctccagggtgatgcctcccatgaaacccaggaacctgagtccttctcagcctggtcagatcgcctggcccgggaacatgcccagaagtgccagcagcagcagcgagaagcagagggatcctgtcgacccccacgtgctgagggctccagccagagctggcgacagcaggaggaggagcagcggctcttcagggagcgagcccgggccaaggaggaagagctgcgtgagagccgagccaggagggcgcaggaggctctaggggaccgagaacccaagccaaccagggccgggcccagggaagagcaccccagaggagcggggaggggcagcctctggcgatttggtgatgtgccctggccctgccctgggggaggggacccagaggccatggctgcagccctggtggccaggggcccccctttggaggaacagggggctctgaggaggtacttgagggtccagcaggtccgctggcaccctgaccgcttcctgcagcgattccgaagccagattgagacctgggagctgggccgtgtgatgggagcagtgacagccctttctcaggccctgaatcgccatgcagaggccctcaagtgaccctagggaagaagcaagaaacttcggggctgcagcctcaggatgaggcagaaggaagggtaagggaaaggatggggaccacaaggaagagccaggtgctgctcagcagaggatatgggtgggagcgaaagttgtaacaagtgggggtggggggtgcgggccgccaccactgctccttgactctgccgtttcctaataagacctggttccacatctca

SEQ ID NO: 20570 - DNA, 1411 bp, Homo sapiens
  source 1..1411: mol_type = unassigned DNA
agggatgaggcaggggcggagacgggggagtactgaggtgagagaaggagaacttgattggtggtaacagaggaagcataaagggttgtgaatgcggtgaaaagcccaagagttccatggcctccacttcccgccgccaacgccgagaacgtcgctttcgtcgttacttgtctgcaggacggctggtccgggcccaggccctcctccagcgacacccaggcctcgatgtagatgctgggcagcccccaccactgcaccgggcctgtgcccgccacgatgcccctgccctgtgcctgctgcttcggctcggggctgaccctgcccaccaggaccgccatggggacacggcactgcatgctgctgcccgccagggcccagatgcctacaccgatttcttcctcccgctgctaagccgctgtccctccgccatgggaataaagaataaggatggggagacccctggccaaattttgggctggggacccccctgggattctgctgaagaggaggaagaagatgatgcctccaaggagcgggaatggagacagaagctccagggtgagctggaggacgagtggcaggaagtcatggggaggtttgaaggtgatgcctcccatgaaacccaggaacctgagtccttctcagcctggtcagatcgcctggcccgggaacatgcccagaagtgccagcagcagcagcgagaagcagagggatcctgtcgacccccacgtgctgagggctccagccagagctggcgacagcaggaggaggagcagcggctcttcagggagcgagcccgggccaaggaggaagagctgcgtgagagccgagccaggagggcgcaggaggctctaggggaccgagaacccaagccaaccagggccgggcccagggaagagcaccccagaggagcggggaggggcagcctctggcgatttggtgatgtgccctggccctgccctgggggaggggacccagaggccatggctgcagccctggtggccaggggcccccctttggaggaacagggggctctgaggaggtacttgagggtccagcaggtccgctggcaccctgaccgcttcctgcagcgattccgaagccagattgagacctgggagctgggccgtgtgatgggagcagtgacagccctttctcaggccctgaatcgccatgcagaggccctcaagtgaccctagggaagaagcaagaaacttcggggctgcagcctcaggatgaggcagaaggaagggtaagggaaaggatggggaccacaaggaagagccaggtgctgctcagcagaggatatgggtgggagcgaaagttgtaacaagtgggggtggggggtgcgggccgccaccactgctccttgactctgccgtttcctaataagacctggttccacatctca

SEQ ID NO: 20571 - DNA, 1478 bp, Homo sapiens
  source 1..1478: mol_type = unassigned DNA
atttcctccagcctggagtgtctccgcccttcccgcctcccgtctccgagcttcttaaacacaggccttgggcctacggctctgggggtacttgggggggcgggggcaggtctgatgagtaacccctccccccaggttccagaggaagaagcctccacatctgtctgccggcccaagagttccatggcctccacttcccgccgccaacgccgagaacgtcgctttcgtcgttacttgtctgcaggacggctggtccgggcccaggccctcctccagcgacacccaggcctcgatgtagatgctgggcagcccccaccactgcaccgggcctgtgcccgccacgatgcccctgccctgtgcctgctgcttcggctcggggctgaccctgcccaccaggaccgccatggggacacggcactgcatgctgctgcccgccagggcccagatgcctacaccgatttcttcctcccgctgctaagccgctgtccctccgccatgggaataaagaataaggatggggagacccctggccaaattttgggctggggacccccctgggattctgctgaagaggaggaagaagatgatgcctccaaggagcgggaatggagacagaagctccagggtgagctggaggacgagtggcaggaagtcatggggaggtttgaaggtgatgcctcccatgaaacccaggaacctgagtccttctcagcctggtcagatcgcctggcccgggaacatgcccagaagtgccagcagcagcagcgagaagcagagggatcctgtcgacccccacgtgctgagggctccagccagagctggcgacagcaggaggaggagcagcggctcttcagggagcgagcccgggccaaggaggaagagctgcgtgagagccgagccaggagggcgcaggaggctctaggggaccgagaacccaagccaaccagggccgggcccagggaagagcaccccagaggagcggggaggggcagcctctggcgatttggtgatgtgccctggccctgccctgggggaggggacccagaggccatggctgcagccctggtggccaggggcccccctttggaggaacagggggctctgaggaggtacttgagggtccagcaggtccgctggcaccctgaccgcttcctgcagcgattccgaagccagattgagacctgggagctgggccgtgtgatgggagcagtgacagccctttctcaggccctgaatcgccatgcagaggccctcaagtgaccctagggaagaagcaagaaacttcggggctgcagcctcaggatgaggcagaaggaagggtaagggaaaggatggggaccacaaggaagagccaggtgctgctcagcagaggatatgggtgggagcgaaagttgtaacaagtgggggtggggggtgcgggccgccaccactgctccttgactctgccgtttcctaataagacctggttccacatctca

SEQ ID NO: 20572 - DNA, 1401 bp, Homo sapiens; identical to SEQ ID NO: 20569
  source 1..1401: mol_type = unassigned DNA

SEQ ID NO: 20573 - DNA, 1478 bp, Homo sapiens; identical to SEQ ID NO: 20571
  source 1..1478: mol_type = unassigned DNA

SEQ ID NO: 20574 - DNA, 1401 bp, Homo sapiens; identical to SEQ ID NO: 20569
  source 1..1401: mol_type = unassigned DNA

SEQ ID NO: 20575 - DNA, 1401 bp, Homo sapiens
  source 1..1401: mol_type = unassigned DNA
ccgcctcccgtctccgagcttcttaaacacaggccttgggcctacggctctgggggtacttgggggggcgggggcaggtctgatgagtaacccctccccccaggttccagaggaagaagcctccacatctgtctgccggcccaagagttccatggcctccacttcccgccgccaacgccgagaacgtcgctttcgtcgttacttgtctgcaggacggctggtccgggcccaggccctcctccagcgacacccaggcctcgatgtagatgctgggcagcccccaccactgcaccgggcctgtgcccgccacgatgcccctgccctgtgcctgctgcttcggctcggggctgaccctgcccaccaggaccgccatggggacacggcactgcatgctgctgcccgccagggcccagatgcctacaccgatttcttcctcccgctgctaagccgctgtccctctgccatgggaataaagaataaggatggggagacccctggccaaattttgggctggggacccccctgggattctgctgaagaggaggaagaagatgatgcctccaaggagcgggaatggagacagaagctccagggtgatgcctcccatgaaacccaggaacctgagtccttctcagcctggtcagatcgcctggcccgggaacatgcccagaagtgccagcagcagcagcgagaagcagagggatcctgtcgacccccacgtgctgagggctccagccagagctggcgacagcaggaggaggagcagcggctcttcagggagcgagcccgggccaaggaggaagagctgcgtgagagccgagccaggagggcgcaggaggctctaggggaccgagaacccaagccaaccagggccgggcccagggaagagcaccccagaggagcggggaggggcagcctctggcgatttggtgatgtgccctggccctgccctgggggaggggacccagaggccatggctgcagccctggtggccaggggcccccctttggaggaacagggggctctgaggaggtacttgagggtccagcaggtccgctggcaccctgaccgcttcctgcagcgattccgaagccagattgagacctgggagctgggccgtgtgatgggagcagtgacagccctttctcaggccctgaatcgccatgcagaggccctcaagtgaccctagggaagaagcaagaaacttcggggctgcagcctcaggatgaggcagaaggaagggtaagggaaaggatggggaccacaaggaagagccaggtgctgctcagcagaggatatgggtgggagcgaaagttgtaacaagtgggggtggggggtgcgggccgccaccactgctccttgactctgccgtttcctaataagacctggttccacatctca

SEQ ID NO: 20576 - DNA, 1478 bp, Homo sapiens; identical to SEQ ID NO: 20571
  source 1..1478: mol_type = unassigned DNA

SEQ ID NO: 20577 - DNA, 1411 bp, Homo sapiens; identical to SEQ ID NO: 20570
  source 1..1411: mol_type = unassigned DNA

SEQ ID NO: 20578 - DNA, 1401 bp, Homo sapiens; identical to SEQ ID NO: 20569
  source 1..1401: mol_type = unassigned DNA

SEQ ID NO: 20579 - DNA, 1411 bp, Homo sapiens
  source 1..1411: mol_type = unassigned DNA
agggatgaggcaggggcggagacgggggagtactgaggtgagagaaggagaacttgattggtggtaacagaggaagcataaagggttgtgaatgcggtgaaaagcccaagagttccatggcctccacttcccgccgccaacgccgagaacgtcgctttcgtcgttacttgtctgcaggacggctggtccgggcccaggccctcctccagcgacacccaggcctcgatgtagatgctgggcagcccccaccactgcaccgggcctgtgcccgccacgatgcccctgccctgtgcctgctgcttcggctcggggctgaccctgcccaccaggaccgccatggggacacggcactgcatgctgctgcccgccagggcccagatgcctacaccgatttcttcctcccgctgctaagccgctgtccctctgccatgggaataaagaataaggatggggagacccctggccaaattttgggctggggacccccctgggattctgctgaagaggaggaagaagatgatgcctccaaggagcgggaatggagacagaagctccagggtgagctggaggacgagtggcaggaagtcatggggaggtttgaaggtgatgcctcccatgaaacccaggaacctgagtccttctcagcctggtcagatcgcctggcccgggaacatgcccagaagtgccagcagcagcagcgagaagcagagggatcctgtcgacccccacgtgctgagggctccagccagagctggcgacagcaggaggaggagcagcggctcttcagggagcgagcccgggccaaggaggaagagctgcgtgagagccgagccaggagggcgcaggaggctctaggggaccgagaacccaagccaaccagggccgggcccagggaagagcaccccagaggagcggggaggggcagcctctggcgatttggtgatgtgccctggccctgccctgggggaggggacccagaggccatggctgcagccctggtggccaggggcccccctttggaggaacagggggctctgaggaggtacttgagggtccagcaggtccgctggcaccctgaccgcttcctgcagcgattccgaagccagattgagacctgggagctgggccgtgtgatgggagcagtgacagccctttctcaggccctgaatcgccatgcagaggccctcaagtgaccctagggaagaagcaagaaacttcggggctgcagcctcaggatgaggcagaaggaagggtaagggaaaggatggggaccacaaggaagagccaggtgctgctcagcagaggatatgggtgggagcgaaagttgtaacaagtgggggtggggggtgcgggccgccaccactgctccttgactctgccgtttcctaataagacctggttccacatctca

SEQ ID NO: 20580 - DNA, 1478 bp, Homo sapiens; identical to SEQ ID NO: 20571
  source 1..1478: mol_type = unassigned DNA

SEQ ID NO: 20581 - DNA, 1411 bp, Homo sapiens; identical to SEQ ID NO: 20570
  source 1..1411: mol_type = unassigned DNA

SEQ ID NO: 20582 - DNA, 1478 bp, Homo sapiens
  source 1..1478: mol_type = unassigned DNA
atttcctccagcctggagtgtctccgcccttcccgcctcccgtctccgagcttcttaaacacaggccttgggcctacggctctgggggtacttgggggggcgggggcaggtctgatgagtaacccctccccccaggttccagaggaagaagcctccacatctgtctgccggcccaagagttccatggcctccacttcccgccgccaacgccgagaacgtcgctttcgtcgttacttgtctgcaggacggctggtccgggcccaggccctcctccagcgacacccaggcctcgatgtagatgctgggcagcccccaccactgcaccgggcctgtgcccgccacgatgcccctgccctgtgcctgctgcttcggctcggggctgaccctgcccaccaggaccgccatggggacacggcactgcatgctgctgcccgccagggcccagatgcctacaccgatttcttcctcccgctgctaagccgctgtccctctgccatgggaataaagaataaggatggggagacccctggccaaattttgggctggggacccccctgggattctgctgaagaggaggaagaagatgatgcctccaaggagcgggaatggagacagaagctccagggtgagctggaggacgagtggcaggaagtcatggggaggtttgaaggtgatgcctcccatgaaacccaggaacctgagtccttctcagcctggtcagatcgcctggcccgggaacatgcccagaagtgccagcagcagcagcgagaagcagagggatcctgtcgacccccacgtgctgagggctccagccagagctggcgacagcaggaggaggagcagcggctcttcagggagcgagcccgggccaaggaggaagagctgcgtgagagccgagccaggagggcgcaggaggctctaggggaccgagaacccaagccaaccagggccgggcccagggaagagcaccccagaggagcggggaggggcagcctctggcgatttggtgatgtgccctggccctgccctgggggaggggacccagaggccatggctgcagccctggtggccaggggcccccctttggaggaacagggggctctgaggaggtacttgagggtccagcaggtccgctggcaccctgaccgcttcctgcagcgattccgaagccagattgagacctgggagctgggccgtgtgatgggagcagtgacagccctttctcaggccctgaatcgccatgcagaggccctcaagtgaccctagggaagaagcaagaaacttcggggctgcagcctcaggatgaggcagaaggaagggtaagggaaaggatggggaccacaaggaagagccaggtgctgctcagcagaggatatgggtgggagcgaaagttgtaacaagtgggggtggggggtgcgggccgccaccactgctccttgactctgccgtttcctaataagacctggttccacatctca

SEQ ID NO: 20583 - DNA, 1401 bp, Homo sapiens; identical to SEQ ID NO: 20569
  source 1..1401: mol_type = unassigned DNA

SEQ ID NO: 20584 - DNA, 1411 bp, Homo sapiens; identical to SEQ ID NO: 20570
  source 1..1411: mol_type = unassigned DNA

SEQ ID NO: 20585 - DNA, 1478 bp, Homo sapiens; identical to SEQ ID NO: 20571
  source 1..1478: mol_type = unassigned DNA

SEQ ID NO: 20586 - DNA, 1411 bp, Homo sapiens; identical to SEQ ID NO: 20570
  source 1..1411: mol_type = unassigned DNA

SEQ ID NO: 20587 - DNA, 1260 bp, Homo sapiens
  source 1..1260: mol_type = unassigned DNA
agaacttgattggtggtaacagaggaagcataaagggttgtgaatgcggtgaaaagcccaagagttccatggcctccacttcccgccgccaacgccgagaacgtcgctttcgtcgttacttgtctgcaggacggctggtccgggcccaggccctcctccagcgacacccaggcctcgatgtagatgctgggcagcccccaccactgcaccgggcctgtgcccgccacgatgcccctgccctgtgcctgctgcttcggctcggggctgaccctgcccaccaggaccgccatggggacacggcactgcatgctgctgcccgccagggcccagatgcctacaccgatttcttcctcccgctgctaagccgctgtccctccgccatgggaataaagaataaggatggggagacccctggccaaattttgggctggggacccccctgggattctgctgaagaggaggaagaagatgatgcctccaaggagcgggaatggagacagaagctccagggtgagctggaggacgagtggcaggaagtcatggggaggtttgaaggtgatgcctcccatgaaacccaggaacctgagtccttctcagcctggtcagatcgcctggcccgggaacatgcccagaagtgccagcagcagcagcgagaagcagagggatcccgtcgacccccacgtgctgagggctccagccagagctggcgacagcaggaggaggagcagcggctcttcagggagcgagcccgggccaaggaggaagagctgcgtgagagccgagccaggagggcgcaggaggctctaggggaccgagaacccaagccaaccagggccgggcccagggaagagcaccccagaggagcggggaggggcagcctctggcgatttggtgatgtgccctggccctgccctgggggaggggacccagaggccatggctgcagccctggtggccaggggcccccctttggaggaacagggggctctgaggaggtacttgagggtccagcaggtccgctggcaccctgaccgcttcctgcagcgattccgaagccagattgagacctgggagctgggccgtgtgatgggagcagtgacagccctttctcaggccctgaatcgccatgcagaggccctcaagtgaccctagggaagaagcaagaaacttcggggctgcagcctcaggatgaggcagaaggaagggttttgagcccagttctctacaggagaatcccaggagtggaagtggaaggcagtag

SEQ ID NO: 20588 - DNA, 1260 bp, Homo sapiens
  source 1..1260: mol_type = unassigned DNA
agaacttgattggtggtaacagaggaagcataaagggttgtgaatgcggtgaaaagcccaagagttccatggcctccacttcccgccgccaacgccgagaacgtcgctttcgtcgttacttgtctgcaggacggctggtccgggcccaggccctcctccagcgacacccaggcctcgatgtagatgctgggcagcccccaccactgcaccgggcctgtgcccgccacgatgcccctgccctgtgcctgctgcttcggctcggggctgaccctgcccaccaggaccgccatggggacacggcactgcatgctgctgcccgccagggcccagatgcctacaccgatttcttcctcccgctgctaagccgctgtccctccgccatgggaataaagaataaggatggggagacccctggccaaattttgggctggggacccccctgggattctgctgaagaggaggaagaagatgatgcctccaaggagcgggaatggagacagaagctccagggtgagctggaggacgagtggcaggaagtcatggggaggtttgaaggtgatgcctcccatgaaacccaggaacctgagtccttctcagcctggtcagatcgcctggcccgggaacatgcccagaagtgccagcagcagcagcgagaagcagagggatcctgtcgacccccacgtgctgagggctccagccagagctggcgacagcaggaggaggagcagcggctcttcagggagcgagcccgggccaaggaggaagagctgcgtgagagccgagccaggagggcgcaggaggctctaggggaccgagaacccaagccaaccagggccgggcccagggaagagcaccccagaggagcggggaggggcagcctctggcgatttggtgatgtgccctggccctgccctgggggaggggacccagaggccatggctgcagccctggtggccaggggcccccctttggaggaacagggggctctgaggaggtacttgagggtccagcaggtccgctggcaccctgaccgcttcctgcagcgattccgaagccagattgagacctgggagctgggccgtgtgatgggagcagtgacagccctttctcaggccctgaatcgccatgcagaggccctcaagtgaccctagggaagaagcaagaaacttcggggctgcagcctcaggatgaggcagaaggaagggttttgagcccagttctctacaggagaatcccaggagtggaagtggaaggcagtag

SEQ ID NO: 20589 - DNA, 1260 bp, Homo sapiens; identical to SEQ ID NO: 20588
  source 1..1260: mol_type = unassigned DNA

SEQ ID NO: 20590 - DNA, 1260 bp, Homo sapiens; identical to SEQ ID NO: 20588
  source 1..1260: mol_type = unassigned DNA

SEQ ID NO: 20591 - DNA, 1260 bp, Homo sapiens; identical to SEQ ID NO: 20588
  source 1..1260: mol_type = unassigned DNA

SEQ ID NO: 20592 - DNA, 1260 bp, Homo sapiens
  source 1..1260: mol_type = unassigned DNA
agaacttgattggtggtaacagaggaagcataaagggttgtgaatgcggtgaaaagcccaagagttccatggcctccacttcccgccgccaacgccgagaacgtcgctttcgtcgttacttgtctgcaggacggctggtccgggcccaggccctcctccagcgacacccaggcctcgatgtagatgctgggcagcccccaccactgcaccgggcctgtgcccgccacgatgcccctgccctgtgcctgctgcttcggctcggggctgaccctgcccaccaggaccgccatggggacacggcactgcatgctgctgcccgccagggcccagatgcctacaccgatttcttcctcccgctgctaagccgctgtccctctgccatgggaataaagaataaggatggggagacccctggccaaattttgggctggggacccccctgggattctgctgaagaggaggaagaagatgatgcctccaaggagcgggaatggagacagaagctccagggtgagctggaggacgagtggcaggaagtcatggggaggtttgaaggtgatgcctcccatgaaacccaggaacctgagtccttctcagcctggtcagatcgcctggcccgggaacatgcccagaagtgccagcagcagcagcgagaagcagagggatcctgtcgacccccacgtgctgagggctccagccagagctggcgacagcaggaggaggagcagcggctcttcagggagcgagcccgggccaaggaggaagagctgcgtgagagccgagccaggagggcgcaggaggctctaggggaccgagaacccaagccaaccagggccgggcccagggaagagcaccccagaggagcggggaggggcagcctctggcgatttggtgatgtgccctggccctgccctgggggaggggacccagaggccatggctgcagccctggtggccaggggcccccctttggaggaacagggggctctgaggaggtacttgagggtccagcaggtccgctggcaccctgaccgcttcctgcagcgattccgaagccagattgagacctgggagctgggccgtgtgatgggagcagtgacagccctttctcaggccctgaatcgccatgcagaggccctcaagtgaccctagggaagaagcaagaaacttcggggctgcagcctcaggatgaggcagaaggaagggttttgagcccagttctctacaggagaatcccaggagtggaagtggaaggcagtag

SEQ ID NO: 20593 - DNA, 1260 bp, Homo sapiens; identical to SEQ ID NO: 20588
  source 1..1260: mol_type = unassigned DNA

SEQ ID NO: 20594 - DNA, 5009 bp, Homo sapiens
  source 1..5009: mol_type = unassigned DNA
gctgtttagctgtaattagggtgcaaggataaggtgtaagaactggctggaggttgaatgttttcctggaggagtgttagcatcaactagatccctggaatttctgcctttctgtctcaagatgcatgtctttgtccagagtacctgtggagaagaaacaatggattccttagaccatatgctgacagatcctctggaacttggtccgtgtggagatggccatggcacgcgcatcatggaggattgcctcctgggaggcaccagagttagtctgcccgaggaccttctggaggatcctgagatcttctttgatgttgtcagcctctcaacatggcaggaagtgttaagtgattctcaacgtgaacacctccagcagtttctgccccagtttcctgaagacagtgctgagcagcagaatgaactcatcttagccttgttcagtggggagaacttccgctttggaaaccctctgcacattgcccagaagcttttccgagacggacactttaaccccgaggtggtcaagtaccggcagttatgcttcaagtcacagtacaagcgctacctcaactcccagcagcagtatttccatcggctgctgaagcaaattcttgcttcccggagtgatctgctggagatggcccggcggagtggccccgcccttcccttccggcagaaacgcccttcaccatcccgcacacctgaggagcgggagtggcggacccagcagcgctacttgaaggtcttaagggaagtgaaagaggagtgtggtgacacagccctgtcatctgatgaagaggatctcagctcatggcttccgagctctccagcacgttctcctagtcctgcggtgcccctgcgggtggtgcccacactttcaaccacggatatgaaaactgcagataaagtagaactgggggacagtgacctgaagataatgttaaagaagcaccacgagaagcggaaacatcagccagatcacccggaccttttgacaggggacctgactctcaatgacatcatgactcgagtaaatgctggcaggaagggctctctggcagccttatatgacttggctgtccttaaaaaaaaggttaaggaaaaagaggaaaagaagaagaagaaaataaaaacgatcaaatcagaggcagaggacctggccgagccgctaagcagtactgaaggggtcgcacctctctcacaggccccctctccgctggcaattcctgctatcaaggaagagccccttgaagacctcaagccttgccttggaatcaatgaaatatcttccagcttcttctctcttctattagagatcttgctgctggagagtcaggctagccttcctatgctagaggagcgagttttggattggcagtcatcgccagccagctccctcaacagctggttctctgcggcccccaactgggctgagttggtactaccagccctgcagtatcttgctggagaaagtcgagctgttccttccagtttctctccatttgttgaattcaaagagaaaacccagcagtggaagttgcttggccaatcccaagataatgaaaaggaattagctgccctcttccagctatggctagagaccaaagatcaggccttctgtaagcaagaaaatgaagacagctcagatgccacaacacctgtccctcgggtaagaactgactatgtggtgcgtcccagcacgggggaggagaaacgggtttttcaggagcaggagcgttacaggtatagccaaccccataaggcgttcacctttcgcatgcacggctttgagtctgtggtggggccagtgaagggcgtgtttgacaaggagacctcgctcaacaaggctcgggagcactccctgctgcgctccgaccggcctgcctacgtcaccattctgtctcttgttcgggacgctgcggctcgactgcctaatggagaaggcacacgggcagagatctgtgaactgcttaaggactcccagtttcttgcaccagatgtcaccagcactcaggtaaatacagtagtgagtggtgcactggatcggctacattacgaaaaagatccctgtgtgaaatacgacattggacgaaagctgtggatctacctgcatcgtgaccggagtgaagaagagtttgagcggattcaccaagcacaagcagctgcagctaaagccagaaaagctcttcagcaaaaacccaagcccccatccaaggtgaagtccagtagcaaggagagctccataaaggtccttagcagtggcccttctgagcagagccagatgagcctcagtgactccagtatgccacccaccccagtcacacctgtaacccccaccacaccagcattgcccgccattcccatctcccctccacctgtatcggcagtgaacaaaagcggcccttccacagtctcagaaccagctaagtctagctcgggtgttcttctggtgtcttcaccaacaatgccacatctgggaacaatgctttccccagcttccagccagactgcacccagttctcaggctgccgcccgggtcgtgagccactctggctctgctggactgtctcaggtgcgagtggtggcccagcctagccttcctgctgttccccagcagtcgggagggccggcacagacattgccacagatgccagcaggaccgcagatccgggttccagccactgccacacagaccaaagtagtgccccagacagtaatggccactgtgcccgtcaaagcgcagactacggcagccactgtgcagcggcctggacccgggcagacagggctcacggtgacaagtctccctgccacagccagccctgtgagtaagccagccacgagttctcctgggacctctgctcccagtgcctccacggctgccgtcattcaaaatgtcacaggacagaacatcatcaagcaggtggcaatcactgggcagcttggtgtgaagccccaaacaggcaacagcattccactcacagccactaacttccgcatccagggtaaggatgtattgcgtctgccgccctcttccatcaccacagatgccaagggccagacggttctgcgaatcactccggacatgatggccacattggccaagtcccaggttaccacagtcaaattgacccaggacctcttcgggacaggaggcaacactacaggcaaaggcatctctgccaccttacacgtcacttccaatccagtacatgcagctgatagccctgccaaggccagttcagccagtgccccttcatccactccaacaggtaccactgtggtcaaagtgactcctgacctcaagccaacagaagcctcaagttcggcttttcgcttgatgccagctcttggcgtgagtgtggctgaccagaagggaaaaagcacagtggcctcttcagaagcaaaaccagctgccacgatccgcatcgtgcagggactgggagtgatgcctcccaaagcaggccagaccatcaccgttgcaacccacgccaagcaaggggcctcggtggccagtgggtctggaactgtccatacttcagcggtgtccttacccagtatgaatgctgctgtgtccaagactgtagctgtggcttctggggctgcaagcacccccatcagcatcagcacaggagcccccaccgtgcggcaggtccctgtcagcaccacggttgtgtccacgtcccaggctgggaagttgcctacacggatcacagttcccctctctgtgatcagccagccaatgaagggcaagagcgtggtcacagcccccatcatcaaaggcaaccttggagccaacctcagtgggttgggccgcaacatcatcctcacaactatgccagcaggcactaagctcattgctggcaataagcctgttagtttcctcactgctcagcagttgcagcagcttcagcagcaaggtcaggccacacaggtgcgcatccagactgtccctgcatcccatctccaacagggaacagcttctggctcctccaaagcagtctccactgttgttgtgactacagctccgtctcctaaacaggcacctgagcaacaatgattatgagagaggatggcttccgtgaaagaccatgcctggtctgtcctggctgagaagggaccagggaggttgcatcattgttttaagcttgcctgttcaaggcagccaggcgaggggtgatggcaacggtggcctggattcgtggcctggattctgctgccacgtgccatagtggagcaccctgagaaaggttcactccagggttccaaggtctgctctctaccaatctaggagaatattctgttgaaattgcaggaattaccagttacgtccaacaagccagagttctgagagtaagacccccagggaaggcttaccagttgcagagtgcacacagcgaataggctggttctccatgaggattgtattttttggcttctggtcttctccatgactagtggtctggataggagttttgtgtccagaaaattttatgtaatttatttttttaaagaacctgttgtacatctttctcaaatacaaacttgggctttagctgccccctccactaaaccgatgacttacttttttgactagaatgagaaaatggcaagaatcttagtaaggtggtagccagcttggtaactgcatagtaatcgagaggctgtaagatgggaattcatcgtaggcagcgaggtagagtgggtcccctgaaatgggattcgcttggcactgcctcttaaagataggggtgttgggatcttgattgtggccgccccccccagctttacctgcccactttgtccttcttggcaagcctgttcacatggacgtccagagccagtggacagagaggaggggacggacagcagaggtgctgcttttgcagcagaaactttgttgcagttcagagtataccttctgctctgctccagagcaagagttgcaaaccaggcccttggggctggccatttgtttttgtaaataaagttttattggaacacagccc

SEQ ID NO: 20595 - DNA, 4949 bp, Homo sapiens
  source 1..4949: mol_type = unassigned DNA
caggattccagaattggaaataacgggagggaggacctggtccagcttcccttcctcaaataaggaaattgacacctggcgtgagtacctgtggagaagaaacaatggattccttagaccatatgctgacagatcctctggaacttggtccgtgtggagatggccatggcacgcgcatcatggaggattgcctcctgggaggcaccagagttagtctgcccgaggaccttctggaggatcctgagatcttctttgatgttgtcagcctctcaacatggcaggaagtgttaagtgattctcaacgtgaacacctccagcagtttctgccccagtttcctgaagacagtgctgagcagcagaatgaactcatcttagccttgttcagtggggagaacttccgctttggaaaccctctgcacattgcccagaagcttttccgagacggacactttaaccccgaggtggtcaagtaccggcagttatgcttcaagtcacagtacaagcgctacctcaactcccagcagcagtatttccatcggctgctgaagcaaattcttgcttcccggagtgatctgctggagatggcccggcggagtggccccgcccttcccttccggcagaaacgcccttcaccatcccgcacacctgaggagcgggagtggcggacccagcagcgctacttgaaggtcttaagggaagtgaaagaggagtgtggtgacacagccctgtcatctgatgaagaggatctcagctcatggcttccgagctctccagcacgttctcctagtcctgcggtgcccctgcgggtggtgcccacactttcaaccacggatatgaaaactgcagataaagtagaactgggggacagtgacctgaagataatgttaaagaagcaccacgagaagcggaaacatcagccagatcacccggaccttttgacaggggacctgactctcaatgacatcatgactcgagtaaatgctggcaggaagggctctctggcagccttatatgacttggctgtccttaaaaaaaaggttaaggaaaaagaggaaaagaagaagaagaaaataaaaacgatcaaatcagaggcagaggacctggccgagccgctaagcagtactgaaggggtcgcacctctctcacaggccccctctccgctggcaattcctgctatcaaggaagagccccttgaagacctcaagccttgccttggaatcaatgaaatatcttccagcttcttctctcttctattagagatcttgctgctggagagtcaggctagccttcctatgctagaggagcgagttttggattggcagtcatcgccagccagctccctcaacagctggttctctgcggcccccaactgggctgagttggtactaccagccctgcagtatcttgctggagaaagtcgagctgttccttccagtttctctccatttgttgaattcaaagagaaaacccagcagtggaagttgcttggccaatcccaagataatgaaaaggaattagctgccctcttccagctatggctagagaccaaagatcaggccttctgtaagcaagaaaatgaagacagctcagatgccacaacacctgtccctcgggtaagaactgactatgtggtgcgtcccagcacgggggaggagaaacgggtttttcaggagcaggagcgttacaggtatagccaaccccataaggcgttcacctttcgcatgcacggctttgagtctgtggtggggccagtgaagggcgtgtttgacaaggagacctcgctcaacaaggctcgggagcactccctgctgcgctccgaccggcctgcctacgtcaccattctgtctcttgttcgggacgctgcggctcgactgcctaatggagaaggcacacgggcagagatctgtgaactgcttaaggactcccagtttcttgcaccagatgtcaccagcactcaggtaaatacagtagtgagtggtgcactggatcggctacattacgaaaaagatccctgtgtgaaatacgacattggacgaaagctgtggatctacctgcatcgtgaccggagtgaagaagagtttgagcggattcaccaagcacaagcagctgcagctaaagccagaaaagctcttcagcaaaaacccaagcccccatccaaggtgaagtccagtagcaaggagagctccataaaggtccttagcagtggcccttctgagcagagccagatgagcctcagtgactccagtatgccacccaccccagtcacacctgtaacccccaccacaccagcattgcccgccattcccatctcccctccacctgtatcggcagtgaacaaaagcggcccttccacagtctcagaaccagctaagtctagctcgggtgttcttctggtgtcttcaccaacaatgccacatctgggaacaatgctttccccagcttccagccagactgcacccagttctcaggctgccgcccgggtcgtgagccactctggctctgctggactgtctcaggtgcgagtggtggcccagcctagccttcctgctgttccccagcagtcgggagggccggcacagacattgccacagatgccagcaggaccgcagatccgggttccagccactgccacacagaccaaagtagtgccccagacagtaatggccactgtgcccgtcaaagcgcagactacggcagccactgtgcagcggcctggacccgggcagacagggctcacggtgacaagtctccctgccacagccagccctgtgagtaagccagccacgagttctcctgggacctctgctcccagtgcctccacggctgccgtcattcaaaatgtcacaggacagaacatcatcaagcaggtggcaatcactgggcagcttggtgtgaagccccaaacaggcaacagcattccactcacagccactaacttccgcatccagggtaaggatgtattgcgtctgccgccctcttccatcaccacagatgccaagggccagacggttctgcgaatcactccggacatgatggccacattggccaagtcccaggttaccacagtcaaattgacccaggacctcttcgggacaggaggcaacactacaggcaaaggcatctctgccaccttacacgtcacttccaatccagtacatgcagctgatagccctgccaaggccagttcagccagtgccccttcatccactccaacaggtaccactgtggtcaaagtgactcctgacctcaagccaacagaagcctcaagttcggcttttcgcttgatgccagctcttggcgtgagtgtggctgaccagaagggaaaaagcacagtggcctcttcagaagcaaaaccagctgccacgatccgcatcgtgcagggactgggagtgatgcctcccaaagcaggccagaccatcaccgttgcaacccacgccaagcaaggggcctcggtggccagtgggtctggaactgtccatacttcagcggtgtccttacccagtatgaatgctgctgtgtccaagactgtagctgtggcttctggggctgcaagcacccccatcagcatcagcacaggagcccccaccgtgcggcaggtccctgtcagcaccacggttgtgtccacgtcccaggctgggaagttgcctacacggatcacagttcccctctctgtgatcagccagccaatgaagggcaagagcgtggtcacagcccccatcatcaaaggcaaccttggagccaacctcagtgggttgggccgcaacatcatcctcacaactatgccagcaggcactaagctcattgctggcaataagcctgttagtttcctcactgctcagcagttgcagcagcttcagcagcaaggtcaggccacacaggtgcgcatccagactgtccctgcatcccatctccaacagggaacagcttctggctcctccaaagcagtctccactgttgttgtgactacagctccgtctcctaaacaggcacctgagcaacaatgattatgagagaggatggcttccgtgaaagaccatgcctggtctgtcctggctgagaagggaccagggaggttgcatcattgttttaagcttgcctgttcaaggcagccaggcgaggggtgatggcaacggtggcctggattcgtggcctggattctgctgccacgtgccatagtggagcaccctgagaaaggttcactccagggttccaaggtctgctctctaccaatctaggagaatattctgttgaaattgcaggaattaccagttacgtccaacaagccagagttctgagagtaagacccccagggaaggcttaccagttgcagagtgcacacagcgaataggctggttctccatgaggattgtattttttggcttctggtcttctccatgactagtggtctggataggagttttgtgtccagaaaattttatgtaatttatttttttaaagaacctgttgtacatctttctcaaatacaaacttgggctttagctgccccctccactaaaccgatgacttacttttttgactagaatgagaaaatggcaagaatcttagtaaggtggtagccagcttggtaactgcatagtaatcgagaggctgtaagatgggaattcatcgtaggcagcgaggtagagtgggtcccctgaaatgggattcgcttggcactgcctcttaaagataggggtgttgggatcttgattgtggccgccccccccagctttacctgcccactttgtccttcttggcaagcctgttcacatggacgtccagagccagtggacagagaggaggggacggacagcagaggtgctgcttttgcagcagaaactttgttgcagttcagagtataccttctgctctgctccagagcaagagttgcaaaccaggcccttggggctggccatttgtttttgtaaataaagttttattggaacaca

SEQ ID NO: 20596 - DNA, 4114 bp, Homo sapiens
  source 1..4114: mol_type = unassigned DNA
caggattccagaattggaaataacgggagggaggacctggtccagcttcccttcctcaaataaggaaattgacacctggcgtgagaaggggttttgccatgttcgctaggctggtctcaaactcatggattcaaggggactgcccgcctggacctcccaaagtactgagattagtacctgtggagaagaaacaatggattccttagaccatatgctgacagatcctctggaacttggtccgtgtggagatggccatggcacgcgcatcatggaggattgcctcctgggaggcaccagagttagtctgcccgaggaccttctggaggatcctgagatcttctttgatgttgtcagcctctcaacatggcaggaagtgttaagtgattctcaacgtgaacacctccagcagtttctgccccagtttcctgaagacagtgctgagcagcagaatgaactcatcttagccttgttcagtggggagaacttccgctttggaaaccctctgcacattgcccagaagcttttccgagacggacactttaaccccgaggtggtcaagtaccggcagttatgcttcaagtcacagtacaagcgctacctcaactcccagcagcagtatttccatcggctgctgaagcaaattcttgcttcccggagtgatctgctggagatggcccggcggagtggccccgcccttcccttccggcagaaacgcccttcaccatcccgcacacctgaggagcgggagtggcggacccagcagcgctacttgaaggtcttaagggaagtgaaagaggagtgtggtgacacagccctgtcatctgatgaagaggatctcagctcatggcttccgagctctccagcacgttctcctagtcctgcggtgcccctgcgggtggtgcccacactttcaaccacggatatgaaaactgcagataaagtagaactgggggacagtgacctgaagataatgttaaagaagcaccacgagaagcggaaacatcagccagatcacccggaccttttgacaggggacctgactctcaatgacatcatgactcgagtaaatgctggcaggaagggctctctggcagccttatatgacttggctgtccttaaaaaaaaggttaaggaaaaagaggaaaagaagaagaagaaaataaaaacgatcaaatcagaggcagaggacctggccgagccgctaagcagtactgaaggggtcgcacctctctcacaggccccctctccgctggcaattcctgctatcaaggaagagccccttgaagacctcaagccttgccttggaatcaatgaaatatcttccagcttcttctctcttctattagagatcttgctgctggagagtcaggctagccttcctatgctagaggagcgagttttggattggcagtcatcgccagccagctccctcaacagctggttctctgcggcccccaactgggctgagttggtactaccagccctgcagtatcttgctggagaaagtcgagctgttccttccagtttctctccatttgttgaattcaaagagaaaacccagcagtggaagttgcttggccaatcccaagataatgaaaaggaattagctgccctcttccagctatggctagagaccaaagatcaggccttctgtaagcaagaaaatgaagacagctcagatgccacaacacctgtccctcgggtaagaactgactatgtggtgcgtcccagcacgggggaggagaaacgggtttttcaggagcaggagcgttacaggtatagccaaccccataaggcgttcacctttcgcatgcacggctttgagtctgtggtggggccagtgaagggcgtgtttgacaaggagacctcgctcaacaaggctcgggagcactccctgctgcgctccgaccggcctgcctacgtcaccattctgtctcttgttcgggacgctgcggctcgactgcctaatggagaaggcacacgggcagagatctgtgaactgcttaaggactcccagtttcttgcaccagatgtcaccagcactcaggtaaatacagtagtgagtggtgcactggatcggctacattacgaaaaagatccctgtgtgaaatacgacattggacgaaagctgtggatctacctgcatcgtgaccggagtgaagaagagtttgagcggattcaccaagcacaagcagctgcagctaaagccagaaaagctcttcagcaaaaacccaagcccccatccaaggtgaagtccagtagcaaggagagctccataaaggtccttagcagtggcccttctgagcagagccagatgagcctcagtgactccagtatgccacccaccccagtcacacctgtaacccccaccacaccagcattgcccgccattcccatctcccctccacctgtatcggcagtgaacaaaagcggcccttccacagtctcagaaccagctaagtctagctcgggtgttcttctggtgtcttcaccaacaatgccacatctgggaacaatgctttccccagcttccagccagactgcacccagttctcaggctgccgcccgggtcgtgagccactctggctctgctggactgtctcaggtgcgagtggtggcccagcctagccttcctgctgttccccagcagtcgggagggccggcacagacattgccacagatgccagcaggaccgcagatccgggttccagccactgccacacagaccaaagtagtgccccagacagtaatggccactgtgcccgtcaaagcgcagactacggcagccactgtgcagcggcctggacccgggcagacagggctcacggtgacaagtctccctgccacagccagccctgtgagtaagccagccacgagttctcctgggacctctgctcccagtgcctccacggctgccgtcattcaaaatgtcacaggacagaacatcatcaagcaggtggcaatcactgggcagcttggtgtgaagccccaaacaggcaacagcattccactcacagccactaacttccgcatccagggtaaggatgtattgcgtctgccgccctcttccatcaccacagatgccaagggccagacggttctgcgaatcactccggacatgatggccacattggccaagtcccaggttaccacagtcaaattgacccaggacctcttcgggacaggaggcaacactacaggcaaaggcatctctgccaccttacacgtcacttccaatccagtacatgcagctgatagccctgccaaggccagttcagccagtgccccttcatccactccaacaggtaccactgtggtcaaagtgactcctgacctcaagccaacagaagcctcaagttcggcttttcgcttgatgccagctcttggcgtgagtgtggctgaccagaagggaaaaagcacagtggcctcttcagaagcaaaaccagctgccacgatccgcatcgtgcagggactgggagtgatgcctcccaaagcaggccagaccatcaccgttgcaacccacgccaagcaaggggcctcggtggccagtgggtctggaactgtccatacttcagcggtgtccttacccagtatgaatgctgctgtgtccaagactgtagctgtggcttctggggctgcaagcacccccatcagcatcagcacaggagcccccaccgtgcggcaggtccctgtcagcaccacggttgtgtccacgtcccaggctgggaagttgcctacacggatcacagttcccctctctgtgatcagccagccaatgaagggcaagagcgtggtcacagcccccatcatcaaaggcaaccttggagccaacctcagtgggttgggccgcaacatcatcctcacaactatgccagcaggcactaagctcattgctggcaataagcctgttagtttcctcactgctcagcagttgcagcagcttcagcagcaaggtcaggccacacaggtgcgcatccagactgtccctgcatcccatctccaacagggaacagcttctggctcctccaaagcagtctccactgttgttgtgactacagctccgtctcctaaacaggcacctgagcaacaatgattatgagagaggatggcttcc

SEQ ID NO: 20597 - DNA, 4351 bp, Homo sapiens
  source 1..4351: mol_type = unassigned DNA
gctgtttagctgtaattagggtgcaaggataaggtgtaagaactggctggaggttgaatgttttcctggaggagtgttagcatcaactagatccctggaatttctgcctttctgtctcaagatgcatgtctttgtccagagtacctgtggagaagaaacaatggattccttagaccatatgctgacagatcctctggaacttggtccgtgtggagatggccatggcacgcgcatcatggaggattgcctcctgggaggcaccagagttagtctgcccgaggaccttctggaggatcctgagatcttctttgatgttgtcagcctctcaacatggcaggaagtgttaagtgattctcaacgtgaacacctccagcagtttctgccccagtttcctgaagacagtgctgagcagcagaatgaactcatcttagccttgttcagtggggagaacttccgctttggaaaccctctgcacattgcccagaagcttttccgagacggacactttaaccccgaggtggtcaagtaccggcagttatgcttcaagtcacagtacaagcgctacctcaactcccagcagcagtatttccatcggctgctgaagcaaattcttgcttcccggagtgatctgctggagatggcccggcggagtggccccgcccttcccttccggcagaaacgcccttcaccatcccgcacacctgaggagcgggagtggcggacccagcagcgctacttgaaggtcttaagggaagtgaaagaggagtgtggtgacacagccctgtcatctgatgaagaggccacgttggatttacaagaacaattttcttttgaagatctcagctcatggcttccgagctctccagcacgttctcctagtcctgcggtgcccctgcgggtggtgcccacactttcaaccacggatatgaaaactgcagataaagtagaactgggggacagtgacctgaagataatgttaaagaagcaccacgagaagcggaaacatcagccagatcacccggaccttttgacaggggacctgactctcaatgacatcatgactcgagtaaatgctggcaggaagggctctctggcagccttatatgacttggctgtccttaaaaaaaaggttaaggaaaaagaggaaaagaagaagaagaaaataaaaacgatcaaatcagaggcagaggacctggccgagccgctaagcagtactgaaggggtcgcacctctctcacaggccccctctccgctggcaattcctgctatcaaggaagagccccttgaagacctcaagccttgccttggaatcaatgaaatatcttccagcttcttctctcttctattagagatcttgctgctggagagtcaggctagccttcctatgctagaggagcgagttttggattggcagtcatcgccagccagctccctcaacagctggttctctgcggcccccaactgggctgagttggtactaccagccctgcagtatcttgctggagaaagtcgagctgttccttccagtttctctccatttgttgaattcaaagagaaaacccagcagtggaagttgcttggccaatcccaagataatgaaaaggaattagctgccctcttccagctatggctagagaccaaagatcaggccttctgtaagcaagaaaatgaagacagctcagatgccacaacacctgtccctcgggtaagaactgactatgtggtgcgtcccagcacgggggaggagaaacgggtttttcaggagcaggagcgttacaggtatagccaaccccataaggcgttcacctttcgcatgcacggctttgagtctgtggtggggccagtgaagggcgtgtttgacaaggagacctcgctcaacaaggctcgggagcactccctgctgcgctccgaccggcctgcctacgtcaccattctgtctcttgttcgggacgctgcggctcgactgcctaatggagaaggcacacgggcagagatctgtgaactgcttaaggactcccagtttcttgcaccagatgtcaccagcactcaggtaaatacagtagtgagtggtgcactggatcggctacattacgaaaaagatccctgtgtgaaatacgacattggacgaaagctgtggatctacctgcatcgtgaccggagtgaagaagagtttgagcggattcaccaagcacaagcagctgcagctaaagccagaaaagctcttcagcaaaaacccaagcccccatccaaggtgaagtccagtagcaaggagagctccataaaggtccttagcagtggcccttctgagcagagccagatgagcctcagtgactccagtatgccacccaccccagtcacacctgtaacccccaccacaccagcattgcccgccattcccatctcccctccacctgtatcggcagtgaacaaaagcggcccttccacagtctcagaaccagctaagtctagctcgggtgttcttctggtgtcttcaccaacaatgccacatctgggaacaatgctttccccagcttccagccagactgcacccagttctcaggctgccgcccgggtcgtgagccactctggctctgctggactgtctcaggtgcgagtggtggcccagcctagccttcctgctgttccccagcagtcgggagggccggcacagacattgccacagatgccagcaggaccgcagatccgggttccagccactgccacacagaccaaagtagtgccccagacagtaatggccactgtgcccgtcaaagcgcagactacggcagccactgtgcagcggcctggacccgggcagacagggctcacggtgacaagtctccctgccacagccagccctgtgagtaagccagccacgagttctcctgggacctctgctcccagtgcctccacggctgccgtcattcaaaatgtcacaggacagaacatcatcaagcaggtggcaatcactgggcagcttggtgtgaagccccaaacaggcaacagcattccactcacagccactaacttccgcatccagggtaaggatgtattgcgtctgccgccctcttccatcaccacagatgccaagggccagacggttctgcgaatcactccggacatgatggccacattggccaagtcccaggttaccacagtcaaattgacccaggacctcttcgggacaggaggcaacactacaggcaaaggcatctctgccaccttacacgtcacttccaatccagtacatgcagctgatagccctgccaaggccagttcagccagtgccccttcatccactccaacaggtaccactgtggtcaaagtgactcctgacctcaagccaacagaagcctcaagttcggcttttcgcttgatgccagctcttggcgtgagtgtggctgaccagaagggaaaaagcacagtggcctcttcagaagcaaaaccagctgccacgatccgcatcgtgcagggactgggagtgatgcctcccaaagcaggccagaccatcaccgttgcaacccacgccaagcaaggggcctcggtggccagtgggtctggaactgtccatacttcagcggtgtccttacccagtatgaatgctgctgtgtccaagactgtagctgtggcttctggggctgcaagcacccccatcagcatcagcacaggagcccccaccgtgcggcaggtccctgtcagcaccacggttgtgtccacgtcccaggctgggaagttgcctacacggatcacagttcccctctctgtgatcagccagccaatgaagggcaagagcgtggtcacagcccccatcatcaaaggcaaccttggagccaacctcagtgggttgggccgcaacatcatcctcacaactatgccagcaggcactaagctcattgctggcaataagcctgttagtttcctcactgctcagcagttgcagcagcttcagcagcaaggtcaggccacacaggtgcgcatccagactgtccctgcatcccatctccaacagggaacagcttctggctcctccaaagcagtctccactgttgttgtgactacagctccgtctcctaaacaggcacctgagcaacaatgattatgagagaggatggcttccgtgaaagaccatgcctggtctgtcctggctgagaagggaccagggaggttgcatcattgttttaagcttgcctgttcaaggcagccaggcgaggggtgatggcaacggtggcctggattcgtggcctggattctgctgccacgtgccatagtggagcaccctgagaaaggttcactccagggttccaaggtctgctctctaccaatctaggagaatattctgttgaaattgcag

SEQ ID NO: 20598 - DNA, 2081 bp, Homo sapiens
  source 1..2081: mol_type = unassigned DNA
acgtagcgcggcgctcggaactgacctactaacacacatctctccgcgcggccacggcgcccgcggacccggcgcgcccgcccgcctcccgcgccgcgccctcgccgccgcccgcctcccgccgcggccccggaggcccggcccggcccgagccccgagcgccggcggcccgactcccggccgcccctttctttctcctcgccggcccgagagcaggaacacgataacgaaggaggcccaacttcattcaataaggagcctgacggatttatcccagacggtagaacaaaaggaagaatattgatggattttaaaccagagtttttaaagagcttgagaatacggggaaattaatttgttctcctacacacatagatagggtaaggttgtttctgatgcagctgagaaaaatgcagaccgtcaaaaaggagcaggcgtctcttgatgccagtagcaatgtggacaagatgatggtccttaattctgctttaacggaagtgtcagaagactccacaacaggtgaggagctgcttctcagtgaaggaagtgtggggaagaacaaatcttctgcatgtcggaggaaacgggaattcattcctgatgaaaagaaagatgctatgtattgggaaaaaaggcggaaaaataatgaagctgccaaaagatctcgtgagaagcgtcgactgaatgacctggttttagagaacaaactaattgcactgggagaagaaaacgccactttaaaagctgagctgctttcactaaaattaaagtttggtttaattagctccacagcatatgctcaagagattcagaaactcagtaattctacagctgtgtactttcaagattaccagacttccaaatccaatgtgagttcatttgtggacgagcacgaaccctcgatggtgtcaagtagttgtatttctgtcattaaacactctccacaaagctcgctgtccgatgtttcagaagtgtcctcagtagaacacacgcaggagagctctgtgcagggaagctgcagaagtcctgaaaacaagttccagattatcaagcaagagccgatggaattagagagctacacaagggagccaagagatgaccgaggctcttacacagcgtccatctatcaaaactatatggggaattctttctctgggtactcacactctcccccactactgcaagtcaaccgatcctccagcaactccccgagaacgtcggaaactgatgatggtgtggtaggaaagtcatctgatggagaagacgagcaacaggtccccaagggccccatccattctccagttgaactcaagcatgtgcatgcaactgtggttaaagttccagaagtgaattcctctgccttgccacacaagctccggatcaaagccaaagccatgcagatcaaagtagaagcctttgataatgaatttgaggccacgcaaaaactttcctcacctattgacatgacatctaaaagacatttcgaactcgaaaagcatagtgccccaagtatggtacattcttctcttactcctttctcagtgcaagtgactaacattcaagattggtctctcaaatcggagcactggcatcaaaaagaactgagtggcaaaactcagaatagtttcaaaactggagttgttgaaatgaaagacagtggctacaaagtttctgacccagagaacttgtatttgaagcaggggatagcaaacttatctgcagaggttgtctcactcaagagacttatagccacacaaccaatctctgcttcagactctgggtaaattactactgagtaagagctgggcatttagaaagatgtcatttgcaatagagcagtccattttgtattatgctgaattttcactggacctgtgatgtcatttcactgtgatgtgcacatgttgtctgtttggtgtctttttgtgcacagattatgatgaagattagattgtgttatcactctgcctgtgtatagtcagatagtccatgcgaaggctgtatatattgaacattatttttgttgttctattataaagtgtgtaagttaccagtttcaataaaggattggtgacaaacac

SEQ ID NO: 20599 - DNA, 2267 bp, Homo sapiens
  source 1..2267: mol_type = unassigned DNA
acgtagcgcggcgctcggaactgacctactaacacacatctctccgcgcggccacggcgcccgcggacccggcgcgcccgcccgcctcccgcgccgcgccctcgccgccgcccgcctcccgccgcggccccggaggcccggcccggcccgagccccgagcgccggcggcccgactcccggccgcccctttctttctcctcgccggcccgagagcaggaacacgtagtttaggtatttgggaacttatttcctttttgaaaatgctaacttgttgaaagaaagaactgtggccatgcctcatctgtgcttgtatgccctaaatgcttagcatatttccttgtacataatttgtaataaacatttatccagtgaataactggttttttttttattcatgtattgcagataacgaaggaggcccaacttcattcaataaggagcctgacggatttatcccagacggtagaacaaaaggaagaatattgatggattttaaaccagagtttttaaagagcttgagaatacggggaaattaatttgttctcctacacacatagatagggtaaggttgtttctgatgcagctgagaaaaatgcagaccgtcaaaaaggagcaggcgtctcttgatgccagtagcaatgtggacaagatgatggtccttaattctgctttaacggaagtgtcagaagactccacaacaggtgaggagctgcttctcagtgaaggaagtgtggggaagaacaaatcttctgcatgtcggaggaaacgggaattcattcctgatgaaaagaaagatgctatgtattgggaaaaaaggcggaaaaataatgaagctgccaaaagatctcgtgagaagcgtcgactgaatgacctggttttagagaacaaactaattgcactgggagaagaaaacgccactttaaaagctgagctgctttcactaaaattaaagtttggtttaattagctccacagcatatgctcaagagattcagaaactcagtaattctacagctgtgtactttcaagattaccagacttccaaatccaatgtgagttcatttgtggacgagcacgaaccctcgatggtgtcaagtagttgtatttctgtcattaaacactctccacaaagctcgctgtccgatgtttcagaagtgtcctcagtagaacacacgcaggagagctctgtgcagggaagctgcagaagtcctgaaaacaagttccagattatcaagcaagagccgatggaattagagagctacacaagggagccaagagatgaccgaggctcttacacagcgtccatctatcaaaactatatggggaattctttctctgggtactcacactctcccccactactgcaagtcaaccgatcctccagcaactccccgagaacgtcggaaactgatgatggtgtggtaggaaagtcatctgatggagaagacgagcaacaggtccccaagggccccatccattctccagttgaactcaagcatgtgcatgcaactgtggttaaagttccagaagtgaattcctctgccttgccacacaagctccggatcaaagccaaagccatgcagatcaaagtagaagcctttgataatgaatttgaggccacgcaaaaactttcctcacctattgacatgacatctaaaagacatttcgaactcgaaaagcatagtgccccaagtatggtacattcttctcttactcctttctcagtgcaagtgactaacattcaagattggtctctcaaatcggagcactggcatcaaaaagaactgagtggcaaaactcagaatagtttcaaaactggagttgttgaaatgaaagacagtggctacaaagtttctgacccagagaacttgtatttgaagcaggggatagcaaacttatctgcagaggttgtctcactcaagagacttatagccacacaaccaatctctgcttcagactctgggtaaattactactgagtaagagctgggcatttagaaagatgtcatttgcaatagagcagtccattttgtattatgctgaattttcactggacctgtgatgtcatttcactgtgatgtgcacatgttgtctgtttggtgtctttttgtgcacagattatgatgaagattagattgtgttatcactctgcctgtgtatagtcagatagtccatgcgaaggctgtatatattgaacattatttttgttgttctattataaagtgtgtaagttaccagtttcaataaaggattggtgacaaacacagaa

SEQ ID NO: 20600 - DNA, 3492 bp, Homo sapiens
  source 1..3492: mol_type = unassigned DNA
aatgcttgctccacagtcgcgtgctagactccggacccgccagtggtatggctgagccgactagtgatttcgagactcctatcgggtggcatgcgtctcccgagctgactcccacgttagggcccctgagcgacactgccccgccgcgggacagctggatgttctgggcaatgctgccgccaccgccaccaccacttacgtcctcgcttcccgcagccgggtcaaagccttcctctgagtcgcagccccccatggaggcccagtctctccccggggctccgccccccttcgacgcccagattcttcccggggcgcaaccccccttcgacgcccagtctccccttgattctcagcctcaacccagcggccagccttggaatttccatgcttccacatcgtggtattggagacagtcttctgataggtttcctcggcatcagaagtccttcaaccctgcagttaaaaattcttattatccacgaaagtatgatgcaaaattcacagacttcagcttacctcccagtagaaaacagaaaaaaaagaaaagaaaggaaccagtttttcactttttttgtgatacctgtgatcgtggttttaaaaatcaagaaaagtatgacaaacacatgtctgaacatacaaaatgccctgaattagattgctcttttactgcacacgagaagattgtccagttccattggagaaatatgcatgctcctggcatgaagaagatcaagttagacactccagaggaaattgcacggtggagggaagaaagaaggaaaaactatccaactctggccaatattgaaaggaagaagaagttaaaacttgaaaaggagaagagaggagcagtattgacaacaacacaatatggcaagatgaaggggatgtccagacattcacaaatggcaaagatcagaagtcctggcaagaatcacaaatggaaaaacgacaattctagacagagagcagtcactggatcaggcagtcacttgtgtgatttgaagctagaaggtccaccggaggcaaatgcagatcctcttggtgttttgataaacagtgattctgagtctgataaggaggagaaaccacaacattctgtgatacccaaggaagtgacaccagccctatgctcactaatgagtagctatggcagtctttcagggtcagagagtgagccagaagaaactcccatcaagactgaagcagacgttttggcagaaaaccaggttcttgatagcagtgctcctaagagtccaagtcaagatgttaaagcaactgttagaaatttttcagaagccaagagtgagaaccgaaagaaaagctttgaaaaaacaaaccctaagaggaaaaaagattatcacaactatcaaacgttattcgaaccaagaacacaccatccatatctcttggaaatgcttctagctccggacattcgacatgaaagaaatgtgattttgcagtgtgttcggtacatcatcaaaaaagacttttttggactggatactaattctgcgaaaagtaaagatgtataggcatctggtgtttcagcatacataactgaagcatgtgaaacagtatcatcctcgttagtagaggaaaaccaaaacccttttttccgtcaaaattggatttgtaattaaattgtaagcctcgtaggatgtatgttggaattttaagtctttcctttggttctatgcaaataaaaaaataactgattttttaagactgtgtctgtattgttgggattgaatctagtatttgctgggagaattttttctttgtatttattttaatgtattgttctcatgtaagaatgactgatgttgtgttagttaagaattgaagataggtttagcagtaaagaagaaagcttttaaaaggattgattcagctaagcaaagttgggcagagaaatacagccattttgtttttaatgcagaaaaggaagatgttctgtagcaagggggaatattttaaaaataaaccagatcaaattaatacaatcagaaggtttcgaaatgtaaatattccttatttaagacatgtttaaattcacctactagcacgacttacatagctcaaatattgaatgtttaaaatattaatacagatggggcctctttatgtttagataaaattgaagtacttaattgaagctttttaaaaattgtaaagtaaatgaaagctattgagatctttttgtctcctataataccagggaatttgagcttgtgttctagtcattgtactagctgtagctattggtctgtccttttgacatacagctaaaagggactaaatttgtaaaaaattagtttgttatagttgaagattaacttttcctaacattgtgattattgaagttcatgaatcttgctgtcaaggaagaaaggtaagaaagctgatagctcctccatgttggtaaaatcctctccagaatcttggaacacctggcatgtgaccctagtgacgtcacagacctgagatgaagattcatgtttagccagtgttttccagccttgtacccaccatacagatctgtttattctgtttcaccctactcctccagtgagccccatattttgggaaattatctgccttatacattaactaattcaattcatgtaacactgttgagtgcttactctttgtacctctattgtgcctatattaaaggtatacaaataaataaggccatgtctgacttcaaggaactcagtttaattttgatatattcaaagatgtgattcccaaccaactcaggatgaagtaactagtgttacaactgagttgatattctaaaatataacacagtttgtacttttattactagttagcatacacattttataggcttatgggttaataaatgaattcatggactcctggactactttcattgatgaccatatctccagggatgttgttgatccccacactgccttaaggtatattatagaaacagttttattttccatttttcttgtttcctgataataaatgtatttaggactgaaaatactcctgagtactcccttggctgtatgtctgacagtctttagctatggtgactattgtttatttttaatgggtatttcagattccaagtgtatttaaaatttctaaggagatataatatagcctgtatggtttctactttatggaattatatggtcaatatttgtaaatattctatgagttttgggtgggtagaggggtgctttgcctgttttgggtacaggtttttttggatttagcttgttaattgttcaaactttctgccttctacattcctatcttattgttcgtttaatcagtttctgaaatgtaagcattacatgactattggtgagttgtgccttttataactgaaatactttactttttctcatatcctctataattgacttctattttccttaatcaaaccagctctgggaaatttaatacatttatattaattgagattattaaaacatttggactatt

SEQ ID NO: 20601 - DNA, 10879 bp, Homo sapiens
  source 1..10879: mol_type = unassigned DNA
agatatactgagtgagccctgagaagcagtctcagatcctgacggtgcagcagcccgcagcctcagccagggagtcccagccgctttcaatggaggagaagcccggccagccacagcctcagcaccatcacagccaccaccatccgcaccatcaccctcagcagcagcagcagcagccgcaccaccaccaccattattatttctacaaccacagccacaaccaccaccaccaccatcatcaccagcagcctcaccaatacctgcagcatggagccgagggcagccccaaggcccagccaaagccgctgaaacatgagcagaaacacaccctccagcagcaccaggaaacgccgaagaagaaaacaggctatggtgaactaaacggtaatgctggagaaagagaaatatctttaaagaacctgagttctgatgaagccaccaaccctatttccagggtcctcaatggcaaccagcaagttgtagacactagcctgaagcagactgtaaaggccaacacctttgggaaagcaggaattaaaaccaagaatttcattcagaaaaacagtatggacaaaaagaatgggaagtcttatgaaaataaatctggagagaatcagtctgtagataagtctgatactataccaattccaaatggtgtggtaacaaataattctggttatattactaatggttatatgggtaaaggagcagataatgatggtagtggatctgagagcggatatacaactcctaaaaaaaggaaagctaggcgcaatagtgccaagggttgtgaaaaccttaatatagtgcaggacaaaataatgcaacaagagaccagtgtcccaaccttaaaacagggacttgaaactttcaagcctgactatagtgaacaaaagggaaatcgagtagatggttcgaagcccatttggaagtatgaaactgggcctggaggaacaagtcgaggaaaacctgctgtgggtgatatgcttcggaaaagctcagatagtaaacctggtgtgagcagcaaaaagtttgatgatcggcccaaaggaaagcatgcttcagctgttgcctccaaagaggactcgtggaccctatttaaaccacccccagtttttccagtggacaatagcagtgctaaaatagttcctaaaataagttatgcaagcaaagttaaggaaaacctcaacaaaactatacagaactcttctgtgtcaccaacttcatcttcatcatcttcatcatctaccggggaaactcagacccaatcatcaagtcgcttatcccaggtccctatgtcagcgctgaaatctgttacttctgccaacttttctaatgggcctgttttagcagggactgatggaaatgtttatcctccagggggtcagccactgctaactactgctgctaatactctaacacccatctcttctgggacagattcagttctccaggacatgagtctaacttcagcagctgttgaacaaattaagactagcctttttatctatccttcaaatatgcaaactatgctgttgagcacagcacaagtggatctgccctctcagacagatcagcaaaacctgggggatatcttccagaatcagtggggtttatcatttataaatgagcccagtgctggccctgagactgttactgggaagtcatcagagcataaagtgatggaggtgacatttcaaggagaatatcctgctactttggtttcacagggtgctgaaataattccctcaggaactgagcatcctgtgtttcccaaggcttacgagctggagaaacggactagtcctcaagttctgggtagcattctaaaatctgggactactagtgagagtggagccttatccttggaacccagtcatataggtgacctgcagaaagcagacaccagtagtcaaggtgctttagtgtttctctcaaaggactacgagatagaaagtcaaaatcctctggcctctcctacgaacactttgttaggctctgccaaagaacagagataccagagaggcctagaaaggaatgatagctggggttcttttgacctgagggctgctattgtatatcacactaaagaaatggaatctatttggaatttgcagaagcaagatcccaaaaggataatcacttacaatgaagccatggatagtccagatcaatgaaggaccagactgcctattcgtaacctttctgcagcattagagccatcgttcatgggggacacaaggcttttatgctcctagatcttcaacgcagcagaggaaccataagtagaatcacaggataatatatacaaatatatatatatacatatatatatatatagttatttaaaaaaggcaactgaaagtaattagacttcttaaggaatcaaatttatttcaagagactacacatggttatttaatctccggtactgaataggttttttttcttctgttagtttttgtttttaagtgtgaatgcaagtgattaatgaatacagacttaacaagtgtggttctaaagttcctgctgtcatcaacttgggcaacaaatgacccactggaaaggcaaatccacttaaaagatctctgtatcttgttctgtgactgaagtgatacactaatcacggggaacccagaatgattcaacattttccccccactcctcccttgatctttttggttttactttaattaagccctgcgagaatgctggataaatgccttgaagttagcagggtgtatttttttagcgaatatgatttgcatgtcttgccaggagttaagcggcctctggggtgttggggaaatactttatttctttccatttattttttgtggggcggggataggggagggcattgaagttctacaattctggaatagttagttgatggtacatagttaacttggcttcggttacatattggactttaacaactgaagaatctatgcgtgtcatttaaagaaaagttgcagaacaagcaattggcttagatatacaatctggaaaaatattcctgtgcccatattttaatgtaattgtataactgggagcaaaaatatattctgcttttcaactgtaggtgctccagacttgctctccgtcactaacactaaatgtgctgttttccttgtttttcatcaaacatttaagacaaacttagacctttctgtaaattatcttttaatttctcagcaaaatctaaaaggggaagaaaaaagtccatgaaaactaaaacttttcatgtttttagccagtgagaagataataaaccctgactgtagaaggtgtgttttcatgcaaactatacttctgagcttgttagcttctaattatatcttaataaatatattttattactagagcaagatgggtttttaaggaaaataatgtgaaattctggaaattttctttggggcagagaagagcattagccctgtcttatcattacattgccatcctgttgcactgcagcttgtgtatagcatgctaaaataaatttttgtgtgtgtgtgcagaaattaagggtccaattgagattgggtgatgttagtaacataataacaagttgtctggcctgacacagcatcacatcacacacacagaaattagtatatccatgtatgtcaaatacaggttaaaatatcagggcatttatataaagagttgtagtcttctgataaaagtagactggatcccctggggtatttggggagaaagtaactactttggctctacccctagaaatgtccagttttgagtgactgtagtatggatgggttttcttgttttgttgattatttgaggcttttaaaacaagtagttcatgaaagaagctgttggactcaacatagagtagagtaactatctttttagtctggatttctgccctgcttagattttaaaagtataagcatggattgccaattccacttgatgtaaacaaaacttttttttatacataatatatatatatatatataaaataacttattgtatcagtccaggttcagaaacttgtggtaggccagttccagatagtttcatttcacctgtaaactgtatcactttgactgatattgtaattttcaaatgtataatatgtttacagatgtgccctgcatttagtctgccttgttcctattttgatttttgttgagtctcctgcctgcttgccaaaagctaggatgcttcaggcccatgtacaattgaaagcagaggcatccttgagctttaaagcattgaacaaactggaaaatgcaacataccacataactgaagtgaaaaaagtctgtgtttttgtgtttttttaaataaaaattttcaaaaagttaaaaaaaaagacatataaggttgattaaagggaaaaaaggctccagtttgttttacaggttttaaagttctgctgtgtgttcaattgccttgtgtaaccacttgtcgccttagggccagattcccctctctagtccccttttttaaatgtccattttgcttgcctggaattttaaagttcttccgtctcacaactcacaagaaactttctgggtttgtgacatacagaggttgaattgagtatatatttgaaaaggaaaaaacaaaaaacaaacccagaccccacctgaattgggctttttaacttagaagcaacacttgattaaacatctttagaaagctattgcttttctaatttccttccatatccctcaggcctcagtgttcagagaagccaaaaagaatgtatcacttctctgtctgtccaaaggtttttgagagtctcacttctaaatgaaacaatgcaacatttcactttgatttctccactgaaatttccttgattatatggttagaggtatgtagttaggaatgtctgttaactttctgagaaccctagtgccccatcatattaactgtcagtattttgggggcattaggttaatagacttaattgcctaggtacaagcaggactttgggacaaatctctttgtgctgtttggtaacacttaactctatttgttgcaatctttctccttaggtcctcacacaattccttacagagcacttattaaaaaaaaatcttaagagttgatctgttttctgattattttgtgtaagcttctaaacaaacttcagctgtgattaatttagcacatttaaataacgtgttattgtttggtataaagaattttccttcaactcagagtattagtactgtagcataaaccaaatacagtctagaggggatttttaacatccctccattataaagactgaaaaaggggtgtgtgtgtgtgtgtgtgtttatgtatgtatgtatgtgtgtgtgaggaaaagatggagatattaaaaattagtaaatgaatgtgtataagacattagtattcagagaatgaacttgtatttattttgtgccatttgttttcattacacagaaaaaagtcaggtggtttaaatccttaaaagggtagtattgaaaaatggcactaagaatgaaattatgacctatttttttaatagctatgaagatactaattatgggtgaagatttctttttaaatctgttttgattattgtaggcttctgtgtcacataccactcttgtaggtgtcctcaataatccccttttcccacaaaatacacagggtgtattatctttctctttattcacccccactttgctgaactgaagttaattacatagcctttcttctaacctccttagtaatgaaccttcacataaagtgtatttacagcgtctgtggtagccagcccttcctcctctactttctaggaggggatagccaataactaggaatttaatgacagatttttttttctttgaaataaatggccagagtttctccattttagaattttgttgtcctccttaatcatctgcttacctagtcattactcaatctgcagaaacttcataaaggaaaagtgctgcattgtttttacaaataacagtttgtagggaaaatatgacaaacctcaactatgggagttgtccacaatacaaaattttgaaaaaacattacatagtgataatatcatacttggttgttaggcttgttgcttccccacatcagaggcatctaatgatttatcttttgtaattgctgtgaacttttttaaataagccatttagtgtgaaattgtcatgtatcaaatggctattggaaatggactttactcaattttaattccactgtaaataaggacggagtcattcctacaaggctctcttcagagaaatagattaaaagtccaatttccaggtattattagtatagttatgccgctgggccacatcctcaacaacagctgatccctcttgtataaatatgttaactgtgcagaacagttatgttatgggacaaatataatggtcattatggtcagattggttgatgccacaccagtcaaggtagagtctgatagggcagtatcttaataaccctacccatgacttaactgttggatttgaaaggaaaacgtaggatttgctcttgtccccttacccgccacaaaattttgataatttgtttaaaagggagaggcagaggaaaagactagaagcataaatagctgctttaggtttgccagaggcacatagcttaacattagttcttaatatcgatgttatttttactaatgtaattaatcaacagagcaccaagattctttcatggtgaaaagggtgggcttctgttttggtatcttaaaatgtttcttttaaaatatacatcacctgtgtgagaaccaggaccacctgggagagtgatgaatcattggctccactcaaaagcattgctttactgagttttaaatttcacactgttttgccgctcaagaaaggtcttaaagtagttaaaggatgccagcaatagtgcgaatagaattttcggttgtctgcataataaaaacacccattgcagcatgattggtatgttgctcttgcattattgggaatggtaaatcagttatgggctagaaactatggaatggccgtcctcatatgtgatgggattgctgattcagacttccctattttccatacaattttgttatgtgcagagttctaaagccattttataatactgcagtatcccccccccccccacctttttttttttgagacggactgtctgttgcccaggctggagtacagtggcgcaatcttggctcactgcaacctccacctccctggttcaagcaattcccctgcctcagcctcccatgtagctgggattacgggcgcacaccaccacacctggctaatttgtattcttagtagagacggggtttcaccatgttgaccagactggtctcgaactcctgacctcaggcaatctgcccgcctcagcctcccaaagtgctggaattacaggtgtgagccaccgtgcccggccaagtatctcttttctacagccttattaaactaactacaaacatttattttccaatttagttttactttcagtgcatatcaaagttgttgtactcttcagaccaacaaattaacttgagggcaaattacatagctttccatgtacccttttttcctcaggtgctaatcaaaggctctgaaaatggatactgctttagtgatgtctgctttattcttaaaatgcttatttcttttgctagatgtaaagatttggtgttaacaaaagtggttttaatatgtaaatatgaatgaatgcctttagtttaccctgtttgtctattattaatctgttttcatttatccttcatagaggaggatcctttcatgatcttgaatacatttcattagatattgttgcattttaagaatgaaaatacaactgttttctgtcttagattaatcctgctgctatgagaaactgaaaatcaagaatgtgatgcactttttacattactatataccatacatataccataggttgctttgatacctttcctgtagcacagccactaacaagagtgaatgaattataaaattctttttgggagggaatcaatacaagtaactaattcttagctgatattgtcctatgaaggacaataacttaggaatataagaattctgttaatagtacactttttggccttaaatgtcttctactactgaaaatagtttaaatcttagctttgtttctattattccctctctctgcctcagaaagaggaattgggaagaatggcttaaaggacgtggtgtcattgatttgttgctgatcttttagaaaacatttgtctatgtaagctggggacttattttttgtttgtatatagaggggaaatagtgctgccctgaaccaatcagatttagtttaaatcaaatcaatcaaaactccagctgtttctcttgtctttttacttagcaaaggaaaactttagtgaatgctacttgacaagaagaaaagtcatttctcaagcacatacccaaacttgaaggtgattgaacccaaaataatgggtgggaaacaccaaatgaggtggaggaatgagaaagatgtgtgggccaaagctatctggttatattttgatgttgccaatatcgcaaagccaaaattttaatttgcttatttaatatatttgttggccagagatctatttttatatcaatgtgccttgcatgtatattaaaaaaaaaaaattggaaacgccatgtagtaatgcctgagatagtcgatggttcttaccacctcactaatttttatgcagtatgaaatgctcattctattgcccaactggtgctctctgtttaaagttacagatcttgcgaaactggaactattttataagctggggaagtgatttactttttttgttgtatcttttttgttcttagtctgttagtggctgtcctgtagtgggaaatagtaaaaggattcttcactcccttctcccctcagcaccttcttcaagtaaacatttcttgtgtgctttgaaaaaagtttcagcttgctgtctcttttagtgttttaaagaagtgttatacaaagcattgtttgcaaaatatagggagataatggagtccactttaatttggaattctgtgtgagctatgatccaagttatcagctctttccaactttaaaaattttgttaaaagcaccttgcttagaaaattttaaatatttatgtctgcaacaattgtctcaaaataataaactgtgcaattcttgtcattaaaaaaaaaaaagatctgaattttccctaatgtgacttgttagtttctctctgtatttcctgccagtgtaaatgtgaaagctttgcttgcattacgttttagaaatgcattttgcacactcgaattttgccgaagctccgtgaaaaggttagatctaagtagatgaataaagctatgcacatgttttgaaagtttaatttgtgtgtcattaccaaaagtgaccgatttgtccttactactttgctgttgttagctttaccatctttggaaacttggctcaaagttacatagttctgggctagctcatcagtggaactaggagagaggaaaactggcacctattttaataaagttcaatttaaacgagagcttgacttgtatctattaaagagcttttcttgaaacagggcagttttatcagctttacaaatcattggatgctcttccttagtaatattttggtttatttgatcaaatagaaatggaaagtaattcaaactgaaagacccttttttgtcatatggaacttggtgacgattttttgtcttaaagctggtttaaaggtaggataggcttttacctttattgctttagcataaatttggtttactgaattgactggcttgagattagaattattcagttgtttgtaagatcaaagcactggttgttttaaagataacgtgtatcttttaaaaaattgcccaagctgattagaacaagtttaggagttgggtacatttggttcaagtgctgcaatctgtatgtactaaatagctttactttgtgtatgtgtacttataatgtgtagatgtactactacccaggttttgtcaaatcatcttttttaaagtttttttttttttaattggttcaggacctttgtaggagaggctaatatgtttaagtagaagatattactgatagcattttccccatgctcctacataaaaaataaatatttccattttatagctttttcaatatacagaagagggttacttcttcatcaagtatattgttgcctttgaggacacagcaaaacccttctatatgtatcttcattgatagtggcagttaaaaactaagttatccagttaagacttaaaaggtgacccatattaattgcatggccttaaaaggcagaaatgcaggagtgtagcaagcatcattttagatggctatggttcctcttccgcatctgtcagtagttcacttatgttcagtcttagaacctactggaggagtgaagtaatttctctgtctcgtgcagaggcactaaggagctgagttacctcttaatctgggggaatggataataagtggagtacagttatgttaaaggatgttccccccgctcaaaaaaaagtttcaatgtttgttttgcccagtcaaaaatataggtcttttctacatataagaacagtcaccagaaattttcccttttgctaaatgcttaggtatttgctatagctgtttctgatgtcatggattctgaggaagtgtcatttacgtgatgatcttcctttattgatgtcttcatcatgttcagtgttttaaaaatataaattacaaacactctacaaccatacccagatttacttattttatcagaaaaaaaacttgagaaatttgtagatcaaattgagagacaataagtgtacattgttgaataaaaaattttaaagtttctg

SEQ ID NO: 20602 - DNA, 3775 bp, Homo sapiens
  source 1..3775: mol_type = unassigned DNA
gtgctggagaggccgctgcgagcggaaggcctcctccataaccgagtccgaaagggcagaatctatgggggtggaaactaattctaagccagactgctggagatcaccctgttctagtgtgtggaggcttccaccaggaggcgcattggagtgactgtctggcatcaccaagatgacactccacgccacccggggggctgcactcctctcttgggtgaacagtctacacgtggctgaccctgtggaggctgtgctgcagctccaggactgcagcatcttcatcaagatcattgacagaatccatggcactgaagagggacagcaaatcttgaagcagccggtgtcagagagactggactttgtgtgcagttttctgcagaaaaatcgaaaacatccctcttccccagaatgcctggtatctgcacagaaggtgctagagggatcagagctggaactggcgaagatgaccatgctgctcttataccactctaccatgagctccaaaagtcccagggactgggaacagtttgaatataaaattcaggctgagttggctgtcattcttaaatttgtgctggaccatgaggacgggctaaaccttaatgaggacctagagaacttcctacagaaagctcctgtgccttctacctgttctagcacattccctgaagagctctccccacctagccaccaggccaagagggagattcgcttcctagagctacagaaggttgcctcctcttccagtgggaacaactttctctcaggttctccagcttctcccatgggtgatatcctgcagaccccacagttccagatgagacggctgaagaagcagcttgctgatgagagaagtaatagggatgagctggagctggagctagctgagaaccgcaagctcctcaccgagaaggatgcacagatagccatgatgcagcagcgcattgaccgcctagccctgctgaatgagaagcaggcggccagcccactggagcccaaggagcttgaggagctgcgtgacaagaatgagagccttaccatgcggctgcatgaaaccctgaagcagtgccaggacctgaagacagagaagagccagatggatcgcaaaatcaaccagctttcggaggagaatggagacctttcctttaagctgcgggagtttgccagtcatctgcagcagctacaggatgccctcaatgagctgacggaggagcacagcaaggccactcaggagtggctagagaagcaggcccagctggagaaggagctcagcgcagccctgcaggacaagaaatgccttgaagagaagaacgaaatccttcagggaaaactttcacagctggaagaacacttgtcccagctgcaggataacccaccccaggagaagggcgaggtgctgggtgatgtcttgcaggtggaagaactgagtaagaaactggctgactctgaccaagccagcaaggtgcagcagcagaagctgaaggctgtccaggctcagggaggcgagagccagcaggaggcccagcgcctccaggcccagctgaatgaactgcaagcccagttgagccagaaggagcaggcagctgagcactataagctgcagatggagaaagccaaaacacattatgatgccaagaagcagcagaaccaagagctgcaggagcagctgcggagcctggagcagctgcagaaggaaaacaaagagctgcgagctgaagctgaacggctgggccatgagctacagcaggctgggctgaagaccaaggaggctgaacagacctgccgccaccttactgcccaggtgcgcagcctggaggcacaggttgcccatgcagaccagcagcttcgagacctgggcaaattccaggtggcaactgatgctttaaagagccgtgagccccaggctaagccccagctggacttgagtattgacagcctggatctgagctgcgaggaggggaccccactcagtatcaccagcaagctgcctcgtacccagccagacggcaccagcgtccctggagaaccagcctcacctatctcccagcgcctgccccccaaggtagaatccctggagagtctctacttcactcccatccctgctcggagtcaggcccccctggagagcagcctggactccctgggagacgtcttcctggactcgggtcgtaagacccgctccgctcgtcggcgcaccacgcagatcatcaacatcaccatgaccaagaagctagatgtggaagagccagacagcgccaactcatcgttctacagcacgcggtctgctcctgcttcccaggctagcctgcgagccacctcctctactcagtctctagctcgcctgggttctcccgattatggcaactcagccctgctcagcttgcctggctaccgccccaccactcgcagttctgctcgtcgttcccaggccggggtgtccagtggggcccctccaggaaggaacagcttctacatgggcacttgccaggatgagcctgagcagctggatgactggaaccgcattgcagagctgcagcagcgcaatcgagtgtgccccccacatctgaagacctgctatcccctggagtccaggccttccctgagcctgggcaccatcacagatgaggagatgaaaactggagacccccaagagaccctgcgccgagccagcatgcagccaatccagatagccgagggcactggcatcaccacccggcagcagcgcaaacgggtctccctagagccccaccagggccctggaactcctgagtctaagaaggccaccagctgtttcccacgccccatgactccccgagaccgacatgaagggcgcaaacagagcactactgaggcccagaagaaagcagctccagcttctactaaacaggctgaccggcgccagtcgatggccttcagcatcctcaacacacccaagaagctagggaacagccttctgcggcggggagcctcaaagaaggccctgtccaaggcttcccccaacactcgcagtggaacccgccgttctccgcgcattgccaccaccacagccagcgccgccactgctgccgccattggtgccacccctcgagccaagggcaaggcaaagcactaaagggccagtaccagtgagtggccccacctgtgtccccgatgctgacctcacctggtcctccgcctactgtccctctcagtgccttctctcagctcccaggccaacagtagccaaacccctagagacagtgatgcctgcccgcaccctggcctggtccctggtccttcactggcgccttctcggagctggcccagggggcctggagcatggacagtgtgggcgctctccctaccttgcctccttttttcttaaagcaaagtcacttctccatcacaaccagatttgaggctggttttgatggctgggtccttgggcctggccagtcttcctcttagcctctggatctagaagggaccataagaggagtaggccctggttcctgctgtcctggtggctgggcccagcaggggccctcactcttgaagtccaggactgggtctgacctggtgggagcacctgccagaggatgctctttcccaggacggatgggccctatgtctcaggagtggggttgggggacagccttcagcagcagctcacaccctaccttccccagacttgcactggggtgggatttggagtgatgggaaggtttttaagggccggggatggatcttttctaaatgttattacttgtaaataaagtctatttttctcccgtga

SEQ ID NO: 20603 - DNA, 7227 bp, Homo sapiens
  source 1..7227: mol_type = unassigned DNA
gcccacgaagaggtacgattccggagaatcgcgaggcagagcgggagcgcgcagccaggtggaaactaattctaagccagactgctggagatcaccctgttctagtgtgtggaggcttccaccaggagtctggagtgcaatggcacgatctcggctcactgcaacctccacctcccaggttcaagcgattctcctgcctcagcctcccaagtagctgggattacaggcgcattggagtgactgtctggcatcaccaagatgacactccacgccacccggggggctgcactcctctcttgggtgaacagtctacacgtggctgaccctgtggaggctgtgctgcagctccaggactgcagcatcttcatcaagatcattgacagaatccatggcactgaagagggacagcaaatcttgaagcagccggtgtcagagagactggactttgtgtgcagttttctgcagaaaaatcgaaaacatccctcttccccagaatgcctggtatctgcacagaaggtgctagagggatcagagctggaactggcgaagatgaccatgctgctcttataccactctaccatgagctccaaaagtcccagggactgggaacagtttgaatataaaattcaggctgagttggctgtcattcttaaatttgtgctggaccatgaggacgggctaaaccttaatgaggacctagagaacttcctacagaaagctcctgtgccttctacctgttctagcacattccctgaagagctctccccacctagccaccaggccaagagggagattcgcttcctagagctacagaaggttgcctcctcttccagtgggaacaactttctctcaggttctccagcttctcccatgggtgatatcctgcagaccccacagttccagatgagacggctgaagaagcagcttgctgatgagagaagtaatagggatgagctggagctggagctagctgagaaccgcaagctcctcaccgagaaggatgcacagatagccatgatgcagcagcgcattgaccgcctagccctgctgaatgagaagcaggcggccagcccactggagcccaaggagcttgaggagctgcgtgacaagaatgagagccttaccatgcggctgcatgaaaccctgaagcagtgccaggacctgaagacagagaagagccagatggatcgcaaaatcaaccagctttcggaggagaatggagacctttcctttaagctgcgggagtttgccagtcatctgcagcagctacaggatgccctcaatgagctgacggaggagcacagcaaggccactcaggagtggctagagaagcaggcccagctggagaaggagctcagcgcagccctgcaggacaagaaatgccttgaagagaagaacgaaatccttcagggaaaactttcacagctggaagaacacttgtcccagctgcaggataacccaccccaggagaagggcgaggtgctgggtgatgtcttgcagctggaaaccttgaagcaagaggcagccactcttgctgcaaacaacacacagctccaagccagggtagagatgctggagactgagcgaggccagcaggaagccaagctgcttgctgagcggggccacttcgaagaagaaaagcagcagctgtctagcctgatcactgacctgcagagctccatctccaacctcagccaggccaaggaagagctggagcaggcctcccaggctcatggggcccggttgactgcccaggtggcctctctgacctctgagctcaccacactcaatgccaccatccagcaacaggatcaagaactggctggcctgaagcagcaggccaaagagaagcaggcccagctagcacagaccctccaacagcaagaacaggcctcccagggcctccgccaccaggtggagcagctaagcagtagcctgaagcagaaggagcagcagttgaaggaggtagcggagaagcaggaggcaactaggcaggaccatgcccagcaactggccactgctgcagaggagcgagaggcctccttaagggagcgggatgcggctctcaagcagctggaggcactggagaaggagaaggctgccaagctggagattctgcagcagcaacttcaggtggctaatgaagcccgggacagtgcccagacctcagtgacacaggcccagcgggagaaggcagagctgagccggaaggtggaggaactccaggcctgtgttgagacagcccgccaggaacagcatgaggcccaggcccaggttgcagagctagagttgcagctgcggtctgagcagcaaaaagcaactgagaaagaaagggtggcccaggagaaggaccagctccaggagcagctccaggccctcaaagagtccttgaaggtcaccaagggcagccttgaagaggagaagcgcagggctgcagatgccctggaagagcagcagcgttgtatctctgagctgaaggcagagacccgaagcctggtggagcagcataagcgggaacgaaaggagctggaagaagagagggctgggcgcaaggggctggaggctcgattacagcagcttggggaggcccatcaggctgagactgaagtcctgcggcgggagctggcagaggccatggctgcccagcacacagctgagagtgagtgtgagcagctcgtcaaagaagtagctgcctggcgtgagcggtatgaggatagccagcaagaggaggcacagtatggcgccatgttccaggaacagctgatgactttgaaggaggaatgtgagaaggcccgccaggagctgcaggaggcaaaggagaaggtggcaggcatagaatcccacagcgagctccagataagccggcagcagaacgaactagctgagctccatgccaacctggccagagcactccagcaggtccaagagaaggaagtcagggcccagaagcttgcagatgacctctccactctgcaggaaaagatggctgccaccagcaaagaggtggcccgcttggagaccttggtgcgcaaggcaggtgagcagcaggaaacagcctcccgggagttagtcaaggagcctgcgagggcaggagacagacagcccgagtggctggaagagcaacagggacgccagttctgcagcacacaggcagcgctgcaggctatggagcgggaggcagagcagatgggcaatgagctggaacggctgcgggccgcgctgatggagagccaggggcagcagcaggaggagcgtgggcagcaggaaagggaggtggcgcggctgacccaggagcggggccgtgcccaggctgaccttgccctggagaaggcggccagagcagagcttgagatgcggctgcagaacgccctcaacgagcagcgtgtggagttcgctaccctgcaagaggcactggctcatgccctgacggaaaaggaaggcaaggaccaggagttggccaagcttcgtggtctggaggcagcccagataaaagagctggaggaacttcggcaaaccgtgaagcaactgaaggaacagctggctaagaaagaaaaggagcacgcatctggctcaggagcccaatctgaggctgctggcaggacagagccaacaggccccaagctggaggcactgcgggcagaggtgagcaagctggaacagcaatgccagaagcagcaggagcaggctgacagcctggaacgcagcctcgaggctgagcgggcctcccgggctgagcgggacagtgctctggagactctgcagggccagttagaggagaaggcccaggagctagggcacagtcagagtgccttagcctcggcccaacgggagttggctgccttccgcaccaaggtacaagaccacagcaaggctgaagatgagtggaaggcccaggtggcccggggccggcaagaggctgagaggaaaaatagcctcatcagcagcttggaggaggaggtgtccatcctgaatcgccaggtcctggagaaggagggggagagcaaggagttgaagcggctggtgatggccgagtcagagaagagccagaagctggaggagaggctgcgcctgctgcaggcagagacagccagcaacagtgccagagctgcagaacgcagctctgctctgcgggaggaggtgcagagcctccgggaggaggctgagaaacagcgggtggcttcagagaacctgcggcaggagctgacctcacaggctgagcgtgcggaggagctgggccaagaattgaaggcgtggcaggagaagttcttccagaaagagcaggccctctccaccctgcagctcgagcacaccagcacacaggccctggtgagtgagctgctgccagctaagcacctctgccagcagctgcaggccgagcaggccgctgccgagaaacgccaccgtgaggagctggagcagagcaagcaggccgctgggggactgcgggcagagctgctgcgggcccagcgggagcttggggagctgattcctctgcggcagaaggtggcagagcaggagcgaacagctcagcagctgcgggcagagaaggccagctatgcagagcagctgagcatgctgaagaaggcgcatggcctgctggcagaggagaaccgggggctgggtgagcgggccaaccttggccggcagtttctggaagtggagttggaccaggcccgggagaagtatgtccaagagttggcagccgtacgtgctgatgctgagacccgtctggctgaggtgcagcgagaagcacagagcactgcccgggagctggaggtgatgactgccaagtatgagggtgccaaggtcaaggtcctggaggagaggcagcggttccaggaagagaggcagaaactcactgcccaggtggaagaactgagtaagaaactggctgactctgaccaagccagcaaggtgcagcagcagaagctgaaggctgtccaggctcagggaggcgagagccagcaggaggcccagcgcctccaggcccagctgaatgaactgcaagcccagttgagccagaaggagcaggcagctgagcactataagctgcagatggagaaagccaaaacacattatgatgccaagaagcagcagaaccaagagctgcaggagcagctgcggagcctggagcagctgcagaaggaaaacaaagagctgcgagctgaagctgaacggctgggccatgagctacagcaggctgggctgaagaccaaggaggctgaacagacctgccgccaccttactgcccaggtgcgcagcctggaggcacaggttgcccatgcagaccagcagcttcgagacctgggcaaattccaggtggcaactgatgctttaaagagccgtgagccccaggctaagccccagctggacttgagtattgacagcctggatctgagctgcgaggaggggaccccactcagtatcaccagcaagctgcctcgtacccagccagacggcaccagcgtccctggagaaccagcctcacctatctcccagcgcctgccccccaaggtagaatccctggagagtctctacttcactcccatccctgctcggagtcaggcccccctggagagcagcctggactccctgggagacgtcttcctggactcgggtcgtaagacccgctccgctcgtcggcgcaccacgcagatcatcaacatcaccatgaccaagaagctagatgtggaagagccagacagcgccaactcatcgttctacagcacgcggtctgctcctgcttcccaggctagcctgcgagccacctcctctactcagtctctagctcgcctgggttctcccgattatggcaactcagccctgctcagcttgcctggctaccgccccaccactcgcagttctgctcgtcgttcccaggccggggtgtccagtggggcccctccaggaaggaacagcttctacatgggcacttgccaggatgagcctgagcagctggatgactggaaccgcattgcagagctgcagcagcgcaatcgagtgtgccccccacatctgaagacctgctatcccctggagtccaggccttccctgagcctgggcaccatcacagatgaggagatgaaaactggagacccccaagagaccctgcgccgagccagcatgcagccaatccagatagccgagggcactggcatcaccacccggcagcagcgcaaacgggtctccctagagccccaccagggccctggaactcctgagtctaagaaggccaccagctgtttcccacgccccatgactccccgagaccgacatgaagggcgcaaacagagcactactgaggcccagaagaaagcagctccagcttctactaaacaggctgaccggcgccagtcgatggccttcagcatcctcaacacacccaagaagctagggaacagccttctgcggcggggagcctcaaagaaggccctgtccaaggcttcccccaacactcgcagtggaacccgccgttctccgcgcattgccaccaccacagccagcgccgccactgctgccgccattggtgccacccctcgagccaagggcaaggcaaagcactaaagggccagtaccagtgagtggccccacctgtgtccccgatgctgacctcacctggtcctccgcctactgtccctctcagtgccttctctcagctcccaggccaacagtagccaaacccctagagacagtgatgcctgcccgcaccctggcctggtccctggtccttcactggcgccttctcggagctggcccagggggcctggagcatggacagtgtgggcgctctccctaccttgcctccttttttcttaaagcaaagtcacttctccatcacaaccagatttgaggctggttttgatggctgggtccttgggcctggccagtcttcctcttagcctctggatctagaagggaccataagaggagtaggccctggttcctgctgtcctggtggctgggcccagcaggggccctcactcttgaagtccaggactgggtctgacctggtgggagcacctgccagaggatgctctttcccaggacggatgggccctatgtctcaggagtggggttgggggacagccttcagcagcagctcacaccctaccttccccagacttgcactggggtgggatttggagtgatgggaaggtttttaagggccggggatggatcttttctaaatgttattacttgtaaataaagtctatttttctcccgtga

SEQ ID NO: 20604 - DNA, 7140 bp, Homo sapiens
  source 1..7140: mol_type = unassigned DNA
gcgctggcgcgagcccacgaagaggtacgattccggagaatcgcgaggcagagcgggagcgcgcagccaggtggaaactaattctaagccagactgctggagatcaccctgttctagtgtgtggaggcttccaccaggaggcgcattggagtgactgtctggcatcaccaagatgacactccacgccacccggggggctgcactcctctcttgggtgaacagtctacacgtggctgaccctgtggaggctgtgctgcagctccaggactgcagcatcttcatcaagatcattgacagaatccatggcactgaagagggacagcaaatcttgaagcagccggtgtcagagagactggactttgtgtgcagttttctgcagaaaaatcgaaaacatccctcttccccagaatgcctggtatctgcacagaaggtgctagagggatcagagctggaactggcgaagatgaccatgctgctcttataccactctaccatgagctccaaaagtcccagggactgggaacagtttgaatataaaattcaggctgagttggctgtcattcttaaatttgtgctggaccatgaggacgggctaaaccttaatgaggacctagagaacttcctacagaaagctcctgtgccttctacctgttctagcacattccctgaagagctctccccacctagccaccaggccaagagggagattcgcttcctagagctacagaaggttgcctcctcttccagtgggaacaactttctctcaggttctccagcttctcccatgggtgatatcctgcagaccccacagttccagatgagacggctgaagaagcagcttgctgatgagagaagtaatagggatgagctggagctggagctagctgagaaccgcaagctcctcaccgagaaggatgcacagatagccatgatgcagcagcgcattgaccgcctagccctgctgaatgagaagcaggcggccagcccactggagcccaaggagcttgaggagctgcgtgacaagaatgagagccttaccatgcggctgcatgaaaccctgaagcagtgccaggacctgaagacagagaagagccagatggatcgcaaaatcaaccagctttcggaggagaatggagacctttcctttaagctgcgggagtttgccagtcatctgcagcagctacaggatgccctcaatgagctgacggaggagcacagcaaggccactcaggagtggctagagaagcaggcccagctggagaaggagctcagcgcagccctgcaggacaagaaatgccttgaagagaagaacgaaatccttcagggaaaactttcacagctggaagaacacttgtcccagctgcaggataacccaccccaggagaagggcgaggtgctgggtgatgtcttgcagctggaaaccttgaagcaagaggcagccactcttgctgcaaacaacacacagctccaagccagggtagagatgctggagactgagcgaggccagcaggaagccaagctgcttgctgagcggggccacttcgaagaagaaaagcagcagctgtctagcctgatcactgacctgcagagctccatctccaacctcagccaggccaaggaagagctggagcaggcctcccaggctcatggggcccggttgactgcccaggtggcctctctgacctctgagctcaccacactcaatgccaccatccagcaacaggatcaagaactggctggcctgaagcagcaggccaaagagaagcaggcccagctagcacagaccctccaacagcaagaacaggcctcccagggcctccgccaccaggtggagcagctaagcagtagcctgaagcagaaggagcagcagttgaaggaggtagcggagaagcaggaggcaactaggcaggaccatgcccagcaactggccactgctgcagaggagcgagaggcctccttaagggagcgggatgcggctctcaagcagctggaggcactggagaaggagaaggctgccaagctggagattctgcagcagcaacttcaggtggctaatgaagcccgggacagtgcccagacctcagtgacacaggcccagcgggagaaggcagagctgagccggaaggtggaggaactccaggcctgtgttgagacagcccgccaggaacagcatgaggcccaggcccaggttgcagagctagagttgcagctgcggtctgagcagcaaaaagcaactgagaaagaaagggtggcccaggagaaggaccagctccaggagcagctccaggccctcaaagagtccttgaaggtcaccaagggcagccttgaagaggagaagcgcagggctgcagatgccctggaagagcagcagcgttgtatctctgagctgaaggcagagacccgaagcctggtggagcagcataagcgggaacgaaaggagctggaagaagagagggctgggcgcaaggggctggaggctcgattacagcagcttggggaggcccatcaggctgagactgaagtcctgcggcgggagctggcagaggccatggctgcccagcacacagctgagagtgagtgtgagcagctcgtcaaagaagtagctgcctggcgtgagcggtatgaggatagccagcaagaggaggcacagtatggcgccatgttccaggaacagctgatgactttgaaggaggaatgtgagaaggcccgccaggagctgcaggaggcaaaggagaaggtggcaggcatagaatcccacagcgagctccagataagccggcagcagaacgaactagctgagctccatgccaacctggccagagcactccagcaggtccaagagaaggaagtcagggcccagaagcttgcagatgacctctccactctgcaggaaaagatggctgccaccagcaaagaggtggcccgcttggagaccttggtgcgcaaggcaggtgagcagcaggaaacagcctcccgggagttagtcaaggagcctgcgagggcaggagacagacagcccgagtggctggaagagcaacagggacgccagttctgcagcacacaggcagcgctgcaggctatggagcgggaggcagagcagatgggcaatgagctggaacggctgcgggccgcgctgatggagagccaggggcagcagcaggaggagcgtgggcagcaggaaagggaggtggcgcggctgacccaggagcggggccgtgcccaggctgaccttgccctggagaaggcggccagagcagagcttgagatgcggctgcagaacgccctcaacgagcagcgtgtggagttcgctaccctgcaagaggcactggctcatgccctgacggaaaaggaaggcaaggaccaggagttggccaagcttcgtggtctggaggcagcccagataaaagagctggaggaacttcggcaaaccgtgaagcaactgaaggaacagctggctaagaaagaaaaggagcacgcatctggctcaggagcccaatctgaggctgctggcaggacagagccaacaggccccaagctggaggcactgcgggcagaggtgagcaagctggaacagcaatgccagaagcagcaggagcaggctgacagcctggaacgcagcctcgaggctgagcgggcctcccgggctgagcgggacagtgctctggagactctgcagggccagttagaggagaaggcccaggagctagggcacagtcagagtgccttagcctcggcccaacgggagttggctgccttccgcaccaaggtacaagaccacagcaaggctgaagatgagtggaaggcccaggtggcccggggccggcaagaggctgagaggaaaaatagcctcatcagcagcttggaggaggaggtgtccatcctgaatcgccaggtcctggagaaggagggggagagcaaggagttgaagcggctggtgatggccgagtcagagaagagccagaagctggaggagaggctgcgcctgctgcaggcagagacagccagcaacagtgccagagctgcagaacgcagctctgctctgcgggaggaggtgcagagcctccgggaggaggctgagaaacagcgggtggcttcagagaacctgcggcaggagctgacctcacaggctgagcgtgcggaggagctgggccaagaattgaaggcgtggcaggagaagttcttccagaaagagcaggccctctccaccctgcagctcgagcacaccagcacacaggccctggtgagtgagctgctgccagctaagcacctctgccagcagctgcaggccgagcaggccgctgccgagaaacgccaccgtgaggagctggagcagagcaagcaggccgctgggggactgcgggcagagctgctgcgggcccagcgggagcttggggagctgattcctctgcggcagaaggtggcagagcaggagcgaacagctcagcagctgcgggcagagaaggccagctatgcagagcagctgagcatgctgaagaaggcgcatggcctgctggcagaggagaaccgggggctgggtgagcgggccaaccttggccggcagtttctggaagtggagttggaccaggcccgggagaagtatgtccaagagttggcagccgtacgtgctgatgctgagacccgtctggctgaggtgcagcgagaagcacagagcactgcccgggagctggaggtgatgactgccaagtatgagggtgccaaggtcaaggtcctggaggagaggcagcggttccaggaagagaggcagaaactcactgcccaggtggaagaactgagtaagaaactggctgactctgaccaagccagcaaggtgcagcagcagaagctgaaggctgtccaggctcagggaggcgagagccagcaggaggcccagcgcctccaggcccagctgaatgaactgcaagcccagttgagccagaaggagcaggcagctgagcactataagctgcagatggagaaagccaaaacacattatgatgccaagaagcagcagaaccaagagctgcaggagcagctgcggagcctggagcagctgcagaaggaaaacaaagagctgcgagctgaagctgaacggctgggccatgagctacagcaggctgggctgaagaccaaggaggctgaacagacctgccgccaccttactgcccaggtgcgcagcctggaggcacaggttgcccatgcagaccagcagcttcgagacctgggcaaattccaggtggcaactgatgctttaaagagccgtgagccccaggctaagccccagctggacttgagtattgacagcctggatctgagctgcgaggaggggaccccactcagtatcaccagcaagctgcctcgtacccagccagacggcaccagcgtccctggagaaccagcctcacctatctcccagcgcctgccccccaaggtagaatccctggagagtctctacttcactcccatccctgctcggagtcaggcccccctggagagcagcctggactccctgggagacgtcttcctggactcgggtcgtaagacccgctccgctcgtcggcgcaccacgcagatcatcaacatcaccatgaccaagaagctagatgtggaagagccagacagcgccaactcatcgttctacagcacgcggtctgctcctgcttcccaggctagcctgcgagccacctcctctactcagtctctagctcgcctgggttctcccgattatggcaactcagccctgctcagcttgcctggctaccgccccaccactcgcagttctgctcgtcgttcccaggccggggtgtccagtggggcccctccaggaaggaacagcttctacatgggcacttgccaggatgagcctgagcagctggatgactggaaccgcattgcagagctgcagcagcgcaatcgagtgtgccccccacatctgaagacctgctatcccctggagtccaggccttccctgagcctgggcaccatcacagatgaggagatgaaaactggagacccccaagagaccctgcgccgagccagcatgcagccaatccagatagccgagggcactggcatcaccacccggcagcagcgcaaacgggtctccctagagccccaccagggccctggaactcctgagtctaagaaggccaccagctgtttcccacgccccatgactccccgagaccgacatgaagggcgcaaacagagcactactgaggcccagaagaaagcagctccagcttctactaaacaggctgaccggcgccagtcgatggccttcagcatcctcaacacacccaagaagctagggaacagccttctgcggcggggagcctcaaagaaggccctgtccaaggcttcccccaacactcgcagtggaacccgccgttctccgcgcattgccaccaccacagccagcgccgccactgctgccgccattggtgccacccctcgagccaagggcaaggcaaagcactaaagggccagtaccagtgagtggccccacctgtgtccccgatgctgacctcacctggtcctccgcctactgtccctctcagtgccttctctcagctcccaggccaacagtagccaaacccctagagacagtgatgcctgcccgcaccctggcctggtccctggtccttcactggcgccttctcggagctggcccagggggcctggagcatggacagtgtgggcgctctccctaccttgcctccttttttcttaaagcaaagtcacttctccatcacaaccagatttgaggctggttttgatggctgggtccttgggcctggccagtcttcctcttagcctctggatctagaagggaccataagaggagtaggccctggttcctgctgtcctggtggctgggcccagcaggggccctcactcttgaagtccaggactgggtctgacctggtgggagcacctgccagaggatgctctttcccaggacggatgggccctatgtctcaggagtggggttgggggacagccttcagcagcagctcacaccctaccttccccagacttgcactggggtgggatttggagtgatgggaaggtttttaagggccggggatggatcttttctaaatgttattacttgtaaataaagtctatttttctcccgtg

SEQ ID NO: 20605 - DNA, 539 bp, Homo sapiens
  source 1..539: mol_type = unassigned DNA
agagcgggagcgcgcagccaggctggagtccagtggtgcaatctcggctccctgcaacctctgcctcctgggttcaagcgattctcctgcctcagcctcctgagtagctgggattacaggcatgcaccaccatgcccagctaattttgtatttttaatagaaatggggtttcaccatgttggtcaggctgatcttgaactgccaacctcaggtggaaactaattctaagccagactgctggagatcaccctgttctagtgtgtggaggcttccaccaggaggcgcattggagtgactgtctggcatcaccaagatgacactccacgccacccggggggctgcactcctctcttgggtgaacagtctacacgtggctgaccctgtggaggctgtgctgcagctccaggactgcagcatcttcatcaagatcattgacagaatccatggcactgaagagggacagcaaatcttgaagcagccggtgtcagagagactggactttgtgtgcagttttctgcagaaaaatcgaaaacatccct

SEQ ID NO: 20606 - DNA, 583 bp, Homo sapiens
  source 1..583: mol_type = unassigned DNA
aattgtgcgctcacagcgctggcgcgagcccacgaagaggtacgattccggagaatcgcgaggcagagcgggagcgcgcagccaggtggaaactaattctaagccagactgctggagatcaccctgttctagtgtgtggaggcttccaccaggagacagggtctctctctgtcacccagactggagtgcaatggcgggatctcagctcactgcaacctccacctctcgggttcaagcgattctcctgcctcagcctccctagtagctatgattacaggcgcattggagtgactgtctggcatcaccaagatgacactccacgccacccggggggctgcactcctctcttgggtgaacagtctacacgtggctgaccctgtggaggctgtgctgcagctccaggactgcagcatcttcatcaagatcattgacagaatccatggcactgaagagggacagcaaatcttgaagcagccggtgtcagagagactggactttgtgtgcagttttctgcagaaaaatcgaaaacatccctcttccccagaatgcctggtatctgcacagaaggtgctagagggatcag

SEQ ID NO: 20607 - DNA, 7343 bp, Homo sapiens
  source 1..7343: mol_type = unassigned DNA
aagtacaggccggggtccggaagcggtgataccccttctctttcccagtggccctcaaacttccttttcccgggtccttaagcgggccccgccgacagaggccaatcagagggcagcgcgagggggcggggccatagtttaaactaattgtgcgctcacagcgctggcgcgagcccacgaagaggtacgattccggagaatcgcgaggcagagcgggagcgcgcagccaggtggaaactaattctaagccagactgctggagatcaccctgttctagtgtgtggaggcttccaccaggaggcgcattggagtgactgtctggcatcaccaagatgacactccacgccacccggggggctgcactcctctcttgggtgaacagtctacacgtggctgaccctgtggaggctgtgctgcagctccaggactgcagcatcttcatcaagatcattgacagaatccatggcactgaagagggacagcaaatcttgaagcagccggtgtcagagagactggactttgtgtgcagttttctgcagaaaaatcgaaaacatccctcttccccagaatgcctggtatctgcacagaaggtgctagagggatcagagctggaactggcgaagatgaccatgctgctcttataccactctaccatgagctccaaaagtcccagggactgggaacagtttgaatataaaattcaggctgagttggctgtcattcttaaatttgtgctggaccatgaggacgggctaaaccttaatgaggacctagagaacttcctacagaaagctcctgtgccttctacctgttctagcacattccctgaagagctctccccacctagccaccaggccaagagggagattcgcttcctagagctacagaaggttgcctcctcttccagtgggaacaactttctctcaggttctccagcttctcccatgggtgatatcctgcagaccccacagttccagatgagacggctgaagaagcagcttgctgatgagagaagtaatagggatgagctggagctggagctagctgagaaccgcaagctcctcaccgagaaggatgcacagatagccatgatgcagcagcgcattgaccgcctagccctgctgaatgagaagcaggcggccagcccactggagcccaaggagcttgaggagctgcgtgacaagaatgagagccttaccatgcggctgcatgaaaccctgaagcagtgccaggacctgaagacagagaagagccagatggatcgcaaaatcaaccagctttcggaggagaatggagacctttcctttaagctgcgggagtttgccagtcatctgcagcagctacaggatgccctcaatgagctgacggaggagcacagcaaggccactcaggagtggctagagaagcaggcccagctggagaaggagctcagcgcagccctgcaggacaagaaatgccttgaagagaagaacgaaatccttcagggaaaactttcacagctggaagaacacttgtcccagctgcaggataacccaccccaggagaagggcgaggtgctgggtgatgtcttgcagctggaaaccttgaagcaagaggcagccactcttgctgcaaacaacacacagctccaagccagggtagagatgctggagactgagcgaggccagcaggaagccaagctgcttgctgagcggggccacttcgaagaagaaaagcagcagctgtctagcctgatcactgacctgcagagctccatctccaacctcagccaggccaaggaagagctggagcaggcctcccaggctcatggggcccggttgactgcccaggtggcctctctgacctctgagctcaccacactcaatgccaccatccagcaacaggatcaagaactggctggcctgaagcagcaggccaaagagaagcaggcccagctagcacagaccctccaacagcaagaacaggcctcccagggcctccgccaccaggtggagcagctaagcagtagcctgaagcagaaggagcagcagttgaaggaggtagcggagaagcaggaggcaactaggcaggaccatgcccagcaactggccactgctgcagaggagcgagaggcctccttaagggagcgggatgcggctctcaagcagctggaggcactggagaaggagaaggctgccaagctggagattctgcagcagcaacttcaggtggctaatgaagcccgggacagtgcccagacctcagtgacacaggcccagcgggagaaggcagagctgagccggaaggtggaggaactccaggcctgtgttgagacagcccgccaggaacagcatgaggcccaggcccaggttgcagagctagagttgcagctgcggtctgagcagcaaaaagcaactgagaaagaaagggtggcccaggagaaggaccagctccaggagcagctccaggccctcaaagagtccttgaaggtcaccaagggcagccttgaagaggagaagcgcagggctgcagatgccctggaagagcagcagcgttgtatctctgagctgaaggcagagacccgaagcctggtggagcagcataagcgggaacgaaaggagctggaagaagagagggctgggcgcaaggggctggaggctcgattacagcagcttggggaggcccatcaggctgagactgaagtcctgcggcgggagctggcagaggccatggctgcccagcacacagctgagagtgagtgtgagcagctcgtcaaagaagtagctgcctggcgtgagcggtatgaggatagccagcaagaggaggcacagtatggcgccatgttccaggaacagctgatgactttgaaggaggaatgtgagaaggcccgccaggagctgcaggaggcaaaggagaaggtggcaggcatagaatcccacagcgagctccagataagccggcagcagaacgaactagctgagctccatgccaacctggccagagcactccagcaggtccaagagaaggaagtcagggcccagaagcttgcagatgacctctccactctgcaggaaaagatggctgccaccagcaaagaggtggcccgcttggagaccttggtgcgcaaggcaggtgagcagcaggaaacagcctcccgggagttagtcaaggagcctgcgagggcaggagacagacagcccgagtggctggaagagcaacagggacgccagttctgcagcacacaggcagcgctgcaggctatggagcgggaggcagagcagatgggcaatgagctggaacggctgcgggccgcgctgatggagagccaggggcagcagcaggaggagcgtgggcagcaggaaagggaggtggcgcggctgacccaggagcggggccgtgcccaggctgaccttgccctggagaaggcggccagagcagagcttgagatgcggctgcagaacgccctcaacgagcagcgtgtggagttcgctaccctgcaagaggcactggctcatgccctgacggaaaaggaaggcaaggaccaggagttggccaagcttcgtggtctggaggcagcccagataaaagagctggaggaacttcggcaaaccgtgaagcaactgaaggaacagctggctaagaaagaaaaggagcacgcatctggctcaggagcccaatctgaggctgctggcaggacagagccaacaggccccaagctggaggcactgcgggcagaggtgagcaagctggaacagcaatgccagaagcagcaggagcaggctgacagcctggaacgcagcctcgaggctgagcgggcctcccgggctgagcgggacagtgctctggagactctgcagggccagttagaggagaaggcccaggagctagggcacagtcagagtgccttagcctcggcccaacgggagttggctgccttccgcaccaaggtacaagaccacagcaaggctgaagatgagtggaaggcccaggtggcccggggccggcaagaggctgagaggaaaaatagcctcatcagcagcttggaggaggaggtgtccatcctgaatcgccaggtcctggagaaggagggggagagcaaggagttgaagcggctggtgatggccgagtcagagaagagccagaagctggaggagaggctgcgcctgctgcaggcagagacagccagcaacagtgccagagctgcagaacgcagctctgctctgcgggaggaggtgcagagcctccgggaggaggctgagaaacagcgggtggcttcagagaacctgcggcaggagctgacctcacaggctgagcgtgcggaggagctgggccaagaattgaaggcgtggcaggagaagttcttccagaaagagcaggccctctccaccctgcagctcgagcacaccagcacacaggccctggtgagtgagctgctgccagctaagcacctctgccagcagctgcaggccgagcaggccgctgccgagaaacgccaccgtgaggagctggagcagagcaagcaggccgctgggggactgcgggcagagctgctgcgggcccagcgggagcttggggagctgattcctctgcggcagaaggtggcagagcaggagcgaacagctcagcagctgcgggcagagaaggccagctatgcagagcagctgagcatgctgaagaaggcgcatggcctgctggcagaggagaaccgggggctgggtgagcgggccaaccttggccggcagtttctggaagtggagttggaccaggcccgggagaagtatgtccaagagttggcagccgtacgtgctgatgctgagacccgtctggctgaggtgcagcgagaagcacagagcactgcccgggagctggaggtgatgactgccaagtatgagggtgccaaggtcaaggtcctggaggagaggcagcggttccaggaagagaggcagaaactcactgcccaggtggagcagctagaggtatttcagagagagcaaactaagcaggtggaagaactgagtaagaaactggctgactctgaccaagccagcaaggtgcagcagcagaagctgaaggctgtccaggctcagggaggcgagagccagcaggaggcccagcgcctccaggcccagctgaatgaactgcaagcccagttgagccagaaggagcaggcagctgagcactataagctgcagatggagaaagccaaaacacattatgatgccaagaagcagcagaaccaagagctgcaggagcagctgcggagcctggagcagctgcagaaggaaaacaaagagctgcgagctgaagctgaacggctgggccatgagctacagcaggctgggctgaagaccaaggaggctgaacagacctgccgccaccttactgcccaggtgcgcagcctggaggcacaggttgcccatgcagaccagcagcttcgagacctgggcaaattccaggtggcaactgatgctttaaagagccgtgagccccaggctaagccccagctggacttgagtattgacagcctggatctgagctgcgaggaggggaccccactcagtatcaccagcaagctgcctcgtacccagccagacggcaccagcgtccctggagaaccagcctcacctatctcccagcgcctgccccccaaggtagaatccctggagagtctctacttcactcccatccctgctcggagtcaggcccccctggagagcagcctggactccctgggagacgtcttcctggactcgggtcgtaagacccgctccgctcgtcggcgcaccacgcagatcatcaacatcaccatgaccaagaagctagatgtggaagagccagacagcgccaactcatcgttctacagcacgcggtctgctcctgcttcccaggctagcctgcgagccacctcctctactcagtctctagctcgcctgggttctcccgattatggcaactcagccctgctcagcttgcctggctaccgccccaccactcgcagttctgctcgtcgttcccaggccggggtgtccagtggggcccctccaggaaggaacagcttctacatgggcacttgccaggatgagcctgagcagctggatgactggaaccgcattgcagagctgcagcagcgcaatcgagtgtgccccccacatctgaagacctgctatcccctggagtccaggccttccctgagcctgggcaccatcacagatgaggagatgaaaactggagacccccaagagaccctgcgccgagccagcatgcagccaatccagatagccgagggcactggcatcaccacccggcagcagcgcaaacgggtctccctagagccccaccagggccctggaactcctgagtctaagaaggccaccagctgtttcccacgccccatgactccccgagaccgacatgaagggcgcaaacagagcactactgaggcccagaagaaagcagctccagcttctactaaacaggctgaccggcgccagtcgatggccttcagcatcctcaacacacccaagaagctagggaacagccttctgcggcggggagcctcaaagaaggccctgtccaaggcttcccccaacactcgcagtggaacccgccgttctccgcgcattgccaccaccacagccagcgccgccactgctgccgccattggtgccacccctcgagccaagggcaaggcaaagcactaaagggccagtaccagtgagtggccccacctgtgtccccgatgctgacctcacctggtcctccgcctactgtccctctcagtgccttctctcagctcccaggccaacagtagccaaacccctagagacagtgatgcctgcccgcaccctggcctggtccctggtccttcactggcgccttctcggagctggcccagggggcctggagcatggacagtgtgggcgctctccctaccttgcctccttttttcttaaagcaaagtcacttctccatcacaaccagatttgaggctggttttgatggctgggtccttgggcctggccagtcttcctcttagcctctggatctagaagggaccataagaggagtaggccctggttcctgctgtcctggtggctgggcccagcaggggccctcactcttgaagtccaggactgggtctgacctggtgggagcacctgccagaggatgctctttcccaggacggatgggccctatgtctcaggagtggggttgggggacagccttcagcagcagctcacaccctaccttccccagacttgcactggggtgggatttggagtgatgggaaggtttttaagggccggggatggatcttttctaaatgttattacttgtaaataaagtctatttttctcccgtga

SEQ ID NO: 20608 - DNA, 606 bp, Homo sapiens
  source 1..606: mol_type = unassigned DNA
tcttcctgctctgccactgactcaccccgttgacctggcctgcatggcttcccttctgcttgctgtctgatccacagaacgctggggttgcccaggataatgtgaggctgagctcactaagagtgggtgggttaggggaatgaataatcattcctgtccctttgccccttccctaggtggaaactaattctaagccagactgctggagatcaccctgttctagtgtgtggaggcttccaccaggaggcgcattggagtgactgtctggcatcaccaagatgacactccacgccacccggggggctgcactcctctcttgggtgaacagtctacacgtggctgaccctgtggaggctgtgctgcagctccaggactgcagcatcttcatcaagatcattgacagaatccatggcactgaagagggacagcaaatcttgaagcagccggtgtcagagagactggactttgtgtgcagttttctgcagaaaaatcgaaaacatccctcttccccagaatgcctggtatctgcacagaaggtgctagagggatcagagctggaactggcgaagatgaccatgctgctcttataccactctaccatgagct

SEQ ID NO: 20609 - DNA, 582 bp, Homo sapiens
  source 1..582: mol_type = unassigned DNA
agccaggtaaccggcgcgggcccgcgtttggcgtgcggcctgggcacccctgcgggtgctcaggcctaaaaggggtgctggagaggccgctgcgagcggaaggcctcctccataaccgagtccgaaagggcagaatctatgggggtggaaactaattctaagccagactgctggagatcaccctgttctagtgtgtggaggcttccaccaggaggaaactgcagctgaggagccattgcagtcccatctccagaagacccccagaaagagttggaagagttcttcaggctgtggcagccactgcccaccaacacacccaaatcaatcaagatgaatcccaggtggtgaggctgaagcagatggtttggcgcattggagtgactgtctggcatcaccaagatgacactccacgccacccggggggctgcactcctctcttgggtgaacagtctacacgtggctgaccctgtggaggctgtgctgcagctccaggactgcagcatcttcatcaagatcattgacagaatccatggcactgaagagggacagcaaatcttgaagcagccggtgtcagagagactg

SEQ ID NO: 20610 - DNA, 582 bp, Homo sapiens
  source 1..582: mol_type = unassigned DNA
agtgactcttcctgctctgccactgactcaccccgttgacctggcctgcatggcttcccttctgcttgctgtctgatccacagaacgctggggttgcccaggataatgtgaggctgagctcactaagagtgggtgggttaggggaatgaataatcattcctgtccctttgccccttccctaggtggaaactaattctaagccagactgctggagatcaccctgttctagtgtgtggaggcttccaccaggagacaggttctcactatgttgcccacgctggtctcaaattccttggctcaagtgatcctcccatcttggcctccaaaagtgccgggattacaagcatgagcaactgtgcctggccctgaaaaggcgcattggagtgactgtctggcatcaccaagatgacactccacgccacccggggggctgcactcctctcttgggtgaacagtctacacgtggctgaccctgtggaggctgtgctgcagctccaggactgcagcatcttcatcaagatcattgacagaatccatggcactgaagagggacagcaaatcttgaagcagccggtgtcagag

SEQ ID NO: 20611 - DNA, 576 bp, Homo sapiens
  source 1..576: mol_type = unassigned DNA
agatgtcagcatgtttttgttcagagaaggaaagcgtgtttgcctgcacgttgagctgtagagacagctcaggagagggcttcaccatttctgcgtgaggccgtgggcgcattggagtgactgtctggcatcaccaagatgacactccacgccacccggggggctgcactcctctcttgggtgaacagtctacacgtggctgaccctgtggaggctgtgctgcagctccaggactgcagcatcttcatcaagatcattgacagaatccatggcactgaagagggacagcaaatcttgaagcagccggtgtcagagagactggactttgtgtgcagttttctgcagaaaaatcgaaaacatccctcttccccagaatgcctggtatctgcacagaaggtgctagagggatcagagctggaactggcgaagatgaccatgctgctcttataccactctaccatgagctccaaaagtcccagggactgggaacagtttgaatataaaattcaggctgagttggctgtcattcttaaatttgtgctggaccatgaggacgggctaaaccttaatgaggac

SEQ ID NO: 20612 - DNA, 7194 bp, Homo sapiens
  source 1..7194: mol_type = unassigned DNA
gcgctggcgcgagcccacgaagaggtacgattccggagaatcgcgaggcagagcgggagcgcgcagccaggtggaaactaattctaagccagactgctggagatcaccctgttctagtgtgtggaggcttccaccaggaggcgcattggagtgactgtctggcatcaccaagatgacactccacgccacccggggggctgcactcctctcttgggtgaacagtctacacgtggctgaccctgtggaggctgtgctgcagctccaggactgcagcatcttcatcaagatcattgacagaatccatggcactgaagagggacagcaaatcttgaagcagccggtgtcagagagactggactttgtgtgcagttttctgcagaaaaatcgaaaacatccctcttccccagaatgcctggtatctgcacagaaggtgctagagggatcagagctggaactggcgaagatgaccatgctgctcttataccactctaccatgagctccaaaagtcccagggactgggaacagtttgaatataaaattcaggctgagttggctgtcattcttaaatttgtgctggaccatgaggacgggctaaaccttaatgaggacctagagaacttcctacagaaagctcctgtgccttctacctgttctagcacattccctgaagagctctccccacctagccaccaggccaagagggagattcgcttcctagagctacagaaggttgcctcctcttccagtgggaacaactttctctcaggttctccagcttctcccatgggtgatatcctgcagaccccacagttccagatgagacggctgaagaagcagcttgctgatgagagaagtaatagggatgagctggagctggagctagctgagaaccgcaagctcctcaccgagaaggatgcacagatagccatgatgcagcagcgcattgaccgcctagccctgctgaatgagaagcaggcggccagcccactggagcccaaggagcttgaggagctgcgtgacaagaatgagagccttaccatgcggctgcatgaaaccctgaagcagtgccaggacctgaagacagagaagagccagatggatcgcaaaatcaaccagctttcggaggagaatggagacctttcctttaagctgcgggagtttgccagtcatctgcagcagctacaggatgccctcaatgagctgacggaggagcacagcaaggccactcaggagtggctagagaagcaggcccagctggagaaggagctcagcgcagccctgcaggacaagaaatgccttgaagagaagaacgaaatccttcagggaaaactttcacagctggaagaacacttgtcccagctgcaggataacccaccccaggagaagggcgaggtgctgggtgatgtcttgcagctggaaaccttgaagcaagaggcagccactcttgctgcaaacaacacacagctccaagccagggtagagatgctggagactgagcgaggccagcaggaagccaagctgcttgctgagcggggccacttcgaagaagaaaagcagcagctgtctagcctgatcactgacctgcagagctccatctccaacctcagccaggccaaggaagagctggagcaggcctcccaggctcatggggcccggttgactgcccaggtggcctctctgacctctgagctcaccacactcaatgccaccatccagcaacaggatcaagaactggctggcctgaagcagcaggccaaagagaagcaggcccagctagcacagaccctccaacagcaagaacaggcctcccagggcctccgccaccaggtggagcagctaagcagtagcctgaagcagaaggagcagcagttgaaggaggtagcggagaagcaggaggcaactaggcaggaccatgcccagcaactggccactgctgcagaggagcgagaggcctccttaagggagcgggatgcggctctcaagcagctggaggcactggagaaggagaaggctgccaagctggagattctgcagcagcaacttcaggtggctaatgaagcccgggacagtgcccagacctcagtgacacaggcccagcgggagaaggcagagctgagccggaaggtggaggaactccaggcctgtgttgagacagcccgccaggaacagcatgaggcccaggcccaggttgcagagctagagttgcagctgcggtctgagcagcaaaaagcaactgagaaagaaagggtggcccaggagaaggaccagctccaggagcagctccaggccctcaaagagtccttgaaggtcaccaagggcagccttgaagaggagaagcgcagggctgcagatgccctggaagagcagcagcgttgtatctctgagctgaaggcagagacccgaagcctggtggagcagcataagcgggaacgaaaggagctggaagaagagagggctgggcgcaaggggctggaggctcgattacagcagcttggggaggcccatcaggctgagactgaagtcctgcggcgggagctggcagaggccatggctgcccagcacacagctgagagtgagtgtgagcagctcgtcaaagaagtagctgcctggcgtgagcggtatgaggatagccagcaagaggaggcacagtatggcgccatgttccaggaacagctgatgactttgaaggaggaatgtgagaaggcccgccaggagctgcaggaggcaaaggagaaggtggcaggcatagaatcccacagcgagctccagataagccggcagcagaacgaactagctgagctccatgccaacctggccagagcactccagcaggtccaagagaaggaagtcagggcccagaagcttgcagatgacctctccactctgcaggaaaagatggctgccaccagcaaagaggtggcccgcttggagaccttggtgcgcaaggcaggtgagcagcaggaaacagcctcccgggagttagtcaaggagcctgcgagggcaggagacagacagcccgagtggctggaagagcaacagggacgccagttctgcagcacacaggcagcgctgcaggctatggagcgggaggcagagcagatgggcaatgagctggaacggctgcgggccgcgctgatggagagccaggggcagcagcaggaggagcgtgggcagcaggaaagggaggtggcgcggctgacccaggagcggggccgtgcccaggctgaccttgccctggagaaggcggccagagcagagcttgagatgcggctgcagaacgccctcaacgagcagcgtgtggagttcgctaccctgcaagaggcactggctcatgccctgacggaaaaggaaggcaaggaccaggagttggccaagcttcgtggtctggaggcagcccagataaaagagctggaggaacttcggcaaaccgtgaagcaactgaaggaacagctggctaagaaagaaaaggagcacgcatctggctcaggagcccaatctgaggctgctggcaggacagagccaacaggccccaagctggaggcactgcgggcagaggtgagcaagctggaacagcaatgccagaagcagcaggagcaggctgacagcctggaacgcagcctcgaggctgagcgggcctcccgggctgagcgggacagtgctctggagactctgcagggccagttagaggagaaggcccaggagctagggcacagtcagagtgccttagcctcggcccaacgggagttggctgccttccgcaccaaggtacaagaccacagcaaggctgaagatgagtggaaggcccaggtggcccggggccggcaagaggctgagaggaaaaatagcctcatcagcagcttggaggaggaggtgtccatcctgaatcgccaggtcctggagaaggagggggagagcaaggagttgaagcggctggtgatggccgagtcagagaagagccagaagctggaggagaggctgcgcctgctgcaggcagagacagccagcaacagtgccagagctgcagaacgcagctctgctctgcgggaggaggtgcagagcctccgggaggaggctgagaaacagcgggtggcttcagagaacctgcggcaggagctgacctcacaggctgagcgtgcggaggagctgggccaagaattgaaggcgtggcaggagaagttcttccagaaagagcaggccctctccaccctgcagctcgagcacaccagcacacaggccctggtgagtgagctgctgccagctaagcacctctgccagcagctgcaggccgagcaggccgctgccgagaaacgccaccgtgaggagctggagcagagcaagcaggccgctgggggactgcgggcagagctgctgcgggcccagcgggagcttggggagctgattcctctgcggcagaaggtggcagagcaggagcgaacagctcagcagctgcgggcagagaaggccagctatgcagagcagctgagcatgctgaagaaggcgcatggcctgctggcagaggagaaccgggggctgggtgagcgggccaaccttggccggcagtttctggaagtggagttggaccaggcccgggagaagtatgtccaagagttggcagccgtacgtgctgatgctgagacccgtctggctgaggtgcagcgagaagcacagagcactgcccgggagctggaggtgatgactgccaagtatgagggtgccaaggtcaaggtcctggaggagaggcagcggttccaggaagagaggcagaaactcactgcccaggtggaagaactgagtaagaaactggctgactctgaccaagccagcaaggtgcagcagcagaagctgaaggctgtccaggctcagggaggcgagagccagcaggaggcccagcgcctccaggcccagctgaatgaactgcaagcccagttgagccagaaggagcaggcagctgagcactataagctgcagatggagaaagccaaaacacattatgatgccaagaagcagcagaaccaagagctgcaggagcagctgcggagcctggagcagctgcagaaggaaaacaaagagctgcgagctgaagctgaacggctgggccatgagctacagcaggctgggctgaagaccaaggaggctgaacagacctgccgccaccttactgcccaggtgcgcagcctggaggcacaggttgcccatgcagaccagcagcttcgagacctgggcaaattccaggtggcaactgatgctttaaagagccgtgagccccaggctaagccccagctggacttgagtattgacagcctggatctgagctgcgaggaggggaccccactcagtatcaccagacataaagcactcatgacaattatacctgatttgtcccccaacaaccctctgagcaagctgcctcgtacccagccagacggcaccagcgtccctggagaaccagcctcacctatctcccagcgcctgccccccaaggtagaatccctggagagtctctacttcactcccatccctgctcggagtcaggcccccctggagagcagcctggactccctgggagacgtcttcctggactcgggtcgtaagacccgctccgctcgtcggcgcaccacgcagatcatcaacatcaccatgaccaagaagctagatgtggaagagccagacagcgccaactcatcgttctacagcacgcggtctgctcctgcttcccaggctagcctgcgagccacctcctctactcagtctctagctcgcctgggttctcccgattatggcaactcagccctgctcagcttgcctggctaccgccccaccactcgcagttctgctcgtcgttcccaggccggggtgtccagtggggcccctccaggaaggaacagcttctacatgggcacttgccaggatgagcctgagcagctggatgactggaaccgcattgcagagctgcagcagcgcaatcgagtgtgccccccacatctgaagacctgctatcccctggagtccaggccttccctgagcctgggcaccatcacagatgaggagatgaaaactggagacccccaagagaccctgcgccgagccagcatgcagccaatccagatagccgagggcactggcatcaccacccggcagcagcgcaaacgggtctccctagagccccaccagggccctggaactcctgagtctaagaaggccaccagctgtttcccacgccccatgactccccgagaccgacatgaagggcgcaaacagagcactactgaggcccagaagaaagcagctccagcttctactaaacaggctgaccggcgccagtcgatggccttcagcatcctcaacacacccaagaagctagggaacagccttctgcggcggggagcctcaaagaaggccctgtccaaggcttcccccaacactcgcagtggaacccgccgttctccgcgcattgccaccaccacagccagcgccgccactgctgccgccattggtgccacccctcgagccaagggcaaggcaaagcactaaagggccagtaccagtgagtggccccacctgtgtccccgatgctgacctcacctggtcctccgcctactgtccctctcagtgccttctctcagctcccaggccaacagtagccaaacccctagagacagtgatgcctgcccgcaccctggcctggtccctggtccttcactggcgccttctcggagctggcccagggggcctggagcatggacagtgtgggcgctctccctaccttgcctccttttttcttaaagcaaagtcacttctccatcacaaccagatttgaggctggttttgatggctgggtccttgggcctggccagtcttcctcttagcctctggatctagaagggaccataagaggagtaggccctggttcctgctgtcctggtggctgggcccagcaggggccctcactcttgaagtccaggactgggtctgacctggtgggagcacctgccagaggatgctctttcccaggacggatgggccctatgtctcaggagtggggttgggggacagccttcagcagcagctcacaccctaccttccccagacttgcactggggtgggatttggagtgatgggaaggtttttaagggccggggatggatcttttctaaatgttattacttgtaaataaagtctatttttctcccgtg

SEQ ID NO: 20613 - DNA, 2331 bp, Homo sapiens
  source 1..2331: mol_type = unassigned DNA
cgggagcgcgcagccaggtaaccggcgcgggcccgcgtttggcgtgcggcctgggcacccctgcgggtgctcaggcctaaaaggggtgctggagaggccgctgcgagcggaaggcctcctccataaccgagtccgaaagggcagaatctatgggggtggaaactaattctaagccagactgctggagatcaccctgttctagtgtgtggaggcttccaccaggaggcgcattggagtgactgtctggcatcaccaagatgacactccacgccacccggggggctgcactcctctcttgggtgaacagtctacacgtggctgaccctgtggaggctgtgctgcagctccaggactgcagcatcttcatcaagatcattgacagaatccatggcactgaagagggacagcaaatcttgaagcagccggtgtcagagagactggactttgtgtgcagttttctgcagaaaaatcgaaaacatccctcttccccagaatgcctggtatctgcacagaaggtgctagagggatcagagctggaactggcgaagatgaccatgctgctcttataccactctaccatgagctccaaaagtcccagggactgggaacagtttgaatataaaattcaggctgagttggctgtcattcttaaatttgtgctggaccatgaggacgggctaaaccttaatgaggacctagagaacttcctacagaaagctcctgtgccttctacctgttctagcacattccctgaagagctctccccacctagccaccaggccaagagggagattcgcttcctagagctacagaaggttgcctcctcttccagtgggaacaactttctctcaggttctccagcttctcccatgggtgatatcctgcagaccccacagttccagatgagacggctgaagaagcagcttgctgatgagagaagtaatagggatgagctggagctggagctagctgagaaccgcaagctcctcaccgagaaggatgcacagatagccatgatgcagcagcgcattgaccgcctagccctgctgaatgagaagcaggcggccagcccactggagcccaaggagcttgaggagctgcgtgacaagaatgagagccttaccatgcggctgcatgaaaccctgaagcagtgccaggacctgaagacagagaagagccagatggatcgcaaaatcaaccagctttcggaggagaatggagacctttcctttaagctgcgggagtttgccagtcatctgcagcagctacaggatgccctcaatgagctgacggaggagcacagcaaggccactcaggagtggctagagaagcaggcccagctggagaaggagctcagcgcagccctgcaggacaagaaatgccttgaagagaagaacgaaatccttcagggaaaactttcacagctggaagaacacttgtcccagctgcaggataacccaccccaggagaagggcgaggtgctgggtgatgtcttgcagctggaaaccttgaagcaagaggcagccactcttgctgcaaacaacacacagctccaagccagggtagagatgctggagactgagcgaggccagcaggaagccaagctgcttgctgagcggggccacttcgaagaagaaaagcagcagctgtctagcctgatcactgacctgcagagctccatctccaacctcagccaggccaaggaagagctggagcaggcctcccaggctcatggggcccggttgactgcccaggtggcctctctgacctctgagctcaccacactcaatgccaccatccagcaacaggatcaagaactggctggcctgaagcagcaggccaaagagaagcaggcccagctagcacagaccctccaacagcaagaacaggcctcccagggcctccgccaccaggtggagcagctaagcagtagcctgaagcagaaggagcagcagttgaaggaggtagcggagaagcaggaggcaactaggcaggaccatgcccagcaactggccactgctgcagaggagcgagaggcctccttaagggagcgggatgcggctctcaagcagctggaggcactggagaaggagaaggctgccaagctggagattctgcagcagcaacttcaggtggctaatgaagcccgggacagtgcccagacctcagtgacacaggcccagcgggagaaggcagagctgagccggaaggtggaggaactccaggcctgtgttgagacagcccgccaggaacagcatgaggcccaggcccaggttgcagagctagagttgcagctgcggtctgagcagcaaaaagcaactgagaaagaaa

SEQ ID NO: 20614 - DNA, 582 bp, Homo sapiens
  source 1..582: mol_type = unassigned DNA
ggatttagtgggtggccgtgtcccagagcagggcaggcggtgcccatggaaggtggcagggcgctttgtgtgcgcattggagtgactgtctggcatcaccaagatgacactccacgccacccggggggctgcactcctctcttgggtgaacagtctacacgtggctgaccctgtggaggctgtgctgcagctccaggactgcagcatcttcatcaagatcattgacagaatccatggcactgaagagggacagcaaatcttgaagcagccggtgtcagagagactggactttgtgtgcagttttctgcagaaaaatcgaaaacatccctcttccccagaatgcctggtatctgcacagaaggtgctagagggatcagagctggaactggcgaagatgaccatgctgctcttataccactctaccatgagctccaaaagtcccagggactgggaacagtttgaatataaaattcaggctgagttggctgtcattcttaaatttgtgctggaccatgaggacgggctaaaccttaatgaggacctagagaacttcctacagaaagctcctgtgccttctacctg

SEQ ID NO: 20615 - DNA, 589 bp, Homo sapiens
  source 1..589: mol_type = unassigned DNA
atagtttaaactaattgtgcgctcacagcgctggcgcgagcccacgaagaggtacgattccggagaatcgcgaggcagagcgggagcgcgcagccaggtggaaactaattctaagccagactgctggagatcaccctgttctagtgtgtggaggcttccaccaggagctgtggcagaagcagtgtgaacaatgaatgcagaaatgctttgtatacatgaagacctatactgatgagaaagatagaggatgtagctgagatgtgctggagagagcactggatttagaagacatctctttgagttctggctctgcagccttaccagtcgaccttgaggcaggcgcattggagtgactgtctggcatcaccaagatgacactccacgccacccggggggctgcactcctctcttgggtgaacagtctacacgtggctgaccctgtggaggctgtgctgcagctccaggactgcagcatcttcatcaagatcattgacagaatccatggcactgaagagggacagcaaatcttgaagcagccggtgtcagagagactggactttgtgtgcagttttctgcagaaaaatcgaaa

SEQ ID NO: 20616 - DNA, 583 bp, Homo sapiens
  source 1..583: mol_type = unassigned DNA
gtgcggcctgggcacccctgcgggtgctcaggcctaaaaggggtgctggagaggccgctgcgagcggaaggcctcctccataaccgagtccgaaagggcagaatctatgggggtggaaactaattctaagccagactgctggagatcaccctgttctagtgtgtggaggcttccaccaggagacaggttctcactatgttgcccacgctggtctcaaattccttggctcaagtgatcctcccatcttggcctccaaaagtgccgggattacaagcatgagcaactgtgcctggccctgaaaaggcgcattggagtgactgtctggcatcaccaagatgacactccacgccacccggggggctgcactcctctcttgggtgaacagtctacacgtggctgaccctgtggaggctgtgctgcagctccaggactgcagcatcttcatcaagatcattgacagaatccatggcactgaagagggacagcaaatcttgaagcagccggtgtcagagagactggactttgtgtgcagttttctgcagaaaaatcgaaaacatccctcttccccagaatgcctggtatc

SEQ ID NO: 20617 - DNA, 2766 bp, Homo sapiens
  source 1..2766: mol_type = unassigned DNA
gcacttctggctgtcagccaggaagatcgctcctgccaggcagactgagaagaaaaccaacaacttttcttttgtgtgtggggttactttccactggcccccccttcctcctctcctttcaagatttaaatgctaatggcggattaaaacctgtagatacgtttggctttaggagtctggcgcattggagtgactgtctggcatcaccaagatgacactccacgccacccggggggctgcactcctctcttgggtgaacagtctacacgtggctgaccctgtggaggctgtgctgcagctccaggactgcagcatcttcatcaagatcattgacagaatccatggcactgaagagggacagcaaatcttgaagcagccggtgtcagagagactggactttgtgtgcagttttctgcagaaaaatcgaaaacatccctcttccccagaatgcctggtatctgcacagaaggtgctagagggatcagagctggaactggcgaagatgaccatgctgctcttataccactctaccatgagctccaaaagtcccagggactgggaacagtttgaatataaaattcaggctgagttggctgtcattcttaaatttgtgctggaccatgaggacgggctaaaccttaatgaggacctagagaacttcctacagaaagctcctgtgccttctacctgttctagcacattccctgaagagctctccccacctagccaccaggccaagagggagattcgcttcctagagctacagaaggttgcctcctcttccagtgggaacaactttctctcaggttctccagcttctcccatgggtgatatcctgcagaccccacagttccagatgagacggctgaagaagcagcttgctgatgagagaagtaatagggatgagctggagctggagctagctgagaaccgcaagctcctcaccgagaaggatgcacagatagccatgatgcagcagcgcattgaccgcctagccctgctgaatgagaagcaggcggccagcccactggagcccaaggagcttgaggagctgcgtgacaagaatgagagccttaccatgcggctgcatgaaaccctgaagcagtgccaggacctgaagacagagaagagccagatggatcgcaaaatcaaccagctttcggaggagaatggagacctttcctttaagctgcgggagtttgccagtcatctgcagcagctacaggatgccctcaatgagctgacggaggagcacagcaaggccactcaggagtggctagagaagcaggcccagctggagaaggagctcagcgcagccctgcaggacaagaaatgccttgaagagaagaacgaaatccttcagggaaaactttcacagctggaagaacacttgtcccagctgcaggataacccaccccaggagaagggcgaggtgctgggtgatgtcttgcagctggaaaccttgaagcaagaggcagccactcttgctgcaaacaacacacagctccaagccagggtagagatgctggagactgagcgaggccagcaggaagccaagctgcttgctgagcggggccacttcgaagaagaaaagcagcagctgtctagcctgatcactgacctgcagagctccatctccaacctcagccaggccaaggaagagctggagcaggcctcccaggctcatggggcccggttgactgcccaggtggcctctctgacctctgagctcaccacactcaatgccaccatccagcaacaggatcaagaactggctggcctgaagcagcaggccaaagagaagcaggcccagctagcacagaccctccaacagcaagaacaggcctcccagggcctccgccaccaggtggagcagctaagcagtagcctgaagcagaaggagcagcagttgaaggaggtagcggagaagcaggaggcaactaggcaggaccatgcccagcaactggccactgctgcagaggagcgagaggcctccttaagggagcgggatgcggctctcaagcagctggaggcactggagaaggagaaggctgccaagctggagattctgcagcagcaacttcaggtggctaatgaagcccgggacagtgcccagacctcagtgacacaggcccagcgggagaaggcagagctgagccggaaggtggaggaactccaggcctgtgttgagacagcccgccaggaacagcatgaggcccaggcccaggttgcagagctagagttgcagctgcggtctgagcagcaaaaagcaactgagaaagaaagggtggcccaggagaaggaccagctccaggagcagctccaggccctcaaagagtccttgaaggtcaccaagggcagccttgaagaggagaagcgcagggctgcagatgccctggaagagcagcagcgttgtatctctgagctgaaggcagagacccgaagcctggtggagcagcataagcgggaacgaaaggagctggaagaagagagggctgggcgcaaggggctggaggctcgattacagcagcttggggaggcccatcaggctgagactgaagtcctgcggcgggagctggcagaggccatggctgcccagcacacagctgagagtgagtgtgagcagctcgtcaaagaagtagctgcctggcgtgagcggtatgaggatagccagcaagaggaggcacagtatggcgccatgttccaggaacagctgatgactttgaaggaggaatgtgagaaggcccgccaggagctgcaggaggc

SEQ ID NO: 20618 - DNA, 874 bp, Homo sapiens
  source 1..874: mol_type = unassigned DNA
ttttgttttcagccatgtaggagaagcagagtctacaagtccccgtgcctgcgtctgttaagggctgcagccagtgcctggcgtactcggtctcgtgccttggcccctcagcccctccccataaatgctcagcggaacaggggattaggttctggcagcacagctgggattttggcggccattccacagccgacaatagcacgcagcacaggacagcgcaggcctgtactccagggccagaatctgcctgggcttcttgtttgggtggcggagggggaggagcgggcacagcacggcatcctggccttgccacgcagaaggcgcattggagtgactgtctggcatcaccaagatgacactccacgccacccggggggctgcactcctctcttgggtgaacagtctacacgtggctgaccctgtggaggctgtgctgcagctccaggactgcagcatcttcatcaagatcattgacagaatccatggcactgaagagggacagcaaatcttgaagcagccggtgtcagagagactggactttgtgtgcagttttctgcagaaaaatcgaaaacatccctcttccccagaatgcctggtatctgcacagaaggtgctagagggatcagagctggaactggcgaagatgaccatgctgctcttataccactctaccatgagctccaaaagtcccagggactgggaacagtttgaatataaaattcaggctgagttggctgtcattcttaaatttgtgctggaccatgaggacgggctaaaccttaatgaggacctagagaacttcctacagaaagctcctgtgccttctacctgttctagcacattccctgaagagctctccccacctagccaccag

SEQ ID NO: 20619 - DNA, 911 bp, Homo sapiens
  source 1..911: mol_type = unassigned DNA
aattgtgcgctcacagcgctggcgcgagcccacgaagaggtacgattccggagaatcgcgaggcagagcgggagcgcgcagccaggtggaaactaattctaagccagactgctggagatcaccctgttctagtgtgtggaggcttccaccaggagacaggttctcactatgttgcccacgctggtctcaaattccttggctcaagtgatcctcccatcttggcctccaaaagtgccgggattacaagcatgagcaactgtgcctggccctgaaaaggcgcattggagtgactgtctggcatcaccaagatgacactccacgccacccggggggctgcactcctctcttgggtgaacagtctacacgtggctgaccctgtggaggctgtgctgcagctccaggactgcagcatcttcatcaagatcattgacagaatccatggcactgaagagggacagcaaatcttgaagcagccggtgtcagagagactggactttgtgtgcagttttctgcagaaaaatcgaaaacatccctcttccccagaatgcctggtatctgcacagaaggtgctagagggatcagagctggaactggcgaagatgaccatgctgctcttataccactctaccatgagctccaaaagtcccagggactgggaacagtttgaatataaaattcaggctgagttggctgtcattcttaaatttgtgctggaccatgaggacgggctaaaccttaatgaggacctagagaacttcctacagaaagctcctgtgccttctacctgttctagcacattccctgaagagctctccccacctagccaccaggccaagagggagattcgcttcctagagctacagaaggttgcctcctcttccagtgggaacaactttctctcaggttctcca

SEQ ID NO: 20620 - DNA, 600 bp, Homo sapiens
  source 1..600: mol_type = unassigned DNA
ggatgtgagtgtctctcagatggggagtatctttctaagaaaggggtacagagcatggaattcttaggctacaggcaggcagcgtctcagggcgcattggagtgactgtctggcatcaccaagatgacactccacgccacccggggggctgcactcctctcttgggtgaacagtctacacgtggctgaccctgtggaggctgtgctgcagctccaggactgcagcatcttcatcaagatcattgacagaatccatggcactgaagagggacagcaaatcttgaagcagccggtgtcagagagactggactttgtgtgcagttttctgcagaaaaatcgaaaacatccctcttccccagaatgcctggtatctgcacagaaggtgctagagggatcagagctggaactggcgaagatgaccatgctgctcttataccactctaccatgagctccaaaagtcccagggactgggaacagtttgaatataaaattcaggctgagttggctgtcattcttaaatttgtgctggaccatgaggacgggctaaaccttaatgaggacctagagaacttcctacagaaagctcctgtgccttctacc

SEQ ID NO: 20621 - DNA, 792 bp, Homo sapiens
  source 1..792: mol_type = unassigned DNA
gagagatggacagattattactgctgccttaaactctgggtggaaaacagagcgaagggggagtgtccggttgatcccagtttgtcaggcaggccactgcgcattggagtgactgtctggcatcaccaagatgacactccacgccacccggggggctgcactcctctcttgggtgaacagtctacacgtggctgaccctgtggaggctgtgctgcagctccaggactgcagcatcttcatcaagatcattgacagaatccatggcactgaagagggacagcaaatcttgaagcagccggtgtcagagagactggactttgtgtgcagttttctgcagaaaaatcgaaaacatccctcttccccagaatgcctggtatctgcacagaaggtgctagagggatcagagctggaactggcgaagatgaccatgctgctcttataccactctaccatgagctccaaaagtcccagggactgggaacagtttgaatataaaattcaggctgagttggctgtcattcttaaatttgtgctggaccatgaggacgggctaaaccttaatgaggacctagagaacttcctacagaaagctcctgtgccttctacctgttctagcacattccctgaagagctctccccacctagccaccaggccaagagggagattcgcttcctagagctacagaaggttgcctcctcttccagtgggaacaactttctctcaggttctccagcttctcccatgggtgatatcctgcagaccccacagttccagatgagacggctgaagaa

SEQ ID NO: 20622 - DNA, 280 bp, Homo sapiens
  source 1..280: mol_type = unassigned DNA
gcgctcacagcgctggcgcgagcccacgaagaggtacgattccggagaatcgcgaggcagagcgggagcgcgcagccaggcgcattggagtgactgtctggcatcaccaagatgacactccacgccacccggggggctgcactcctctcttgggtgaacagtctacacgtggctgaccctgtggaggctgtgctgcagctccaggactgcagcatcttcatcaagatcattgacagaatccatggcactgaagagggacagcaaatcttgaagcagccgg

SEQ ID NO: 20623 - DNA, 1084 bp, Homo sapiens
  source 1..1084: mol_type = unassigned DNA
atgttttgttgcttaggatatgaatggctgagcggaggctgtaaaacctggcactctgcttgggttatcaatactctggctgaccatcgtcatcgtgggactgactttggtggaagtccttggttacttatcattactgtgtttctgagaagttataaatttgccatctccctctgcacaagttacctttgtgtgtctttcctgaagactatcttcccgtctcaaaatggacatgatggatccacggatgtacagcagagagccaggaggtccaaccgccgtagacaggaaggaattaaaattgtcctggaagacatctttactttatggagacaggtggaaaccaaagttcgagctaaaatccgtaagatgaaggtgacaacaaaagtcaaccgtcatgacaaaatcaatggaaagaggaagaccgccaaagaacatctgaggaaactaagcatgaaagaacgtgagcacggagaaaaggagaggcaggtgtcagaggcagaggaaaatgggaaattggatatgaaagaaatacacacctacatggaaatgtttcaacgtgcgcaagcgttgcggcggcgggcagaggactactacagatgcaaaatcaccccttctgcaagaaagcctctttgcaaccgggtcagaatggcggcagtggagcatcgtcattcttcaggattgccctactggccctacctcacagctgaaactttaaaaaacaggatgggccaccagccacctcctccaactcaacaacattctataattgataactccctgagcctcaagacaccttccgagtgtctgctcactccccttccaccctcagctctaccctcagcggatgataatctcaagacacctgcggagtgtctgctctatccccttccaccctcagcggatgataatctcaagacacctcccgagtgtctgctcactccccttccaccctcagctccaccctcagtggatgataatctcaagacacctcccgagtgtgtctgctcactccccttccaccctcagcggatgataatctcaagaaactaaggaagaataaataaataatataaaaataaaa

SEQ ID NO: 20624 - DNA, 1102 bp, Homo sapiens
  source 1..1102: mol_type = unassigned DNA
atgttttgttgcttaggatatgaatggctgagcggaggctgtaaaacctggcactctgcttgggttatcaatactctggctgaccatcgtcatcgtgggactgactttggtggaagtccttggttacttatcattactgtgtttctgagaagttataaatttgccatctccctctgcacaagttacctttgtgtgtctttcctgaagactatcttcccgtctcaaaatggacatgatggatccacggatgtacagcagagagccaggaggtccaaccgccgtagacaggaaggaattaaaattgtcctggaagacatctttactttatggagacaggtggaaaccaaagttcgagctaaaatccgtaagatgaaggtgacaacaaaagtcaaccgtcatgacaaaatcaatggaaagaggaagaccgccaaagaacatctgaggaaactaagcatgaaagaacgtgagcacggagaaaaggagaggcaggtgtcagaggcagaggaaaatgggaaattggatatgaaagaaatacacacctacatggaaatgtttcaacgtgcgcaagcgttgcggcggcgggcagaggactactacagatgcaaaatcaccccttctgcaagaaagcctctttgcaaccgggtcagaatggcggcagtggagcatcgtcattcttcaggattgccctactggccctacctcacagctgaaactttaaaaaacaggatgggccaccagccacctcctccaactcaacaacattctataattgataactccctgagcctcaagacaccttccgagtgtctgctcactccccttccaccctcagctctaccctcagcggatgataatctcaagacacctgcggagtgtctgctctatccccttccaccctcagcggatgataatctcaagacacctcccgagtgtctgctcactccccttccaccctcagctccaccctcagtggatgataatctcaagacacctcccgagtgtgtctgctcactccccttccaccctcagcggatgataatctcaagaaactaaggaagaataaataaataatataaaaataaaatgaatactgcagtcctta

SEQ ID NO: 20625 - DNA, 2112 bp, Homo sapiens
  source 1..2112: mol_type = unassigned DNA
gcggcagtgcggccgtcatggcgtcgcccttcagcggggcgctgcagctgacggacctggatgacttcatcgggccgtctcaggagtgcatcaagcctgtcaaagtggaaaaaagggcgggaagtggcgtggccaagattcgcattgaagatgacgggagctacttccaaattaaccaagacggcgggacccggaggctggagaaggccaaggtctcgctaaacgactgcctggcgtgcagcggctgcatcacctccgcagagaccgtgcttatcacccagcagagccacgaggagctgaagaaggttctagatgctaacaagatggcggcacccagtcagcagaggctggttgtagtttcggtctcaccacagtctagagcatcgctggctgcacggtttcagctgaatcctacagatactgccaggaaattaacctcattctttaaaaaaataggggtgcacttcgtcttcgacaccgccttctcaaggcacttcagcctcctggagagccagcgagagtttgtgcggcgattccgaggacaggccgactgcagacaggcgctgcccctgctggcctctgcctgcccaggctggatctgctatgccgagaagactcacggcagcttcatcctcccccacatcagcaccgcccggtccccgcagcaggtcatgggctccctggtcaaggacttcttcgcccagcagcagcacttgacccctgacaagatctaccacgtcacagtgatgccctgctatgacaaaaagctggaagcctccagacccgactttttcaaccaggagcaccagacacgggatgtggactgtgtcctcacaacaggagaagttttcaggttgctggaggaagagggcgtctccctccccgacctggaaccagcccctctggacagcctgtgcagcggtgcctctgcagaggagcccaccagccatcggggagggggctcggggggctacctggagcacgtgttccggcacgcggcccgagagctctttggaatccatgtggctgaggttacctacaaacccctgaggaacaaagacttccaggaggtgacactggagaaggagggccaggtgctgctgcacttcgcaatggcgtacggcttccgcaacatccagaacctggtgcagaggctcaaacgagggcgctgcccctaccactacgtggaggtcatggcctgcccctcaggctgcctgaacggcgggggccagctccaggccccagacaggcccagcagagagctcctccagcacgtggagagactgtacggcatggtccgggctgaggcgcccgaggacgcgcctggggttcaggagctgtacacacactggctgcagggcacggactcggagtgtgcaggtcgcttgctgcatacgcagtaccacgccgtggagaaggccagcactggcctgggcatccggtggtaggggctgcaggaccaggactcccaggaggccgtgtccatgtgtgacagcagaaccacatgccccaagaccccagggcttcccccaaaattctgagtgagctgcagggtgtgctgggacccgagtaggagctaggactagccaggacccgcagccgcctcgtcacctccagttgggtgcctctgggttcccactggctctgcccaggtggggtggggtggcccaggcagcagaaggttccctgaggtcccagagcctgttccgttggccctgggccgaggcccacaggtgctgcccttgctgctgctggtcgggcacccaagtgcgtgaggggcttcagcctgtcccggggttgcctgaggcagagcaagacgggttctcacccctgacttctggaggcttcccttgaagctctgtgcaaaaggtgggagacagagctggacctgcaggggtggtcccgccacaaccctgcgtgtggaccctggcaggggggggtgccaggcccctggaaagcaggggttaccgttacgaggctgtggtccggggcaagccaagtacgaagcagcagccatcgcgggctgcatcatcccccagccaggtccccaccaggcctgtctcccagcgtttgtctaataaacgcacccctcctaaaacacgcctacgaaaa

SEQ ID NO: 20626 - DNA, 1003 bp, Homo sapiens
  source 1..1003: mol_type = unassigned DNA
agtgcggccgtcatggcgtcgcccttcagcggggcgctgcagctgacggacctggatgacttcatcgggccgtctcaggagtgcatcaagcctgtcaaagtggaaaaaagggcgggaagtggcgtggccaagattcgcattgaagatgacgggagctacttccaaattaaccaagacggcgggacccggaggctggagaaggccaaggtctcgctaaacgactgcctggcgtgcagcggctgcatcacctccgcagagaccgtgcttatcacccagcagagccacgaggagctgaagaaggttctagatgctaacaaggggtgcacttcgtcttcgacaccgccttctcaaggcacttcagcctcctggagagccagcgagagtttgtgcggcgattccgaggacaggccgactgcagacaggcgctgcccctgctggcctctgcctgcccaggctggatctgctatgccgagaagactcacggcagcttcatcctcccccacatcagcaccgcccggtccccgcagcaggtcatgggctccctggtcaaggacttcttcgcccagcagcagcacttgacccctgacaagatctaccacgtcacagtgatgccctgctatgacaaaaagctggaagcctccagacccgactttttcaaccaggagcaccagacacgggatgtggactgtgtcctcacaacaggagaagttttcaggttgctggaggaagagggcgtctccctccccgacctggaaccagcccctctggacagcctgtgcagcggtgcctctgcagaggagcccaccagccatcggggagggggctcggggggctacctggagcacgtgttccggcacgcggcccgagagctctttggaatccatgtggctgaggttacctacaaacccctgaggaacaaagacttccaggaggtgacactggagaaggagggccaggtgctgctgcacttcgcaatggcgtacggcttccgcaacatccagaa

SEQ ID NO: 20627 - DNA, 3212 bp, Homo sapiens
  source 1..3212: mol_type = unassigned DNA
atcgggccgtctcaggtgggccggcctgggcgggcggggtcgaggctgcgctcggtgccctgtcgcgcggagggaaattgctctgcgccccacttcctcccctgaggaatgagatccgaatcccgggagcccggtctgggccgtcagggactctatcgacccgggcgcggggcctcagacactgaggcccgcttcttaccaacaaggaaactgaggccagggagggcggcgccccccaacccgctcctgtgccccatggtgtccgggcgggctgcgtgggagggtcccgtggtcgcgggctcgcgccggcctgcccaacccagaggaggcagcagaggcggctcccacacatccctaaccctaacccgacccctgggtcgcagctggagggcggcggggcccgggccggggcctcttccccttcccctgcgcaggacgccttgtcaggcctcaggacccccaagccacagcctttgcatctgcataaacgggtgcggtggggaccccacctcatttgagggcagtaggggcggcccgctagacgccccgcagtggctcctcagtagagctgtccttaacgtcgccctggtgggccggacagctacccttgaacccgggaggctgcaggcgcccttttctgggtgcacctgcctgtccatgtccaacagccccgcggggccagagctgagcagggcgagaggcgggctgctgggagcgcttccggcagggatgagctgggaggcggctttctgggctgccagggttctcaaggagaagagagagaaatccacttgtttcccgggcactgagcaggaggtggtctccaaacagatccaagcacacgtcctctcgatgggcagtgcaactctggtctctgtggtggtcacgccccctgttcacgtgaagggtgaaggtcagtgttggtggtgtctccgcaggtgggtagtttgcaggcgctgttagcactggccttcctgcacactgggaacttcagtgccgcaggatgttgggaacccgatccctgggtgagagcagtggggcaggaagaagacggtgggaccagcctcagtccctgagtgcatggctcctggcagagccttcaggctgtgcggctgggcagccatccttgaggcctggcctcccagggaacctccgcccactcacaggggctgatttggggtctcttcctgctctaggagtgcatcaagcctgtcaaagtggaaaaaagggcgggaagtggcgtggccaagattcgcattgaagatgacgggagctacttccaaattaaccaagacggcgggacccggaggctggagaaggccaaggtctcgctaaacgactgcctggcgtgcagcggctgcatcacctccgcagagaccgtgcttatcacccagcagagccacgaggagctgaagaaggttctagatgctaacaagatggcggcacccagtcagcagaggctggttgtagtttcggtctcaccacagtctagagcatcgctggctgcacggtttcagctgaatcctacagatactgccaggaaattaacctcattctttaaaaaaataggggtgcacttcgtcttcgacaccgccttctcaaggcacttcagcctcctggagagccagcgagagtttgtgcggcgattccgaggacaggccgactgcagacaggcgctgcccctgctggcctctgcctgcccaggctggatctgctatgccgagaagactcacggcagcttcatcctcccccacatcagcaccgcccggtccccgcagcaggtcatgggctccctggtcaaggacttcttcgcccagcagcagcacttgacccctgacaagatctaccacgtcacagtgatgccctgctatgacaaaaagctggaagcctccagacccgactttttcaaccaggagcaccagacacgggatgtggactgtgtcctcacaacaggagaagttttcaggttgctggaggaagagggcgtctccctccccgacctggaaccagcccctctggacagcctgtgcagcggtgcctctgcagaggagcccaccagccatcggggagggggctcggggggctacctggagcacgtgttccggcacgcggcccgagagctctttggaatccatgtggctgaggttacctacaaacccctgaggaacaaagacttccaggaggtgacactggagaaggagggccaggtgctgctgcacttcgcaatggcgtacggcttccgcaacatccagaacctggtgcagaggctcaaacgagggcgctgcccctaccactacgtggaggtcatggcctgcccctcaggctgcctgaacggcgggggccagctccaggccccagacaggcccagcagagagctcctccagcacgtggagagactgtacggcatggtccgggctgaggcgcccgaggacgcgcctggggttcaggagctgtacacacactggctgcagggcacggactcggagtgtgcaggtcgcttgctgcatacgcagtaccacgccgtggagaaggccagcactggcctgggcatccggtggtaggggctgcaggaccaggactcccaggaggccgtgtccatgtgtgacagcagaaccacatgccccaagaccccagggcttcccccaaaattctgagtgagctgcagggtgtgctgggacccgagtaggagctaggactagccaggacccgcagccgcctcgtcacctccagttgggtgcctctgggttcccactggctctgcccaggtggggtggggtggcccaggcagcagaaggttccctgaggtcccagagcctgttccgttggccctgggccgaggcccacaggtgctgcccttgctgctgctggtcgggcacccaagtgcgtgaggggcttcagcctgtcccggggttgcctgaggcagagcaagacgggttctcacccctgacttctggaggcttcccttgaagctctgtgcaaaaggtgggagacagagctggacctgcaggggtggtcccgccacaaccctgcgtgtggaccctggcaggggggggtgccaggcccctggaaagcaggggttaccgttacgaggctgtggtccggggcaagccaagtacgaagcagcagccatcgcgggctgcatcatcccccagccaggtccccaccaggcctgtctcccagcgtttgtctaataaacgcacccctcctaaaac

SEQ ID NO: 20628 - DNA, 6117 bp, Homo sapiens
  source 1..6117: mol_type = unassigned DNA
gttcagtgccgccactggaaccaggagatgcggcgcaggagctgtcgctgtgtttgctttaacctgagtcttgttccttattgtggttcctgctgtggttttgatcatgttgttaccctcggacgtagcccggcttgtattgggttacttacagcaagaaaacctcatttctacctgccagacttttattttggaaagttcagatttaaaagaatatgcagaacattgtacagatgaagggtttattccagcctgcttactgtccttatttggaaaaaacttgacaacaattttaaatgagtatgtagctatgaaaacaaaagaaacatcaaataatgtcccagcaataatgtcatctctatggaagaaattggaccatacactttctcagatcaggagcatgcaaagttccccaaggtttgctggcagtcagagagcccgaacgagaactggaattgcagaaatcaaacggcagagaaagcttgcatctcaaacagctccagccagtgcagagttgctcactttaccttacctttcaggacagtttaccactcctccttccacaggtacacaggttactcgaccaagtggccaaatttcagatccatcgaggtcatattttgtagtggtcaaccactcacagtcacaagatactgtaaccactggagaagctttaaatgtcattcctggtgctcaggaaaagaaagcacatgccagtttaatgtctcccggtagacgcaaaagtgaatctcagagaaaaagtaccactttgtctggccctcattcaacaatacggaatttccaagatccaaacgcttttgcagtagaaaaacaaatggttattgaaaatgcacgagaaaaaatactaagcaacaaatctcttcaagaaaagctagcagaaaacataaataaatttttaactagtgataacaatattgcccaagtacctaagcaaacagataacaaccctacggagccagagacttcaattgatgaattcctaggacttccgagtgaaattcacatgtctgaagaagctatacaggacatattggaacagacagaatcagacccagcatttcaggcactctttgatctctttgactatggcaaaacaaagaataataaaaatatatcacaaagtatttccagtcaacctatggaatccaatcccagtatagtcttagcagatgaaactaatctagcagttaaaggttcttttgaaacagaagaatctgatggtcagtctggtcagcccgctttttgtacatcctatcagaatgatgacccattaaatgctttgaagaatagcaacaaccatgatgtgcttagacaagaagaccaggaaaatttttcccaaataagtaccagcatacagaaaaaggcctttaaaacagctgtacccactgaacagaagtgtgacattgacattacctttgagtccgtgcctaatttgaatgactttaaccaaagagggaattctaatgctgaatgtaatccacattgtgctgaattatacaccaatcagatgtccactgaaactgaaatggctatagggattgaaaagaactctttgtcttcaaatgtaccgagtgaatctcagttacagcctgatcagcctgatataccaataacttcatttgtttcacttggttgtgaagctaacaatgaaaacttaattctctctgggaagagttctcaacttttatcccaagatacttcattaactggaaagccatctaaaaaaagtcaattttgtgaaaattctaatgatacagtaaaacttaaaattaattttcatggttccaagtcatcagattctagtgaagttcacaagagtaaaatagaaattaatgtgttagaaccagttatgtcacagctatcaaattgccaagataattcttgtcttcaaagtgaaatactacctgtgtctgttgaaagttcacatttaaatgtatctggacaagtagaaattcatcttggagattcgctgtcttctactaaacaaccatctaatgattcagcatctgttgagttaaatcatacagaaaatgaagctcaggcatccaagtctgagaattcacaggagccttcatcttctgtaaaagaagagaatactatttttctctctttaggtggaaatgctaactgtgagaaagttgcactgacgcctccagaaggcactcctgtagaaaacagtcactctcttcctccagaatctgtgtgttcttcagtgggagattctcaccctgagtcccaaaatactgatgataaaccttctagcaacaactcagcagagatagatgcatcaaatatcgtctctctcaaagttatcattagtgatgatccatttgtttcctcagatactgaacttaccagtgctgtttctagtattaatggagaaaacctgccaactataatcttgtcttctcctactaaatcacctactaaaaatgcagaactagttaaatgcctatcttcagaagaaactgtaggtgctgttgtatatgccgaagtaggggattcagcctcaatggaacagagtcttttaacattcaaatctgaagactctgcagtaaacaatactcagaatgaagatggcattgctttttcagctaatgttacaccatgtgtttccaaggatggaggatatatacagttgatgccagccacaagcacagcttttggcaattcaaataacattctgatagctacctgtgtgactgatccaacagcgttaggaacatctgtaagtcagtctaatgtagtggtgttgcctggaaattctgcacctatgactgctcaacctctaccacctcagttacagacaccaccaaggtcaaacagtgtatttgctgtcaaccaagctgtgtcaccaaacttttcacaaggatctgccataataattgcctctccagtccagcctgtactccaaggaatggtagggatgatcccagtatctgtggttggacagaatggaaataacttttctactcctcctcggcaggttcttcatatgcctttgacagcacctgtatgcaatagaagtatccctcaattccccgtccctccaaaatctcagaaggctcagggactaagaaacaagccttgtataggaaaacaagtaaataatttggtggattcgtcaggtcattcagttggatgtcatgcacaaaaaactgaagtttctgacaaaagtattgccacagatcttgggaaaaaatcagaagaaaccacagttcccttcccagaagagagtatagttccagctgctaaaccatgccacagacgtgtactctgtttcgacagcactactgctcctgtggcaaatacgcaggggccaaaccataagatggtgtcccaaaacaaagaaaggaatgcagtctcttttcctaatcttgactcacccaatgtgtcctccaccttaaaacccccttctaataatgctatcaaaagagagaaagagaagcctcctctgcctaagattttatctaaatcggaaagtgccattagccggcataccaccataagagaaactcaatcagaaaagaaagtttcaccaacagaaattgtgcttgaatctttccataaagcaacagctaataaggagaatgaattatgcagcgatgtagaaagacagaaaaatccagaaaattcaaaactatctattgggcagcaaaatgggggtttgcgaagtgagaaatctatagcttcactgcaagaaatgaccaaaaaacaaggcacatcttcaaacaataaaaatgtactttcagtaggtacagctgtgaaggatctaaaacaagaacaaactaaatccgccagttctttgattaccacagaaatgttacaggatatacagaggcacagctcagtaagtaggcttgctgatagtagtgatttacctgtgccccggacacctggctcaggggcaggggaaaaacataaagaagaacctatagatattatcaaggccccctctagtaggcgtttcagtgaagacagtagtacatcaaaagtaatggtccctcctgtcaccccagacttgcctgcctgcagccctgccagtgaaacaggaagtgaaaacagtgtaaatatggctgcccacacattaatgattctctccagggcagccatttctaggactacttcagcaactcctctgaaagataacacacaacagtttagagcatcttcaaggagcaccacaaaaaagcggaaaattgaggaattagatgaacgtgagcgaaactctcgtccttctagtaaaaatcttacaaattcatcaataccaatgaaaaagaagaaaattaagaaaaagaagcttcccagttcatttccagcaggaatggatgtagacaaatttttgttatcattgcattatgatgagtaaacattctggacacataagaacagtaggtgttaaaaactcatatcccttaaactgagtgtagggaatgggatattgacagaatctgaaagcatgacctgcactttcattgtactgaaacttcactttatatctaaatcatgctgtttctgaaacagcttcctagtttgtaaatagacttacttggtatatttttattttgggaaaaacgtttgcagaaatgtaagtaaagccaatctgcaaaactgtatagctttgacaattccatattgtaaatactgtgtaaatcttgttgaaatagaggttaaatcaacctaatgttcttacactgtgttttttgacttcttatgatccctaattctgagacttactcatctggaatagtttctcacttgttttggaggaaaatgatgcttattcttataaattaccttcagtaactattcaataagacatttaaatacacaatcactaagtactacaaaataataaccacctcaactgatagcaaaatatctaattagaaatcaacagtttgatgagtttttttcctagagtgaatactacccctttcttataattgctgtaagtattatatttctggaatttcacactttacctactctgatcactctgttctctttgttttaaagagagaattttgtaaaccatttattgaatgttctgatctttcatttataacttaagattttttacagaactttaagtggttagactattgagccataaaattttggtttgtagtagagatttctcggtatgtacttttcccctaaatgctggggatttaaagaattgcactaattcatagaactctttacattgtagtgaccaatgcacatataatttaaatcttgtgttctatgtgagagtttatgtggaggattatcttctggtgttgtgtccatcataagatgtaaaaagagaaatcatagttttatattttagtttctcctacaatgggtatgttaaataactatatctatacttagatatagtgcattgtctgtgtcccttaaagtgttacaaagagtttctctcaaaaggtccttaaggagagtgagagatgagagaggtgccttctctgtattagactcacacacatcagtccagttgaagaattggtttaaacttttaaatgagaacagaaattataattagtacctgaccaattgtgcctagatattaaagtatgttctctttagtactttccgttcaattaaatatcagtatattagggatttttttctacaggtgtatattttgttgaagagtcactttcctcaaccatttttttgtactgggcctttaaaaaaataaatccatccaactttaacacaacatttctcagtgtagaaatcatgtcttcttaattgctgaaccttactgcaaaaacttgtgatgtaagaaatttgtatggtgtggcagtggtctattcctaaggaactaaatatcatatagttaatgtttatttaactcagcttgagactgtactacagttaggtttgaataaatattttcattaacttcaaaagtttgaattactttacattggcagtcttgtttagaaactgattaaattcctttgcaagtcagttctttttgggagtttgtacaatgctgaaaatcacagttttcttcttattcaattcatagttgtatgtactaagcactgaaaattcatatacaaataaaataagtttactttc

SEQ ID NO: 20629 - DNA, 7688 bp, Homo sapiens
  source 1..7688: mol_type = unassigned DNA
cctccgcctcccctcaggttgatgccggcccaggatggatcagacctgtgaactacccagaagaaattgtctgctgcccttttccaatccagtgaatttagatgcccctgaagacaaggacagccctttcggatgatccagattccagtaccagtacattaggaaacatgctagaattacctggaacttcatcatcatctacttcacaggaattgccattttgtcaacctaagaaaaagtctacgccactgaagtatgaagttggagatctcatctgggcaaaattcaagagacgcccatggtggccctgcaggatttgttctgatccgttgattaacacacattcaaaaatgaaagtttccaaccggaggccctatcggcagtactacgtggaggcttttggagatccttctgagagagcctgggtggctggaaaagcaatcgtcatgtttgaaggcagacatcaattcgaagagctacctgtccttaggagaagagggaaacagaaagaaaaaggatataggcataaggttcctcagaaaattttgagtaaatgggaagccagtgttggacttgcagaacagtatgatgttcccaaggggtcaaagaaccgaaaatgtattcctggttcaatcaagttggacagtgaagaagatatgccatttgaagactgcacaaatgatcctgagtcagaacatgacctgttgcttaatggctgtttgaaatcactggcttttgattctgaacattctgcagatgagaaggaaaagccttgcgctaaatctcgagccagaaagagctctgataatccaaaaaggactagtgtgaaaaagggccacatacaatttgaagcacataaagatgaacggaggggaaagattccagagaaccttggcctaaactttatctctggggatatatctgatacgcaggcctctaatgaactttccaggatagcaaatagcctcacagggtccaacactgccccaggaagttttctgttttcttcctgtggaaaaaacactgcaaagaaagaatttgagacttcaaatggtgactctttattgggcttgcctgagggtgctttgatctcaaagtgttctcgagagaagaataaaccccaacgaagcctggtgtgtggttcaaaagtgaagctctgctatattggagcaggtgatgaggaaaagcgaagtgattccattagtatctgtaccacttctgatgatggaagcagtgacctggatcccatagaacacagctcagagtctgataacagtgtccttgaaattccagatgctttcgatagaacagagaacatgttatctatgcagaaaaatgaaaagataaagtattctaggtttgctgccacaaacactagggtaaaagcaaaacagaagcctctcattagtaactcacatacagaccacttaatgggttgtactaagagtgcagagcctggaaccgagacgtctcaggttaatctctctgatctgaaggcatctactcttgttcacaaaccccagtcagattttacaaatgatgctctctctccaaaattcaacctgtcatcaagcatatccagtgagaactcgttaataaagggtggggcagcaaatcaagctctattacattcgaaaagcaaacagcccaagttccgaagtataaagtgcaaacacaaagaaaatccagttatggcagaacccccagttataaatgaggagtgcagtttgaaatgctgctcttctgataccaaaggctctcctttggccagcatttctaaaagtgggaaagtggatggtctaaaactactgaacaatatgcatgagaaaaccagggattcaagtgacatagaaacagcagtggtgaaacatgttttatccgagttgaaggaactctcttacagatccttaggtgaggatgtcagtgactctggaacatcaaagccatcaaaaccattacttttctcttctgcttctagtcagaatcacatacctattgaaccagactacaaattcagtacattgctaatgatgttgaaagatatgcatgatagtaagacgaaggagcagcggttgatgactgctcaaaacctggtctcttaccggagtcctggtcgtggggactgttctactaatagtcctgtaggagtctctaaggttttggtttcaggaggctccacacacaattcagagaaaaagggagatggcactcagaactccgccaatcctagccctagtgggggtgactctgcattatctggcgagttgtctgcttccctacctggcttactgtccgacaagagagacctccctgcttctggtaaaagtcgttcagactgtgttactaggcgcaactgtggacgatcaaagccttcatccaaattgcgagatgctttttcagcccaaatggtaaagaacacagtgaaccgtaaagccttaaagaccgagcgcaaaagaaaactgaatcagcttccaagtgtgactcttgatgctgtactgcagggagaccgagaacgtggaggttcattgagaggtggggcagaagatcctagtaaagaggatccccttcagataatgggccacttaacaagtgaagatggtgaccatttttctgatgtgcatttcgatagcaaggttaagcaatctgatcctggtaaaatttctgaaaaaggactctcttttgaaaacggaaaaggcccagagctggactctgtaatgaacagtgagaatgatgaactcaatggtgtaaatcaagtggtgcctaaaaagcggtggcagcgtttaaaccaaaggcgcactaaacctcgtaagcgcatgaacagatttaaagagaaagaaaactctgagtgtgcctttagggtcttacttcctagtgaccctgtgcaggaggggcgggatgagtttccagagcatagaactccttcagcaagcatacttgaggaaccactgacagagcaaaatcatgctgactgcttagattcagctgggccacggttaaatgtttgtgataaatccagtgccagcattggtgacatggaaaaggagccaggaattcccagtttgacaccacaggctgagctccctgaaccagctgtgcggtcagagaagaaacgccttaggaagccaagcaagtggcttttggaatatacagaagaatatgatcagatatttgctcctaagaaaaaacaaaagaaggtacaggagcaggtgcacaaggtaagttcccgctgtgaagaggaaagccttctagcccgaggtcgatctagtgctcagaacaagcaggtggacgagaattctttgatttcaaccaaagaagagcctccagttcttgaaagggaggctccgtttttggagggccccttggctcagtcagaacttggaggtggacatgctgagttgccgcagctgaccttgtctgtgcctgtggctccggaagtctctccacggcctgcccttgagtctgaggaattgctagttaaaacgccaggaaattatgaaagtaaacgtcaaagaaaaccaactaagaaacttcttgaatccaatgatttagaccctggatttatgcccaagaagggggaccttggcctttctaaaaagtgctatgaagctggtcacctggagaatggcataactgaatcttgtgccacatcttattcaaaagattttggtggaggcactaccaagatatttgacaagccaaggaagcgaaaacgacagaggcatgctgcagccaagatgcagtgtaaaaaagtgaaaaatgatgactcgtcaaaagagattccaggctcagagggagaactaatgcctcacaggacggccacaagccccaaggagactgttgaggaaggtgtagaacacgatcccgggatgcctgcctctaaaaaaatgcagggtgaacgcggtggaggagctgcactcaaggagaatgtctgtcagaattgtgaaaaattgggtgagctgctgttatgtgaggctcagtgctgtggggctttccacctggagtgccttggattgactgagatgccaagaggaaaatttatctgcaatgaatgtcgcacaggaatccatacctgttttgtatgtaagcagagtggggaagatgttaaaaggtgccttctacccttgtgtggaaagttttaccatgaagagtgtgtccagaagtacccacccactgttatgcagaacaagggcttccggtgctccctccacatctgtataacctgtcatgctgctaatccagccaatgtttctgcatctaaaggtcggttgatgcgctgtgtccgctgtcctgtggcataccacgccaatgacttttgcctggctgctgggtcaaagatccttgcatctaatagtatcatctgccctaatcactttacccctaggcggggctgccgaaatcatgagcatgttaatgttagctggtgctttgtgtgctcagaaggaggcagccttctgtgctgtgattcttgccctgctgcttttcatcgtgaatgcctgaacattgatatccctgaaggaaactggtattgcaatgactgtaaagcaggcaaaaagccacactacagggagattgtctgggtaaaagttggacgatacaggtggtggccagctgagatctgccatcctcgagctgttccttccaacattgataagatgagacatgatgtgggagagttcccagtcctcttttttggatctaatgactatttgtggactcaccaggcccgagtcttcccttacatggagggtgacgtgagcagcaaggataagatgggcaaaggagtggatgggacatataaaaaagctcttcaggaagctgcagcaaggtttgaggaattaaaggcccaaaaagagctaagacagctgcaggaagaccgaaagaatgacaagaagccaccaccttataaacatataaaggtaaaccgtcctattggcagggtacagatcttcactgcagacttatctgaaataccccgttgcaactgtaaagctactgatgagaacccctgtgggatagactctgaatgcatcaaccgcatgctgctctatgagtgccaccccacagtgtgtcctgccggagggcgctgtcaaaaccagtgcttttccaagcgccaatatccagaggttgaaattttccgcacattacagcggggttggggtctacggacaaaaacagatattaaaaagggtgaatttgtgaatgagtatgtgggtgagcttatagatgaagaagaatgcagagctcgaattcgctatgctcaagaacatgatatcactaatttctatatgctcaccctagacaaagaccgaatcattgatgctggtcccaaaggaaactatgctcggttcatgaatcattgctgccagcccaactgtgaaacacagaagtggtctgtgaatggagatacccgtgtaggcctttttgcactaagtgacattaaagcaggcactgaacttaccttcaactacaacctagaatgtcttgggaatggaaagactgtttgcaaatgtggagccccgaactgcagtggcttcttgggtgtaaggccaaagaatcaacccattgccacggaagaaaagtcaaagaaattcaagaagaagcaacagggaaagcgcaggacccagggtgaaatcacaaaggagcgagaagatgagtgttttagttgtggggatgctggccagctcgtctcctgcaagaaaccaggctgcccaaaagtttaccacgcagactgtctcaatctgaccaagcgaccagcagggaaatgggaatgtccgtggcatcagtgtgacatctgcgggaaggaagcagcctccttctgtgagatgtgccccagctccttttgtaagcagcatcgagaagggatgcttttcatttccaaactggatgggcgtctgtcttgtactgagcatgacccctgtgggcccaatcctctggaacctggggagatccgtgagtatgtgcctcccccagtaccgctgcctccagggccaagcactcacctggcagagcaatcaacaggaatggctgctcaggcacccaaaatgtcagataaacctcctgctgacaccaaccagatgctgtcgctctccaaaaaagctctggcagggacttgtcagaggccattgctacctgaaagacctcttgagagaactgactccaggccccagcctttagataaggtcagagacctcgctgggtcagggaccaaatcccaatccttggtttccagccagaggccactggacaggccaccagcagtggcaggaccaagaccccagctaagcgacaaaccctctccagtgaccagcccaagctcctcaccctcagtcaggtcccaaccactggaaagacctctggggacggctgacccaaggctggataaatccataggtgctgccagcccaaggccccagtcactggagaaaacctcagttcccactggcctgagacttccgccgccagacagactgctcattactagcagtcccaaaccccagacttcagacaggcctactgacaaaccccatgcctctttgtcccagagactcccacctcctgagaaagtactatcagctgtggtccagacccttgtagctaaagaaaaagcactgaggcctgtggaccagaatactcagtcaaaaaatagagctgctttggtgatggatctcatagacctaactcctcgccagaaggagcgggcagcttcacctcatcaggtcacaccacaggctgatgagaagatgccagtgttggagtcaagttcatggcctgccagcaaaggtctggggcatatgccgagagctgttgagaaaggctgtgtgtcagatcctcttcagacatctgggaaagcagcagccccttcagaggacccctggcaagctgttaaatcactcacccaggccagacttctttctcagcctcctgccaaggcctttttatatgagccaacaactcaggcctcaggaagagcttctgcaggggctgagcagaccccagggcctcttagccaatccccgggcctggtgaagcaggcgaagcagatggtcggaggccagcaactacctgcacttgccgccaagagtgggcaatcttttaggtctctcgggaaggccccagcctccctccccactgaagaaaagaagttggtaaccacagagcaaagtccctgggccctgggaaaagcctcatcacgggcagggctctggcccatagtggctggacagacactggcacagtcttgctggtctgctgggagcacacagacattggcacagacttgctggtctcttggaagagggcaagaccccaaaccagagcaaaatacacttccagctcttaaccaggctccttccagtcacaagtgtgcagaatcagaacagaagtagtaccaatcaatgtcacatgaacaaacaagctgcccccagggtaccatttggggaggggaaatcttttctttctttcccccttaaaaaaaaacacatctgccccgaacactttcccactgttattctttcctcatatcccaacactcagaactcttgtgacattagccagtgggggcttatggttgtgtgaaccatgtatgaaaatccagtgggccccaaccaaggagacagacagacttgggtctctttcccccaacttttccacatggtcatcgtgaaataaaaagtccactctggagtcaa

SEQ ID NO: 20630 - DNA, 12195 bp, Homo sapiens
  source 1..12195: mol_type = unassigned DNA
ggccgggtagggggttcgcctgcggccgcgtctgctcggggcctgaggcctcgaagaccccagcccaagcccccaggttgatgccggcccaggatggatcagacctgtgaactacccagaagaaattgtctgctgcccttttccaatccagtgaatttagatgcccctgaagacaaggacagccctttcggatgatccagattccagtaccagtacattaggaaacatgctagaattacctggaacttcatcatcatctacttcacaggaattgccattttgtcaacctaagaaaaagtctacgccactgaagtatgaagttggagatctcatctgggcaaaattcaagagacgcccatggtggccctgcaggatttgttctgatccgttgattaacacacattcaaaaatgaaagtttccaaccggaggccctatcggcagtactacgtggaggcttttggagatccttctgagagagcctgggtggctggaaaagcaatcgtcatgtttgaaggcagacatcaattcgaagagctacctgtccttaggagaagagggaaacagaaagaaaaaggatataggcataaggttcctcagaaaattttgagtaaatgggaagccagtgttggacttgcagaacagtatgatgttcccaaggggtcaaagaaccgaaaatgtattcctggttcaatcaagttggacagtgaagaagatatgccatttgaagactgcacaaatgatcctgagtcagaacatgacctgttgcttaatggctgtttgaaatcactggcttttgattctgaacattctgcagatgagaaggaaaagccttgcgctaaatctcgagccagaaagagctctgataatccaaaaaggactagtgtgaaaaagggccacatacaatttgaagcacataaagatgaacggaggggaaagattccagagaaccttggcctaaactttatctctggggatatatctgatacgcaggcctctaatgaactttccaggatagcaaatagcctcacagggtccaacactgccccaggaagttttctgttttcttcctgtggaaaaaacactgcaaagaaagaatttgagacttcaaatggtgactctttattgggcttgcctgagggtgctttgatctcaaagtgttctcgagagaagaataaaccccaacgaagcctggtgtgtggttcaaaagtgaagctctgctatattggagcaggtgatgaggaaaagcgaagtgattccattagtatctgtaccacttctgatgatggaagcagtgacctggatcccatagaacacagctcagagtctgataacagtgtccttgaaattccagatgctttcgatagaacagagaacatgttatctatgcagaaaaatgaaaagataaagtattctaggtttgctgccacaaacactagggtaaaagcaaaacagaagcctctcattagtaactcacatacagaccacttaatgggttgtactaagagtgcagagcctggaaccgagacgtctcaggttaatctctctgatctgaaggcatctactcttgttcacaaaccccagtcagattttacaaatgatgctctctctccaaaattcaacctgtcatcaagcatatccagtgagaactcgttaataaagggtggggcagcaaatcaagctctattacattcgaaaagcaaacagcccaagttccgaagtataaagtgcaaacacaaagaaaatccagttatggcagaacccccagttataaatgaggagtgcagtttgaaatgctgctcttctgataccaaaggctctcctttggccagcatttctaaaagtgggaaagtggatggtctaaaactactgaacaatatgcatgagaaaaccagggattcaagtgacatagaaacagcagtggtgaaacatgttttatccgagttgaaggaactctcttacagatccttaggtgaggatgtcagtgactctggaacatcaaagccatcaaaaccattacttttctcttctgcttctagtcagaatcacatacctattgaaccagactacaaattcagtacattgctaatgatgttgaaagatatgcatgatagtaagacgaaggagcagcggttgatgactgctcaaaacctggtctcttaccggagtcctggtcgtggggactgttctactaatagtcctgtaggagtctctaaggttttggtttcaggaggctccacacacaattcagagaaaaagggagatggcactcagaactccgccaatcctagccctagtgggggtgactctgcattatctggcgagttgtctgcttccctacctggcttactgtccgacaagagagacctccctgcttctggtaaaagtcgttcagactgtgttactaggcgcaactgtggacgatcaaagccttcatccaaattgcgagatgctttttcagcccaaatggtaaagaacacagtgaaccgtaaagccttaaagaccgagcgcaaaagaaaactgaatcagcttccaagtgtgactcttgatgctgtactgcagggagaccgagaacgtggaggttcattgagaggtggggcagaagatcctagtaaagaggatccccttcagataatgggccacttaacaagtgaagatggtgaccatttttctgatgtgcatttcgatagcaaggttaagcaatctgatcctggtaaaatttctgaaaaaggactctcttttgaaaacggaaaaggcccagagctggactctgtaatgaacagtgagaatgatgaactcaatggtgtaaatcaagtggtgcctaaaaagcggtggcagcgtttaaaccaaaggcgcactaaacctcgtaagcgcatgaacagatttaaagagaaagaaaactctgagtgtgcctttagggtcttacttcctagtgaccctgtgcaggaggggcgggatgagtttccagagcatagaactccttcagcaagcatacttgaggaaccactgacagagcaaaatcatgctgactgcttagattcagctgggccacggttaaatgtttgtgataaatccagtgccagcattggtgacatggaaaaggagccaggaattcccagtttgacaccacaggctgagctccctgaaccagctgtgcggtcagagaagaaacgccttaggaagccaagcaagtggcttttggaatatacagaagaatatgatcagatatttgctcctaagaaaaaacaaaagaaggtacaggagcaggtgcacaaggtaagttcccgctgtgaagaggaaagccttctagcccgaggtcgatctagtgctcagaacaagcaggtggacgagaattctttgatttcaaccaaagaagagcctccagttcttgaaagggaggctccgtttttggagggccccttggctcagtcagaacttggaggtggacatgctgagttgccgcagctgaccttgtctgtgcctgtggctccggaagtctctccacggcctgcccttgagtctgaggaattgctagttaaaacgccaggaaattatgaaagtaaacgtcaaagaaaaccaactaagaaacttcttgaatccaatgatttagaccctggatttatgcccaagaagggggaccttggcctttctaaaaagtgctatgaagctggtcacctggagaatggcataactgaatcttgtgccacatcttattcaaaagattttggtggaggcactaccaagatatttgacaagccaaggaagcgaaaacgacagaggcatgctgcagccaagatgcagtgtaaaaaagtgaaaaatgatgactcgtcaaaagagattccaggctcagagggagaactaatgcctcacaggacggccacaagccccaaggagactgttgaggaaggtgtagaacacgatcccgggatgcctgcctctaaaaaaatgcagggtgaacgcggtggaggagctgcactcaaggagaatgtctgtcagaattgtgaaaaattgggtgagctgctgttatgtgaggctcagtgctgtggggctttccacctggagtgccttggattgactgagatgccaagaggaaaatttatctgcaatgaatgtcgcacaggaatccatacctgttttgtatgtaagcagagtggggaagatgttaaaaggtgccttctacccttgtgtggaaagttttaccatgaagagtgtgtccagaagtacccacccactgttatgcagaacaagggcttccggtgctccctccacatctgtataacctgtcatgctgctaatccagccaatgtttctgcatctaaaggtcggttgatgcgctgtgtccgctgtcctgtggcataccacgccaatgacttttgcctggctgctgggtcaaagatccttgcatctaatagtatcatctgccctaatcactttacccctaggcggggctgccgaaatcatgagcatgttaatgttagctggtgctttgtgtgctcagaaggaggcagccttctgtgctgtgattcttgccctgctgcttttcatcgtgaatgcctgaacattgatatccctgaaggaaactggtattgcaatgactgtaaagcaggcaaaaagccacactacagggagattgtctgggtaaaagttggacgatacaggtggtggccagctgagatctgccatcctcgagctgttccttccaacattgataagatgagacatgatgtgggagagttcccagtcctcttttttggatctaatgactatttgtggactcaccaggcccgagtcttcccttacatggagggtgacgtgagcagcaaggataagatgggcaaaggagtggatgggacatataaaaaagctcttcaggaagctgcagcaaggtttgaggaattaaaggcccaaaaagagctaagacagctgcaggaagaccgaaagaatgacaagaagccaccaccttataaacatataaaggtaaaccgtcctattggcagggtacagatcttcactgcagacttatctgaaataccccgttgcaactgtaaagctactgatgagaacccctgtgggatagactctgaatgcatcaaccgcatgctgctctatgagtgccaccccacagtgtgtcctgccggagggcgctgtcaaaaccagtgcttttccaagcgccaatatccagaggttgaaattttccgcacattacagcggggttggggtctacggacaaaaacagatattaaaaagggtgaatttgtgaatgagtatgtgggtgagcttatagatgaagaagaatgcagagctcgaattcgctatgctcaagaacatgatatcactaatttctatatgctcaccctagacaaagaccgaatcattgatgctggtcccaaaggaaactatgctcggttcatgaatcattgctgccagcccaactgtgaaacacagaagtggtctgtgaatggagatacccgtgtaggcctttttgcactaagtgacattaaagcaggcactgaacttaccttcaactacaacctagaatgtcttgggaatggaaagactgtttgcaaatgtggagccccgaactgcagtggcttcttgggtgtaaggccaaagaatcaacccattgccacggaagaaaagtcaaagaaattcaagaagaagcaacagggaaagcgcaggacccagggtgaaatcacaaaggagcgagaagatgagtgttttagttgtggggatgctggccagctcgtctcctgcaagaaaccaggctgcccaaaagtttaccacgcagactgtctcaatctgaccaagcgaccagcagggaaatgggaatgtccgtggcatcagtgtgacatctgcgggaaggaagcagcctccttctgtgagatgtgccccagctccttttgtaagcagcatcgagaagggatgcttttcatttccaaactggatgggcgtctgtcttgtactgagcatgacccctgtgggcccaatcctctggaacctggggagatccgtgagtatgtgcctcccccagtaccgctgcctccagggccaagcactcacctggcagagcaatcaacaggaatggctgctcaggcacccaaaatgtcagataaacctcctgctgacaccaaccagatgctgtcgctctccaaaaaagctctggcagggacttgtcagaggccattgctacctgaaagacctcttgagagaactgactccaggccccagcctttagataaggtcagagacctcgctgggtcagggaccaaatcccaatccttggtttccagccagaggccactggacaggccaccagcagtggcaggaccaagaccccagctaagcgacaaaccctctccagtgaccagcccaagctcctcaccctcagtcaggtcccaaccactggaaagacctctggggacggctgacccaaggctggataaatccataggtgctgccagcccaaggccccagtcactggagaaaacctcagttcccactggcctgagacttccgccgccagacagactgctcattactagcagtcccaaaccccagacttcagacaggcctactgacaaaccccatgcctctttgtcccagagactcccacctcctgagaaagtactatcagctgtggtccagacccttgtagctaaagaaaaagcactgaggcctgtggaccagaatactcagtcaaaaaatagagctgctttggtgatggatctcatagacctaactcctcgccagaaggagcgggcagcttcacctcatcaggtcacaccacaggctgatgagaagatgccagtgttggagtcaagttcatggcctgccagcaaaggtctggggcatatgccgagagctgttgagaaaggctgtgtgtcagatcctcttcagacatctgggaaagcagcagccccttcagaggacccctggcaagctgttaaatcactcacccaggccagacttctttctcagcctcctgccaaggcctttttatatgagccaacaactcaggcctcaggaagagcttctgcaggggctgagcagaccccagggcctcttagccaatccccgggcctggtgaagcaggcgaagcagatggtcggaggccagcaactacctgcacttgccgccaagagtgggcaatcttttaggtctctcgggaaggccccagcctccctccccactgaagaaaagaagttggtaaccacagagcaaagtccctgggccctgggaaaagcctcatcacgggcagggctctggcccatagtggctggacagacactggcacagtcttgctggtctgctgggagcacacagacattggcacagacttgctggtctcttggaagagggcaagaccccaaaccagagcaaaatacacttccagctcttaaccaggctccttccagtcacaagtgtgcagaatcagaacagaagtagtaccaatcaatgtcacatgaacaaacaagctgcccccagggtaccatttggggaggggaaatcttttctttctttcccccttaaaaaaaaacacatctgccccgaacactttcccactgttattctttcctcatatcccaacactcagaactcttgtgacattagccagtgggggcttatggttgtgtgaaccatgtatgaaaatccagtgggccccaaccaaggagacagacagacttgggtctctttcccccaacttttccacatggtcatcgtgaaataaaaagtccactctggagtcaagtatggaattcaattccgctggtcaggttggaaggtataggggctctcaaagcgatttccccaaccagacagagccccattgagggcacctaggaacccttgggaggaaatggtgttctttcaaatcagtggcgatttcctgagcattcacgtgttctaggccgggtgctagtcactgatgagagatacaggcctcatccctgtgagcctggattccaaggctttcaggaacctttgaccaggaagtaacaggaagttctgaggggccctggggctttagactcattttgaaatgtcctttgtggcaccagaagtggttgtgttgaggaagtgtctcttggctgcggtgtgcatgggtgcgtgtgcatgcgcgcacactcacagaggtctcctctatagatgcaagggtgctgcattgaggccagcaaggctgttggctgtggggtcgccgctgctgcttttgtctgggctgtgcagagtctcaagatcagtccttggaggagcaggtggtcaggggcagtcgggctctgtgcgaatgtagatttccagcagtggaagaaggcatttggcaagcttctctttctttgcttttgtttctacctatttttctctttgtacatgaatccaccccatccctatttccctaaaacactcaggtgctttcagatttcagagcctcgggcagtggacatagggaatctctggcaagctctgagctagacacaccagcttcaggaagagtaccagatcctgatgggaaatttcttttccccattccttttccctcctgagtggagggagtcctcttcttcgcctccctgagaattgctgtgctctgtattgagagcacctgcctgctgacttagctcaaaggcaagccagaacccttccctgaagactggcaagaggtggtgtttagagcaacgtccaggctaagagatgactcctattaactgctgattatctgttactgctgccctgagctggggcccaagggctgggaaatctgttggtgctaccctgccctaccattcacccagctcacagactgccaacaggaagtgctgtttggctagtttcctcccacttgtctacccctcctttgtccttagaccaacatgtttacctctctgctttgccaacttagccagcaggccatccccggccctaacgtctcctggccattatctcttagttatggctttcacgctctcaataggattctgtatttggtcccaatttcctcaagttcttattgaggttactcccatcaattccacggagggaacagtagttattatagaagcatttgcgctttatctaaagattaaaaatagaatctgcttttatttcccaaagtctgtctctgaggttgagacacttgaactcaggcagagggacgaggctgggcagggctgtcctgagtttaggggcctatccctgcatttcactgagacctcggaatctcctctgtgaattccacctgcctagttctcccctttcatcctctctctcttcccacatcatcaaagaggaaaagctctttgttcaaaaggaagagaaaacgtaaagcatcttattttcttttaaaagaattttaaaccatgaaaaagatatttttaaagaaattcaccgagaacattaaagttcattatattaagtatttatcatgtgtgagaataataaatatataactgcagctagtaggtccctttccctaatcttttaggtcatatgagtagggtttgcttggtgccagtcctgtgcccttttctctccagtcatctgtagttgtgatcagaaaaaggtatctgcactgcactgtcagagtctcctttcactatgttgtgtgttaaattaccgtagctctttgtttcatgaaataaactgtgaatttggggggggcggggggagggcgtgcaggccatgtaaaaattttccgtggagaagtttgattctaaagtagcttctctaaagtaggctttggtaggtaatcaacttgacagcagtctagatgtctcacaggacaggagggagtgagggaaaggggccatgattggctgctttgtggttttattttggttctttccattctccgccattcattggaggcttcgttccagacctgcctgggaaaacagcttctgagccattttggggagcagttcttcatctgaatggatggacatctgggcttccttcaagggccattgaatgggaactagaaaaccactggaaactagaaatttgagctattgggcccaccagtagcagcatgtgatactagatggttaaaatcatgaaagcagtcactatccaattagaagcagagtcacaacaactgttgggaaatgtgactcttggaggaaggtggggagggagtggccttgccagccctgtgggacgtcccctgaagtttgtaataagaccccttttccaaagggatgtgaattggagtgaaaaggaaatctttcatcttagaaaacttctggtccttaacgcagggtggtatttgggtatgtgcttggaaattgagatctcaagagtgtttgccttggagccagctccccaggaggccttttccagggacaaggcaaaagttgaaattctccatgggtagctagaaagccaatacatctagccctgctaagtcagaaaaagattatgaaaaatgttgaaatttacattcaaagcctcatttgcttatcttgctggagccaacccagtctaatagcaaaatagctgtcattgatacagaaacatcctcatttttaaatgtctgctttaccctgttactgagtttgagatgacttaaatcactgtgttgaccctcttctgaaccaaatctttagcattgatgaaaatagttattttattctttacatccttcaccccacactatggtcagggcatgaaacaccctgttgatcccttcccaggctcggcactgtctgctcactggagccggactcccaggttgtaattctaatgttgcctcatgagaacagaatggcagaaagtttagtcctgacagattcccccatagggagtaatgaggacagcatgaaacttggataggttttacccttagtccctataaggtggattttactaaggttttttaaatgatactgtcatcctcttggggtttatcagccaggttagaggagcccagtgtcctaacctctctcagatcatggcagagaaggagctgcctccagcccctttcttgctgagtttcatttgagcagttccatgtgtagacattccaagtcactgcttggtagttgctgtgggagcctgtcattggctatggccagttagttctcagctgagcttcctagggccagtgcaacagggccagaggctgctatagtgtaaattgaaataagaatagatcattgttttgtacacacacacaataaaatgtaatgatggtgctaatttcacggtataaataagcactgccaagggttgagggactggcagctcaagaaacccgggttcctgtttgggaggagattttatgtagaaaagtttgaggctttgttaaaagtggggagaaggaagatcctcagtgaagcctgcacccaaccctggagtggcccagtgcaatccagaggtggaagagatcctatatccaggtgaaggtggccattgagtttctcagggctggggccaccttgtccatagcctccgtccacgctgcctggagcaggttgttagagagctctggttgttgggtcttcctcagctcccttctgcccctctctacctcttccactcatggaagcccctctactgcttatgaagattaagggtagtattttctaaggaagtggaaagaattaaactagaaatccacaacctcggaagaagtgtttcgagtttaacatgcgctgtttctgcttatgtggttccttctctagagctgctttcccatggctttcaaaacatcaggttattgtggggcttcaggtgtaaggtcctggaagttcagcaaagtttcgtggacaagacatgggcacagagagtagaagcagaaataaatggttctatgttttcaacttccagggttggggcaggccagagcaaggcggtctcatcgaggtgggtgctacctgtgtgtgtgtagatgagtgtgctgaaggtggggagggcagcacacagcagctcatggcagagccgcctcctaggtcttggcaaagaggcaagctgacgatagacatctacctatattgttaagaaaggggtcggggggatcagccaaggtccatcattgcttttttgccgcgcccccccccccccgcccccatagattgtcagctgtaagtgaaactcctagtgaaaaagaggggagccctgtgttaggagtccccataaacatgtactgtaattctttgtatatagaaaaaaaatttactgtaaagtaaagtttaactttactc

SEQ ID NO: 20631 - DNA, 1849 bp, Homo sapiens
  source 1..1849: mol_type = unassigned DNA
ggccgggtagggggttcgcctgcggccgcgtctgctcggggcctgaggcctcgaagaccccagcccaagcccccaggttgatgccggcccaggatggatcagacctgtgaactacccagaagaaattgtctgctgcccttttccaatccagtgaatttagatgcccctgaagacaaggacagccctttcggatgatccagattccagtaccagtacattaggaaacatgctagaattacctggaacttcatcatcatctacttcacaggaattgccattttgtcaacctaagaaaaagtctacgccactgaagtatgaagttggagatctcatctgggcaaaattcaagagacgcccatggtggccctgcaggatttgttctgatccgttgattaacacacattcaaaaatgaaagtttccaaccggaggccctatcggcagtactacgtggaggcttttggagatccttctgagagagcctgggtggctggaaaagcaatcgtcatgtttgaaggcagacatcaattcgaagagctacctgtccttaggagaagagggaaacagaaagaaaaaggatataggcataaggttcctcagaaaattttgagtaaatgggaagccagtgttggacttgcagaacagtatgatgttcccaaggggtcaaagaaccgaaaatgtattcctggttcaatcaagttggacagtgaagaagatatgccatttgaagactgcacaaatgatcctgagtcagaacatgacctgttgcttaatggctgtttgaaatcactggcttttgattctgaacattctgcagatgagaaggaaaagccttgcgctaaatctcgagccagaaagagctctgataatccaaaaaggactagtgtgaaaaagggccacatacaatttgaagcacataaagatgaacggaggggaaagattccagagaaccttggcctaaactttatctctggggatatatctgatacgcaggcctctaatgaactttccaggatagcaaatagcctcacagggtccaacactgccccaggaagttttctgttttcttcctgtggaaaaaacactgcaaagaaagaatttgagacttcaaatggtgactctttattgggcttgcctgagggtgctttgatctcaaagtgttctcgagagaagaataaaccccaacgaagcctggtgtgtggttcaaaagtgaagctctgctatattggagcaggtgatgaggaaaagcgaagtgattccattagtatctgtaccacttctgatgatggaagcagtgacctggatcccatagaacacagctcagagtctgataacagtgtccttgaaattccagatgctttcgatagaacagagaacatgttatctatgcagaaaaatgaaaagataaagtattctaggtttgctgccacaaacactagggtaaaagcaaaacagaagcctctcattagtaactcacatacagaccacttaatgggttgtactaagagtgcagagcctggaaccgagacgtctcaggttaatctctctgatctgaaggcatctactcttgttcacaaaccccagtcagattttacaaatgatgctctctctccaaaattcaacctgtcatcaagcatatccagtgagaactcgttaataaagggtggggcagcaaatcaagctctattacattcgaaaagcaaacagcccaagttccgaagtataaagtgcaaacacaaagaaaatccagttatggcagaacccccagttataaatgaggagtgcagtttgaaatgctgctcttctgataccaaaggctctcctttggccagcatttctaaaacacccccg

SEQ ID NO: 20632 - DNA, 12533 bp, Homo sapiens
  source 1..12533: mol_type = unassigned DNA
atggatcagacctgtgaactacccagaagaaattgtctgctgcccttttccaatccagtgaatttagatgcccctgaagacaaggacagccctttcggtaatggtcaatccaatttttctgagccacttaatgggtgtactatgcagttatcgactgtcagtggaacatcccaaaatgcttatggacaagattctccatcttgttacattccactgcggagactacaggatttggcctccatgatcaatgtagagtatttaaatgggtctgctgatggatcagaatcctttcaagaccctgaaaaaagtgattcaagagctcagacgccaattgtttgcacttccttgagtcctggtggtcctacagcacttgctatgaaacaggaaccctcttgtaataactcccctgaactccaggtaaaagtaacaaagactatcaagaatggctttctgcactttgagaattttacttgtgtggacgatgcagatgtagattctgaaatggacccagaacagccagtcacagaggatgagagtatagaggagatctttgaggaaactcagaccaatgccacctgcaattatgagactaaatcagagaatggtgtaaaagtggccatgggaagtgaacaagacagcacaccagagagtagacacggtgcagtcaaatcgccattcttgccattagctcctcagactgaaacacagaaaaataagcaaagaaatgaagtggacggcagcaatgaaaaagcagcccttctcccagcccccttttcactaggagacacaaacattacaatagaagagcaattaaactcaataaatttatcttttcaggatgatccagattccagtaccagtacattaggaaacatgctagaattacctggaacttcatcatcatctacttcacaggaattgccatttgttcctcagaaaattttgagtaaatgggaagccagtgttggacttgcagaacagtatgatgttcccaaggggtcaaagaaccgaaaatgtattcctggttcaatcaagttggacagtgaagaagatatgccatttgaagactgcacaaatgatcctgagtcagaacatgacctgttgcttaatggctgtttgaaatcactggcttttgattctgaacattctgcagatgagaaggaaaagccttgcgctaaatctcgagccagaaagagctctgataatccaaaaaggactagtgtgaaaaagggccacatacaatttgaagcacataaagatgaacggaggggaaagattccagagaaccttggcctaaactttatctctggggatatatctgatacgcaggcctctaatgaactttccaggatagcaaatagcctcacagggtccaacactgccccaggaagttttctgttttcttcctgtggaaaaaacactgcaaagaaagaatttgagacttcaaatggtgactctttattgggcttgcctgagggtgctttgatctcaaagtgttctcgagagaagaataaaccccaacgaagcctggtgtgtggttcaaaagtgaagctctgctatattggagcaggtgatgaggaaaagcgaagtgattccattagtatctgtaccacttctgatgatggaagcagtgacctggatcccatagaacacagctcagagtctgataacagtgtccttgaaattccagatgctttcgatagaacagagaacatgttatctatgcagaaaaatgaaaagataaagtattctaggtttgctgccacaaacactagggtaaaagcaaaacagaagcctctcattagtaactcacatacagaccacttaatgggttgtactaagagtgcagagcctggaaccgagacgtctcaggttaatctctctgatctgaaggcatctactcttgttcacaaaccccagtcagattttacaaatgatgctctctctccaaaattcaacctgtcatcaagcatatccagtgagaactcgttaataaagggtggggcagcaaatcaagctctattacattcgaaaagcaaacagcccaagttccgaagtataaagtgcaaacacaaagaaaatccagttatggcagaacccccagttataaatgaggagtgcagtttgaaatgctgctcttctgataccaaaggctctcctttggccagcatttctaaaagtgggaaagtggatggtctaaaactactgaacaatatgcatgagaaaaccagggattcaagtgacatagaaacagcagtggtgaaacatgttttatccgagttgaaggaactctcttacagatccttaggtgaggatgtcagtgactctggaacatcaaagccatcaaaaccattacttttctcttctgcttctagtcagaatcacatacctattgaaccagactacaaattcagtacattgctaatgatgttgaaagatatgcatgatagtaagacgaaggagcagcggttgatgactgctcaaaacctggtctcttaccggagtcctggtcgtggggactgttctactaatagtcctgtaggagtctctaaggttttggtttcaggaggctccacacacaattcagagaaaaagggagatggcactcagaactccgccaatcctagccctagtgggggtgactctgcattatctggcgagttgtctgcttccctacctggcttactgtccgacaagagagacctccctgcttctggtaaaagtcgttcagactgtgttactaggcgcaactgtggacgatcaaagccttcatccaaattgcgagatgctttttcagcccaaatggtaaagaacacagtgaaccgtaaagccttaaagaccgagcgcaaaagaaaactgaatcagcttccaagtgtgactcttgatgctgtactgcagggagaccgagaacgtggaggttcattgagaggtggggcagaagatcctagtaaagaggatccccttcagataatgggccacttaacaagtgaagatggtgaccatttttctgatgtgcatttcgatagcaaggttaagcaatctgatcctggtaaaatttctgaaaaaggactctcttttgaaaacggaaaaggcccagagctggactctgtaatgaacagtgagaatgatgaactcaatggtgtaaatcaagtggtgcctaaaaagcggtggcagcgtttaaaccaaaggcgcactaaacctcgtaagcgcatgaacagatttaaagagaaagaaaactctgagtgtgcctttagggtcttacttcctagtgaccctgtgcaggaggggcgggatgagtttccagagcatagaactccttcagcaagcatacttgaggaaccactgacagagcaaaatcatgctgactgcttagattcagctgggccacggttaaatgtttgtgataaatccagtgccagcattggtgacatggaaaaggagccaggaattcccagtttgacaccacaggctgagctccctgaaccagctgtgcggtcagagaagaaacgccttaggaagccaagcaagtggcttttggaatatacagaagaatatgatcagatatttgctcctaagaaaaaacaaaagaaggtacaggagcaggtgcacaaggtaagttcccgctgtgaagaggaaagccttctagcccgaggtcgatctagtgctcagaacaagcaggtggacgagaattctttgatttcaaccaaagaagagcctccagttcttgaaagggaggctccgtttttggagggccccttggctcagtcagaacttggaggtggacatgctgagttgccgcagctgaccttgtctgtgcctgtggctccggaagtctctccacggcctgcccttgagtctgaggaattgctagttaaaacgccaggaaattatgaaagtaaacgtcaaagaaaaccaactaagaaacttcttgaatccaatgatttagaccctggatttatgcccaagaagggggaccttggcctttctaaaaagtgctatgaagctggtcacctggagaatggcataactgaatcttgtgccacatcttattcaaaagattttggtggaggcactaccaagatatttgacaagccaaggaagcgaaaacgacagaggcatgctgcagccaagatgcagtgtaaaaaagtgaaaaatgatgactcgtcaaaagagattccaggctcagagggagaactaatgcctcacaggacggccacaagccccaaggagactgttgaggaaggtgtagaacacgatcccgggatgcctgcctctaaaaaaatgcagggtgaacgcggtggaggagctgcactcaaggagaatgtctgtcagaattgtgaaaaattgggtgagctgctgttatgtgaggctcagtgctgtggggctttccacctggagtgccttggattgactgagatgccaagaggaaaatttatctgcaatgaatgtcgcacaggaatccatacctgttttgtatgtaagcagagtggggaagatgttaaaaggtgccttctacccttgtgtggaaagttttaccatgaagagtgtgtccagaagtacccacccactgttatgcagaacaagggcttccggtgctccctccacatctgtataacctgtcatgctgctaatccagccaatgtttctgcatctaaaggtcggttgatgcgctgtgtccgctgtcctgtggcataccacgccaatgacttttgcctggctgctgggtcaaagatccttgcatctaatagtatcatctgccctaatcactttacccctaggcggggctgccgaaatcatgagcatgttaatgttagctggtgctttgtgtgctcagaaggaggcagccttctgtgctgtgattcttgccctgctgcttttcatcgtgaatgcctgaacattgatatccctgaaggaaactggtattgcaatgactgtaaagcaggcaaaaagccacactacagggagattgtctgggtaaaagttggacgatacaggtggtggccagctgagatctgccatcctcgagctgttccttccaacattgataagatgagacatgatgtgggagagttcccagtcctcttttttggatctaatgactatttgtggactcaccaggcccgagtcttcccttacatggagggtgacgtgagcagcaaggataagatgggcaaaggagtggatgggacatataaaaaagctcttcaggaagctgcagcaaggtttgaggaattaaaggcccaaaaagagctaagacagctgcaggaagaccgaaagaatgacaagaagccaccaccttataaacatataaaggtaaaccgtcctattggcagggtacagatcttcactgcagacttatctgaaataccccgttgcaactgtaaagctactgatgagaacccctgtgggatagactctgaatgcatcaaccgcatgctgctctatgagtgccaccccacagtgtgtcctgccggagggcgctgtcaaaaccagtgcttttccaagcgccaatatccagaggttgaaattttccgcacattacagcggggttggggtctacggacaaaaacagatattaaaaagggtgaatttgtgaatgagtatgtgggtgagcttatagatgaagaagaatgcagagctcgaattcgctatgctcaagaacatgatatcactaatttctatatgctcaccctagacaaagaccgaatcattgatgctggtcccaaaggaaactatgctcggttcatgaatcattgctgccagcccaactgtgaaacacagaagtggtctgtgaatggagatacccgtgtaggcctttttgcactaagtgacattaaagcaggcactgaacttaccttcaactacaacctagaatgtcttgggaatggaaagactgtttgcaaatgtggagccccgaactgcagtggcttcttgggtgtaaggccaaagaatcaacccattgccacggaagaaaagtcaaagaaattcaagaagaagcaacagggaaagcgcaggacccagggtgaaatcacaaaggagcgagaagatgagtgttttagttgtggggatgctggccagctcgtctcctgcaagaaaccaggctgcccaaaagtttaccacgcagactgtctcaatctgaccaagcgaccagcagggaaatgggaatgtccgtggcatcagtgtgacatctgcgggaaggaagcagcctccttctgtgagatgtgccccagctccttttgtaagcagcatcgagaagggatgcttttcatttccaaactggatgggcgtctgtcttgtactgagcatgacccctgtgggcccaatcctctggaacctggggagatccgtgagtatgtgcctcccccagtaccgctgcctccagggccaagcactcacctggcagagcaatcaacaggaatggctgctcaggcacccaaaatgtcagataaacctcctgctgacaccaaccagatgctgtcgctctccaaaaaagctctggcagggacttgtcagaggccattgctacctgaaagacctcttgagagaactgactccaggccccagcctttagataaggtcagagacctcgctgggtcagggaccaaatcccaatccttggtttccagccagaggccactggacaggccaccagcagtggcaggaccaagaccccagctaagcgacaaaccctctccagtgaccagcccaagctcctcaccctcagtcaggtcccaaccactggaaagacctctggggacggctgacccaaggctggataaatccataggtgctgccagcccaaggccccagtcactggagaaaacctcagttcccactggcctgagacttccgccgccagacagactgctcattactagcagtcccaaaccccagacttcagacaggcctactgacaaaccccatgcctctttgtcccagagactcccacctcctgagaaagtactatcagctgtggtccagacccttgtagctaaagaaaaagcactgaggcctgtggaccagaatactcagtcaaaaaatagagctgctttggtgatggatctcatagacctaactcctcgccagaaggagcgggcagcttcacctcatcaggtcacaccacaggctgatgagaagatgccagtgttggagtcaagttcatggcctgccagcaaaggtctggggcatatgccgagagctgttgagaaaggctgtgtgtcagatcctcttcagacatctgggaaagcagcagccccttcagaggacccctggcaagctgttaaatcactcacccaggccagacttctttctcagcctcctgccaaggcctttttatatgagccaacaactcaggcctcaggaagagcttctgcaggggctgagcagaccccagggcctcttagccaatccccgggcctggtgaagcaggcgaagcagatggtcggaggccagcaactacctgcacttgccgccaagagtgggcaatcttttaggtctctcgggaaggccccagcctccctccccactgaagaaaagaagttggtaaccacagagcaaagtccctgggccctgggaaaagcctcatcacgggcagggctctggcccatagtggctggacagacactggcacagtcttgctggtctgctgggagcacacagacattggcacagacttgctggtctcttggaagagggcaagaccccaaaccagagcaaaatacacttccagctcttaaccaggctccttccagtcacaagtgtgcagaatcagaacagaagtagtaccaatcaatgtcacatgaacaaacaagctgcccccagggtaccatttggggaggggaaatcttttctttctttcccccttaaaaaaaaacacatctgccccgaacactttcccactgttattctttcctcatatcccaacactcagaactcttgtgacattagccagtgggggcttatggttgtgtgaaccatgtatgaaaatccagtgggccccaaccaaggagacagacagacttgggtctctttcccccaacttttccacatggtcatcgtgaaataaaaagtccactctggagtcaagtatggaattcaattccgctggtcaggttggaaggtataggggctctcaaagcgatttccccaaccagacagagccccattgagggcacctaggaacccttgggaggaaatggtgttctttcaaatcagtggcgatttcctgagcattcacgtgttctaggccgggtgctagtcactgatgagagatacaggcctcatccctgtgagcctggattccaaggctttcaggaacctttgaccaggaagtaacaggaagttctgaggggccctggggctttagactcattttgaaatgtcctttgtggcaccagaagtggttgtgttgaggaagtgtctcttggctgcggtgtgcatgggtgcgtgtgcatgcgcgcacactcacagaggtctcctctatagatgcaagggtgctgcattgaggccagcaaggctgttggctgtggggtcgccgctgctgcttttgtctgggctgtgcagagtctcaagatcagtccttggaggagcaggtggtcaggggcagtcgggctctgtgcgaatgtagatttccagcagtggaagaaggcatttggcaagcttctctttctttgcttttgtttctacctatttttctctttgtacatgaatccaccccatccctatttccctaaaacactcaggtgctttcagatttcagagcctcgggcagtggacatagggaatctctggcaagctctgagctagacacaccagcttcaggaagagtaccagatcctgatgggaaatttcttttccccattccttttccctcctgagtggagggagtcctcttcttcgcctccctgagaattgctgtgctctgtattgagagcacctgcctgctgacttagctcaaaggcaagccagaacccttccctgaagactggcaagaggtggtgtttagagcaacgtccaggctaagagatgactcctattaactgctgattatctgttactgctgccctgagctggggcccaagggctgggaaatctgttggtgctaccctgccctaccattcacccagctcacagactgccaacaggaagtgctgtttggctagtttcctcccacttgtctacccctcctttgtccttagaccaacatgtttacctctctgctttgccaacttagccagcaggccatccccggccctaacgtctcctggccattatctcttagttatggctttcacgctctcaataggattctgtatttggtcccaatttcctcaagttcttattgaggttactcccatcaattccacggagggaacagtagttattatagaagcatttgcgctttatctaaagattaaaaatagaatctgcttttatttcccaaagtctgtctctgaggttgagacacttgaactcaggcagagggacgaggctgggcagggctgtcctgagtttaggggcctatccctgcatttcactgagacctcggaatctcctctgtgaattccacctgcctagttctcccctttcatcctctctctcttcccacatcatcaaagaggaaaagctctttgttcaaaaggaagagaaaacgtaaagcatcttattttcttttaaaagaattttaaaccatgaaaaagatatttttaaagaaattcaccgagaacattaaagttcattatattaagtatttatcatgtgtgagaataataaatatataactgcagctagtaggtccctttccctaatcttttaggtcatatgagtagggtttgcttggtgccagtcctgtgcccttttctctccagtcatctgtagttgtgatcagaaaaaggtatctgcactgcactgtcagagtctcctttcactatgttgtgtgttaaattaccgtagctctttgtttcatgaaataaactgtgaatttggggggggcggggggagggcgtgcaggccatgtaaaaattttccgtggagaagtttgattctaaagtagcttctctaaagtaggctttggtaggtaatcaacttgacagcagtctagatgtctcacaggacaggagggagtgagggaaaggggccatgattggctgctttgtggttttattttggttctttccattctccgccattcattggaggcttcgttccagacctgcctgggaaaacagcttctgagccattttggggagcagttcttcatctgaatggatggacatctgggcttccttcaagggccattgaatgggaactagaaaaccactggaaactagaaatttgagctattgggcccaccagtagcagcatgtgatactagatggttaaaatcatgaaagcagtcactatccaattagaagcagagtcacaacaactgttgggaaatgtgactcttggaggaaggtggggagggagtggccttgccagccctgtgggacgtcccctgaagtttgtaataagaccccttttccaaagggatgtgaattggagtgaaaaggaaatctttcatcttagaaaacttctggtccttaacgcagggtggtatttgggtatgtgcttggaaattgagatctcaagagtgtttgccttggagccagctccccaggaggccttttccagggacaaggcaaaagttgaaattctccatgggtagctagaaagccaatacatctagccctgctaagtcagaaaaagattatgaaaaatgttgaaatttacattcaaagcctcatttgcttatcttgctggagccaacccagtctaatagcaaaatagctgtcattgatacagaaacatcctcatttttaaatgtctgctttaccctgttactgagtttgagatgacttaaatcactgtgttgaccctcttctgaaccaaatctttagcattgatgaaaatagttattttattctttacatccttcaccccacactatggtcagggcatgaaacaccctgttgatcccttcccaggctcggcactgtctgctcactggagccggactcccaggttgtaattctaatgttgcctcatgagaacagaatggcagaaagtttagtcctgacagattcccccatagggagtaatgaggacagcatgaaacttggataggttttacccttagtccctataaggtggattttactaaggttttttaaatgatactgtcatcctcttggggtttatcagccaggttagaggagcccagtgtcctaacctctctcagatcatggcagagaaggagctgcctccagcccctttcttgctgagtttcatttgagcagttccatgtgtagacattccaagtcactgcttggtagttgctgtgggagcctgtcattggctatggccagttagttctcagctgagcttcctagggccagtgcaacagggccagaggctgctatagtgtaaattgaaataagaatagatcattgttttgtacacacacacaataaaatgtaatgatggtgctaatttcacggtataaataagcactgccaagggttgagggactggcagctcaagaaacccgggttcctgtttgggaggagattttatgtagaaaagtttgaggctttgttaaaagtggggagaaggaagatcctcagtgaagcctgcacccaaccctggagtggcccagtgcaatccagaggtggaagagatcctatatccaggtgaaggtggccattgagtttctcagggctggggccaccttgtccatagcctccgtccacgctgcctggagcaggttgttagagagctctggttgttgggtcttcctcagctcccttctgcccctctctacctcttccactcatggaagcccctctactgcttatgaagattaagggtagtattttctaaggaagtggaaagaattaaactagaaatccacaacctcggaagaagtgtttcgagtttaacatgcgctgtttctgcttatgtggttccttctctagagctgctttcccatggctttcaaaacatcaggttattgtggggcttcaggtgtaaggtcctggaagttcagcaaagtttcgtggacaagacatgggcacagagagtagaagcagaaataaatggttctatgttttcaacttccagggttggggcaggccagagcaaggcggtctcatcgaggtgggtgctacctgtgtgtgtgtagatgagtgtgctgaaggtggggagggcagcacacagcagctcatggcagagccgcctcctaggtcttggcaaagaggcaagctgacgatagacatctacctatattgttaagaaaggggtcggggggatcagccaaggtccatcattgcttttttgccgcgcccccccccccccgcccccatagattgtcagctgtaagtgaaactcctagtgaaaaagaggggagccctgtgttaggagtccccataaacatgtactgtaattctttgtatatagaaaaaaaatttactgtaaagtaaagtttaactttactc

SEQ ID NO: 20633 - DNA, 12892 bp, Homo sapiens
  source 1..12892: mol_type = unassigned DNA
gctggcccgggagggggcgcggggcacggttgatgccggcccaggatggatcagacctgtgaactacccagaagaaattgtctgctgcccttttccaatccagtgaatttagatgcccctgaagacaaggacagccctttcggtaatggtcaatccaatttttctgagccacttaatgggtgtactatgcagttatcgactgtcagtggaacatcccaaaatgcttatggacaagattctccatcttgttacattccactgcggagactacaggatttggcctccatgatcaatgtagagtatttaaatgggtctgctgatggatcagaatcctttcaagaccctgaaaaaagtgattcaagagctcagacgccaattgtttgcacttccttgagtcctggtggtcctacagcacttgctatgaaacaggaaccctcttgtaataactcccctgaactccaggtaaaagtaacaaagactatcaagaatggctttctgcactttgagaattttacttgtgtggacgatgcagatgtagattctgaaatggacccagaacagccagtcacagaggatgagagtatagaggagatctttgaggaaactcagaccaatgccacctgcaattatgagactaaatcagagaatggtgtaaaagtggccatgggaagtgaacaagacagcacaccagagagtagacacggtgcagtcaaatcgccattcttgccattagctcctcagactgaaacacagaaaaataagcaaagaaatgaagtggacggcagcaatgaaaaagcagcccttctcccagcccccttttcactaggagacacaaacattacaatagaagagcaattaaactcaataaatttatcttttcaggatgatccagattccagtaccagtacattaggaaacatgctagaattacctggaacttcatcatcatctacttcacaggaattgccattttgtcaacctaagaaaaagtctacgccactgaagtatgaagttggagatctcatctgggcaaaattcaagagacgcccatggtggccctgcaggatttgttctgatccgttgattaacacacattcaaaaatgaaagtttccaaccggaggccctatcggcagtactacgtggaggcttttggagatccttctgagagagcctgggtggctggaaaagcaatcgtcatgtttgaaggcagacatcaattcgaagagctacctgtccttaggagaagagggaaacagaaagaaaaaggatataggcataaggttcctcagaaaattttgagtaaatgggaagccagtgttggacttgcagaacagtatgatgttcccaaggggtcaaagaaccgaaaatgtattcctggttcaatcaagttggacagtgaagaagatatgccatttgaagactgcacaaatgatcctgagtcagaacatgacctgttgcttaatggctgtttgaaatcactggcttttgattctgaacattctgcagatgagaaggaaaagccttgcgctaaatctcgagccagaaagagctctgataatccaaaaaggactagtgtgaaaaagggccacatacaatttgaagcacataaagatgaacggaggggaaagattccagagaaccttggcctaaactttatctctggggatatatctgatacgcaggcctctaatgaactttccaggatagcaaatagcctcacagggtccaacactgccccaggaagttttctgttttcttcctgtggaaaaaacactgcaaagaaagaatttgagacttcaaatggtgactctttattgggcttgcctgagggtgctttgatctcaaagtgttctcgagagaagaataaaccccaacgaagcctggtgtgtggttcaaaagtgaagctctgctatattggagcaggtgatgaggaaaagcgaagtgattccattagtatctgtaccacttctgatgatggaagcagtgacctggatcccatagaacacagctcagagtctgataacagtgtccttgaaattccagatgctttcgatagaacagagaacatgttatctatgcagaaaaatgaaaagataaagtattctaggtttgctgccacaaacactagggtaaaagcaaaacagaagcctctcattagtaactcacatacagaccacttaatgggttgtactaagagtgcagagcctggaaccgagacgtctcaggttaatctctctgatctgaaggcatctactcttgttcacaaaccccagtcagattttacaaatgatgctctctctccaaaattcaacctgtcatcaagcatatccagtgagaactcgttaataaagggtggggcagcaaatcaagctctattacattcgaaaagcaaacagcccaagttccgaagtataaagtgcaaacacaaagaaaatccagttatggcagaacccccagttataaatgaggagtgcagtttgaaatgctgctcttctgataccaaaggctctcctttggccagcatttctaaaagtgggaaagtggatggtctaaaactactgaacaatatgcatgagaaaaccagggattcaagtgacatagaaacagcagtggtgaaacatgttttatccgagttgaaggaactctcttacagatccttaggtgaggatgtcagtgactctggaacatcaaagccatcaaaaccattacttttctcttctgcttctagtcagaatcacatacctattgaaccagactacaaattcagtacattgctaatgatgttgaaagatatgcatgatagtaagacgaaggagcagcggttgatgactgctcaaaacctggtctcttaccggagtcctggtcgtggggactgttctactaatagtcctgtaggagtctctaaggttttggtttcaggaggctccacacacaattcagagaaaaagggagatggcactcagaactccgccaatcctagccctagtgggggtgactctgcattatctggcgagttgtctgcttccctacctggcttactgtccgacaagagagacctccctgcttctggtaaaagtcgttcagactgtgttactaggcgcaactgtggacgatcaaagccttcatccaaattgcgagatgctttttcagcccaaatggtaaagaacacagtgaaccgtaaagccttaaagaccgagcgcaaaagaaaactgaatcagcttccaagtgtgactcttgatgctgtactgcagggagaccgagaacgtggaggttcattgagaggtggggcagaagatcctagtaaagaggatccccttcagataatgggccacttaacaagtgaagatggtgaccatttttctgatgtgcatttcgatagcaaggttaagcaatctgatcctggtaaaatttctgaaaaaggactctcttttgaaaacggaaaaggcccagagctggactctgtaatgaacagtgagaatgatgaactcaatggtgtaaatcaagtggtgcctaaaaagcggtggcagcgtttaaaccaaaggcgcactaaacctcgtaagcgcatgaacagatttaaagagaaagaaaactctgagtgtgcctttagggtcttacttcctagtgaccctgtgcaggaggggcgggatgagtttccagagcatagaactccttcagcaagcatacttgaggaaccactgacagagcaaaatcatgctgactgcttagattcagctgggccacggttaaatgtttgtgataaatccagtgccagcattggtgacatggaaaaggagccaggaattcccagtttgacaccacaggctgagctccctgaaccagctgtgcggtcagagaagaaacgccttaggaagccaagcaagtggcttttggaatatacagaagaatatgatcagatatttgctcctaagaaaaaacaaaagaaggtacaggagcaggtgcacaaggtaagttcccgctgtgaagaggaaagccttctagcccgaggtcgatctagtgctcagaacaagcaggtggacgagaattctttgatttcaaccaaagaagagcctccagttcttgaaagggaggctccgtttttggagggccccttggctcagtcagaacttggaggtggacatgctgagttgccgcagctgaccttgtctgtgcctgtggctccggaagtctctccacggcctgcccttgagtctgaggaattgctagttaaaacgccaggaaattatgaaagtaaacgtcaaagaaaaccaactaagaaacttcttgaatccaatgatttagaccctggatttatgcccaagaagggggaccttggcctttctaaaaagtgctatgaagctggtcacctggagaatggcataactgaatcttgtgccacatcttattcaaaagattttggtggaggcactaccaagatatttgacaagccaaggaagcgaaaacgacagaggcatgctgcagccaagatgcagtgtaaaaaagtgaaaaatgatgactcgtcaaaagagattccaggctcagagggagaactaatgcctcacaggacggccacaagccccaaggagactgttgaggaaggtgtagaacacgatcccgggatgcctgcctctaaaaaaatgcagggtgaacgcggtggaggagctgcactcaaggagaatgtctgtcagaattgtgaaaaattgggtgagctgctgttatgtgaggctcagtgctgtggggctttccacctggagtgccttggattgactgagatgccaagaggaaaatttatctgcaatgaatgtcgcacaggaatccatacctgttttgtatgtaagcagagtggggaagatgttaaaaggtgccttctacccttgtgtggaaagttttaccatgaagagtgtgtccagaagtacccacccactgttatgcagaacaagggcttccggtgctccctccacatctgtataacctgtcatgctgctaatccagccaatgtttctgcatctaaaggtcggttgatgcgctgtgtccgctgtcctgtggcataccacgccaatgacttttgcctggctgctgggtcaaagatccttgcatctaatagtatcatctgccctaatcactttacccctaggcggggctgccgaaatcatgagcatgttaatgttagctggtgctttgtgtgctcagaaggaggcagccttctgtgctgtgattcttgccctgctgcttttcatcgtgaatgcctgaacattgatatccctgaaggaaactggtattgcaatgactgtaaagcaggcaaaaagccacactacagggagattgtctgggtaaaagttggacgatacaggtggtggccagctgagatctgccatcctcgagctgttccttccaacattgataagatgagacatgatgtgggagagttcccagtcctcttttttggatctaatgactatttgtggactcaccaggcccgagtcttcccttacatggagggtgacgtgagcagcaaggataagatgggcaaaggagtggatgggacatataaaaaagctcttcaggaagctgcagcaaggtttgaggaattaaaggcccaaaaagagctaagacagctgcaggaagaccgaaagaatgacaagaagccaccaccttataaacatataaaggtaaaccgtcctattggcagggtacagatcttcactgcagacttatctgaaataccccgttgcaactgtaaagctactgatgagaacccctgtgggatagactctgaatgcatcaaccgcatgctgctctatgagtgccaccccacagtgtgtcctgccggagggcgctgtcaaaaccagtgcttttccaagcgccaatatccagaggttgaaattttccgcacattacagcggggttggggtctacggacaaaaacagatattaaaaagggtgaatttgtgaatgagtatgtgggtgagcttatagatgaagaagaatgcagagctcgaattcgctatgctcaagaacatgatatcactaatttctatatgctcaccctagacaaagaccgaatcattgatgctggtcccaaaggaaactatgctcggttcatgaatcattgctgccagcccaactgtgaaacacagaagtggtctgtgaatggagatacccgtgtaggcctttttgcactaagtgacattaaagcaggcactgaacttaccttcaactacaacctagaatgtcttgggaatggaaagactgtttgcaaatgtggagccccgaactgcagtggcttcttgggtgtaaggccaaagaatcaacccattgccacggaagaaaagtcaaagaaattcaagaagaagcaacagggaaagcgcaggacccagggtgaaatcacaaaggagcgagaagatgagtgttttagttgtggggatgctggccagctcgtctcctgcaagaaaccaggctgcccaaaagtttaccacgcagactgtctcaatctgaccaagcgaccagcagggaaatgggaatgtccgtggcatcagtgtgacatctgcgggaaggaagcagcctccttctgtgagatgtgccccagctccttttgtaagcagcatcgagaagggatgcttttcatttccaaactggatgggcgtctgtcttgtactgagcatgacccctgtgggcccaatcctctggaacctggggagatccgtgagtatgtgcctcccccagtaccgctgcctccagggccaagcactcacctggcagagcaatcaacaggaatggctgctcaggcacccaaaatgtcagataaacctcctgctgacaccaaccagatgctgtcgctctccaaaaaagctctggcagggacttgtcagaggccattgctacctgaaagacctcttgagagaactgactccaggccccagcctttagataaggtcagagacctcgctgggtcagggaccaaatcccaatccttggtttccagccagaggccactggacaggccaccagcagtggcaggaccaagaccccagctaagcgacaaaccctctccagtgaccagcccaagctcctcaccctcagtcaggtcccaaccactggaaagacctctggggacggctgacccaaggctggataaatccataggtgctgccagcccaaggccccagtcactggagaaaacctcagttcccactggcctgagacttccgccgccagacagactgctcattactagcagtcccaaaccccagacttcagacaggcctactgacaaaccccatgcctctttgtcccagagactcccacctcctgagaaagtactatcagctgtggtccagacccttgtagctaaagaaaaagcactgaggcctgtggaccagaatactcagtcaaaaaatagagctgctttggtgatggatctcatagacctaactcctcgccagaaggagcgggcagcttcacctcatcaggtcacaccacaggctgatgagaagatgccagtgttggagtcaagttcatggcctgccagcaaaggtctggggcatatgccgagagctgttgagaaaggctgtgtgtcagatcctcttcagacatctgggaaagcagcagccccttcagaggacccctggcaagctgttaaatcactcacccaggccagacttctttctcagcctcctgccaaggcctttttatatgagccaacaactcaggcctcaggaagagcttctgcaggggctgagcagaccccagggcctcttagccaatccccgggcctggtgaagcaggcgaagcagatggtcggaggccagcaactacctgcacttgccgccaagagtgggcaatcttttaggtctctcgggaaggccccagcctccctccccactgaagaaaagaagttggtaaccacagagcaaagtccctgggccctgggaaaagcctcatcacgggcagggctctggcccatagtggctggacagacactggcacagtcttgctggtctgctgggagcacacagacattggcacagacttgctggtctcttggaagagggcaagaccccaaaccagagcaaaatacacttccagctcttaaccaggctccttccagtcacaagtgtgcagaatcagaacagaagtagtaccaatcaatgtcacatgaacaaacaagctgcccccagggtaccatttggggaggggaaatcttttctttctttcccccttaaaaaaaaacacatctgccccgaacactttcccactgttattctttcctcatatcccaacactcagaactcttgtgacattagccagtgggggcttatggttgtgtgaaccatgtatgaaaatccagtgggccccaaccaaggagacagacagacttgggtctctttcccccaacttttccacatggtcatcgtgaaataaaaagtccactctggagtcaagtatggaattcaattccgctggtcaggttggaaggtataggggctctcaaagcgatttccccaaccagacagagccccattgagggcacctaggaacccttgggaggaaatggtgttctttcaaatcagtggcgatttcctgagcattcacgtgttctaggccgggtgctagtcactgatgagagatacaggcctcatccctgtgagcctggattccaaggctttcaggaacctttgaccaggaagtaacaggaagttctgaggggccctggggctttagactcattttgaaatgtcctttgtggcaccagaagtggttgtgttgaggaagtgtctcttggctgcggtgtgcatgggtgcgtgtgcatgcgcgcacactcacagaggtctcctctatagatgcaagggtgctgcattgaggccagcaaggctgttggctgtggggtcgccgctgctgcttttgtctgggctgtgcagagtctcaagatcagtccttggaggagcaggtggtcaggggcagtcgggctctgtgcgaatgtagatttccagcagtggaagaaggcatttggcaagcttctctttctttgcttttgtttctacctatttttctctttgtacatgaatccaccccatccctatttccctaaaacactcaggtgctttcagatttcagagcctcgggcagtggacatagggaatctctggcaagctctgagctagacacaccagcttcaggaagagtaccagatcctgatgggaaatttcttttccccattccttttccctcctgagtggagggagtcctcttcttcgcctccctgagaattgctgtgctctgtattgagagcacctgcctgctgacttagctcaaaggcaagccagaacccttccctgaagactggcaagaggtggtgtttagagcaacgtccaggctaagagatgactcctattaactgctgattatctgttactgctgccctgagctggggcccaagggctgggaaatctgttggtgctaccctgccctaccattcacccagctcacagactgccaacaggaagtgctgtttggctagtttcctcccacttgtctacccctcctttgtccttagaccaacatgtttacctctctgctttgccaacttagccagcaggccatccccggccctaacgtctcctggccattatctcttagttatggctttcacgctctcaataggattctgtatttggtcccaatttcctcaagttcttattgaggttactcccatcaattccacggagggaacagtagttattatagaagcatttgcgctttatctaaagattaaaaatagaatctgcttttatttcccaaagtctgtctctgaggttgagacacttgaactcaggcagagggacgaggctgggcagggctgtcctgagtttaggggcctatccctgcatttcactgagacctcggaatctcctctgtgaattccacctgcctagttctcccctttcatcctctctctcttcccacatcatcaaagaggaaaagctctttgttcaaaaggaagagaaaacgtaaagcatcttattttcttttaaaagaattttaaaccatgaaaaagatatttttaaagaaattcaccgagaacattaaagttcattatattaagtatttatcatgtgtgagaataataaatatataactgcagctagtaggtccctttccctaatcttttaggtcatatgagtagggtttgcttggtgccagtcctgtgcccttttctctccagtcatctgtagttgtgatcagaaaaaggtatctgcactgcactgtcagagtctcctttcactatgttgtgtgttaaattaccgtagctctttgtttcatgaaataaactgtgaatttggggggggcggggggagggcgtgcaggccatgtaaaaattttccgtggagaagtttgattctaaagtagcttctctaaagtaggctttggtaggtaatcaacttgacagcagtctagatgtctcacaggacaggagggagtgagggaaaggggccatgattggctgctttgtggttttattttggttctttccattctccgccattcattggaggcttcgttccagacctgcctgggaaaacagcttctgagccattttggggagcagttcttcatctgaatggatggacatctgggcttccttcaagggccattgaatgggaactagaaaaccactggaaactagaaatttgagctattgggcccaccagtagcagcatgtgatactagatggttaaaatcatgaaagcagtcactatccaattagaagcagagtcacaacaactgttgggaaatgtgactcttggaggaaggtggggagggagtggccttgccagccctgtgggacgtcccctgaagtttgtaataagaccccttttccaaagggatgtgaattggagtgaaaaggaaatctttcatcttagaaaacttctggtccttaacgcagggtggtatttgggtatgtgcttggaaattgagatctcaagagtgtttgccttggagccagctccccaggaggccttttccagggacaaggcaaaagttgaaattctccatgggtagctagaaagccaatacatctagccctgctaagtcagaaaaagattatgaaaaatgttgaaatttacattcaaagcctcatttgcttatcttgctggagccaacccagtctaatagcaaaatagctgtcattgatacagaaacatcctcatttttaaatgtctgctttaccctgttactgagtttgagatgacttaaatcactgtgttgaccctcttctgaaccaaatctttagcattgatgaaaatagttattttattctttacatccttcaccccacactatggtcagggcatgaaacaccctgttgatcccttcccaggctcggcactgtctgctcactggagccggactcccaggttgtaattctaatgttgcctcatgagaacagaatggcagaaagtttagtcctgacagattcccccatagggagtaatgaggacagcatgaaacttggataggttttacccttagtccctataaggtggattttactaaggttttttaaatgatactgtcatcctcttggggtttatcagccaggttagaggagcccagtgtcctaacctctctcagatcatggcagagaaggagctgcctccagcccctttcttgctgagtttcatttgagcagttccatgtgtagacattccaagtcactgcttggtagttgctgtgggagcctgtcattggctatggccagttagttctcagctgagcttcctagggccagtgcaacagggccagaggctgctatagtgtaaattgaaataagaatagatcattgttttgtacacacacacaataaaatgtaatgatggtgctaatttcacggtataaataagcactgccaagggttgagggactggcagctcaagaaacccgggttcctgtttgggaggagattttatgtagaaaagtttgaggctttgttaaaagtggggagaaggaagatcctcagtgaagcctgcacccaaccctggagtggcccagtgcaatccagaggtggaagagatcctatatccaggtgaaggtggccattgagtttctcagggctggggccaccttgtccatagcctccgtccacgctgcctggagcaggttgttagagagctctggttgttgggtcttcctcagctcccttctgcccctctctacctcttccactcatggaagcccctctactgcttatgaagattaagggtagtattttctaaggaagtggaaagaattaaactagaaatccacaacctcggaagaagtgtttcgagtttaacatgcgctgtttctgcttatgtggttccttctctagagctgctttcccatggctttcaaaacatcaggttattgtggggcttcaggtgtaaggtcctggaagttcagcaaagtttcgtggacaagacatgggcacagagagtagaagcagaaataaatggttctatgttttcaacttccagggttggggcaggccagagcaaggcggtctcatcgaggtgggtgctacctgtgtgtgtgtagatgagtgtgctgaaggtggggagggcagcacacagcagctcatggcagagccgcctcctaggtcttggcaaagaggcaagctgacgatagacatctacctatattgttaagaaaggggtcggggggatcagccaaggtccatcattgcttttttgccgcgcccccccccccccgcccccatagattgtcagctgtaagtgaaactcctagtgaaaaagaggggagccctgtgttaggagtccccataaacatgtactgtaattctttgtatatagaaaaaaaatttactgtaaagtaaagtttaactttactcatata

SEQ ID NO: 20634 - DNA, 585 bp, Homo sapiens
  source 1..585: mol_type = unassigned DNA
acaagcccgacttcacccgccctgaaccccgaagagttgatgccggcccaggatggatcagacctgtgaactacccagaagaaattgtctgctgcccttttccaatccagtgaatttagatgcccctgaagacaaggacagccctttcggatgatccagattccagtaccagtacattaggaaacatgctagaattacctggaacttcatcatcatctacttcacaggaattgccattttgtcaacctaagaaaaagtctacgccactgaagtatgaagttggagatctcatctgggcaaaattcaagagacgcccatggtggccctgcaggatttgttctgatccgttgattaacacacattcaaaaatgaaagtttccaaccggaggccctatcggcagtactacgtggaggcttttggagatccttctgagagagcctgggtggctggaaaagcaatcgtcatgtttgaaggcagacatcaattcgaagagctacctgtccttaggagaagagggaaacagaaagaaaaaggatataggcataaggttcctcagaaaattttgagtaaatgggaagccagtg

SEQ ID NO: 20635 - DNA, 533 bp, Homo sapiens
  source 1..533: mol_type = unassigned DNA
ggccgggtagggggttcgcctgcggccgcgtctgctcggggcctgaggcctcgaagaccccagcccaagcccccaggttgatgccggcccaggatggatcagacctgtgaactacccagaagaaattgtctgctgcccttttccaatccagtgaatttagatgcccctgaagacaaggacagccctttcggatgatccagattccagtaccagtacattaggaaacatgctagaattacctggaacttcatcatcatctacttcacaggaattgccattttgtcaacctaagaaaaagtctacgccactgaagtatgaagttggagatctcatctgggcaaaattcaagagacgcccatggtggccctgcaggatttgttctgatccgttgattaacacacattcaaaaatgaaagtttccaaccggaggccctatcggcagtactacgtggaggcttttggagatccttctgagagagcctgggtggctggaaaagcaatcgtcatgtttgaaggcagacatcaattcgaag

SEQ ID NO: 20636 - DNA, 6952 bp, Homo sapiens
  source 1..6952: mol_type = unassigned DNA
ttccagttacagctatatcagagaatgagttaatctcctcagaaatcactaaatactactctgaggggcttagaaattaacaggttgtttatataattggccttaaatgaggtgagagtgaagagactagagccatctctggaaaacatcattatcccattccccgggaagctaccctctggaactcaagatttgaccatatctgttttgaggattcattatgaacaaagaagtctcccaggtgtgaagtttttcaacatgagtggcctcggggacagttcatccgaccctgctaacccagactcacataagaggaaaggatcgccatgtgacacactggcatcaagcacggaaaagaggcgcagggagcaagaaaataaatatttagaagaactagctgagttactgtctgccaacattagtgacattgacagcttgagtgtaaaaccagacaaatgcaagattttgaagaaaacagtcgatcagatacagctaatgaagagaatggaacaagagaaatcaacaactgatgacgatgtacagaaatcagacatctcatcaagtagtcaaggagtgatagaaaaggaatccttgggacctcttcttttggaggctttggatggatttttctttgttgtgaactgtgaagggagaattgtatttgtgtcagagaatgtaaccagctacttaggttacaatcaggaggaattaatgaatacgagcgtctacagcatactgcacgtgggggatcatgcagaatttgtgaagaatctgctaccaaaatcactagtaaatggagttccttggcctcaagaggcaacacgacgaaatagccatacctttaactgcaggatgctaattcaccctccagatgagccagggaccgagaaccaagaagcttgccagcgttatgaagtaatgcagtgtttcactgtgtcacagccaaaatcaattcaagaggatggagaagatttccagtcatgtctgatttgtattgcacggcgattacctcggcctccagctattacgggtgtagaatcctttatgaccaagcaagatactacaggtaaaatcatctctattgatactagttccctgagagctgctggcagaactggttgggaagatttagtgaggaagtgcatttatgcttttttccaacctcagggcagagaaccatcttatgccagacagctgttccaagaagtgatgactcgtggcactgcctccagcccctcctatagattcatattgaatgatgggacaatgcttagcgcccacaccaagtgtaaactttgctaccctcaaagtccagacatgcaacctttcatcatgggaattcatatcatcgacagggagcacagtgggctttctcctcaagatgacactaattctggaatgtcaattccccgagtaaatccctcggtcaatcctagtatctctccagctcatggtgtggctcgttcatccacattgccaccatccaacagcaacatggtatccaccagaataaaccgccagcagagctcagaccttcatagcagcagtcatagtaattctagcaacagccaaggaagtttcggatgctcacccggaagtcagattgtagccaatgttgccttaaaccaaggacaggccagttcacagagcagtaatccctctttaaacctcaataattctcctatggaaggtacaggaatatccctagcacagttcatgtctccaaggagacaggttacttctggattggcaacaaggcccaggatgccaaacaattcctttcctcctaatatttcgacattaagctctcccgttggcatgacaagtagtgcctgtaataataataaccgatcttattcaaacatcccagtaacatctttacagggtatgaatgaaggacccaataactccgttggcttctctgccagttctccagtcctcaggcagatgagctcacagaattcacctagcagattaaatatacaaccagcaaaagctgagtccaaagataacaaagagattgcctcaattttaaatgaaatgattcaatctgacaacagctctagtgatggcaaacctctggattcagggcttctgcataacaatgacagactttcagatggagacagtaaatactctcaaaccagtcacaaactagtgcagcttttgacaacaactgccgaacagcagttacggcatgctgatatagacacaagctgcaaagatgtcctgtcttgcacaggcacttccaactctgcctctgctaactcttcaggaggttcttgtccctcttctcatagctcattgacagaacggcataaaattctacaccggctcttacaggagggtagcccctcagatatcaccactttgtctgtcgagcctgataaaaaggacagtgcatctacttctgtgtcagtgactggacaggtacaaggaaactccagtataaaactagaactggatgcttcaaagaaaaaagaatcaaaagaccatcagctcctacgctatcttttagataaagatgagaaagatttaagatcaactccaaacctgagcctggatgatgtaaaggtgaaagtggaaaagaaagaacagatggatccatgtaatacaaacccaaccccaatgaccaaacccactcctgaggaaataaaactggaggcccagagccagtttacagctgaccttgaccagtttgatcagttactgcccacgctggagaaggcagcacagttgccaggcttatgtgagacagacaggatggatggtgcggtcaccagtgtaaccatcaaatcggagatcctgccagcttcacttcagtccgccactgccagacccacttccaggctaaatagattacctgagctggaattggaagcaattgataaccaatttggacaaccaggaacaggcgatcagattccatggacaaataatacagtgacagctataaatcagagtaaatcagaagaccagtgtattagctcacaattagatgagcttctctgtccacccacaacagtagaagggagaaatgatgagaaggctcttcttgaacagctggtatccttccttagtggcaaagatgaaactgagctagctgaactagacagagctctgggaattgacaaacttgttcaggggggtggattagatgtattatcagagagatttccaccacaacaagcaacgccacctttgatcatggaagaaagacccaacctttattcccagccttactcttctccttctcctactgccaatctccctagccctttccaaggcatggtcaggcaaaaaccttcactggggacgatgcctgttcaagtaacacctccccgaggtgctttttcacctggcatgggcatgcagcccaggcaaactctaaacagacctccggctgcacctaaccagcttcgacttcaactacagcagcgattacagggacaacagcagttgatacaccaaaatcggcaagctatcttaaaccagtttgcagcaactgctcctgttggcatcaatatgagatcaggcatgcaacagcaaattacacctcagccacccctgaatgctcaaatgttggcacaacgtcagcgggaactgtacagtcaacagcaccgacagaggcagctaatacagcagcaaagagccatgcttatgaggcagcaaagctttgggaacaacctccctccctcatctggactaccagttcaaatggggaacccccgtcttcctcagggtgctccacagcaattcccctatccaccaaactatggtacaaatccaggaaccccacctgcttctaccagcccgttttcacaactagcagcaaatcctgaagcatccttggccaaccgcaacagcatggtgagcagaggcatgacaggaaacataggaggacagtttggcactggaatcaatcctcagatgcagcagaatgtcttccagtatccaggagcaggaatggttccccaaggtgaggccaactttgctccatctctaagccctgggagctccatggtgccgatgccaatccctcctcctcagagttctcttctccagcaaactccacctgcctccgggtatcagtcaccagacatgaaggcctggcagcaaggagcgataggaaacaacaatgtgttcagtcaagctgtccagaaccagcccacgcctgcacagccaggagtatacaacaacatgagcatcaccgtttccatggcaggtggaaatacgaatgttcagaacatgaacccaatgatggcccagatgcagatgagctctttgcagatgccaggaatgaacactgtgtgccctgagcagataaatgatcccgcactgagacacacaggcctctactgcaaccagctctcatccactgaccttctcaaaacagaagcagatggaacccaggacaagaagacagaagagttcttctctgtggtgactacagactagaggaatgctctacaggtgcaacaggttcaggtgtttgctgacgtccagtgtacagtgaatctggtaggcggggacccttacctgaaccagcctggtccactgggaactcaaaagcccacgtcaggaccacagaccccccaggcccagcagaagagcctccttcagcagctactgactgaataaccacttttaaaggaatgtgaaatttaaataatagacatacagagatatacaaatatattatatatttttctgagatttttgatatctcaatctgcagccattcttcaggtcgtagcatttggagcaaaaaaaaaaaaaaaaaaaaaaaaaggagtttgcttttgtcgggagattgaaagatgtttttgtttctttctttgtaaaggccttggatattgaaaaaataccaaggcagaacagttggacaatctatttcttgagccaaatttaattattcttatttttgtaatcagtcattggcttcttatctggatgaaggcttttggaggagaaccaaaacgacaagttccaagaagaagatgaagctccgcctccgccgcttagtcccaaccctgcccaggaagaagggcccgtggggctttgcctgtgcccgtccaccaaaggctgtcatgtgtctcgaaatcagcagccctccccatcccaatcccaggcagcttgtgtgtacaatcagcttctctagcaactctgtatctgttggcttcaagagaatattttgcctccacatatgtaccccttctcctttttttaaagatggatttaaaccaagatgcctccaggaaagaggacgaaatgagtatattcacagaggaatccaaaaaatacagtttgggggaaaatgcaataatttttgatgagatgggtgaaggacaagaagtgagttgtgtcaattattgtagatacaattttctgattaaatctggaaaaataaaaggcagcctgttttttctgcttttattgtattaacagctgaggtagctaaagttatttaaaataaaattaaatttatgatccaagtagcttatttttccctttaaatctcattgtaaatatatttgatttcttgtagaaattgatttccttctgtttaattttatgcttttattatactcttgatttttctaaatttgtgtgtgaaatataacattgattgaattgcagttacatttggttagtaatatttcattattttaataactgtgatgtcatgtatggatttactttggggttcaaatcaaaatgtcactgccagaaagagctgttccagctgatctagagcatactgccctagagtgtccctgggatcatctgaacagaagtgcacaggctacttgtacagagaaaaaattaatactcaaaggaaatcttcattttttagattgactttgggaatttgaattttcatcagtgcaaatataaatttctctatcctgctctgaggctaattggtaccatattttccctttgtgtcttgtgactctgccacatcccatctcatcctggcctctgagtcaagaacccagtgaactgactttctagttctagaagttccgctgcaaggccaggaaagcttgagaaaggtattgtggaagaagcaaaggtagacccccatcactcacctttgtctgcatccctgggcctgtgaatgatgacagcacctgacattctgcaccagctacctctgcctccatggcagagaaaaggccataagaacagtggaagaggagcatggactcagacttcaaggaagaagccatttccccaggtccttccttctgcatctcaccacccctagttacaaataactccattgaacagcatctattcagaaactatgccgaataaaaagattggtggaagggctcatgtggttagcaactatgaaacagaaataggacactcagttacaaacattatctcctttagtttttcagaaaatgcatccctgatttcattcatttccagcttgaaagccagccatattactctagtccctaccaaactgctctagaaggtcatttccattttgtttgtgatatttagacgcgcagacttcaggaagttcacctttaacttcagcattccagatgaagtttcctgactcagtgcttttgcataaggaactagaaaaaaaaagtaaggaaaattggagatgctaacatcctcccccatcccaactgcaccttaaaatatgcatgtcaccttcaaggttttataattgcactgtttgttttatgtatgtacagattaaaattattgctacatttgaggaaaataaaattgcttgcttctatgtaattcctgtcattccacaggaaattcacttttccagctactgaatagaatttgtttaacaacctcatgggttgcctcttcatttacagggaagaaatgaaatgtacatctgcagaaattgccaaagcccaaattaacgagtattataaaaggataataaagcatccctgaagccaaa

SEQ ID NO: 20637 - DNA, 6895 bp, Homo sapiens
  source 1..6895: mol_type = unassigned DNA
ttccagttacagctatatcagagaatgagttaatctcctcagaaatcactaaatactactctgaggggcttagaaattaacaggttgtttatataattggccttaaatgaggtgagagtgaagagactagagccatctctggaaaacatcattatcccattccccgggaagctaccctctggaactcaagatttgaccatatctgttttgaggattcattatgaacaaagaagtctcccaggtgtgaagtttttcaacatgagtggcctcggggacagttcatccgaccctgctaacccagactcacataagaggaaaggatcgccatgtgacacactggcatcaagcacggaaaagaggcgcagggagcaagaaaataaatatttagaagaactagctgagttactgtctgccaacattagtgacattgacagcttgagtgtaaaaccagacaaatgcaagattttgaagaaaacagtcgatcagatacagctaatgaagagaatggaacaagagaaatcaacaactgatgacgatgtacagaaatcagacatctcatcaagtagtcaaggagtgatagaaaaggaatccttgggacctcttcttttggaggctttggatggatttttctttgttgtgaactgtgaagggagaattgtatttgtgtcagagaatgtaaccagctacttaggttacaatcaggaggaattaatgaatacgagcgtctacagcatactgcacgtgggggatcatgcagaatttgtgaagaatctgctaccaaaatcactagtaaatggagttccttggcctcaagaggcaacacgacgaaatagccatacctttaactgcaggatgctaattcaccctccagatgagccagggaccgagaaccaagaagcttgccagcgttatgaagtaatgcagtgtttcactgtgtcacagccaaaatcaattcaagaggatggagaagatttccagtcatgtctgatttgtattgcacggcgattacctcggcctccagctattacgggtgtagaatcctttatgaccaagcaagatactacaggtaaaatcatctctattgatactagttccctgagagctgctggcagaactggttgggaagatttagtgaggaagtgcatttatgcttttttccaacctcagggcagagaaccatcttatgccagacagctgttccaagaagtgatgactcgtggcactgcctccagcccctcctatagattcatattgaatgatgggacaatgcttagcgcccacaccaagtgtaaactttgctaccctcaaagtccagacatgcaacctttcatcatgggaattcatatcatcgacagggagcacagtgggctttctcctcaagatgacactaattctggaatgtcaattccccgagtaaatccctcggtcaatcctagtatctctccagctcatggtgtggctcgttcatccacattgccaccatccaacagcaacatggtatccaccagaataaaccgccagcagagctcagaccttcatagcagcagtcatagtaattctagcaacagccaaggaagtttcggatgctcacccggaagtcagattgtagccaatgttgccttaaaccaaggacaggccagttcacagagcagtaatccctctttaaacctcaataattctcctatggaaggtacaggaatatccctagcacagttcatgtctccaaggagacaggttacttctggattggcaacaaggcccaggatgccaaacaattcctttcctcctaatatttcgacattaagctctcccgttggcatgacaagtagtgcctgtaataataataaccgatcttattcaaacatcccagtaacatctttacagggtatgaatgaaggacccaataactccgttggcttctctgccagttctccagtcctcaggcagatgagctcacagaattcacctagcagattaaatatacaaccagcaaaagctgagtccaaagataacaaagagattgcctcaattttaaatgaaatgattcaatctgacaacagctctagtgatggcaaacctctggattcagggcttctgcataacaatgacagactttcagatggagacagtaaatactctcaaaccagtcacaaactagtgcagcttttgacaacaactgccgaacagcagttacggcatgctgatatagacacaagctgcaaagatgtcctgtcttgcacaggcacttccaactctgcctctgctaactcttcaggaggttcttgtccctcttctcatagctcattgacagaacggcataaaattctacaccggctcttacaggagggtagcccctcagatatcaccactttgtctgtcgagcctgataaaaaggacagtgcatctacttctgtgtcagtgactggacaggtacaaggaaactccagtataaaactagaactggatgcttcaaagaaaaaagaatcaaaagaccatcagctcctacgctatcttttagataaagatgagaaagatttaagatcaactccaaacctgagcctggatgatgtaaaggtgaaagtggaaaagaaagaacagatggatccatgtaatacaaacccaaccccaatgaccaaacccactcctgaggaaataaaactggaggcccagagccagtttacagctgaccttgaccagtttgatcagttactgcccacgctggagaaggcagcacagttgccaggcttatgtgagacagacaggatggatggtgcggtcaccagtgtaaccatcaaatcggagatcctgccagcttcacttcagtccgccactgccagacccacttccaggctaaatagattacctgagctggaattggaagcaattgataaccaatttggacaaccaggaacaggcgatcagattccatggacaaataatacagtgacagctataaatcagagtaaatcagaagaccagtgtattagctcacaattagatgagcttctctgtccacccacaacagtagaagggagaaatgatgagaaggctcttcttgaacagctggtatccttccttagtggcaaagatgaaactgagctagctgaactagacagagctctgggaattgacaaacttgttcaggggggtggattagatgtattatcagagagatttccaccacaacaagcaacgccacctttgatcatggaagaaagacccaacctttattcccagccttactcttctccttctcctactgccaatctccctagccctttccaaggcatggtcaggcaaaaaccttcactggggacgatgcctgttcaagtaacacctccccgaggtgctttttcacctggcatgggcatgcagcccaggcaaactctaaacagacctccggctgcacctaaccagcttcgacttcaactacagcagcgattacagggacaacagcagttgatacaccaaaatcggcaagctatcttaaaccagtttgcagcaactgctcctgttggcatcaatatgagatcaggcatgcaacagcaaattacacctcagccacccctgaatgctcaaatgttggcacaacgtcagcgggaactgtacagtcaacagcaccgacagaggcagctaatacagcagcaaagagccatgcttatgaggcagcaaagctttgggaacaacctccctccctcatctggactaccagttcaaatggggaacccccgtcttcctcagggtgctccacagcaattcccctatccaccaaactatggtacaaatccaggaaccccacctgcttctaccagcccgttttcacaactagcagcaaatcctgaagcatccttggccaaccgcaacagcatggtgagcagaggcatgacaggaaacataggaggacagtttggcactggaatcaatcctcagatgcagcagaatgtcttccagtatccaggagcaggaatggttccccaaggtgaggccaactttgctccatctctaagccctgggagctccatggtgccgatgccaatccctcctcctcagagttctcttctccagcaaactccacctgcctccgggtatcagtcaccagacatgaaggcctggcagcaaggagcgataggaaacaacaatgtgttcagtcaagctgtccagaaccagcccacgcctgcacagccaggagtatacaacaacatgagcatcaccgtttccatggcaggtggaaatacgaatgttcagaacatgaacccaatgatggcccagatgcagatgagctctttgcagatgccaggaatgaacactgtgtgccctgagcagataaatgatcccgcactgagacacacaggcctctactgcaaccagctctcatccactgaccttctcaaaacagaagcagatggaacccagcaggtgcaacaggttcaggtgtttgctgacgtccagtgtacagtgaatctggtaggcggggacccttacctgaaccagcctggtccactgggaactcaaaagcccacgtcaggaccacagaccccccaggcccagcagaagagcctccttcagcagctactgactgaataaccacttttaaaggaatgtgaaatttaaataatagacatacagagatatacaaatatattatatatttttctgagatttttgatatctcaatctgcagccattcttcaggtcgtagcatttggagcaaaaaaaaaaaaaaaaaaaaaaaaaggagtttgcttttgtcgggagattgaaagatgtttttgtttctttctttgtaaaggccttggatattgaaaaaataccaaggcagaacagttggacaatctatttcttgagccaaatttaattattcttatttttgtaatcagtcattggcttcttatctggatgaaggcttttggaggagaaccaaaacgacaagttccaagaagaagatgaagctccgcctccgccgcttagtcccaaccctgcccaggaagaagggcccgtggggctttgcctgtgcccgtccaccaaaggctgtcatgtgtctcgaaatcagcagccctccccatcccaatcccaggcagcttgtgtgtacaatcagcttctctagcaactctgtatctgttggcttcaagagaatattttgcctccacatatgtaccccttctcctttttttaaagatggatttaaaccaagatgcctccaggaaagaggacgaaatgagtatattcacagaggaatccaaaaaatacagtttgggggaaaatgcaataatttttgatgagatgggtgaaggacaagaagtgagttgtgtcaattattgtagatacaattttctgattaaatctggaaaaataaaaggcagcctgttttttctgcttttattgtattaacagctgaggtagctaaagttatttaaaataaaattaaatttatgatccaagtagcttatttttccctttaaatctcattgtaaatatatttgatttcttgtagaaattgatttccttctgtttaattttatgcttttattatactcttgatttttctaaatttgtgtgtgaaatataacattgattgaattgcagttacatttggttagtaatatttcattattttaataactgtgatgtcatgtatggatttactttggggttcaaatcaaaatgtcactgccagaaagagctgttccagctgatctagagcatactgccctagagtgtccctgggatcatctgaacagaagtgcacaggctacttgtacagagaaaaaattaatactcaaaggaaatcttcattttttagattgactttgggaatttgaattttcatcagtgcaaatataaatttctctatcctgctctgaggctaattggtaccatattttccctttgtgtcttgtgactctgccacatcccatctcatcctggcctctgagtcaagaacccagtgaactgactttctagttctagaagttccgctgcaaggccaggaaagcttgagaaaggtattgtggaagaagcaaaggtagacccccatcactcacctttgtctgcatccctgggcctgtgaatgatgacagcacctgacattctgcaccagctacctctgcctccatggcagagaaaaggccataagaacagtggaagaggagcatggactcagacttcaaggaagaagccatttccccaggtccttccttctgcatctcaccacccctagttacaaataactccattgaacagcatctattcagaaactatgccgaataaaaagattggtggaagggctcatgtggttagcaactatgaaacagaaataggacactcagttacaaacattatctcctttagtttttcagaaaatgcatccctgatttcattcatttccagcttgaaagccagccatattactctagtccctaccaaactgctctagaaggtcatttccattttgtttgtgatatttagacgcgcagacttcaggaagttcacctttaacttcagcattccagatgaagtttcctgactcagtgcttttgcataaggaactagaaaaaaaaagtaaggaaaattggagatgctaacatcctcccccatcccaactgcaccttaaaatatgcatgtcaccttcaaggttttataattgcactgtttgttttatgtatgtacagattaaaattattgctacatttgaggaaaataaaattgcttgcttctatgtaattcctgtcattccacaggaaattcacttttccagctactgaatagaatttgtttaacaacctcatgggttgcctcttcatttacagggaagaaatgaaatgtacatctgcagaaattgccaaagcccaaattaacgagtattataaaaggataataaagcatccctgaagccaaa

SEQ ID NO: 20638 - DNA, 6828 bp, Homo sapiens
  source 1..6828: mol_type = unassigned DNA
ggggcttagaaattaacaggttgtttatataattggccttaaatgaggtgagagtgaagagactagagccatctctggaaaacatcattatcccattccccgggaagctaccctctggaactcaagatttgaccatatctgttttgaggattcattatgaacaaagaagtctcccaggtgtgaagtttttcaacatgagtggcctcggggacagttcatccgaccctgctaacccagactcacataagaggaaaggatcgccatgtgacacactggcatcaagcacggaaaagaggcgcagggagcaagaaaataaatatttagaagaactagctgagttactgtctgccaacattagtgacattgacagcttgagtgtaaaaccagacaaatgcaagattttgaagaaaacagtcgatcagatacagctaatgaagagaatggaacaagagaaatcaacaactgatgacgatgtacagaaatcagacatctcatcaagtagtcaaggagtgatagaaaaggaatccttgggacctcttcttttggaggctttggatggatttttctttgttgtgaactgtgaagggagaattgtatttgtgtcagagaatgtaaccagctacttaggttacaatcaggaggaattaatgaatacgagcgtctacagcatactgcacgtgggggatcatgcagaatttgtgaagaatctgctaccaaaatcactagtaaatggagttccttggcctcaagaggcaacacgacgaaatagccatacctttaactgcaggatgctaattcaccctccagatgagccagggaccgagaaccaagaagcttgccagcgttatgaagtaatgcagtgtttcactgtgtcacagccaaaatcaattcaagaggatggagaagatttccagtcatgtctgatttgtattgcacggcgattacctcggcctccagctattacgggtgtagaatcctttatgaccaagcaagatactacaggtaaaatcatctctattgatactagttccctgagagctgctggcagaactggttgggaagatttagtgaggaagtgcatttatgcttttttccaacctcagggcagagaaccatcttatgccagacagctgttccaagaagtgatgactcgtggcactgcctccagcccctcctatagattcatattgaatgatgggacaatgcttagcgcccacaccaagtgtaaactttgctaccctcaaagtccagacatgcaacctttcatcatgggaattcatatcatcgacagggagcacagtgggctttctcctcaagatgacactaattctggaatgtcaattccccgagtaaatccctcggtcaatcctagtatctctccagctcatggtgtggctcgttcatccacattgccaccatccaacagcaacatggtatccaccagaataaaccgccagcagagctcagaccttcatagcagcagtcatagtaattctagcaacagccaaggaagtttcggatgctcacccggaagtcagattgtagccaatgttgccttaaaccaaggacaggccagttcacagagcagtaatccctctttaaacctcaataattctcctatggaaggtacaggaatatccctagcacagttcatgtctccaaggagacaggttacttctggattggcaacaaggcccaggatgccaaacaattcctttcctcctaatatttcgacattaagctctcccgttggcatgacaagtagtgcctgtaataataataaccgatcttattcaaacatcccagtaacatctttacagggtatgaatgaaggacccaataactccgttggcttctctgccagttctccagtcctcaggcagatgagctcacagaattcacctagcagattaaatatacaaccagcaaaagctgagtccaaagataacaaagagattgcctcaattttaaatgaaatgattcaatctgacaacagctctagtgatggcaaacctctggattcagggcttctgcataacaatgacagactttcagatggagacagtaaatactctcaaaccagtcacaaactagtgcagcttttgacaacaactgccgaacagcagttacggcatgctgatatagacacaagctgcaaagatgtcctgtcttgcacaggcacttccaactctgcctctgctaactcttcaggaggttcttgtccctcttctcatagctcattgacagaacggcataaaattctacaccggctcttacaggagggtagcccctcagatatcaccactttgtctgtcgagcctgataaaaaggacagtgcatctacttctgtgtcagtgactggacaggtacaaggaaactccagtataaaactagaactggatgcttcaaagaaaaaagaatcaaaagaccatcagctcctacgctatcttttagataaagatgagaaagatttaagatcaactccaaacctgagcctggatgatgtaaaggtgaaagtggaaaagaaagaacagatggatccatgtaatacaaacccaaccccaatgaccaaacccactcctgaggaaataaaactggaggcccagagccagtttacagctgaccttgaccagtttgatcagttactgcccacgctggagaaggcagcacagttgccaggcttatgtgagacagacaggatggatggtgcggtcaccagtgtaaccatcaaatcggagatcctgccagcttcacttcagtccgccactgccagacccacttccaggctaaatagattacctgagctggaattggaagcaattgataaccaatttggacaaccaggaacaggcgatcagattccatggacaaataatacagtgacagctataaatcagagtaaatcagaagaccagtgtattagctcacaattagatgagcttctctgtccacccacaacagtagaagggagaaatgatgagaaggctcttcttgaacagctggtatccttccttagtggcaaagatgaaactgagctagctgaactagacagagctctgggaattgacaaacttgttcaggggggtggattagatgtattatcagagagatttccaccacaacaagcaacgccacctttgatcatggaagaaagacccaacctttattcccagccttactcttctccttctcctactgccaatctccctagccctttccaaggcatggtcaggcaaaaaccttcactggggacgatgcctgttcaagtaacacctccccgaggtgctttttcacctggcatgggcatgcagcccaggcaaactctaaacagacctccggctgcacctaaccagcttcgacttcaactacagcagcgattacagggacaacagcagttgatacaccaaaatcggcaagctatcttaaaccagtttgcagcaactgctcctgttggcatcaatatgagatcaggcatgcaacagcaaattacacctcagccacccctgaatgctcaaatgttggcacaacgtcagcgggaactgtacagtcaacagcaccgacagaggcagctaatacagcagcaaagagccatgcttatgaggcagcaaagctttgggaacaacctccctccctcatctggactaccagttcaaatggggaacccccgtcttcctcagggtgctccacagcaattcccctatccaccaaactatggtacaaatccaggaaccccacctgcttctaccagcccgttttcacaactagcagcaaatcctgaagcatccttggccaaccgcaacagcatggtgagcagaggcatgacaggaaacataggaggacagtttggcactggaatcaatcctcagatgcagcagaatgtcttccagtatccaggagcaggaatggttccccaaggtgaggccaactttgctccatctctaagccctgggagctccatggtgccgatgccaatccctcctcctcagagttctcttctccagcaaactccacctgcctccgggtatcagtcaccagacatgaaggcctggcagcaaggagcgataggaaacaacaatgtgttcagtcaagctgtccagaaccagcccacgcctgcacagccaggagtatacaacaacatgagcatcaccgtttccatggcaggtggaaatacgaatgttcagaacatgaacccaatgatggcccagatgcagatgagctctttgcagatgccaggaatgaacactgtgtgccctgagcagataaatgatcccgcactgagacacacaggcctctactgcaaccagctctcatccactgaccttctcaaaacagaagcagatggaacccaggtgcaacaggttcaggtgtttgctgacgtccagtgtacagtgaatctggtaggcggggacccttacctgaaccagcctggtccactgggaactcaaaagcccacgtcaggaccacagaccccccaggcccagcagaagagcctccttcagcagctactgactgaataaccacttttaaaggaatgtgaaatttaaataatagacatacagagatatacaaatatattatatatttttctgagatttttgatatctcaatctgcagccattcttcaggtcgtagcatttggagcaaaaaaaaaaaaaaaaaaaaaaaaaggagtttgcttttgtcgggagattgaaagatgtttttgtttctttctttgtaaaggccttggatattgaaaaaataccaaggcagaacagttggacaatctatttcttgagccaaatttaattattcttatttttgtaatcagtcattggcttcttatctggatgaaggcttttggaggagaaccaaaacgacaagttccaagaagaagatgaagctccgcctccgccgcttagtcccaaccctgcccaggaagaagggcccgtggggctttgcctgtgcccgtccaccaaaggctgtcatgtgtctcgaaatcagcagccctccccatcccaatcccaggcagcttgtgtgtacaatcagcttctctagcaactctgtatctgttggcttcaagagaatattttgcctccacatatgtaccccttctcctttttttaaagatggatttaaaccaagatgcctccaggaaagaggacgaaatgagtatattcacagaggaatccaaaaaatacagtttgggggaaaatgcaataatttttgatgagatgggtgaaggacaagaagtgagttgtgtcaattattgtagatacaattttctgattaaatctggaaaaataaaaggcagcctgttttttctgcttttattgtattaacagctgaggtagctaaagttatttaaaataaaattaaatttatgatccaagtagcttatttttccctttaaatctcattgtaaatatatttgatttcttgtagaaattgatttccttctgtttaattttatgcttttattatactcttgatttttctaaatttgtgtgtgaaatataacattgattgaattgcagttacatttggttagtaatatttcattattttaataactgtgatgtcatgtatggatttactttggggttcaaatcaaaatgtcactgccagaaagagctgttccagctgatctagagcatactgccctagagtgtccctgggatcatctgaacagaagtgcacaggctacttgtacagagaaaaaattaatactcaaaggaaatcttcattttttagattgactttgggaatttgaattttcatcagtgcaaatataaatttctctatcctgctctgaggctaattggtaccatattttccctttgtgtcttgtgactctgccacatcccatctcatcctggcctctgagtcaagaacccagtgaactgactttctagttctagaagttccgctgcaaggccaggaaagcttgagaaaggtattgtggaagaagcaaaggtagacccccatcactcacctttgtctgcatccctgggcctgtgaatgatgacagcacctgacattctgcaccagctacctctgcctccatggcagagaaaaggccataagaacagtggaagaggagcatggactcagacttcaaggaagaagccatttccccaggtccttccttctgcatctcaccacccctagttacaaataactccattgaacagcatctattcagaaactatgccgaataaaaagattggtggaagggctcatgtggttagcaactatgaaacagaaataggacactcagttacaaacattatctcctttagtttttcagaaaatgcatccctgatttcattcatttccagcttgaaagccagccatattactctagtccctaccaaactgctctagaaggtcatttccattttgtttgtgatatttagacgcgcagacttcaggaagttcacctttaacttcagcattccagatgaagtttcctgactcagtgcttttgcataaggaactagaaaaaaaaagtaaggaaaattggagatgctaacatcctcccccatcccaactgcaccttaaaatatgcatgtcaccttcaaggttttataattgcactgtttgttttatgtatgtacagattaaaattattgctacatttgaggaaaataaaattgcttgcttctatgtaattcctgtcattccacaggaaattcacttttccagctactgaatagaatttgtttaacaacctcatgggttgcctcttcatttacagggaagaaatgaaatgtacatctgcagaaattgccaaagcccaaattaacgagtattataaaaggataataaagcatccctgaagccaaa

SEQ ID NO: 20639 - DNA, 7405 bp, Homo sapiens
  source 1..7405: mol_type = unassigned DNA
gaatctcgcctgccgggaccgcgaaatgggggcgaccgcggcgtccctctccgtcggcgcagccctcgacggcgcttgggtttgaccccggcgcgcttgctcgccccttctcccgagaaggggtttcggaggagcagaggtttaataggcaagagaaagagaaaggaaaacagctctctctctaatgagagagaggggacttcggagaggaaaagaggacaggagatacggcaatcgtggataggaaaggaggaaattacgatagaaaagttggagatccttttgctaacacccctttgggcagttggatgctgagatctatccatactaatggaaatgtaactggaactgactctgatgataaaatcaaggaccatcaagcaagatcatgcagtaggcaactttgcttccaaaagaagttaccaacatttagaatttctacttattctgaggttccagttacagctatatcagagaatgagttaatctcctcagaaatcactaaatactactctgaggggcttagaaattaacaggttgtttatataattggccttaaatgaggtgagagtgaagagactagagccatctctggaaaacatcattatcccattccccgggaagctaccctctggaactcaagatttgaccatatctgttttgaggattcattatgaacaaagaagtctcccaggtgtgaagtttttcaacatgagtggcctcggggacagttcatccgaccctgctaacccagactcacataagaggaaaggatcgccatgtgacacactggcatcaagcacggaaaagaggcgcagggagcaagaaaataaatatttagaagaactagctgagttactgtctgccaacattagtgacattgacagcttgagtgtaaaaccagacaaatgcaagattttgaagaaaacagtcgatcagatacagctaatgaagagaatggaacaagagaaatcaacaactgatgacgatgtacagaaatcagacatctcatcaagtagtcaaggagtgatagaaaaggaatccttgggacctcttcttttggaggctttggatggatttttctttgttgtgaactgtgaagggagaattgtatttgtgtcagagaatgtaaccagctacttaggttacaatcaggaggaattaatgaatacgagcgtctacagcatactgcacgtgggggatcatgcagaatttgtgaagaatctgctaccaaaatcactagtaaatggagttccttggcctcaagaggcaacacgacgaaatagccatacctttaactgcaggatgctaattcaccctccagatgagccagggaccgagaaccaagaagcttgccagcgttatgaagtaatgcagtgtttcactgtgtcacagccaaaatcaattcaagaggatggagaagatttccagtcatgtctgatttgtattgcacggcgattacctcggcctccagctattacgggtgtagaatcctttatgaccaagcaagatactacaggtaaaatcatctctattgatactagttccctgagagctgctggcagaactggttgggaagatttagtgaggaagtgcatttatgcttttttccaacctcagggcagagaaccatcttatgccagacagctgttccaagaagtgatgactcgtggcactgcctccagcccctcctatagattcatattgaatgatgggacaatgcttagcgcccacaccaagtgtaaactttgctaccctcaaagtccagacatgcaacctttcatcatgggaattcatatcatcgacagggagcacagtgggctttctcctcaagatgacactaattctggaatgtcaattccccgagtaaatccctcggtcaatcctagtatctctccagctcatggtgtggctcgttcatccacattgccaccatccaacagcaacatggtatccaccagaataaaccgccagcagagctcagaccttcatagcagcagtcatagtaattctagcaacagccaaggaagtttcggatgctcacccggaagtcagattgtagccaatgttgccttaaaccaaggacaggccagttcacagagcagtaatccctctttaaacctcaataattctcctatggaaggtacaggaatatccctagcacagttcatgtctccaaggagacaggttacttctggattggcaacaaggcccaggatgccaaacaattcctttcctcctaatatttcgacattaagctctcccgttggcatgacaagtagtgcctgtaataataataaccgatcttattcaaacatcccagtaacatctttacagggtatgaatgaaggacccaataactccgttggcttctctgccagttctccagtcctcaggcagatgagctcacagaattcacctagcagattaaatatacaaccagcaaaagctgagtccaaagataacaaagagattgcctcaattttaaatgaaatgattcaatctgacaacagctctagtgatggcaaacctctggattcagggcttctgcataacaatgacagactttcagatggagacagtaaatactctcaaaccagtcacaaactagtgcagcttttgacaacaactgccgaacagcagttacggcatgctgatatagacacaagctgcaaagatgtcctgtcttgcacaggcacttccaactctgcctctgctaactcttcaggaggttcttgtccctcttctcatagctcattgacagaacggcataaaattctacaccggctcttacaggagggtagcccctcagatatcaccactttgtctgtcgagcctgataaaaaggacagtgcatctacttctgtgtcagtgactggacaggtacaaggaaactccagtataaaactagaactggatgcttcaaagaaaaaagaatcaaaagaccatcagctcctacgctatcttttagataaagatgagaaagatttaagatcaactccaaacctgagcctggatgatgtaaaggtgaaagtggaaaagaaagaacagatggatccatgtaatacaaacccaaccccaatgaccaaacccactcctgaggaaataaaactggaggcccagagccagtttacagctgaccttgaccagtttgatcagttactgcccacgctggagaaggcagcacagttgccaggcttatgtgagacagacaggatggatggtgcggtcaccagtgtaaccatcaaatcggagatcctgccagcttcacttcagtccgccactgccagacccacttccaggctaaatagattacctgagctggaattggaagcaattgataaccaatttggacaaccaggaacaggcgatcagattccatggacaaataatacagtgacagctataaatcagagtaaatcagaagaccagtgtattagctcacaattagatgagcttctctgtccacccacaacagtagaagggagaaatgatgagaaggctcttcttgaacagctggtatccttccttagtggcaaagatgaaactgagctagctgaactagacagagctctgggaattgacaaacttgttcaggggggtggattagatgtattatcagagagatttccaccacaacaagcaacgccacctttgatcatggaagaaagacccaacctttattcccagccttactcttctccttctcctactgccaatctccctagccctttccaaggcatggtcaggcaaaaaccttcactggggacgatgcctgttcaagtaacacctccccgaggtgctttttcacctggcatgggcatgcagcccaggcaaactctaaacagacctccggctgcacctaaccagcttcgacttcaactacagcagcgattacagggacaacagcagttgatacaccaaaatcggcaagctatcttaaaccagtttgcagcaactgctcctgttggcatcaatatgagatcaggcatgcaacagcaaattacacctcagccacccctgaatgctcaaatgttggcacaacgtcagcgggaactgtacagtcaacagcaccgacagaggcagctaatacagcagcaaagagccatgcttatgaggcagcaaagctttgggaacaacctccctccctcatctggactaccagttcaaatggggaacccccgtcttcctcagggtgctccacagcaattcccctatccaccaaactatggtacaaatccaggaaccccacctgcttctaccagcccgttttcacaactagcagcaaatcctgaagcatccttggccaaccgcaacagcatggtgagcagaggcatgacaggaaacataggaggacagtttggcactggaatcaatcctcagatgcagcagaatgtcttccagtatccaggagcaggaatggttccccaaggtgaggccaactttgctccatctctaagccctgggagctccatggtgccgatgccaatccctcctcctcagagttctcttctccagcaaactccacctgcctccgggtatcagtcaccagacatgaaggcctggcagcaaggagcgataggaaacaacaatgtgttcagtcaagctgtccagaaccagcccacgcctgcacagccaggagtatacaacaacatgagcatcaccgtttccatggcaggtggaaatacgaatgttcagaacatgaacccaatgatggcccagatgcagatgagctctttgcagatgccaggaatgaacactgtgtgccctgagcagataaatgatcccgcactgagacacacaggcctctactgcaaccagctctcatccactgaccttctcaaaacagaagcagatggaacccaggacaagaagacagaagagttcttctctgtggtgactacagactagaggaatgctctacaggtgcaacaggttcaggtgtttgctgacgtccagtgtacagtgaatctggtaggcggggacccttacctgaaccagcctggtccactgggaactcaaaagcccacgtcaggaccacagaccccccaggcccagcagaagagcctccttcagcagctactgactgaataaccacttttaaaggaatgtgaaatttaaataatagacatacagagatatacaaatatattatatatttttctgagatttttgatatctcaatctgcagccattcttcaggtcgtagcatttggagcaaaaaaaaaaaaaaaaaaaaaaaaaggagtttgcttttgtcgggagattgaaagatgtttttgtttctttctttgtaaaggccttggatattgaaaaaataccaaggcagaacagttggacaatctatttcttgagccaaatttaattattcttatttttgtaatcagtcattggcttcttatctggatgaaggcttttggaggagaaccaaaacgacaagttccaagaagaagatgaagctccgcctccgccgcttagtcccaaccctgcccaggaagaagggcccgtggggctttgcctgtgcccgtccaccaaaggctgtcatgtgtctcgaaatcagcagccctccccatcccaatcccaggcagcttgtgtgtacaatcagcttctctagcaactctgtatctgttggcttcaagagaatattttgcctccacatatgtaccccttctcctttttttaaagatggatttaaaccaagatgcctccaggaaagaggacgaaatgagtatattcacagaggaatccaaaaaatacagtttgggggaaaatgcaataatttttgatgagatgggtgaaggacaagaagtgagttgtgtcaattattgtagatacaattttctgattaaatctggaaaaataaaaggcagcctgttttttctgcttttattgtattaacagctgaggtagctaaagttatttaaaataaaattaaatttatgatccaagtagcttatttttccctttaaatctcattgtaaatatatttgatttcttgtagaaattgatttccttctgtttaattttatgcttttattatactcttgatttttctaaatttgtgtgtgaaatataacattgattgaattgcagttacatttggttagtaatatttcattattttaataactgtgatgtcatgtatggatttactttggggttcaaatcaaaatgtcactgccagaaagagctgttccagctgatctagagcatactgccctagagtgtccctgggatcatctgaacagaagtgcacaggctacttgtacagagaaaaaattaatactcaaaggaaatcttcattttttagattgactttgggaatttgaattttcatcagtgcaaatataaatttctctatcctgctctgaggctaattggtaccatattttccctttgtgtcttgtgactctgccacatcccatctcatcctggcctctgagtcaagaacccagtgaactgactttctagttctagaagttccgctgcaaggccaggaaagcttgagaaaggtattgtggaagaagcaaaggtagacccccatcactcacctttgtctgcatccctgggcctgtgaatgatgacagcacctgacattctgcaccagctacctctgcctccatggcagagaaaaggccataagaacagtggaagaggagcatggactcagacttcaaggaagaagccatttccccaggtccttccttctgcatctcaccacccctagttacaaataactccattgaacagcatctattcagaaactatgccgaataaaaagattggtggaagggctcatgtggttagcaactatgaaacagaaataggacactcagttacaaacattatctcctttagtttttcagaaaatgcatccctgatttcattcatttccagcttgaaagccagccatattactctagtccctaccaaactgctctagaaggtcatttccattttgtttgtgatatttagacgcgcagacttcaggaagttcacctttaacttcagcattccagatgaagtttcctgactcagtgcttttgcataaggaactagaaaaaaaaagtaaggaaaattggagatgctaacatcctcccccatcccaactgcaccttaaaatatgcatgtcaccttcaaggttttataattgcactgtttgttttatgtatgtacagattaaaattattgctacatttgaggaaaataaaattgcttgcttctatgtaattcctgtcattccacaggaaattcacttttccagctactgaatagaatttgtttaacaacctcatgggttgcctcttcatttacagggaagaaatgaaatgtacatctgcagaaattgccaaagcccaaattaacgagtattataaaaggataataaagcatccctgaagccaaa

SEQ ID NO: 20640 - DNA, 7289 bp, Homo sapiens
  source 1..7289: mol_type = unassigned DNA
gcggccgcctgcccggcgtggggagcgggcgccccgggccgccgccgagagggggagccggaagtcggcgcgggcgcccctcggccccgacgacgccgtgaccttggccggcccgctcacctctcggaatctcgcctgccgggaccgcgaaatgggggcgaccgcggcgtccctctccgtcggcgcagccctcgacggcgcttgggtttgaccccggcgcgcttgctcgccccttctcccgagaaggggtttcggagatctatccatactaatggaaatgtaactggaactgactctgatgataaaatcaaggaccatcaagcaagatcatgcagtaggcaactttgcttccaaaagaagttaccaacatttagaatttctacttattctgaggttccagttacagctatatcagagaatgagttaatctcctcagaaatcactaaatactactctgaggggcttagaaattaacaggttgtttatataattggccttaaatgaggtgagagtgaagagactagagccatctctggaaaacatcattatcccattccccgggaagctaccctctggaactcaagatttgaccatatctgttttgaggattcattatgaacaaagaagtctcccaggtgtgaagtttttcaacatgagtggcctcggggacagttcatccgaccctgctaacccagactcacataagaggaaaggatcgccatgtgacacactggcatcaagcacggaaaagaggcgcagggagcaagaaaataaatatttagaagaactagctgagttactgtctgccaacattagtgacattgacagcttgagtgtaaaaccagacaaatgcaagattttgaagaaaacagtcgatcagatacagctaatgaagagaatggaacaagagaaatcaacaactgatgacgatgtacagaaatcagacatctcatcaagtagtcaaggagtgatagaaaaggaatccttgggacctcttcttttggaggctttggatggatttttctttgttgtgaactgtgaagggagaattgtatttgtgtcagagaatgtaaccagctacttaggttacaatcaggaggaattaatgaatacgagcgtctacagcatactgcacgtgggggatcatgcagaatttgtgaagaatctgctaccaaaatcactagtaaatggagttccttggcctcaagaggcaacacgacgaaatagccatacctttaactgcaggatgctaattcaccctccagatgagccagggaccgagaaccaagaagcttgccagcgttatgaagtaatgcagtgtttcactgtgtcacagccaaaatcaattcaagaggatggagaagatttccagtcatgtctgatttgtattgcacggcgattacctcggcctccagctattacgggtgtagaatcctttatgaccaagcaagatactacaggtaaaatcatctctattgatactagttccctgagagctgctggcagaactggttgggaagatttagtgaggaagtgcatttatgcttttttccaacctcagggcagagaaccatcttatgccagacagctgttccaagaagtgatgactcgtggcactgcctccagcccctcctatagattcatattgaatgatgggacaatgcttagcgcccacaccaagtgtaaactttgctaccctcaaagtccagacatgcaacctttcatcatgggaattcatatcatcgacagggagcacagtgggctttctcctcaagatgacactaattctggaatgtcaattccccgagtaaatccctcggtcaatcctagtatctctccagctcatggtgtggctcgttcatccacattgccaccatccaacagcaacatggtatccaccagaataaaccgccagcagagctcagaccttcatagcagcagtcatagtaattctagcaacagccaaggaagtttcggatgctcacccggaagtcagattgtagccaatgttgccttaaaccaaggacaggccagttcacagagcagtaatccctctttaaacctcaataattctcctatggaaggtacaggaatatccctagcacagttcatgtctccaaggagacaggttacttctggattggcaacaaggcccaggatgccaaacaattcctttcctcctaatatttcgacattaagctctcccgttggcatgacaagtagtgcctgtaataataataaccgatcttattcaaacatcccagtaacatctttacagggtatgaatgaaggacccaataactccgttggcttctctgccagttctccagtcctcaggcagatgagctcacagaattcacctagcagattaaatatacaaccagcaaaagctgagtccaaagataacaaagagattgcctcaattttaaatgaaatgattcaatctgacaacagctctagtgatggcaaacctctggattcagggcttctgcataacaatgacagactttcagatggagacagtaaatactctcaaaccagtcacaaactagtgcagcttttgacaacaactgccgaacagcagttacggcatgctgatatagacacaagctgcaaagatgtcctgtcttgcacaggcacttccaactctgcctctgctaactcttcaggaggttcttgtccctcttctcatagctcattgacagaacggcataaaattctacaccggctcttacaggagggtagcccctcagatatcaccactttgtctgtcgagcctgataaaaaggacagtgcatctacttctgtgtcagtgactggacaggtacaaggaaactccagtataaaactagaactggatgcttcaaagaaaaaagaatcaaaagaccatcagctcctacgctatcttttagataaagatgagaaagatttaagatcaactccaaacctgagcctggatgatgtaaaggtgaaagtggaaaagaaagaacagatggatccatgtaatacaaacccaaccccaatgaccaaacccactcctgaggaaataaaactggaggcccagagccagtttacagctgaccttgaccagtttgatcagttactgcccacgctggagaaggcagcacagttgccaggcttatgtgagacagacaggatggatggtgcggtcaccagtgtaaccatcaaatcggagatcctgccagcttcacttcagtccgccactgccagacccacttccaggctaaatagattacctgagctggaattggaagcaattgataaccaatttggacaaccaggaacaggcgatcagattccatggacaaataatacagtgacagctataaatcagagtaaatcagaagaccagtgtattagctcacaattagatgagcttctctgtccacccacaacagtagaagggagaaatgatgagaaggctcttcttgaacagctggtatccttccttagtggcaaagatgaaactgagctagctgaactagacagagctctgggaattgacaaacttgttcaggggggtggattagatgtattatcagagagatttccaccacaacaagcaacgccacctttgatcatggaagaaagacccaacctttattcccagccttactcttctccttctcctactgccaatctccctagccctttccaaggcatggtcaggcaaaaaccttcactggggacgatgcctgttcaagtaacacctccccgaggtgctttttcacctggcatgggcatgcagcccaggcaaactctaaacagacctccggctgcacctaaccagcttcgacttcaactacagcagcgattacagggacaacagcagttgatacaccaaaatcggcaagctatcttaaaccagtttgcagcaactgctcctgttggcatcaatatgagatcaggcatgcaacagcaaattacacctcagccacccctgaatgctcaaatgttggcacaacgtcagcgggaactgtacagtcaacagcaccgacagaggcagctaatacagcagcaaagagccatgcttatgaggcagcaaagctttgggaacaacctccctccctcatctggactaccagttcaaatggggaacccccgtcttcctcagggtgctccacagcaattcccctatccaccaaactatggtacaaatccaggaaccccacctgcttctaccagcccgttttcacaactagcagcaaatcctgaagcatccttggccaaccgcaacagcatggtgagcagaggcatgacaggaaacataggaggacagtttggcactggaatcaatcctcagatgcagcagaatgtcttccagtatccaggagcaggaatggttccccaaggtgaggccaactttgctccatctctaagccctgggagctccatggtgccgatgccaatccctcctcctcagagttctcttctccagcaaactccacctgcctccgggtatcagtcaccagacatgaaggcctggcagcaaggagcgataggaaacaacaatgtgttcagtcaagctgtccagaaccagcccacgcctgcacagccaggagtatacaacaacatgagcatcaccgtttccatggcaggtggaaatacgaatgttcagaacatgaacccaatgatggcccagatgcagatgagctctttgcagatgccaggaatgaacactgtgtgccctgagcagataaatgatcccgcactgagacacacaggcctctactgcaaccagctctcatccactgaccttctcaaaacagaagcagatggaacccagcaggtgcaacaggttcaggtgtttgctgacgtccagtgtacagtgaatctggtaggcggggacccttacctgaaccagcctggtccactgggaactcaaaagcccacgtcaggaccacagaccccccaggcccagcagaagagcctccttcagcagctactgactgaataaccacttttaaaggaatgtgaaatttaaataatagacatacagagatatacaaatatattatatatttttctgagatttttgatatctcaatctgcagccattcttcaggtcgtagcatttggagcaaaaaaaaaaaaaaaaaaaaaaaaaggagtttgcttttgtcgggagattgaaagatgtttttgtttctttctttgtaaaggccttggatattgaaaaaataccaaggcagaacagttggacaatctatttcttgagccaaatttaattattcttatttttgtaatcagtcattggcttcttatctggatgaaggcttttggaggagaaccaaaacgacaagttccaagaagaagatgaagctccgcctccgccgcttagtcccaaccctgcccaggaagaagggcccgtggggctttgcctgtgcccgtccaccaaaggctgtcatgtgtctcgaaatcagcagccctccccatcccaatcccaggcagcttgtgtgtacaatcagcttctctagcaactctgtatctgttggcttcaagagaatattttgcctccacatatgtaccccttctcctttttttaaagatggatttaaaccaagatgcctccaggaaagaggacgaaatgagtatattcacagaggaatccaaaaaatacagtttgggggaaaatgcaataatttttgatgagatgggtgaaggacaagaagtgagttgtgtcaattattgtagatacaattttctgattaaatctggaaaaataaaaggcagcctgttttttctgcttttattgtattaacagctgaggtagctaaagttatttaaaataaaattaaatttatgatccaagtagcttatttttccctttaaatctcattgtaaatatatttgatttcttgtagaaattgatttccttctgtttaattttatgcttttattatactcttgatttttctaaatttgtgtgtgaaatataacattgattgaattgcagttacatttggttagtaatatttcattattttaataactgtgatgtcatgtatggatttactttggggttcaaatcaaaatgtcactgccagaaagagctgttccagctgatctagagcatactgccctagagtgtccctgggatcatctgaacagaagtgcacaggctacttgtacagagaaaaaattaatactcaaaggaaatcttcattttttagattgactttgggaatttgaattttcatcagtgcaaatataaatttctctatcctgctctgaggctaattggtaccatattttccctttgtgtcttgtgactctgccacatcccatctcatcctggcctctgagtcaagaacccagtgaactgactttctagttctagaagttccgctgcaaggccaggaaagcttgagaaaggtattgtggaagaagcaaaggtagacccccatcactcacctttgtctgcatccctgggcctgtgaatgatgacagcacctgacattctgcaccagctacctctgcctccatggcagagaaaaggccataagaacagtggaagaggagcatggactcagacttcaaggaagaagccatttccccaggtccttccttctgcatctcaccacccctagttacaaataactccattgaacagcatctattcagaaactatgccgaataaaaagattggtggaagggctcatgtggttagcaactatgaaacagaaataggacactcagttacaaacattatctcctttagtttttcagaaaatgcatccctgatttcattcatttccagcttgaaagccagccatattactctagtccctaccaaactgctctagaaggtcatttccattttgtttgtgatatttagacgcgcagacttcaggaagttcacctttaacttcagcattccagatgaagtttcctgactcagtgcttttgcataaggaactagaaaaaaaaagtaaggaaaattggagatgctaacatcctcccccatcccaactgcaccttaaaatatgcatgtcaccttcaaggttttataattgcactgtttgttttatgtatgtacagattaaaattattgctacatttgaggaaaataaaattgcttgcttctatgtaattcctgtcattccacaggaaattcacttttccagctactgaatagaatttgtttaacaacctcatgggttgcctcttcatttacagggaagaaatgaaatgtacatctgcagaaattgccaaagcccaaattaacgagtattataaaaggataataaagcatccctgaagccaaa

SEQ ID NO: 20641 - DNA, 4597 bp, Homo sapiens
  source 1..4597: mol_type = unassigned DNA
caacatttagaatttctacttattctgaggttccagttacagctatatcagagaatgagttaatctcctcagaaatcactaaatactactctgaggggcttagaaattaacaggttgtttatataattggccttaaatgaggtgagagtgaagagactagagccatctctggaaaacatcattatcccattccccgggaagctaccctctggaactcaagatttgaccatatctgttttgaggattcattatgaacaaagaagtctcccaggtgtgaagtttttcaacatgagtggcctcggggacagttcatccgaccctgctaacccagactcacataagaggaaaggatcgccatgtgacacactggcatcaagcacggaaaagaggcgcagggagcaagaaaataaatatttagaagaactagctgagttactgtctgccaacattagtgacattgacagcttgagtgtaaaaccagacaaatgcaagattttgaagaaaacagtcgatcagatacagctaatgaagagaatggaacaagagaaatcaacaactgatgacgatgtacagaaatcagacatctcatcaagtagtcaaggagtgatagaaaaggaatccttgggacctcttcttttggaggctttggatggatttttctttgttgtgaactgtgaagggagaattgtatttgtgtcagagaatgtaaccagctacttaggttacaatcaggaggaattaatgaatacgagcgtctacagcatactgcacgtgggggatcatgcagaatttgtgaagaatctgctaccaaaatcactagtaaatggagttccttggcctcaagaggcaacacgacgaaatagccatacctttaactgcaggatgctaattcaccctccagatgagccagggaccgagaaccaagaagcttgccagcgttatgaagtaatgcagtgtttcactgtgtcacagccaaaatcaattcaagaggatggagaagatttccagtcatgtctgatttgtattgcacggcgattacctcggcctccagctattacgggtgtagaatcctttatgaccaagcaagatactacaggtaaaatcatctctattgatactagttccctgagagctgctggcagaactggttgggaagatttagtgaggaagtgcatttatgcttttttccaacctcagggcagagaaccatcttatgccagacagctgttccaagaagtgatgactcgtggcactgcctccagcccctcctatagattcatattgaatgatgggacaatgcttagcgcccacaccaagtgtaaactttgctaccctcaaagtccagacatgcaacctttcatcatgggaattcatatcatcgacagggagcacagtgggctttctcctcaagatgacactaattctggaatgtcaattccccgagtaaatccctcggtcaatcctagtatctctccagctcatggtgtggctcgttcatccacattgccaccatccaacagcaacatggtatccaccagaataaaccgccagcagagctcagaccttcatagcagcagtcatagtaattctagcaacagccaaggaagtttcggatgctcacccggaagtcagattgtagccaatgttgccttaaaccaaggacaggccagttcacagagcagtaatccctctttaaacctcaataattctcctatggaaggtacaggaatatccctagcacagttcatgtctccaaggagacaggttacttctggattggcaacaaggcccaggatgccaaacaattcctttcctcctaatatttcgacattaagctctcccgttggcatgacaagtagtgcctgtaataataataaccgatcttattcaaacatcccagtaacatctttacagggtatgaatgaaggacccaataactccgttggcttctctgccagttctccagtcctcaggcagatgagctcacagaattcacctagcagattaaatatacaaccagcaaaagctgagtccaaagataacaaagagattgcctcaattttaaatgaaatgattcaatctgacaacagctctagtgatggcaaacctctggattcagggcttctgcataacaatgacagactttcagatggagacagtaaatactctcaaaccagtcacaaactagtgcagcttttgacaacaactgccgaacagcagttacggcatgctgatatagacacaagctgcaaagatgtcctgtcttgcacaggcacttccaactctgcctctgctaactcttcaggaggttcttgtccctcttctcatagctcattgacagaacggcataaaattctacaccggctcttacaggagggtagcccctcagatatcaccactttgtctgtcgagcctgataaaaaggacagtgcatctacttctgtgtcagtgactggacaggtacaaggaaactccagtataaaactagaactggatgcttcaaagaaaaaagaatcaaaagaccatcagctcctacgctatcttttagataaagatgagaaagatttaagatcaactccaaacctgagcctggatgatgtaaaggtgaaagtggaaaagaaagaacagatggatccatgtaatacaaacccaaccccaatgaccaaacccactcctgaggaaataaaactggaggcccagagccagtttacagctgaccttgaccagtttgatcagttactgcccacgctggagaaggcagcacagttgccaggcttatgtgagacagacaggatggatggtgcggtcaccagtgtaaccatcaaatcggagatcctgccagcttcacttcagtccgccactgccagacccacttccaggctaaatagattacctgagctggaattggaagcaattgataaccaatttggacaaccaggaacaggcgatcagattccatggacaaataatacagtgacagctataaatcagagtaaatcagaagaccagtgtattagctcacaattagatgagcttctctgtccacccacaacagtagaagggagaaatgatgagaaggctcttcttgaacagctggtatccttccttagtggcaaagatgaaactgagctagctgaactagacagagctctgggaattgacaaacttgttcaggggggtggattagatgtattatcagagagatttccaccacaacaagcaacgccacctttgatcatggaagaaagacccaacctttattcccagccttactcttctccttctcctactgccaatctccctagccctttccaaggcatggtcaggcaaaaaccttcactggggacgatgcctgttcaagtaacacctccccgaggtgctttttcacctggcatgggcatgcagcccaggcaaactctaaacagacctccggctgcacctaaccagcttcgacttcaactacagcagcgattacagggacaacagcagttgatacaccaaaatcggcaagctatcttaaaccagtttgcagcaactgctcctgttggcatcaatatgagatcaggcatgcaacagcaaattacacctcagccacccctgaatgctcaaatgttggcacaacgtcagcgggaactgtacagtcaacagcaccgacagaggcagctaatacagcagcaaagagccatgcttatgaggcagcaaagctttgggaacaacctccctccctcatctggactaccagttcaaatggggaacccccgtcttcctcagggtgctccacagcaattcccctatccaccaaactatggtacaaatccaggaaccccacctgcttctaccagcccgttttcacaactagcagcaaatcctgaagcatccttggccaaccgcaacagcatggtgagcagaggcatgacaggaaacataggaggacagtttggcactggaatcaatcctcagatgcagcagaatgtcttccagtatccaggagcaggaatggttccccaaggtgaggccaactttgctccatctctaagccctgggagctccatggtgccgatgccaatccctcctcctcagagttctcttctccagcaaactccacctgcctccgggtatcagtcaccagacatgaaggcctggcagcaaggagcgataggaaacaacaatgtgttcagtcaagctgtccagaaccagcccacgcctgcacagccaggagtatacaacaacatgagcatcaccgtttccatggcaggtggaaatacgaatgttcagaacatgaacccaatgatggcccagatgcagatgagctctttgcagatgccaggaatgaacactgtgtgccctgagcagataaatgatcccgcactgagacacacaggcctctactgcaaccagctctcatccactgaccttctcaaaacagaagcagatggaacccaggacaagaagacagaagagttcttctctgtggtgactacagactagaggaatgctctacaggtgcaacaggttcaggtgtttgctgacgtccagtgtacagtgaatctggtaggcggggacccttacctgaaccagcctggtccactgggaactc

SEQ ID NO: 20642 - DNA, 1760 bp, Homo sapiens
  source 1..1760: mol_type = unassigned DNA
ctggatcagttgacaagcaagccatcatcaatgacctcatgcaactcacagctgaaaacagccctgtcacacctgttggagcccagaaaacagcactgcgaatttcacagagcagaatgattggtaacagtgcttctcggcctactatgccatctggagaatgggcaccgcagagttcggctgtgagagtcacctgtgctgctaccaccagtgccatgaaccggccagtccaaggaggtatgattcggaacccagcagccagcatccccatgaggcccagcagccagcctggccaaagacagacgcttcagtctcaggtcatgaatatagggccatctgaattagagatgaacatggggggacctcagtatagccaacaacaagctcctccaaatcagactgccccatggcctgaaagcatcctgcctatagaccaggcgtcttttgccagccaaaacaggcagccatttggcagttctccagatgacttgctatgtccacatcctgcagctgagtctccgagtgatgagggagctctcctggaccagctgtatctggccttgcggaattttgatggcctggaggagattgatagagccttaggaatacccgaactggtcagccagagccaagcagtagatccagaacagttctcaagtcaggattccaacatcatgctggagcagaaggcgcccgttttcccacagcagtatgcatctcaggcacaaatggcccagggtagctattctcccatgcaagatccaaactttcacaccatgggacagcggcctagttatgccacactccgtatgcagcccagaccgggcctcaggcccacgggcctagtgcagaaccagccaaatcaactaagacttcaacttcagcatcgcctccaagcacagcagaatcgccagccacttatgaatcaaatcagcaatgtttccaatgtgaacttgactctgaggcctggagtaccaacacaggcacctattaatgcacagatgctggcccagagacagagggaaatcctgaaccagcatcttcgacagagacaaatgcatcagcaacagcaagttcagcaacgaactttgatgatgagaggacaagggttgaatatgacaccaagcatggtggctcctagtggtatgccagcaactatgagcaaccctcggattccccaggcaaatgcacagcagtttccatttcctccaaactacggaataagtcagcaacctgatccaggctttactggggctacgactccccagagcccacttatgtcaccccgaatggcacatacacagagtcccatgatgcaacagtctcaggccaacccagcctatcaggccccctccgacataaatggatgggcgcaggggaacatgggcggaaacagcatgttttcccagcagtccccaccacactttgggcagcaagcaaacaccagcatgtacagtaacaacatgaacatcaatgtgtccatggcgaccaacacaggtggcatgagcagcatgaaccagatgacaggacagatcagcatgacctcagtgacctccgtgcctacgtcagggctgtcctccatgggtcccgagcaggttaatgatcctgctctgaggggaggcaacctgttcccaaaccagctgcctggaatggatatgattaagcaggagggagacacaacacggaaatattgctgacactgctgaagccagttgcttcttcagctgaccgggctcacttgctcaaaacacttccagtct

SEQ ID NO: 20643 - DNA, 8447 bp, Homo sapiens
  source 1..8447: mol_type = unassigned DNA
agttattaacacgggaacatggcggccgcagcctcggctacagcttcggcggcgaaggtcagcgccgacggcagccggcacctgacggcgtgaccgacccgagccgatttctcttggatttggctacacacttatagatcttctgcactgtttacaggcacagttgctgatatgtgttcaagatgagtgggatgggagaaaatacctctgacccctccagggcagagacaagaaagcgcaaggaatgtcctgaccaacttggacccagccccaaaaggaacactgaaaaacgtaatcgtgaacaggaaaataaatatatagaagaacttgcagagttgatttttgcaaattttaatgatatagacaactttaacttcaaacctgacaaatgtgcaatcttaaaagaaactgtgaagcaaattcgtcagatcaaagaacaagagaaagcagcagctgccaacatagatgaagtgcagaagtcagatgtatcctctacagggcagggtgtcatcgacaaggatgcgctggggcctatgatgcttgaggcccttgatgggttcttctttgtagtgaacctggaaggcaacgttgtgtttgtgtcagagaatgtgacacagtatctaaggtataaccaagaagagctgatgaacaaaagtgtatatagcatcttgcatgttggggaccacacggaatttgtcaaaaacctgctgccaaagtctatagtaaatgggggatcttggtctggcgaacctccgaggcggaacagccataccttcaattgtcggatgctggtaaaacctttacctgattcagaagaggagggtcatgataaccaggaagctcatcagaaatatgaaactatgcagtgcttcgctgtctctcaaccaaagtccatcaaagaagaaggagaagatttgcagtcctgcttgatttgcgtggcaagaagagttcccatgaaggaaagaccagttcttccctcatcagaaagttttactactcgccaggatctccaaggcaagatcacgtctctggataccagcaccatgagagcagccatgaaaccaggctgggaggacctggtaagaaggtgtattcagaagttccatgcgcagcatgaaggagaatctgtgtcctatgctaagaggcatcatcatgaagtactgagacaaggattggcattcagtcaaatctatcgtttttccttgtctgatggcactcttgttgctgcacaaacgaagagcaaactcatccgttctcagactactaatgaacctcaacttgtaatatctttacatatgcttcacagagagcagaatgtgtgtgtgatgaatccggatctgactggacaaacgatggggaagccactgaatccaattagctctaacagccctgcccatcaggccctgtgcagtgggaacccaggtcaggacatgaccctcagtagcaatataaattttcccataaatggcccaaaggaacaaatgggcatgcccatgggcaggtttggtggttctgggggaatgaaccatgtgtcaggcatgcaagcaaccactcctcagggtagtaactatgcactcaaaatgaacagcccctcacaaagcagccctggcatgaatccaggacagcccacctccatgctttcaccaaggcatcgcatgagccctggagtggctggcagccctcgaatcccacccagtcagttttcccctgcaggaagcttgcattcccctgtgggagtttgcagcagcacaggaaatagccatagttataccaacagctccctcaatgcacttcaggccctcagcgaggggcacggggtctcattagggtcatcgttggcttcaccagacctaaaaatgggcaatttgcaaaactccccagttaatatgaatcctcccccactcagcaagatgggaagcttggactcaaaagactgttttggactatatggggagccctctgaaggtacaactggacaagcagagagcagctgccatcctggagagcaaaaggaaacaaatgaccccaacctgcccccggccgtgagcagtgagagagctgacgggcagagcagactgcatgacagcaaagggcagaccaaactcctgcagctgctgaccaccaaatctgatcagatggagccctcgcccttagccagctctttgtcggatacaaacaaagactccacaggtagcttgcctggttctgggtctacacatggaacctcgctcaaggagaagcataaaattttgcacagactcttgcaggacagcagttcccctgtggacttggccaagttaacagcagaagccacaggcaaagacctgagccaggagtccagcagcacagctcctggatcagaagtgactattaaacaagagccggtgagccccaagaagaaagagaatgcactacttcgctatttgctagataaagatgatactaaagatattggtttaccagaaataacccccaaacttgagagactggacagtaagacagatcctgccagtaacacaaaattaatagcaatgaaaactgagaaggaggagatgagctttgagcctggtgaccagcctggcagtgagctggacaacttggaggagattttggatgatttgcagaatagtcaattaccacagcttttcccagacacgaggccaggcgcccctgctggatcagttgacaagcaagccatcatcaatgacctcatgcaactcacagctgaaaacagccctgtcacacctgttggagcccagaaaacagcactgcgaatttcacagagcacttttaataacccacgaccagggcaactgggcaggttattgccaaaccagaatttaccacttgacatcacattgcaaagcccaactggtgctggacctttcccaccaatcagaaacagtagtccctactcagtgatacctcagccaggaatgatgggtaatcaagggatgataggaaaccaaggaaatttagggaacagtagcacaggaatgattggtaacagtgcttctcggcctactatgccatctggagaatgggcaccgcagagttcggctgtgagagtcacctgtgctgctaccaccagtgccatgaaccggccagtccaaggaggtatgattcggaacccagcagccagcatccccatgaggcccagcagccagcctggccaaagacagacgcttcagtctcaggtcatgaatatagggccatctgaattagagatgaacatggggggacctcagtatagccaacaacaagctcctccaaatcagactgccccatggcctgaaagcatcctgcctatagaccaggcgtcttttgccagccaaaacaggcagccatttggcagttctccagatgacttgctatgtccacatcctgcagctgagtctccgagtgatgagggagctctcctggaccagctgtatctggccttgcggaattttgatggcctggaggagattgatagagccttaggaatacccgaactggtcagccagagccaagcagtagatccagaacagttctcaagtcaggattccaacatcatgctggagcagaaggcgcccgttttcccacagcagtatgcatctcaggcacaaatggcccagggtagctattctcccatgcaagatccaaactttcacaccatgggacagcggcctagttatgccacactccgtatgcagcccagaccgggcctcaggcccacgggcctagtgcagaaccagccaaatcaactaagacttcaacttcagcatcgcctccaagcacagcagaatcgccagccacttatgaatcaaatcagcaatgtttccaatgtgaacttgactctgaggcctggagtaccaacacaggcacctattaatgcacagatgctggcccagagacagagggaaatcctgaaccagcatcttcgacagagacaaatgcatcagcaacagcaagttcagcaacgaactttgatgatgagaggacaagggttgaatatgacaccaagcatggtggctcctagtggtatgccagcaactatgagcaaccctcggattccccaggcaaatgcacagcagtttccatttcctccaaactacggaataagtcagcaacctgatccaggctttactggggctacgactccccagagcccacttatgtcaccccgaatggcacatacacagagtcccatgatgcaacagtctcaggccaacccagcctatcaggccccctccgacataaatggatgggcgcaggggaacatgggcggaaacagcatgttttcccagcagtccccaccacactttgggcagcaagcaaacaccagcatgtacagtaacaacatgaacatcaatgtgtccatggcgaccaacacaggtggcatgagcagcatgaaccagatgacaggacagatcagcatgacctcagtgacctccgtgcctacgtcagggctgtcctccatgggtcccgagcaggttaatgatcctgctctgaggggaggcaacctgttcccaaaccagctgcctggaatggatatgattaagcaggagggagacacaacacggaaatattgctgacactgctgaagccagttgcttcttcagctgaccgggctcacttgctcaaaacacttccagtctggagagctgtgtctatttgtttcaacccaactgacctgccagccggttctgctagagcagacaggcctggccctggttcccagggtggcgtccactcggctgtggcaggaggagctgcctcttctcttgacagtctgaagctcgcatccagacagtcgctcagtctgttcactgcattcaccttagtgcaacttagatctctcctgcaaaagtaaatgttgacaggcaaatttcatacccatgtcagattgaatgtatttaaatgtatgtatttaaggagaaccatgctcttgttctgttcctgttcggttccagacactggtttcttgctttgttttccctggctaacagtctagtgcaaaagattaagattttatctgggggaaagaaaagaattttttaaaaaattaaactaaagatgttttaagctaaagcctgaatttgggatggaagcaggacagacaccgtggacagcgctgtatttacagacacacccagtgcgtgaagaccaacaaagtcacagtcgtatctctagaaagctctaaagaccatgttggaaagagtctccagttactgaacagatgaaaaggagcctgtgagagggctgttaacattagcaaatattttttccttgttttttctttgttaaaaccaaactggttcacctgaatcatgaattgagaagaaataattttcatttctaaattaagtcccttttagtttgatcagacagcttgaatcagcatctcttcttccctgtcagcctgactcttcccttcccctctctcattccccatactccctattttcattccttttttaaaaaataatataagctacagaaaccaggtaagccctttatttccttaaatgttttgccagccacttaccaattgctaagtattgaatttcagaaaaaaaaaatgcatttactggcaaggagaagagcaaagttaaggcttgataccaatcgagctaaggatacctgctttggaagcatgtttattctgttccccagcaactctggcctccaaaatgggagaaaacgccagtgtgtttaaattgatagcagatatcacgacagatttaacctctgccatgtgttttttattttgttttttagcagtgctgactaagccgaagttttgtaaggtacataaaatccaatttatatgtaaacaagcaataatttaagttgagaacttatgtgttttaattgtataatttttgtgaggtatacatattgtggaattgactcaaaaatgaggtacttcagtattaaattagatatcttcatagcaatgtctcctaaaggtgttttgtaaaggatatcaatgccttgattagacctaatttgtagacttaagactttttattttctaaaccttgtgattctgcttataagtcatttatctaatctatatgatatgcagccgctgtaggaaccaattcttgatttttatatgtttatattctttcttaatgaaccttagaaagactacatgttactaagcaggccacttttatggttgtttttcttgcccactctggtaggggaaaaatcttttattaataggtgtcagtttcagacaactccaataccaagaaactgatgaccttttttgagctatttctccttaacccctaatacctttcttacctaaatttcagaatgatatctttttgatgtctaaaaagcaaagcattttataatatctcattagccaggctttttaggaacagagaagtttttccttgaaatttgattgtttgtttatttgtggcagggtgaaaaatgtacaaactacccctatttatacttatatctctctctatatgtacgcattatggaaatataggaagagatatagcccaaagatagatggtaagtagacagtctgaaaatgttgctccatactaaagaacctttctggaaatttgcatttcgctacttttttccacttgagaggggtctcaatacagggaggtggccaaggaacaacacttctcagtggccaccagttcatatatcccctcaaaaggctctacttttctccaccaaaccattgggttgcccaactgtgatggaaaaaacaagcagatgttggcccagaactccaggacctccccgtgggctgaggctcatgtggcatacaattcagtgtgaccagttttaatgttcagaaatatgtgaattagaatgacttttaacttcacacagcacaaaagagaaatggagtttaaactggatttgttttgttttgagtttcaagtcccttttcactacaacaccgtccaaaactatctacctatctcttcttttttatccatctgcccgctgtattttaatgtcaatcctaattcagacaaatccgcaacttcatgatactggtaatttataataattcgtgatcattgctgttttgaaggaaaagagatgataaattctcttacggtttcaatcaggtaatggattttgttttacatctagttaggagaagaaaagtaagtgaaggaatcctctgatcatattgatcactatagaagcaaaagccaaatcagttcccttcattatcagtatttctcatgctgtacacaataaatttgttagactgagtacttggtttttgtttaatagaacaaataatcagtgtttcacttatattactaaatgtgaaaaacataatgtgaaaagtatacatacattaacttggttgtaaaactcattttaagtgttcatgtaatgtggtaagtttaaaaagtgaagtgagctgttttactacaatgaattcgtttgactcaaagattaaaatgcccctccccctatgtgtatctcttatggcctgtaataattgaaagcaatgtttttgcagtttatataatgcaatttttaatctgtgttcaaaaatggagttcatatgggcttaacacatgaaatgggtggcacagatccacttgcagaacccaaagatacacaatcagttttgaaatgcaacttaagccattaattgttggtgtgaatttaaaattttctagtgtttgtatggtggtatgctgcctaagagcaaagcatcctctgcacaaaagaaaattactgtagtggcttcgattttaattagaattttctccctggtgtttctttatagactaaagcaaaatcttttaagtttcttactacaggtaaaagctatgtgcaagaacctcaaaatgctaaaatctagcataatgccttagatctgtttttaagtcttgtatattcctacatagctgtccgatgtattatatttgtatagtgaattgtgtacaatttttgaataagtgcatcatcacttaacctttatgttgtttgaatagtgatgatgatacatttcttcagacatttaactgtcatttttttcctttgtcatttgtgagttttatttgtacagttcctcatgaagttgcatctgagatgtgtgtatatgaaaagattatacaagggtaaaattaagcaatatattaactatggttcttcaggagaaagcttacagtgtttcaggttgtgatttattttcaaaatggagttgactctgaacatcactttgttcacctgcattgatgtttgtatttctagtgtgagcagtttatgcaaaggtagatatattcagagaaattttaaatacatttatgcaagttaatattgctttgctgatgctatttgcttatttgatgttaaataatgctattgtaaataaagaattctgttgttattgcatcatttaataaattttaatgccttcgggttttacatggctttagagattttaa

SEQ ID NO: 20644 - DNA, 438 bp, Homo sapiens
  source 1..438: mol_type = unassigned DNA
agagcaagcaatagaatagaagcaggaagaattttcgagtgttccaccatgctggattgtcaaagggggatctgtctgatcagcagctaaaaaaggatttgtgtggctagtttgtcagctatcgttagaaacaaatgatagaggagataagcggcggggtgctcagcatgtgcttaggtttacatcaagatgtaatgttggtttgggttaacagaggagatttatctctgaggcaataaatttattgctaattgtgggggtttttgttttgatgagtgatgtatggtatttgtatttacatcactggtgaagataaagagaagctgctgagctctaatatgaactgcagaagctgtggacagttacaagttgctgatatgtgttcaagatgagtgggatgggagaaaatacctctgacccctccagggcagagacaag

SEQ ID NO: 20645 - DNA, 526 bp, Homo sapiens
  source 1..526: mol_type = unassigned DNA
ggagggggccggggtcgtcgctgccggctgcgctccccgcctcctcccctcgggggagtcccagaggcgcctcttccgagaccgggggtgggtcggtccctggttagatggcccctccctcttcccctccctctagtggtttccggggcctgcgggaccgaggggcgggaatcggggactggagcccccttccgctggcccggagctggactgggcctcccgcgttctgggtccgtcactggtaggggaaactttcccaaaccagagaccgagcctgaacaccttcctccgccacctcgtcctctaatcccactccctctccacctcctccgacgccttcccctcccaccgacccgaatctcggtgcgtctgactgatggggcagtgagccaatcgaaggcagggagctgacctgccgggtgtcgatttctcttggatttggctacacacttatagatcttctgcactgtttacaggcacagttgctgatatgtgttcaagatgagtgggatgggagaaaatacct

SEQ ID NO: 20646 - DNA, 7984 bp, Homo sapiens
  source 1..7984: mol_type = unassigned DNA
atatcccagtggcccccgtgcggcgactttagctgctgctgtctcagccgctccacagcgacggcagcggctgcggcttagtcggtggcggccggcggcggctgcgggctgagcggcgagtttccgatttaaagctgagctgcgaggaaaatggcggcgggaggatcaaaatacttgctggatggtggactcagagaccaataaaaataaactgcttgaacatcctttgactggttagccagttgctgatgtatattcaagatgagtggattaggagaaaacttggatccactggccagtgattcacgaaaacgcaaattgccatgtgatactccaggacaaggtcttacctgcagtggtgaaaaacggagacgggagcaggaaagtaaatatattgaagaattggctgagctgatatctgccaatcttagtgatattgacaatttcaatgtcaaaccagataaatgtgcgattttaaaggaaacagtaagacagatacgtcaaataaaagagcaaggaaaaactatttccaatgatgatgatgttcaaaaagccgatgtatcttctacagggcagggagttattgataaagactccttaggaccgcttttacttcaggcattggatggtttcctatttgtggtgaatcgagacggaaacattgtatttgtatcagaaaatgtcacacaatacctgcaatataagcaagaggacctggttaacacaagtgtttacaatatcttacatgaagaagacagaaaggattttcttaagaatttaccaaaatctacagttaatggagtttcctggacaaatgagacccaaagacaaaaaagccatacatttaattgccgtatgttgatgaaaacaccacatgatattctggaagacataaacgccagtcctgaaatgcgccagagatatgaaacaatgcagtgctttgccctgtctcagccacgagctatgatggaggaaggggaagatttgcaatcttgtatgatctgtgtggcacgccgcattactacaggagaaagaacatttccatcaaaccctgagagctttattaccagacatgatctttcaggaaaggttgtcaatatagatacaaattcactgagatcctccatgaggcctggctttgaagatataatccgaaggtgtattcagagattttttagtctaaatgatgggcagtcatggtcccagaaacgtcactatcaagaagcttatcttaatggccatgcagaaaccccagtatatcgattctcgttggctgatggaactatagtgactgcacagacaaaaagcaaactcttccgaaatcctgtaacaaatgatcgacatggctttgtctcaacccacttccttcagagagaacagaatggatatagaccaaacccaaatcctgttggacaagggattagaccacctatggctggatgcaacagttcggtaggcggcatgagtatgtcgccaaaccaaggcttacagatgccgagcagcagggcctatggcttggcagaccctagcaccacagggcagatgagtggagctaggtatgggggttccagtaacatagcttcattgacccctgggccaggcatgcaatcaccatcttcctaccagaacaacaactatgggctcaacatgagtagccccccacatgggagtcctggtcttgccccaaaccagcagaatatcatgatttctcctcgtaatcgtgggagtccaaagatagcctcacatcagttttctcctgttgcaggtgtgcactctcccatggcatcttctggcaatactgggaaccacagcttttccagcagctctctcagtgccctgcaagccatcagtgaaggtgtggggacttcccttttatctactctgtcatcaccaggccccaaattggataactctcccaatatgaatattacccaaccaagtaaagtaagcaatcaggattccaagagtcctctgggcttttattgcgaccaaaatccagtggagagttcaatgtgtcagtcaaatagcagagatcacctcagtgacaaagaaagtaaggagagcagtgttgagggggcagagaatcaaaggggtcctttggaaagcaaaggtcataaaaaattactgcagttacttacctgttcttctgatgaccggggtcattcctccttgaccaactcccccctagattcaagttgtaaagaatcttctgttagtgtcaccagcccctctggagtctcctcctctacatctggaggagtatcctctacatccaatatgcatgggtcactgttacaagagaagcaccggattttgcacaagttgctgcagaatgggaattcaccagctgaggtagccaagattactgcagaagccactgggaaagacaccagcagtataacttcttgtggggacggaaatgttgtcaagcaggagcagctaagtcctaagaagaaggagaataatgcacttcttagatacctgctggacagggatgatcctagtgatgcactctctaaagaactacagccccaagtggaaggagtggataataaaatgagtcagtgcaccagctccaccattcctagctcaagtcaagagaaagaccctaaaattaagacagagacaagtgaagagggatctggagacttggataatctagatgctattcttggtgatctgactagttctgacttttacaataattccatatcctcaaatggtagtcatctggggactaagcaacaggtgtttcaaggaactaattctctgggtttgaaaagttcacagtctgtgcagtctattcgtcctccatataaccgagcagtgtctctggatagccctgtttctgttggctcaagtcctccagtaaaaaatatcagtgctttccccatgttaccaaagcaacccatgttgggtgggaatccaagaatgatggatagtcaggaaaattatggctcaagtatgggtgggccaaaccgaaatgtgactgtgactcagactccttcctcaggagactggggcttaccaaactcaaaggccggcagaatggaacctatgaattcaaactccatgggaagaccaggaggagattataatacttctttacccagacctgcactgggtggctctattcccacattgcctcttcggtctaatagcataccaggtgcgagaccagtattgcaacagcagcagcagatgcttcaaatgaggcctggtgaaatccccatgggaatgggggctaatccctatggccaagcagcagcatctaaccaactgggttcctggcccgatggcatgttgtccatggaacaagtttctcatggcactcaaaataggcctcttcttaggaattccctggatgatcttgttgggccaccttccaacctggaaggccagagtgacgaaagagcattattggaccagctgcacactcttctcagcaacacagatgccacaggcctggaagaaattgacagagctttgggcattcctgaacttgtcaatcagggacaggcattagagcccaaacaggatgctttccaaggccaagaagcagcagtaatgatggatcagaaggcaggattatatggacagacatacccagcacaggggcctccaatgcaaggaggctttcatcttcagggacaatcaccatcttttaactctatgatgaatcagatgaaccagcaaggcaattttcctctccaaggaatgcacccacgagccaacatcatgagaccccggacaaacacccccaagcaacttagaatgcagcttcagcagaggctgcagggccagcagtttttgaatcagagccgacaggcacttgaattgaaaatggaaaaccctactgctggtggtgctgcggtgatgaggcctatgatgcagccccagcagggttttcttaatgctcaaatggtcgcccaacgcagcagagagctgctaagtcatcacttccgacaacagagggtggctatgatgatgcagcagcagcagcagcagcaacagcagcagcagcagcagcagcagcagcaacagcaacagcaacagcaacagcagcaacagcagcaaacccaggccttcagcccacctcctaatgtgactgcttcccccagcatggatgggcttttggcaggacccacaatgccacaagctcctccgcaacagtttccatatcaaccaaattatggaatgggacaacaaccagatccagcctttggtcgagtgtctagtcctcccaatgcaatgatgtcgtcaagaatgggtccctcccagaatcccatgatgcaacacccgcaggctgcatccatctatcagtcctcagaaatgaagggctggccatcaggaaatttggccaggaacagctccttttcccagcagcagtttgcccaccaggggaatcctgcagtgtatagtatggtgcacatgaatggcagcagtggtcacatgggacagatgaacatgaaccccatgcccatgtctggcatgcctatgggtcctgatcagaaatactgctgacatctctgcaccaggacctcttaaggaaaccactgtacaaatgacactgcactaggattattgggaaggaatcattgttccaggcatccatcttggaagaaaggaccagctttgagctccatcaagggtattttaagtgatgtcatttgagcaggactggattttaagccgaagggcaatatctacgtgtttttcccccctccttctgctgtgtatcatggtgttcaaaacagaaatgttttttggcattccacctcctagggatataattctggagacatggagtgttactgatcataaaacttttgtgtcacttttttctgccttgctagccaaaatctcttaaatacacgtaggtgggccagagaacattggaagaatcaagagagattagaatatctggtttctctagttgcagtattggacaaagagcatagtcccagccttcaggtgtagtagttctgtgttgaccctttgtccagtggaattggtgattctgaattgtcctttactaatggtgttgagttgctctgtccctattatttgccctaggctttctcctaatgaaggttttcatttgccattcatgtcctgtaatacttcacctccaggaactgtcatggatgtccaaatggctttgcagaaaggaaatgagatgacagtatttaatcgcagcagtagcaaacttttcacatgctaatgtgcagctgagtgcactttatttaaaaagaatggataaatgcaatattcttgaggtcttgagggaatagtgaaacacattcctggtttttgcctacacttacgtgttagacaagaactatgatttttttttttaaagtactggtgtcaccctttgcctatatggtagagcaataatgctttttaaaaataaacttctgaaaacccaaggccaggtactgcattctgaatcagaatctcgcagtgtttctgtgaatagatttttttgtaaatatgacctttaagatattgtattatgtaaaatatgtatatacctttttttgtaggtcacaacaactcatttttacagagtttgtgaagctaaatatttaacattgttgatttcagtaagctgtgtggtgaggctaccagtggaagagacatcccttgacttttgtggcctgggggaggggtagtgctccacagcttttccttccccaccccccagccttagatgcctcgctcttttcaatctcttaatctaaatgctttttaaagagattatttgtttagatgtaggcattttaattttttaaaaattcctctaccagaactaagcactttgttaatttggggggaaagaatagatatggggaaataaacttaaaaaaaaatcaggaatttaaaaaaacgagcaatttgaagagaatcttttggattttaagcagtccgaaataatagcaattcatgggctgtgtgtgtgtgtgtatgtgtgtgtgtgtgtgtgtatgtttaattatgttaccttttcatcccctttaggagcgttttcagattttggttgctaagacctgaatcccatattgagatctcgagtagaatccttggtgtggtttctggtgtctgctcagctgtcccctcattctactaatgtgatgctttcattatgtccctgtggattagaatagtgtcagttatttcttaagtaactcagtacccagaacagccagttttactgtgattcagagccacagtctaactgagcaccttttaaacccctccctcttctgccccctaccacttttctgctgttgcctctctttgacacctgttttagtcagttgggaggaagggaaaaatcaagtttaattccctttatctgggttaattcatttggttcaaatagttgacggaattgggtttctgaatgtctgtgaatttcagaggtctctgctagccttggtatcattttctagcaataactgagagccagttaattttaagaatttcacacatttagccaatctttctagatgtctctgaaggtaagatcatttaatatctttgatatgcttacgagtaagtgaatcctgattatttccagacccaccaccagagtggatcttattttcaaagcagtatagacaattatgagtttgccctctttcccctaccaagttcaaaatatatctaagaaagattgtaaatccgaaaacttccattgtagtggcctgtgcttttcagatagtatactctcctgtttggagacagaggaagaaccaggtcagtctgtctctttttcagctcaattgtatctgacccttctttaagttatgtgtgtggggagaaatagaatggtgctcttatctttcttgactttaaaaaaattattaaaaacaaaaaaaaaataaatttttttgcaatcctttcctcagacctggctccaggctaactggaaggcagcactcccttttttatatagtagaaaaatgaagtttattataagtttttatattttctacttgttcatttggtgcaaactcaagatttcttttaataggtgcagtctttgagataatttgtttttacctgtattgccctttatcttttttaggtaattctttgtactcctgctgtctacctctcctcacaccccagcaccccccattttttcaaaccttggtatctgttgggtgaacagtataatcttttcatctgcttttagaatgtgggatatttccagtacctactttttttttttttttttgctgaatccaaagatatataaataaaatatatatattttataaagatcagaatgatataaaggagatacatgtttcttcctttaaaaaataaacggaagttacattgttaatgttcatattatgatgccacttttctaaactgcatctggattgaaaggtgtaaatatcaataacagtgctacttagttatcagtatttaatatctgaggtgagttgggggtatctatattaggggtagggtattacagaagataattggcttgatgtcctagaagttctttgatccagaggtgggtgcagctgaaagtaaacagaatggattgccagttacatgtatgcctgcccagttccctttttatttgcagaagctgtgagttttgttcacaattaggttcctaggagcaaaacctcaaggattgatttattgttttcaactccaaggcacactgttaataaacgagcagggtgttttctctcttcctttctaatatatggagtttcgaagaataaaatatgagagcaatatttaaattctcaggaattgacttatactcttgagaatgaattcagtttcaatcaagtttacattatgttgcttaaaaaaatagaaattattctttatcttgcaaagaattgaaaccacatgaaatgacttatgggggatggtgagctgtgactgctttgctgaccattttggatgtcattgtaaataaaggtttctatttaaaattgga

SEQ ID NO: 20647 - DNA, 7774 bp, Homo sapiens
  source 1..7774: mol_type = unassigned DNA
atatcccagtggcccccgtgcggcgactttagctgctgctgtctcagccgctccacagcgacggcagcggctgcggcttagtcggtggcggccggcggcggctgcgggctgagcggcgagtttccgatttaaagctgagctgcgaggaaaatggcggcgggaggatcaaaatacttgctggatggtggactcagagaccaataaaaataaactgcttgaacatcctttgactggttagccagttgctgatgtatattcaagatgagtggattaggagaaaacttggatccactggccagtgattcacgaaaacgcaaattgccatgtgatactccaggacaaggtcttacctgcagtggtgaaaaacggagacgggagcaggaaagtaaatatattgaagaattggctgagctgatatctgccaatcttagtgatattgacaatttcaatgtcaaaccagataaatgtgcgattttaaaggaaacagtaagacagatacgtcaaataaaagagcaaggaaaaactatttccaatgatgatgatgttcaaaaagccgatgtatcttctacagggcagggagttattgataaagactccttaggaccgcttttacttcaggcattggatggtttcctatttgtggtgaatcgagacggaaacattgtatttgtatcagaaaatgtcacacaatacctgcaatataagcaagaggacctggttaacacaagtgtttacaatatcttacatgaagaagacagaaaggattttcttaagaatttaccaaaatctacagttaatggagtttcctggacaaatgagacccaaagacaaaaaagccatacatttaattgccgtatgttgatgaaaacaccacatgatattctggaagacataaacgccagtcctgaaatgcgccagagatatgaaacaatgcagtgctttgccctgtctcagccacgagctatgatggaggaaggggaagatttgcaatcttgtatgatctgtgtggcacgccgcattactacaggagaaagaacatttccatcaaaccctgagagctttattaccagacatgatctttcaggaaaggttgtcaatatagatacaaattcactgagatcctccatgaggcctggctttgaagatataatccgaaggtgtattcagagattttttagtctaaatgatgggcagtcatggtcccagaaacgtcactatcaagaagttaccagtgatgggatattttccccaacagcttatcttaatggccatgcagaaaccccagtatatcgattctcgttggctgatggaactatagtgactgcacagacaaaaagcaaactcttccgaaatcctgtaacaaatgatcgacatggctttgtctcaacccacttccttcagagagaacagaatggatatagaccaaacccaaatcctgttggacaagggattagaccacctatggctggatgcaacagttcggtaggcggcatgagtatgtcgccaaaccaaggcttacagatgccgagcagcagggcctatggcttggcagaccctagcaccacagggcagatgagtggagctaggtatgggggttccagtaacatagcttcattgacccctgggccaggcatgcaatcaccatcttcctaccagaacaacaactatgggctcaacatgagtagccccccacatgggagtcctggtcttgccccaaaccagcagaatatcatgatttctcctcgtaatcgtgggagtccaaagatagcctcacatcagttttctcctgttgcaggtgtgcactctcccatggcatcttctggcaatactgggaaccacagcttttccagcagctctctcagtgccctgcaagccatcagtgaaggtgtggggacttcccttttatctactctgtcatcaccaggccccaaattggataactctcccaatatgaatattacccaaccaagtaaagtaagcaatcaggattccaagagtcctctgggcttttattgcgaccaaaatccagtggagagttcaatgtgtcagtcaaatagcagagatcacctcagtgacaaagaaagtaaggagagcagtgttgagggggcagagaatcaaaggggtcctttggaaagcaaaggtcataaaaaattactgcagttacttacctgttcttctgatgaccggggtcattcctccttgaccaactcccccctagattcaagttgtaaagaatcttctgttagtgtcaccagcccctctggagtctcctcctctacatctggaggagtatcctctacatccaatatgcatgggtcactgttacaagagaagcaccggattttgcacaagttgctgcagaatgggaattcaccagctgaggtagccaagattactgcagaagccactgggaaagacaccagcagtataacttcttgtggggacggaaatgttgtcaagcaggagcagctaagtcctaagaagaaggagaataatgcacttcttagatacctgctggacagggatgatcctagtgatgcactctctaaagaactacagccccaagtggaaggagtggataataaaatgagtcagtgcaccagctccaccattcctagctcaagtcaagagaaagaccctaaaattaagacagagacaagtgaagagggatctggagacttggataatctagatgctattcttggtgatctgactagttctgacttttacaataattccatatcctcaaatggtagtcatctggggactaagcaacaggtgtttcaaggaactaattctctgggagactggggcttaccaaactcaaaggccggcagaatggaacctatgaattcaaactccatgggaagaccaggaggagattataatacttctttacccagacctgcactgggtggctctattcccacattgcctcttcggtctaatagcataccaggtgcgagaccagtattgcaacagcagcagcagatgcttcaaatgaggcctggtgaaatccccatgggaatgggggctaatccctatggccaagcagcagcatctaaccaactgggttcctggcccgatggcatgttgtccatggaacaagtttctcatggcactcaaaataggcctcttcttaggaattccctggatgatcttgttgggccaccttccaacctggaaggccagagtgacgaaagagcattattggaccagctgcacactcttctcagcaacacagatgccacaggcctggaagaaattgacagagctttgggcattcctgaacttgtcaatcagggacaggcattagagcccaaacaggatgctttccaaggccaagaagcagcagtaatgatggatcagaaggcaggattatatggacagacatacccagcacaggggcctccaatgcaaggaggctttcatcttcagggacaatcaccatcttttaactctatgatgaatcagatgaaccagcaaggcaattttcctctccaaggaatgcacccacgagccaacatcatgagaccccggacaaacacccccaagcaacttagaatgcagcttcagcagaggctgcagggccagcagtttttgaatcagagccgacaggcacttgaattgaaaatggaaaaccctactgctggtggtgctgcggtgatgaggcctatgatgcagccccagcagggttttcttaatgctcaaatggtcgcccaacgcagcagagagctgctaagtcatcacttccgacaacagagggtggctatgatgatgcagcagcagcagcagcagcaacagcagcagcagcagcagcagcagcagcaacagcaacagcaacagcaacagcagcaacagcagcaaacccaggccttcagcccacctcctaatgtgactgcttcccccagcatggatgggcttttggcaggacccacaatgccacaagctcctccgcaacagtttccatatcaaccaaattatggaatgggacaacaaccagatccagcctttggtcgagtgtctagtcctcccaatgcaatgatgtcgtcaagaatgggtccctcccagaatcccatgatgcaacacccgcaggctgcatccatctatcagtcctcagaaatgaagggctggccatcaggaaatttggccaggaacagctccttttcccagcagcagtttgcccaccaggggaatcctgcagtgtatagtatggtgcacatgaatggcagcagtggtcacatgggacagatgaacatgaaccccatgcccatgtctggcatgcctatgggtcctgatcagaaatactgctgacatctctgcaccaggacctcttaaggaaaccactgtacaaatgacactgcactaggattattgggaaggaatcattgttccaggcatccatcttggaagaaaggaccagctttgagctccatcaagggtattttaagtgatgtcatttgagcaggactggattttaagccgaagggcaatatctacgtgtttttcccccctccttctgctgtgtatcatggtgttcaaaacagaaatgttttttggcattccacctcctagggatataattctggagacatggagtgttactgatcataaaacttttgtgtcacttttttctgccttgctagccaaaatctcttaaatacacgtaggtgggccagagaacattggaagaatcaagagagattagaatatctggtttctctagttgcagtattggacaaagagcatagtcccagccttcaggtgtagtagttctgtgttgaccctttgtccagtggaattggtgattctgaattgtcctttactaatggtgttgagttgctctgtccctattatttgccctaggctttctcctaatgaaggttttcatttgccattcatgtcctgtaatacttcacctccaggaactgtcatggatgtccaaatggctttgcagaaaggaaatgagatgacagtatttaatcgcagcagtagcaaacttttcacatgctaatgtgcagctgagtgcactttatttaaaaagaatggataaatgcaatattcttgaggtcttgagggaatagtgaaacacattcctggtttttgcctacacttacgtgttagacaagaactatgatttttttttttaaagtactggtgtcaccctttgcctatatggtagagcaataatgctttttaaaaataaacttctgaaaacccaaggccaggtactgcattctgaatcagaatctcgcagtgtttctgtgaatagatttttttgtaaatatgacctttaagatattgtattatgtaaaatatgtatatacctttttttgtaggtcacaacaactcatttttacagagtttgtgaagctaaatatttaacattgttgatttcagtaagctgtgtggtgaggctaccagtggaagagacatcccttgacttttgtggcctgggggaggggtagtgctccacagcttttccttccccaccccccagccttagatgcctcgctcttttcaatctcttaatctaaatgctttttaaagagattatttgtttagatgtaggcattttaattttttaaaaattcctctaccagaactaagcactttgttaatttggggggaaagaatagatatggggaaataaacttaaaaaaaaatcaggaatttaaaaaaacgagcaatttgaagagaatcttttggattttaagcagtccgaaataatagcaattcatgggctgtgtgtgtgtgtgtatgtgtgtgtgtgtgtgtgtatgtttaattatgttaccttttcatcccctttaggagcgttttcagattttggttgctaagacctgaatcccatattgagatctcgagtagaatccttggtgtggtttctggtgtctgctcagctgtcccctcattctactaatgtgatgctttcattatgtccctgtggattagaatagtgtcagttatttcttaagtaactcagtacccagaacagccagttttactgtgattcagagccacagtctaactgagcaccttttaaacccctccctcttctgccccctaccacttttctgctgttgcctctctttgacacctgttttagtcagttgggaggaagggaaaaatcaagtttaattccctttatctgggttaattcatttggttcaaatagttgacggaattgggtttctgaatgtctgtgaatttcagaggtctctgctagccttggtatcattttctagcaataactgagagccagttaattttaagaatttcacacatttagccaatctttctagatgtctctgaaggtaagatcatttaatatctttgatatgcttacgagtaagtgaatcctgattatttccagacccaccaccagagtggatcttattttcaaagcagtatagacaattatgagtttgccctctttcccctaccaagttcaaaatatatctaagaaagattgtaaatccgaaaacttccattgtagtggcctgtgcttttcagatagtatactctcctgtttggagacagaggaagaaccaggtcagtctgtctctttttcagctcaattgtatctgacccttctttaagttatgtgtgtggggagaaatagaatggtgctcttatctttcttgactttaaaaaaattattaaaaacaaaaaaaaaataaatttttttgcaatcctttcctcagacctggctccaggctaactggaaggcagcactcccttttttatatagtagaaaaatgaagtttattataagtttttatattttctacttgttcatttggtgcaaactcaagatttcttttaataggtgcagtctttgagataatttgtttttacctgtattgccctttatcttttttaggtaattctttgtactcctgctgtctacctctcctcacaccccagcaccccccattttttcaaaccttggtatctgttgggtgaacagtataatcttttcatctgcttttagaatgtgggatatttccagtacctactttttttttttttttttgctgaatccaaagatatataaataaaatatatatattttataaagatcagaatgatataaaggagatacatgtttcttcctttaaaaaataaacggaagttacattgttaatgttcatattatgatgccacttttctaaactgcatctggattgaaaggtgtaaatatcaataacagtgctacttagttatcagtatttaatatctgaggtgagttgggggtatctatattaggggtagggtattacagaagataattggcttgatgtcctagaagttctttgatccagaggtgggtgcagctgaaagtaaacagaatggattgccagttacatgtatgcctgcccagttccctttttatttgcagaagctgtgagttttgttcacaattaggttcctaggagcaaaacctcaaggattgatttattgttttcaactccaaggcacactgttaataaacgagcagggtgttttctctcttcctttctaatatatggagtttcgaagaataaaatatgagagcaatatttaaattctcaggaattgacttatactcttgagaatgaattcagtttcaatcaagtttacattatgttgcttaaaaaaatagaaattattctttatcttgcaaagaattgaaaccacatgaaatgacttatgggggatggtgagctgtgactgctttgctgaccattttggatgtcattgtaaataaaggtttctatttaaaattgga

SEQ ID NO: 20648 - DNA, 6750 bp, Homo sapiens
  source 1..6750: mol_type = unassigned DNA
gtggcggccggcggcggctgcgggctgagcggcgagtttccgatttaaagctgagctgcgaggaaaatggcggcgggaggatcaaaatacttgctggatggtggactcagagaccaataaaaataaactgcttgaacatcctttgactggttagccagttgctgatgtatattcaagatgagtggattaggagaaaacttggatccactggccagtgattcacgaaaacgcaaattgccatgtgatactccaggacaaggtcttacctgcagtggtgaaaaacggagacgggagcaggaaagtaaatatattgaagaattggctgagctgatatctgccaatcttagtgatattgacaatttcaatgtcaaaccagataaatgtgcgattttaaaggaaacagtaagacagatacgtcaaataaaagagcaaggaaaaactatttccaatgatgatgatgttcaaaaagccgatgtatcttctacagggcagggagttattgataaagactccttaggaccgcttttacttcaggcattggatggtttcctatttgtggtgaatcgagacggaaacattgtatttgtatcagaaaatgtcacacaatacctgcaatataagcaagaggacctggttaacacaagtgtttacaatatcttacatgaagaagacagaaaggattttcttaagaatttaccaaaatctacagttaatggagtttcctggacaaatgagacccaaagacaaaaaagccatacatttaattgccgtatgttgatgaaaacaccacatgatattctggaagacataaacgccagtcctgaaatgcgccagagatatgaaacaatgcagtgctttgccctgtctcagccacgagctatgatggaggaaggggaagatttgcaatcttgtatgatctgtgtggcacgccgcattactacaggagaaagaacatttccatcaaaccctgagagctttattaccagacatgatctttcaggaaaggttgtcaatatagatacaaattcactgagatcctccatgaggcctggctttgaagatataatccgaaggtgtattcagagattttttagtctaaatgatgggcagtcatggtcccagaaacgtcactatcaagaagttaccagtgatgggatattttccccaacagcttatcttaatggccatgcagaaaccccagtatatcgattctcgttggctgatggaactatagtgactgcacagacaaaaagcaaactcttccgaaatcctgtaacaaatgatcgacatggctttgtctcaacccacttccttcagagagaacagaatggatatagaccaaacccaaatcctgttggacaagggattagaccacctatggctggatgcaacagttcggtaggcggcatgagtatgtcgccaaaccaaggcttacagatgccgagcagcagggcctatggcttggcagaccctagcaccacagggcagatgagtggagctaggtatgggggttccagtaacatagcttcattgacccctgggccaggcatgcaatcaccatcttcctaccagaacaacaactatgggctcaacatgagtagccccccacatgggagtcctggtcttgccccaaaccagcagaatatcatgatttctcctcgtaatcgtgggagtccaaagatagcctcacatcagttttctcctgttgcaggtgtgcactctcccatggcatcttctggcaatactgggaaccacagcttttccagcagctctctcagtgccctgcaagccatcagtgaaggtgtggggacttcccttttatctactctgtcatcaccaggccccaaattggataactctcccaatatgaatattacccaaccaagtaaagtaagcaatcaggattccaagagtcctctgggcttttattgcgaccaaaatccagtggagagttcaatgtgtcagtcaaatagcagagatcacctcagtgacaaagaaagtaaggagagcagtgttgagggggcagagaatcaaaggggtcctttggaaagcaaaggtcataaaaaattactgcagttacttacctgttcttctgatgaccggggtcattcctccttgaccaactcccccctagattcaagttgtaaagaatcttctgttagtgtcaccagcccctctggagtctcctcctctacatctggaggagtatcctctacatccaatatgcatgggtcactgttacaagagaagcaccggattttgcacaagttgctgcagaatgggaattcaccagctgaggtagccaagattactgcagaagccactgggaaagacaccagcagtataacttcttgtggggacggaaatgttgtcaagcaggagcagctaagtcctaagaagaaggagaataatgcacttcttagatacctgctggacagggatgatcctagtgatgcactctctaaagaactacagccccaagtggaaggagtggataataaaatgagtcagtgcaccagctccaccattcctagctcaagtcaagagaaagaccctaaaattaagacagagacaagtgaagagggatctggagacttggataatctagatgctattcttggtgatctgactagttctgacttttacaataattccatatcctcaaatggtagtcatctggggactaagcaacaggtgtttcaaggaactaattctctgggtttgaaaagttcacagtctgtgcagtctattcgtcctccatataaccgagcagtgtctctggatagccctgtttctgttggctcaagtcctccagtaaaaaatatcagtgctttccccatgttaccaaagcaacccatgttgggtgggaatccaagaatgatggatagtcaggaaaattatggctcaagtatgggagactggggcttaccaaactcaaaggccggcagaatggaacctatgaattcaaactccatgggaagaccaggaggagattataatacttctttacccagacctgcactgggtggctctattcccacattgcctcttcggtctaatagcataccaggtgcgagaccagtattgcaacagcagcagcagatgcttcaaatgaggcctggtgaaatccccatgggaatgggggctaatccctatggccaagcagcagcatctaaccaactgggttcctggcccgatggcatgttgtccatggaacaagtttctcatggcactcaaaataggcctcttcttaggaattccctggatgatcttgttgggccaccttccaacctggaaggccagagtgacgaaagagcattattggaccagctgcacactcttctcagcaacacagatgccacaggcctggaagaaattgacagagctttgggcattcctgaacttgtcaatcagggacaggcattagagcccaaacaggatgctttccaaggccaagaagcagcagtaatgatggatcagaaggcaggattatatggacagacatacccagcacaggggcctccaatgcaaggaggctttcatcttcagggacaatcaccatcttttaactctatgatgaatcagatgaaccagcaaggcaattttcctctccaaggaatgcacccacgagccaacatcatgagaccccggacaaacacccccaagcaacttagaatgcagcttcagcagaggctgcagggccagcagtttttgaatcagagccgacaggcacttgaattgaaaatggaaaaccctactgctggtggtgctgcggtgatgaggcctatgatgcagccccagcagggttttcttaatgctcaaatggtcgcccaacgcagcagagagctgctaagtcatcacttccgacaacagagggtggctatgatgatgcagcagcagcagcagcagcaacagcagcagcagcagcagcagcagcagcaacagcaacagcaacagcaacagcagcaacagcagcaaacccaggccttcagcccacctcctaatgtgactgcttcccccagcatggatgggcttttggcaggacccacaatgccacaagctcctccgcaacagtttccatatcaaccaaattatggaatgggacaacaaccagatccagcctttggtcgagtgtctagtcctcccaatgcaatgatgtcgtcaagaatgggtccctcccagaatcccatgatgcaacacccgcaggctgcatccatctatcagtcctcagaaatgaagggctggccatcaggaaatttggccaggaacagctccttttcccagcagcagtttgcccaccaggggaatcctgcagtgtatagtatggtgcacatgaatggcagcagtggtcacatgggacagatgaacatgaaccccatgcccatgtctggcatgcctatgggtcctgatcagaaatactgctgacatctctgcaccaggacctcttaaggaaaccactgtacaaatgacactgcactaggattattgggaaggaatcattgttccaggcatccatcttggaagaaaggaccagctttgagctccatcaagggtattttaagtgatgtcatttgagcaggactggattttaagccgaagggcaatatctacgtgtttttcccccctccttctgctgtgtatcatggtgttcaaaacagaaatgttttttggcattccacctcctagggatataattctggagacatggagtgttactgatcataaaacttttgtgtcacttttttctgccttgctagccaaaatctcttaaatacacgtaggtgggccagagaacattggaagaatcaagagagattagaatatctggtttctctagttgcagtattggacaaagagcatagtcccagccttcaggtgtagtagttctgtgttgaccctttgtccagtggaattggtgattctgaattgtcctttactaatggtgttgagttgctctgtccctattatttgccctaggctttctcctaatgaaggttttcatttgccattcatgtcctgtaatacttcacctccaggaactgtcatggatgtccaaatggctttgcagaaaggaaatgagatgacagtatttaatcgcagcagtagcaaacttttcacatgctaatgtgcagctgagtgcactttatttaaaaagaatggataaatgcaatattcttgaggtcttgagggaatagtgaaacacattcctggtttttgcctacacttacgtgttagacaagaactatgatttttttttttaaagtactggtgtcaccctttgcctatatggtagagcaataatgctttttaaaaataaacttctgaaaacccaaggccaggtactgcattctgaatcagaatctcgcagtgtttctgtgaatagatttttttgtaaatatgacctttaagatattgtattatgtaaaatatgtatatacctttttttgtaggtcacaacaactcatttttacagagtttgtgaagctaaatatttaacattgttgatttcagtaagctgtgtggtgaggctaccagtggaagagacatcccttgacttttgtggcctgggggaggggtagtgctccacagcttttccttccccaccccccagccttagatgcctcgctcttttcaatctcttaatctaaatgctttttaaagagattatttgtttagatgtaggcattttaattttttaaaaattcctctaccagaactaagcactttgttaatttggggggaaagaatagatatggggaaataaacttaaaaaaaaatcaggaatttaaaaaaacgagcaatttgaagagaatcttttggattttaagcagtccgaaataatagcaattcatgggctgtgtgtgtgtgtgtatgtgtgtgtgtgtgtgtgtatgtttaattatgttaccttttcatcccctttaggagcgttttcagattttggttgctaagacctgaatcccatattgagatctcgagtagaatccttggtgtggtttctggtgtctgctcagctgtcccctcattctactaatgtgatgctttcattatgtccctgtggattagaatagtgtcagttatttcttaagtaactcagtacccagaacagccagttttactgtgattcagagccacagtctaactgagcaccttttaaacccctccctcttctgccccctaccacttttctgctgttgcctctctttgacacctgttttagtcagttgggaggaagggaaaaatcaagtttaattccctttatctgggttaattcatttggttcaaatagttgacggaattgggtttctgaatgtctgtgaatttcagaggtctctgctagccttggtatcattttctagcaataactgagagccagttaattttaagaatttcacacatttagccaatctttctagatgtctctgaaggtaagatcatttaatatctttgatatgcttacgagtaagtgaatcctgattatttccagacccaccaccagagtggatcttattttcaaagcagtatagacaattatgagtttgccctctttcccctaccaagttcaaaatatatctaagaaagattgtaaatccgaaaacttccattgtagtggcctgtgcttttcagatagtatactctcctgtttggagacagaggaagaaccaggtcagtctgtctctttttcagctcaattgtatctgacccttctttaagttatgtgtgtggggagaaatagaatggtgctcttat

SEQ ID NO: 20649 - DNA, 4668 bp, Homo sapiens
  source 1..4668: mol_type = unassigned DNA
ctgcggcttagtcggtggcggccggcggcggctgcgggctgagcggcgagtttccgatttaaagctgagctgcgaggaaaatggcggcgggaggatcaaaatacttgctggatggtggactcagagaccaataaaaataaactgcttgaacatcctttgactggttagccagttgctgatgtatattcaagatgagtggattaggagaaaacttggatccactggccagtgattcacgaaaacgcaaattgccatgtgatactccaggacaaggtcttacctgcagtggtgaaaaacggagacgggagcaggaaagtaaatatattgaagaattggctgagctgatatctgccaatcttagtgatattgacaatttcaatgtcaaaccagataaatgtgcgattttaaaggaaacagtaagacagatacgtcaaataaaagagcaaggaaaaactatttccaatgatgatgatgttcaaaaagccgatgtatcttctacagggcagggagttattgataaagactccttaggaccgcttttacttcaggcattggatggtttcctatttgtggtgaatcgagacggaaacattgtatttgtatcagaaaatgtcacacaatacctgcaatataagcaagaggacctggttaacacaagtgtttacaatatcttacatgaagaagacagaaaggattttcttaagaatttaccaaaatctacagttaatggagtttcctggacaaatgagacccaaagacaaaaaagccatacatttaattgccgtatgttgatgaaaacaccacatgatattctggaagacataaacgccagtcctgaaatgcgccagagatatgaaacaatgcagtgctttgccctgtctcagccacgagctatgatggaggaaggggaagatttgcaatcttgtatgatctgtgtggcacgccgcattactacaggagaaagaacatttccatcaaaccctgagagctttattaccagacatgatctttcaggaaaggttgtcaatatagatacaaattcactgagatcctccatgaggcctggctttgaagatataatccgaaggtgtattcagagattttttagtctaaatgatgggcagtcatggtcccagaaacgtcactatcaagaagcttatcttaatggccatgcagaaaccccagtatatcgattctcgttggctgatggaactatagtgactgcacagacaaaaagcaaactcttccgaaatcctgtaacaaatgatcgacatggctttgtctcaacccacttccttcagagagaacagaatggatatagaccaaacccaaatcctgttggacaagggattagaccacctatggctggatgcaacagttcggtaggcggcatgagtatgtcgccaaaccaaggcttacagatgccgagcagcagggcctatggcttggcagaccctagcaccacagggcagatgagtggagctaggtatgggggttccagtaacatagcttcattgacccctgggccaggcatgcaatcaccatcttcctaccagaacaacaactatgggctcaacatgagtagccccccacatgggagtcctggtcttgccccaaaccagcagaatatcatgatttctcctcgtaatcgtgggagtccaaagatagcctcacatcagttttctcctgttgcaggtgtgcactctcccatggcatcttctggcaatactgggaaccacagcttttccagcagctctctcagtgccctgcaagccatcagtgaaggtgtggggacttcccttttatctactctgtcatcaccaggccccaaattggataactctcccaatatgaatattacccaaccaagtaaagtaagcaatcaggattccaagagtcctctgggcttttattgcgaccaaaatccagtggagagttcaatgtgtcagtcaaatagcagagatcacctcagtgacaaagaaagtaaggagagcagtgttgagggggcagagaatcaaaggggtcctttggaaagcaaaggtcataaaaaattactgcagttacttacctgttcttctgatgaccggggtcattcctccttgaccaactcccccctagattcaagttgtaaagaatcttctgttagtgtcaccagcccctctggagtctcctcctctacatctggaggagtatcctctacatccaatatgcatgggtcactgttacaagagaagcaccggattttgcacaagttgctgcagaatgggaattcaccagctgaggtagccaagattactgcagaagccactgggaaagacaccagcagtataacttcttgtggggacggaaatgttgtcaagcaggagcagctaagtcctaagaagaaggagaataatgcacttcttagatacctgctggacagggatgatcctagtgatgcactctctaaagaactacagccccaagtggaaggagtggataataaaatgagtcagtgcaccagctccaccattcctagctcaagtcaagagaaagaccctaaaattaagacagagacaagtgaagagggatctggagacttggataatctagatgctattcttggtgatctgactagttctgacttttacaataattccatatcctcaaatggtagtcatctggggactaagcaacaggtgtttcaaggaactaattctctgggtttgaaaagttcacagtctgtgcagtctattcgtcctccatataaccgagcagtgtctctggatagccctgtttctgttggctcaagtcctccagtaaaaaatatcagtgctttccccatgttaccaaagcaacccatgttgggtgggaatccaagaatgatggatagtcaggaaaattatggctcaagtatgggtgggccaaaccgaaatgtgactgtgactcagactccttcctcaggagactggggcttaccaaactcaaaggccggcagaatggaacctatgaattcaaactccatgggaagaccaggaggagattataatacttctttacccagacctgcactgggtggctctattcccacattgcctcttcggtctaatagcataccaggtgcgagaccagtattgcaacagcagcagcagatgcttcaaatgaggcctggtgaaatccccatgggaatgggggctaatccctatggccaagcagcagcatctaaccaactgggttcctggcccgatggcatgttgtccatggaacaagtttctcatggcactcaaaataggcctcttcttaggaattccctggatgatcttgttgggccaccttccaacctggaaggccagagtgacgaaagagcattattggaccagctgcacactcttctcagcaacacagatgccacaggcctggaagaaattgacagagctttgggcattcctgaacttgtcaatcagggacaggcattagagcccaaacaggatgctttccaaggccaagaagcagcagtaatgatggatcagaaggcaggattatatggacagacatacccagcacaggggcctccaatgcaaggaggctttcatcttcagggacaatcaccatcttttaactctatgatgaatcagatgaaccagcaaggcaattttcctctccaaggaatgcacccacgagccaacatcatgagaccccggacaaacacccccaagcaacttagaatgcagcttcagcagaggctgcagggccagcagtttttgaatcagagccgacaggcacttgaattgaaaatggaaaaccctactgctggtggtgctgcggtgatgaggcctatgatgcagccccaggtgagctcccagcagggttttcttaatgctcaaatggtcgcccaacgcagcagagagctgctaagtcatcacttccgacaacagagggtggctatgatgatgcagcagcagcagcagcagcaacagcagcagcagcagcagcagcagcagcaacagcaacagcaacagcaacagcagcaacagcagcaaacccaggccttcagcccacctcctaatgtgactgcttcccccagcatggatgggcttttggcaggacccacaatgccacaagctcctccgcaacagtttccatatcaaccaaattatggaatgggacaacaaccagatccagcctttggtcgagtgtctagtcctcccaatgcaatgatgtcgtcaagaatgggtccctcccagaatcccatgatgcaacacccgcaggctgcatccatctatcagtcctcagaaatgaagggctggccatcaggaaatttggccaggaacagctccttttcccagcagcagtttgcccaccaggggaatcctgcagtgtatagtatggtgcacatgaatggcagcagtggtcacatgggacagatgaacatgaaccccatgcccatgtctggcatgcctatgggtcctgatcagaaatactgctgacatctctgcaccaggacctcttaaggaaaccactgtacaaatgacactgcactaggattattgggaaggaatcattgttccaggcatccatcttggaagaaaggaccagctttgagctccatcaagggtattttaagtgatgtcatttgagcaggactggattttaagccgaagggcaatatctacgtgtttttcccccctc

SEQ ID NO: 20650 - DNA, 6851 bp, Homo sapiens
  source 1..6851: mol_type = unassigned DNA
agccgctccacagcgacggcagcggctgcggcttagtcggtggcggccggcggcggctgcgggctgagcggcgagtttccgatttaaagctgagctgcgaggaaaatggcggcgggaggatcaaaatacttgctggatggtggactcagagaccaataaaaataaactgcttgaacatcctttgactggttagccagagttgctgatgtatattcaagatgagtggattaggagaaaacttggatccactggccagtgattcacgaaaacgcaaattgccatgtgatactccaggacaaggtcttacctgcagtggtgaaaaacggagacgggagcaggaaagtaaatatattgaagaattggctgagctgatatctgccaatcttagtgatattgacaatttcaatgtcaaaccagataaatgtgcgattttaaaggaaacagtaagacagatacgtcaaataaaagagcaaggaaaaactatttccaatgatgatgatgttcaaaaagccgatgtatcttctacagggcagggagttattgataaagactccttaggaccgcttttacttcaggcattggatggtttcctatttgtggtgaatcgagacggaaacattgtatttgtatcagaaaatgtcacacaatacctgcaatataagcaagaggacctggttaacacaagtgtttacaatatcttacatgaagaagacagaaaggattttcttaagaatttaccaaaatctacagttaatggagtttcctggacaaatgagacccaaagacaaaaaagccatacatttaattgccgtatgttgatgaaaacaccacatgatattctggaagacataaacgccagtcctgaaatgcgccagagatatgaaacaatgcagtgctttgccctgtctcagccacgagctatgatggaggaaggggaagatttgcaatcttgtatgatctgtgtggcacgccgcattactacaggagaaagaacatttccatcaaaccctgagagctttattaccagacatgatctttcaggaaaggttgtcaatatagatacaaattcactgagatcctccatgaggcctggctttgaagatataatccgaaggtgtattcagagattttttagtctaaatgatgggcagtcatggtcccagaaacgtcactatcaagaagcttatcttaatggccatgcagaaaccccagtatatcgattctcgttggctgatggaactatagtgactgcacagacaaaaagcaaactcttccgaaatcctgtaacaaatgatcgacatggctttgtctcaacccacttccttcagagagaacagaatggatatagaccaaacccaaatcctgttggacaagggattagaccacctatggctggatgcaacagttcggtaggcggcatgagtatgtcgccaaaccaaggcttacagatgccgagcagcagggcctatggcttggcagaccctagcaccacagggcagatgagtggagctaggtatgggggttccagtaacatagcttcattgacccctgggccaggcatgcaatcaccatcttcctaccagaacaacaactatgggctcaacatgagtagccccccacatgggagtcctggtcttgccccaaaccagcagaatatcatgatttctcctcgtaatcgtgggagtccaaagatagcctcacatcagttttctcctgttgcaggtgtgcactctcccatggcatcttctggcaatactgggaaccacagcttttccagcagctctctcagtgccctgcaagccatcagtgaaggtgtggggacttcccttttatctactctgtcatcaccaggccccaaattggataactctcccaatatgaatattacccaaccaagtaaagtaagcaatcaggattccaagagtcctctgggcttttattgcgaccaaaatccagtggagagttcaatgtgtcagtcaaatagcagagatcacctcagtgacaaagaaagtaaggagagcagtgttgagggggcagagaatcaaaggggtcctttggaaagcaaaggtcataaaaaattactgcagttacttacctgttcttctgatgaccggggtcattcctccttgaccaactcccccctagattcaagttgtaaagaatcttctgttagtgtcaccagcccctctggagtctcctcctctacatctggaggagtatcctctacatccaatatgcatgggtcactgttacaagagaagcaccggattttgcacaagttgctgcagaatgggaattcaccagctgaggtagccaagattactgcagaagccactgggaaagacaccagcagtataacttcttgtggggacggaaatgttgtcaagcaggagcagctaagtcctaagaagaaggagaataatgcacttcttagatacctgctggacagggatgatcctagtgatgcactctctaaagaactacagccccaagtggaaggagtggataataaaatgagtcagtgcaccagctccaccattcctagctcaagtcaagagaaagaccctaaaattaagacagagacaagtgaagagggatctggagacttggataatctagatgctattcttggtgatctgactagttctgacttttacaataattccatatcctcaaatggtagtcatctggggactaagcaacaggtgtttcaaggaactaattctctgggtttgaaaagttcacagtctgtgcagtctattcgtcctccatataaccgagcagtgtctctggatagccctgtttctgttggctcaagtcctccagtaaaaaatatcagtgctttccccatgttaccaaagcaacccatgttgggtgggaatccaagaatgatggatagtcaggaaaattatggctcaagtatgggtgggccaaaccgaaatgtgactgtgactcagactccttcctcaggagactggggcttaccaaactcaaaggccggcagaatggaacctatgaattcaaactccatgggaagaccaggaggagattataatacttctttacccagacctgcactgggtggctctattcccacattgcctcttcggtctaatagcataccaggtgcgagaccagtattgcaacagcagcagcagatgcttcaaatgaggcctggtgaaatccccatgggaatgggggctaatccctatggccaagcagcagcatctaaccaactgggttcctggcccgatggcatgttgtccatggaacaagtttctcatggcactcaaaataggcctcttcttaggaattccctggatgatcttgttgggccaccttccaacctggaaggccagagtgacgaaagagcattattggaccagctgcacactcttctcagcaacacagatgccacaggcctggaagaaattgacagagctttgggcattcctgaacttgtcaatcagggacaggcattagagcccaaacaggatgctttccaaggccaagaagcagcagtaatgatggatcagaaggcaggattatatggacagacatacccagcacaggggcctccaatgcaaggaggctttcatcttcagggacaatcaccatcttttaactctatgatgaatcagatgaaccagcaaggcaattttcctctccaaggaatgcacccacgagccaacatcatgagaccccggacaaacacccccaagcaacttagaatgcagcttcagcagaggctgcagggccagcagtttttgaatcagagccgacaggcacttgaattgaaaatggaaaaccctactgctggtggtgctgcggtgatgaggcctatgatgcagccccagcagggttttcttaatgctcaaatggtcgcccaacgcagcagagagctgctaagtcatcacttccgacaacagagggtggctatgatgatgcagcagcagcagcagcagcaacagcagcagcagcagcagcagcagcagcaacagcaacagcaacagcaacagcagcaacagcagcaaacccaggccttcagcccacctcctaatgtgactgcttcccccagcatggatgggcttttggcaggacccacaatgccacaagctcctccgcaacagtttccatatcaaccaaattatggaatgggacaacaaccagatccagcctttggtcgagtgtctagtcctcccaatgcaatgatgtcgtcaagaatgggtccctcccagaatcccatgatgcaacacccgcaggctgcatccatctatcagtcctcagaaatgaagggctggccatcaggaaatttggccaggaacagctccttttcccagcagcagtttgcccaccaggggaatcctgcagtgtatagtatggtgcacatgaatggcagcagtggtcacatgggacagatgaacatgaaccccatgcccatgtctggcatgcctatgggtcctgatcagaaatactgctgacatctctgcaccaggacctcttaaggaaaccactgtacaaatgacactgcactaggattattgggaaggaatcattgttccaggcatccatcttggaagaaaggaccagctttgagctccatcaagggtattttaagtgatgtcatttgagcaggactggattttaagccgaagggcaatatctacgtgtttttcccccctccttctgctgtgtatcatggtgttcaaaacagaaatgttttttggcattccacctcctagggatataattctggagacatggagtgttactgatcataaaacttttgtgtcacttttttctgccttgctagccaaaatctcttaaatacacgtaggtgggccagagaacattggaagaatcaagagagattagaatatctggtttctctagttgcagtattggacaaagagcatagtcccagccttcaggtgtagtagttctgtgttgaccctttgtccagtggaattggtgattctgaattgtcctttactaatggtgttgagttgctctgtccctattatttgccctaggctttctcctaatgaaggttttcatttgccattcatgtcctgtaatacttcacctccaggaactgtcatggatgtccaaatggctttgcagaaaggaaatgagatgacagtatttaatcgcagcagtagcaaacttttcacatgctaatgtgcagctgagtgcactttatttaaaaagaatggataaatgcaatattcttgaggtcttgagggaatagtgaaacacattcctggtttttgcctacacttacgtgttagacaagaactatgatttttttttttaaagtactggtgtcaccctttgcctatatggtagagcaataatgctttttaaaaataaacttctgaaaacccaaggccaggtactgcattctgaatcagaatctcgcagtgtttctgtgaatagatttttttgtaaatatgacctttaagatattgtattatgtaaaatatgtatatacctttttttgtaggtcacaacaactcatttttacagagtttgtgaagctaaatatttaacattgttgatttcagtaagctgtgtggtgaggctaccagtggaagagacatcccttgacttttgtggcctgggggaggggtagtgctccacagcttttccttccccaccccccagccttagatgcctcgctcttttcaatctcttaatctaaatgctttttaaagagattatttgtttagatgtaggcattttaattttttaaaaattcctctaccagaactaagcactttgttaatttggggggaaagaatagatatggggaaataaacttaaaaaaaaatcaggaatttaaaaaaacgagcaatttgaagagaatcttttggattttaagcagtccgaaataatagcaattcatgggctgtgtgtgtgtgtgtatgtgtgtgtgtgtgtgtgtatgtttaattatgttaccttttcatcccctttaggagcgttttcagattttggttgctaagacctgaatcccatattgagatctcgagtagaatccttggtgtggtttctggtgtctgctcagctgtcccctcattctactaatgtgatgctttcattatgtccctgtggattagaatagtgtcagttatttcttaagtaactcagtacccagaacagccagttttactgtgattcagagccacagtctaactgagcaccttttaaacccctccctcttctgccccctaccacttttctgctgttgcctctctttgacacctgttttagtcagttgggaggaagggaaaaatcaagtttaattccctttatctgggttaattcatttggttcaaatagttgacggaattgggtttctgaatgtctgtgaatttcagaggtctctgctagccttggtatcattttctagcaataactgagagccagttaattttaagaatttcacacatttagccaatctttctagatgtctctgaaggtaagatcatttaatatctttgatatgcttacgagtaagtgaatcctgattatttccagacccaccaccagagtggatcttattttcaaagcagtatagacaattatgagtttgccctctttcccctaccaagttcaaaatatatctaagaaagattgtaaatccgaaaacttccattgtagtggcctgtgcttttcagatagtatactctcctgtttggagacagaggaagaaccaggtcagtctgtctctttttcagctcaattgtatctgacccttctttaagttatgtgtgtggggagaaatagaatggtgctcttatctttcttgactttaaaaaaattattaaaaacaaaaaaaaaataaa

SEQ ID NO: 20651 - DNA, 1016 bp, Homo sapiens
  source 1..1016: mol_type = unassigned DNA
ctttgccctgtctcagccacgagctatgatggaggaaggggaagatttgcaatcttgtatgatctgtgtggcacgccgcattactacaggagaaagaacatttccatcaaaccctgagagctttattaccagacatgatctttcaggaaaggttgtcaatatagatacaaattcactgagatcctccatgaggcctggctttgaagatataatccgaaggtgtattcagagattttttagtctaaatgatgggcagtcatggtcccagaaacgtcactatcaagaagcttatcttaatggccatgcagaaaccccagtatatcgattctcgttggctgatggaactatagtgactgcacagacaaaaagcaaactcttccgaaatcctgtaacaaatgatcgacatggctttgtctcaacccacttccttcagagagaacagaatggatatagaccaaacccaaatcctgttggacaagggattagaccacctatggctggatgcaacagttcggtaggcggcatgagtatgtcgccaaaccaaggcttacagatgccgagcagcagggcctatggcttggcagaccctagcaccacagggcagatgagtggagctaggtatgggggttccagtaacatagcttcattgacccctgggccaggcatgcaatcaccatcttcctaccagaacaacaactatgggctcaacatgagtagccccccacatgggagtcctggtcttgccccaaaccagcagaatatcatgattctcctcgtaatcgtgggagtccaaagatagcctcacatcagttttctcctgttgcaggtgtgcactctcccatggcatcttctggcaatactgggaaccacagcttttccagcagctctctcagtgccctgcaagccatcagtgaaggtgtggggacttcccttttatctactctgtcatcaccaggccccaaattggataactctcccaatatgaatattacccaaccaagtaaagtaagcaatca

SEQ ID NO: 20652 - DNA, 945 bp, Homo sapiens
  source 1..945: mol_type = unassigned DNA
ggttagtgtggggccgtgtctcagtccacccaaggtctcctcggatcgcctggagaggcactcggacctggagcagtgaggagaatgaataccttccaagaccagagtggcagctccagtaatagagaaccccttttgaggtgtagtgatgcacggagggacttggagcttgctattggtggagttctccgggctgaacagcaaattaaagataacttgcgagaggtcaaagctcagattcacagttgcataagccgtcacctggaatgtcttagaagccgtgaggtatggctgtatgaacaggtggaccttatttatcagcttaaagaggagacacttcaacagcaggctcagcagctctactcgttattgggccagttcaattgtcttactcatcaactggagtgtacccaaaacaaagatctagccaatcaagtctctgtgtgcctggagagactgggcagtttgacccttaagcctgaagattcaactgtcctgctctttgaagctgacacaattactctgcgccagaccatcaccacatttgggtctctcaaaaccattcaaattcctgagcacttgatggctcatgctagttcagcaaatattgggcccttcctggagaagagaggctgtatctccatgccagagcagaagtcagcatccggtattgtagctgtccctttcagcgaatggctccttggaagcaaacctgccagtggttatcaagctccttacatacccagcaccgacccccaggactggcttacccaaaagcagaccttggagaacagtcagcaggaagtattacttaattcacctctacaggaggaacataacttccccccagaccattatggcctccctgcagtttgtgatctctttgcctgtatgcagcttaaagttgataaagagaagtggttatatcgaactcctctacaggtg

SEQ ID NO: 20653 - DNA, 3487 bp, Homo sapiens
  source 1..3487: mol_type = unassigned DNA
ctggagttgccgtgtgacgcgtgggcgggacgaggcccgggctcggggacctttcgcactcgggtcaggggtaaagcagcctgtcgcttgccgggcagctggtgagtcggtgacctggcctgtgaggagcagtgaggagaatgaataccttccaagaccagagtggcagctccagtaatagagaaccccttttgaggtgtagtgatgcacggagggacttggagcttgctattggtggagttctccgggctgaacagcaaattaaagataacttgcgagaggtcaaagctcagattcacagttgcataagccgtcacctggaatgtcttagaagccgtgaggtatggctgtatgaacaggtggaccttatttatcagcttaaagaggagacacttcaacagcaggctcagcagctctactcgttattgggccagttcaattgtcttactcatcaactggagtgtacccaaaacaaagatctagccaatcaagtctctgtgtgcctggagagactgggcagtttgacccttaagcctgaagattcaactgtcctgctctttgaagctgacacaattactctgcgccagaccatcaccacatttgggtctctcaaaaccattcaaattcctgagcacttgatggctcatgctagttcagcaaatattgggcccttcctggagaagagaggctgtatctccatgccagagcagaagtcagcatccggtattgtagctgtccctttcagcgaatggctccttggaagcaaacctgccagtggttatcaagctccttacatacccagcaccgacccccaggactggcttacccaaaagcagaccttggagaacagtcagacttcttccagagcctgcaatttcttcaataatgtcgggggaaacctaaagggcttagaaaactggctcctcaagagtgaaaaatcaagttatcaaaagtgtaacagccattccactactagttctttctccattgaaatggaaaaggttggagatcaagagcttcctgatcaagatgagatggacctatcagattggctagtgactccccaggaatcccataagctgcggaagcctgagaatggcagtcgtgaaaccagtgagaagtttaagctcttattccagtcctataatgtgaatgattggcttgtcaagactgactcctgtaccaactgtcagggaaaccagcccaaaggtgtggagattgaaaacctgggcaatctgaagtgcctgaatgaccacttggaggccaagaaaccattgtccacccccagcatggttacagaggattggcttgtccagaaccatcaggacccatgtaaggtagaggaggtgtgcagagccaatgagccctgcacaagctttgcagagtgtgtgtgtgatgagaattgtgagaaggaggctctgtataagtggcttctgaagaaagaaggaaaggataaaaatgggatgcctgtggaacccaaacctgagcctgagaagcataaagattccctgaatatgtggctctgtcctagaaaagaagtaatagaacaaactaaagcaccaaaggcaatgactccttctagaattgctgattccttccaagtcataaagaacagccccttgtcggagtggcttatcaggcccccatacaaagaaggaagtcccaaggaagtgcctggtactgaagacagagctggcaaacagaagtttaaaagccccatgaatacttcctggtgttcctttaacacagctgactgggtcctgccaggaaagaagatgggcaacctcagccagttatcttctggagaagacaagtggctgcttcgaaagaaggcccaggaagtattacttaattcacctctacaggaggaacataacttccccccagaccattatggcctccctgcagtttgtgatctctttgcctgtatgcagcttaaagttgataaagagaagtggttatatcgaactcctctacagatgtgaaggaatggacaagagttgagcagcctttctgctgattatcacacatcatgagctgagtgactgcagcttgccaaatctttgtgtttctgggtctgaccaattagcttagttcttctcctgcctaattttgaactagtaaagcaaagtgagtcatcagattatgagttactgtttaaaagaaaaatgctgtttattcatgctgaggtgattcagttccctccttcttacagaagtattttaattcaccccacactagaaatgcagcatctttgtggacgtctttttcacaagcctccaaggctccttagattgggtcgttactaaaagtacattaaaacactcttgtttatcgaagtatattgatgtattctaaagctagtaaacttccctaacgtttaattgccctacagatgcttctcttgctgtgggttttcttttgttagtggtctgaaataattattttcctgttctattaatacatagtgtattttgcacaaaaaaattaacctggtcaatagtgattaccaaaatatatattaataatcttggcaatttttgacattaattatgaaacattttagcccacgttagttctacattattcttcacttaaactcagctactgcaaattttgtctttctgtaaatgttattaaaatatccagtgagctctttagaaggactcagtattatttcaagactatttttgaggtaattctagccttttaaaatattctacagacctacggggcttaaaagaaccccagtaccgactaagcaaataggcaaaagacatgttggaaatgtagtatagtacttgaaacagtcactatcatagggataattggtgcatcctgtgtaaatggaagctgagcttgacacctggtgcttttaagtagggataaagtcatcctctcactgcaagcacagcatacctgtacctccaaaagtgacgttttagtgaacaggccgttttcaacacttgtgccttggggtgttcattgaagctttgtgaaaactactgatgttttctcagtctccttaaagttacgtccatgctttaaaatgtctgtgtaggagagaagtggggtttataatgttttctctaagatatctttgctgctttccagactttgaaactattaagcttcttaactgcctcttaccggaaatacttctggggaaacttcatggtcccaaaatgtcattgccatacagcttcactagagttctttgaaccacagctgaaaagagctttgtattattttttaattccctccccagatatcatttaggagtattatataaaggtggtgggcaaaaacaatgtaaggagcctttccagttatcttgagttgcagctctgtagtttcttgaggccaaacacactgtattttacaagtcaaaatataatttacattaatcactatgttaatgagtatgtaaaacattcttttgcattgatgaattttgtatctgcttccattaaaagcataacagcca

SEQ ID NO: 20654 - DNA, 3293 bp, Homo sapiens
  source 1..3293: mol_type = unassigned DNA
cgggtcaggggtaaagcagcctgtcgcttgccgggcagctggtgagtcggtgacctggcctgtgaggagcagtgaggagaatgaataccttccaagaccagagtggcagctccagtaatagagaaccccttttgaggtgtagtgatgcacggagggacttggagcttgctattggtggagttctccgggctgaacagcaaattaaagataacttgcgagaggtcaaagctcagattcacagttgcataagccgtcacctggaatgtcttagaagccgtgaggtatggctgtatgaacaggtggaccttatttatcagcttaaagaggagacacttcaacagcaggctcagcagctctactcgttattgggccagttcaattgtcttactcatcaactggagtgtacccaaaacaaagatctagccaatcaagtctctgtgtgcctggagagactgggcagtttgacccttaagcctgaagattcaactgtcctgctctttgaagctgacacaattactctgcgccagaccatcaccacatttgggtctctcaaaaccattcaaattcctgagcacttgatggctcatgctagttcagcaaatattgggcccttcctggagaagagaggctgtatctccatgccagagcagaagtcagcatccggtattgtagctgtccctttcagcgaatggctccttggaagcaaacctgccagtggttatcaagctccttacatacccagcaccgacccccaggactggcttacccaaaagcagaccttggagaacagtcagacttcttccagagcctgcaatttcttcaataatgtcgggggaaacctaaagggcttagaaaactggctcctcaagagtgaaaaatcaagttatcaaaagtgtaacagccattccactactagttctttctccattgaaatggaaaaggttggagatcaagagcttcctgatcaagatgagatggacctatcagattggctagtgactccccaggaatcccataagctgcggaagcctgagaatggcagtcgtgaaaccagtgagaagtttaagctcttattccagtcctataatgtgaatgattggcttgtcaagactgactcctgtaccaactgtcagggaaaccagcccaaaggtgtggagattgaaaacctgggcaatctgaagtgcctgaatgaccacttggaggccaagaaaccattgtccacccccagcatggttacagaggattggcttgtccagaaccatcaggacccatgtaaggtagaggaggtgtgcagagccaatgagccctgcacaagctttgcagagtgtgtgtgtgatgagaattgtgagaaggaggctctgtataagtggcttctgaagaaagaaggaaaggataaaaatgggatgcctgtggaacccaaacctgagcctgagaagcataaagattccctgaatatgtggctctgtcctagaaaagaagtaatagaacaaactaaagcaccaaaggcaatgactccttctagaattgctgattccttccaagtcataaagaacagccccttgtcggagtggcttatcaggcccccatacaaagaaggaagtcccaaggaagtgcctggtactgaagacagagctggcaaacagaagtattacttaattcacctctacaggaggaacataacttccccccagaccattatggcctccctgcagtttgtgatctctttgcctgtatgcagcttaaagttgataaagagaagtggttatatcgaactcctctacagatgtgaaggaatggacaagagttgagcagcctttctgctgattatcacacatcatgagctgagtgactgcagcttgccaaatctttgtgtttctgggtctgaccaattagcttagttcttctcctgcctaattttgaactagtaaagcaaagtgagtcatcagattatgagttactgtttaaaagaaaaatgctgtttattcatgctgaggtgattcagttccctccttcttacagaagtattttaattcaccccacactagaaatgcagcatctttgtggacgtctttttcacaagcctccaaggctccttagattgggtcgttactaaaagtacattaaaacactcttgtttatcgaagtatattgatgtattctaaagctagtaaacttccctaacgtttaattgccctacagatgcttctcttgctgtgggttttcttttgttagtggtctgaaataattattttcctgttctattaatacatagtgtattttgcacaaaaaaattaacctggtcaatagtgattaccaaaatatatattaataatcttggcaatttttgacattaattatgaaacattttagcccacgttagttctacattattcttcacttaaactcagctactgcaaattttgtctttctgtaaatgttattaaaatatccagtgagctctttagaaggactcagtattatttcaagactatttttgaggtaattctagccttttaaaatattctacagacctacggggcttaaaagaaccccagtaccgactaagcaaataggcaaaagacatgttggaaatgtagtatagtacttgaaacagtcactatcatagggataattggtgcatcctgtgtaaatggaagctgagcttgacacctggtgcttttaagtagggataaagtcatcctctcactgcaagcacagcatacctgtacctccaaaagtgacgttttagtgaacaggccgttttcaacacttgtgccttggggtgttcattgaagctttgtgaaaactactgatgttttctcagtctccttaaagttacgtccatgctttaaaatgtctgtgtaggagagaagtggggtttataatgttttctctaagatatctttgctgctttccagactttgaaactattaagcttcttaactgcctcttaccggaaatacttctggggaaacttcatggtcccaaaatgtcattgccatacagcttcactagagttctttgaaccacagctgaaaagagctttgtattattttttaattccctccccagatatcatttaggagtattatataaaggtggtgggcaaaaacaatgtaaggagcctttccagttatcttgagttgcagctctgtagtttcttgaggccaaacacactgtattttacaagtcaaaatataatttacattaatcactatgttaatgagtatgtaaaacattcttttgcattgatgaattttgtatctgcttccattaaaagcataacagccata

SEQ ID NO: 20655 - DNA, 3431 bp, Homo sapiens
  source 1..3431: mol_type = unassigned DNA
ggttagtgtggggccgtgtctcagtccacccaaggtctcctcggatcgcctggagaggcactcggacctggagcagtgaggagaatgaataccttccaagaccagagtggcagctccagtaatagagaaccccttttgaggtgtagtgatgcacggagggacttggagcttgctattggtggagttctccgggctgaacagcaaattaaagataacttgcgagaggtcaaagctcagattcacagttgcataagccgtcacctggaatgtcttagaagccgtgaggtatggctgtatgaacaggtggaccttatttatcagcttaaagaggagacacttcaacagcaggctcagcagctctactcgttattgggccagttcaattgtcttactcatcaactggagtgtacccaaaacaaagatctagccaatcaagtctctgtgtgcctggagagactgggcagtttgacccttaagcctgaagattcaactgtcctgctctttgaagctgacacaattactctgcgccagaccatcaccacatttgggtctctcaaaaccattcaaattcctgagcacttgatggctcatgctagttcagcaaatattgggcccttcctggagaagagaggctgtatctccatgccagagcagaagtcagcatccggtattgtagctgtccctttcagcgaatggctccttggaagcaaacctgccagtggttatcaagctccttacatacccagcaccgacccccaggactggcttacccaaaagcagaccttggagaacagtcagacttcttccagagcctgcaatttcttcaataatgtcgggggaaacctaaagggcttagaaaactggctcctcaagagtgaaaaatcaagttatcaaaagtgtaacagccattccactactagttctttctccattgaaatggaaaaggttggagatcaagagcttcctgatcaagatgagatggacctatcagattggctagtgactccccaggaatcccataagctgcggaagcctgagaatggcagtcgtgaaaccagtgagaagtttaagctcttattccagtcctataatgtgaatgattggcttgtcaagactgactcctgtaccaactgtcagggaaaccagcccaaaggtgtggagattgaaaacctgggcaatctgaagtgcctgaatgaccacttggaggccaagaaaccattgtccacccccagcatggttacagaggattggcttgtccagaaccatcaggacccatgtaaggtagaggaggtgtgcagagccaatgagccctgcacaagctttgcagagtgtgtgtgtgatgagaattgtgagaaggaggctctgtataagtggcttctgaagaaagaaggaaaggataaaaatgggatgcctgtggaacccaaacctgagcctgagaagcataaagattccctgaatatgtggctctgtcctagaaaagaagtaatagaacaaactaaagcaccaaaggcaatgactccttctagaattgctgattccttccaagtcataaagaacagccccttgtcggagtggcttatcaggcccccatacaaagaaggaagtcccaaggaagtgcctggtactgaagacagagctggcaaacagaagtttaaaagccccatgaatacttcctggtgttcctttaacacagctgactgggtcctgccaggaaagaagatgggcaacctcagccagttatcttctggagaagacaagtggctgcttcgaaagaaggcccaggaagtattacttaattcacctctacaggaggaacataacttccccccagaccattatggcctccctgcagtttgtgatctctttgcctgtatgcagcttaaagttgataaagagaagtggttatatcgaactcctctacagatgtgaaggaatggacaagagttgagcagcctttctgctgattatcacacatcatgagctgagtgactgcagcttgccaaatctttgtgtttctgggtctgaccaattagcttagttcttctcctgcctaattttgaactagtaaagcaaagtgagtcatcagattatgagttactgtttaaaagaaaaatgctgtttattcatgctgaggtgattcagttccctccttcttacagaagtattttaattcaccccacactagaaatgcagcatctttgtggacgtctttttcacaagcctccaaggctccttagattgggtcgttactaaaagtacattaaaacactcttgtttatcgaagtatattgatgtattctaaagctagtaaacttccctaacgtttaattgccctacagatgcttctcttgctgtgggttttcttttgttagtggtctgaaataattattttcctgttctattaatacatagtgtattttgcacaaaaaaattaacctggtcaatagtgattaccaaaatatatattaataatcttggcaatttttgacattaattatgaaacattttagcccacgttagttctacattattcttcacttaaactcagctactgcaaattttgtctttctgtaaatgttattaaaatatccagtgagctctttagaaggactcagtattatttcaagactatttttgaggtaattctagccttttaaaatattctacagacctacggggcttaaaagaaccccagtaccgactaagcaaataggcaaaagacatgttggaaatgtagtatagtacttgaaacagtcactatcatagggataattggtgcatcctgtgtaaatggaagctgagcttgacacctggtgcttttaagtagggataaagtcatcctctcactgcaagcacagcatacctgtacctccaaaagtgacgttttagtgaacaggccgttttcaacacttgtgccttggggtgttcattgaagctttgtgaaaactactgatgttttctcagtctccttaaagttacgtccatgctttaaaatgtctgtgtaggagagaagtggggtttataatgttttctctaagatatctttgctgctttccagactttgaaactattaagcttcttaactgcctcttaccggaaatacttctggggaaacttcatggtcccaaaatgtcattgccatacagcttcactagagttctttgaaccacagctgaaaagagctttgtattattttttaattccctccccagatatcatttaggagtattatataaaggtggtgggcaaaaacaatgtaaggagcctttccagttatcttgagttgcagctctgtagtttcttgaggccaaacacactgtattttacaagtcaaaatataatttacattaatcactatgttaatgagtatgtaaaacattcttttgcattgatgaattttgtatctgcttccattaaaagcataacagcca

SEQ ID NO: 20656 - DNA, 1755 bp, Homo sapiens
  source 1..1755: mol_type = unassigned DNA
tagtgtggggccgtgtctcagtccacccaaggtctcctcggatcgcctggagaggcactcggacctgactgggcagtttgacccttaagcctgaagattcaactgtcctgctctttgaagctgacacaattactctgcgccagaccatcaccacatttgggtctctcaaaaccattcaaattcctgagcacttgatggctcatgctagttcagcaaatattgggcccttcctggagaagagaggctgtatctccatgccagagcagaagtcagcatccggtattgtagctgtccctttcagcgaatggctccttggaagcaaacctgccagtggttatcaagctccttacatacccagcaccgacccccaggactggcttacccaaaagcagaccttggagaacagtcagacttcttccagagcctgcaatttcttcaataatgtcgggggaaacctaaagggcttagaaaactggctcctcaagagtgaaaaatcaagttatcaaaagtgtaacagccattccactactagttctttctccattgaaatggaaaaggttggagatcaagagcttcctgatcaagatgagatggacctatcagattggctagtgactccccaggaatcccataagctgcggaagcctgagaatggcagtcgtgaaaccagtgagaagtttaagctcttattccagtcctataatgtgaatgattggcttgtcaagactgactcctgtaccaactgtcagggaaaccagcccaaaggtgtggagattgaaaacctgggcaatctgaagtgcctgaatgaccacttggaggccaagaaaccattgtccacccccagcatggttacagaggattggcttgtccagaaccatcaggacccatgtaaggtagaggaggtgtgcagagccaatgagccctgcacaagctttgcagagtgtgtgtgtgatgagaattgtgagaaggaggctctgtataagtggcttctgaagaaagaaggaaaggataaaaatgggatgcctgtggaacccaaacctgagcctgagaagcataaagattccctgaatatgtggctctgtcctagaaaagaagtaatagaacaaactaaagcaccaaaggcaatgactccttctagaattgctgattccttccaagtcataaagaacagccccttgtcggagtggcttatcaggcccccatacaaagaaggaagtcccaaggaagtgcctggtactgaagacagagctggcaaacagaagtttaaaagccccatgaatacttcctggtgttcctttaacacagctgactgggtcctgccaggaaagaagatgggcaacctcagccagttatcttctggagaagacaagtggctgcttcgaaagaaggcccaggaagtattacttaattcacctctacaggaggaacataacttccccccagaccattatggcctccctgcagtttgtgatctctttgcctgtatgcagcttaaagttgataaagagaagtggttatatcgaactcctctacagatgtgaaggaatggacaagagttgagcagcctttctgctgattatcacacatcatgagctgagtgactgcagcttgccaaatctttgtgtttctgggtctgaccaattagcttagttcttctcctgcctaattttgaactagtaaagcaaagtgagtcatcagattatgagttactgtttaaaagaaaaatgctgtttattcatgctgaggtgattcagt

SEQ ID NO: 20657 - DNA, 2124 bp, Homo sapiens
  source 1..2124: mol_type = unassigned DNA
aactctgcctttgggccgtaggttagtgtggggccgtgtctcagtccacccaaggtctcctcggatcgcctggagaggcactcggacctggtcaaagctcagattcacagttgcataagccgtcacctggaatgtcttagaagccgtgaggtatggctgtatgaacaggtggaccttatttatcagcttaaagaggagacacttcaacagcaggctcagcagctctactcgactgggcagtttgacccttaagcctgaagattcaactgtcctgctctttgaagctgacacaattactctgcgccagaccatcaccacatttgggtctctcaaaaccattcaaattcctgagcacttgatggctcatgctagttcagcaaatattgggcccttcctggagaagagaggctgtatctccatgccagagcagaagtcagcatccggtattgtagctgtccctttcagcgaatggctccttggaagcaaacctgccagtggttatcaagctccttacatacccagcaccgacccccaggactggcttacccaaaagcagaccttggagaacagtcagacttcttccagagcctgcaatttcttcaataatgtcgggggaaacctaaagggcttagaaaactggctcctcaagagtgaaaaatcaagttatcaaaagtgtaacagccattccactactagttctttctccattgaaatggaaaaggttggagatcaagagcttcctgatcaagatgagatggacctatcagattggctagtgactccccaggaatcccataagctgcggaagcctgagaatggcagtcgtgaaaccagtgagaagtttaagctcttattccagtcctataatgtgaatgattggcttgtcaagactgactcctgtaccaactgtcagggaaaccagcccaaaggtgtggagattgaaaacctgggcaatctgaagtgcctgaatgaccacttggaggccaagaaaccattgtccacccccagcatggttacagaggattggcttgtccagaaccatcaggacccatgtaaggtagaggaggtgtgcagagccaatgagccctgcacaagctttgcagagtgtgtgtgtgatgagaattgtgagaaggaggctctgtataagtggcttctgaagaaagaaggaaaggataaaaatgggatgcctgtggaacccaaacctgagcctgagaagcataaagattccctgaatatgtggctctgtcctagaaaagaagtaatagaacaaactaaagcaccaaaggcaatgactccttctagaattgctgattccttccaagtcataaagaacagccccttgtcggagtggcttatcaggcccccatacaaagaaggaagtcccaaggaagtgcctggtactgaagacagagctggcaaacagaagtttaaaagccccatgaatacttcctggtgttcctttaacacagctgactgggtcctgccaggaaagaagatgggcaacctcagccagttatcttctggagaagacaagtggctgcttcgaaagaaggcccaggaagtattacttaattcacctctacaggaggaacataacttccccccagaccattatggcctccctgcagtttgtgatctctttgcctgtatgcagcttaaagttgataaagagaagtggttatatcgaactcctctacagatgtgaaggaatggacaagagttgagcagcctttctgctgattatcacacatcatgagctgagtgactgcagcttgccaaatctttgtgtttctgggtctgaccaattagcttagttcttctcctgcctaattttgaactagtaaagcaaagtgagtcatcagattatgagttactgtttaaaagaaaaatgctgtttattcatgctgaggtgattcagttccctccttcttacagaagtattttaattcaccccacactagaaatgcagcatctttgtggacgtctttttcacaagcctccaaggctccttagattgggtcgttactaaaagtacattaaaacactcttgtttatcgaagtatattgatgtattctaaagctagtaaacttccctaacgtttaattgccctacagatgcttctc

SEQ ID NO: 20658 - DNA, 792 bp, Homo sapiens
  source 1..792: mol_type = unassigned DNA
ctgcactccagcctgggcggcagagctagactccgtctcaaaacaaaaaaaaaacccaaaaccaacctttaaaaaaaagacggaagaaagaacgtgtgaagtgaaaaaagtctcaagactgggcagtttgacccttaagcctgaagattcaactgtcctgctctttgaagctgacacaattactctgcgccagaccatcaccacatttgggtctctcaaaaccattcaaattcctgagcacttgatggctcatgctagttcagcaaatattgggcccttcctggagaagagaggctgtatctccatgccagagcagaagtcagcatccggtattgtagctgtccctttcagcgaatggctccttggaagcaaacctgccagtggttatcaagctccttacatacccagcaccgacccccaggactggcttacccaaaagcagaccttggagaacagtcagacttcttccagagcctgcaatttcttcaataatgtcgggggaaacctaaagggcttagaaaactggctcctcaagagtgaaaaatcaagttatcaaaagtgtaacagccattccactactagttctttctccattgaaatggaaaaggttggagatcaagagcttcctgatcaagatgagatggacctatcagattggctagtgactccccaggaatcccataagctgcggaagcctgagaatggcagtcgtgaaaccagtgagaagtttaagctcttattccagtcctataatgtgaatgattggcttgtcaagactgactcctgtaccaa

SEQ ID NO: 20659 - DNA, 3646 bp, Homo sapiens
  source 1..3646: mol_type = unassigned DNA
agagggcagtcaagggcttctggctgacccgagcggagatctcgcgagactgtcagacgtatggcgagaggtgtgggaggaagattgtgttgtcgcgagaactctgcctttgggccgtaggttagtgtggggccgtgtctcagtccacccaaggtctcctcggatcgcctggagaggcactcggacctgttatgtctggacacattgcttcaacatagaacgcacatgaacaatgtggaggtctaggctggaatgggggcccagttgaccacttttgctctagctggagcagtgaggagaatgaataccttccaagaccagagtggcagctccagtaatagagaaccccttttgaggtgtagtgatgcacggagggacttggagcttgctattggtggagttctccgggctgaacagcaaattaaagataacttgcgagaggtcaaagctcagattcacagttgcataagccgtcacctggaatgtcttagaagccgtgaggtatggctgtatgaacaggtggaccttatttatcagcttaaagaggagacacttcaacagcaggctcagcagctctactcgttattgggccagttcaattgtcttactcatcaactggagtgtacccaaaacaaagatctagccaatcaagtctctgtgtgcctggagagactgggcagtttgacccttaagcctgaagattcaactgtcctgctctttgaagctgacacaattactctgcgccagaccatcaccacatttgggtctctcaaaaccattcaaattcctgagcacttgatggctcatgctagttcagcaaatattgggcccttcctggagaagagaggctgtatctccatgccagagcagaagtcagcatccggtattgtagctgtccctttcagcgaatggctccttggaagcaaacctgccagtggttatcaagctccttacatacccagcaccgacccccaggactggcttacccaaaagcagaccttggagaacagtcagacttcttccagagcctgcaatttcttcaataatgtcgggggaaacctaaagggcttagaaaactggctcctcaagagtgaaaaatcaagttatcaaaagtgtaacagccattccactactagttctttctccattgaaatggaaaaggttggagatcaagagcttcctgatcaagatgagatggacctatcagattggctagtgactccccaggaatcccataagctgcggaagcctgagaatggcagtcgtgaaaccagtgagaagtttaagctcttattccagtcctataatgtgaatgattggcttgtcaagactgactcctgtaccaactgtcagggaaaccagcccaaaggtgtggagattgaaaacctgggcaatctgaagtgcctgaatgaccacttggaggccaagaaaccattgtccacccccagcatggttacagaggattggcttgtccagaaccatcaggacccatgtaaggtagaggaggtgtgcagagccaatgagccctgcacaagctttgcagagtgtgtgtgtgatgagaattgtgagaaggaggctctgtataagtggcttctgaagaaagaaggaaaggataaaaatgggatgcctgtggaacccaaacctgagcctgagaagcataaagattccctgaatatgtggctctgtcctagaaaagaagtaatagaacaaactaaagcaccaaaggcaatgactccttctagaattgctgattccttccaagtcataaagaacagccccttgtcggagtggcttatcaggcccccatacaaagaaggaagtcccaaggaagtgcctggtactgaagacagagctggcaaacagaagtttaaaagccccatgaatacttcctggtgttcctttaacacagctgactgggtcctgccaggaaagaagatgggcaacctcagccagttatcttctggagaagacaagtggctgcttcgaaagaaggcccaggaagtattacttaattcacctctacaggaggaacataacttccccccagaccattatggcctccctgcagtttgtgatctctttgcctgtatgcagcttaaagttgataaagagaagtggttatatcgaactcctctacagatgtgaaggaatggacaagagttgagcagcctttctgctgattatcacacatcatgagctgagtgactgcagcttgccaaatctttgtgtttctgggtctgaccaattagcttagttcttctcctgcctaattttgaactagtaaagcaaagtgagtcatcagattatgagttactgtttaaaagaaaaatgctgtttattcatgctgaggtgattcagttccctccttcttacagaagtattttaattcaccccacactagaaatgcagcatctttgtggacgtctttttcacaagcctccaaggctccttagattgggtcgttactaaaagtacattaaaacactcttgtttatcgaagtatattgatgtattctaaagctagtaaacttccctaacgtttaattgccctacagatgcttctcttgctgtgggttttcttttgttagtggtctgaaataattattttcctgttctattaatacatagtgtattttgcacaaaaaaattaacctggtcaatagtgattaccaaaatatatattaataatcttggcaatttttgacattaattatgaaacattttagcccacgttagttctacattattcttcacttaaactcagctactgcaaattttgtctttctgtaaatgttattaaaatatccagtgagctctttagaaggactcagtattatttcaagactatttttgaggtaattctagccttttaaaatattctacagacctacggggcttaaaagaaccccagtaccgactaagcaaataggcaaaagacatgttggaaatgtagtatagtacttgaaacagtcactatcatagggataattggtgcatcctgtgtaaatggaagctgagcttgacacctggtgcttttaagtagggataaagtcatcctctcactgcaagcacagcatacctgtacctccaaaagtgacgttttagtgaacaggccgttttcaacacttgtgccttggggtgttcattgaagctttgtgaaaactactgatgttttctcagtctccttaaagttacgtccatgctttaaaatgtctgtgtaggagagaagtggggtttataatgttttctctaagatatctttgctgctttccagactttgaaactattaagcttcttaactgcctcttaccggaaatacttctggggaaacttcatggtcccaaaatgtcattgccatacagcttcactagagttctttgaaccacagctgaaaagagctttgtattattttttaattccctccccagatatcatttaggagtattatataaaggtggtgggcaaaaacaatgtaaggagcctttccagttatcttgagttgcagctctgtagtttcttgaggccaaacacactgtattttacaagtcaaaatataatttacattaatcactatgttaatgagtatgtaaaacattcttttgcattgatgaattttgtatctgcttccattaaaagcataacagcc

SEQ ID NO: 20660 - DNA, 3575 bp, Homo sapiens
  source 1..3575: mol_type = unassigned DNA
attgattcaattttacactgtgccaggcattgtggcattccacacaaatggtgagaagctaaaagtgagaaatttggcacaggtgaagaaggctgggtaacacatttgaaagactgctaaacaggtcttgcatgactggcctaagtgcaaagtgaagcagcccatcacgctccagctctccaaatcggagccggcatttcacccatgtgatacaggagcagtgaggagaatgaataccttccaagaccagagtggcagctccagtaatagagaaccccttttgaggtgtagtgatgcacggagggacttggagcttgctattggtggagttctccgggctgaacagcaaattaaagataacttgcgagaggtcaaagctcagattcacagttgcataagccgtcacctggaatgtcttagaagccgtgaggtatggctgtatgaacaggtggaccttatttatcagcttaaagaggagacacttcaacagcaggctcagcagctctactcgttattgggccagttcaattgtcttactcatcaactggagtgtacccaaaacaaagatctagccaatcaagtctctgtgtgcctggagagactgggcagtttgacccttaagcctgaagattcaactgtcctgctctttgaagctgacacaattactctgcgccagaccatcaccacatttgggtctctcaaaaccattcaaattcctgagcacttgatggctcatgctagttcagcaaatattgggcccttcctggagaagagaggctgtatctccatgccagagcagaagtcagcatccggtattgtagctgtccctttcagcgaatggctccttggaagcaaacctgccagtggttatcaagctccttacatacccagcaccgacccccaggactggcttacccaaaagcagaccttggagaacagtcagacttcttccagagcctgcaatttcttcaataatgtcgggggaaacctaaagggcttagaaaactggctcctcaagagtgaaaaatcaagttatcaaaagtgtaacagccattccactactagttctttctccattgaaatggaaaaggttggagatcaagagcttcctgatcaagatgagatggacctatcagattggctagtgactccccaggaatcccataagctgcggaagcctgagaatggcagtcgtgaaaccagtgagaagtttaagctcttattccagtcctataatgtgaatgattggcttgtcaagactgactcctgtaccaactgtcagggaaaccagcccaaaggtgtggagattgaaaacctgggcaatctgaagtgcctgaatgaccacttggaggccaagaaaccattgtccacccccagcatggttacagaggattggcttgtccagaaccatcaggacccatgtaaggtagaggaggtgtgcagagccaatgagccctgcacaagctttgcagagtgtgtgtgtgatgagaattgtgagaaggaggctctgtataagtggcttctgaagaaagaaggaaaggataaaaatgggatgcctgtggaacccaaacctgagcctgagaagcataaagattccctgaatatgtggctctgtcctagaaaagaagtaatagaacaaactaaagcaccaaaggcaatgactccttctagaattgctgattccttccaagtcataaagaacagccccttgtcggagtggcttatcaggcccccatacaaagaaggaagtcccaaggaagtgcctggtactgaagacagagctggcaaacagaagtttaaaagccccatgaatacttcctggtgttcctttaacacagctgactgggtcctgccaggaaagaagatgggcaacctcagccagttatcttctggagaagacaagtggctgcttcgaaagaaggcccaggaagtattacttaattcacctctacaggaggaacataacttccccccagaccattatggcctccctgcagtttgtgatctctttgcctgtatgcagcttaaagttgataaagagaagtggttatatcgaactcctctacagatgtgaaggaatggacaagagttgagcagcctttctgctgattatcacacatcatgagctgagtgactgcagcttgccaaatctttgtgtttctgggtctgaccaattagcttagttcttctcctgcctaattttgaactagtaaagcaaagtgagtcatcagattatgagttactgtttaaaagaaaaatgctgtttattcatgctgaggtgattcagttccctccttcttacagaagtattttaattcaccccacactagaaatgcagcatctttgtggacgtctttttcacaagcctccaaggctccttagattgggtcgttactaaaagtacattaaaacactcttgtttatcgaagtatattgatgtattctaaagctagtaaacttccctaacgtttaattgccctacagatgcttctcttgctgtgggttttcttttgttagtggtctgaaataattattttcctgttctattaatacatagtgtattttgcacaaaaaaattaacctggtcaatagtgattaccaaaatatatattaataatcttggcaatttttgacattaattatgaaacattttagcccacgttagttctacattattcttcacttaaactcagctactgcaaattttgtctttctgtaaatgttattaaaatatccagtgagctctttagaaggactcagtattatttcaagactatttttgaggtaattctagccttttaaaatattctacagacctacggggcttaaaagaaccccagtaccgactaagcaaataggcaaaagacatgttggaaatgtagtatagtacttgaaacagtcactatcatagggataattggtgcatcctgtgtaaatggaagctgagcttgacacctggtgcttttaagtagggataaagtcatcctctcactgcaagcacagcatacctgtacctccaaaagtgacgttttagtgaacaggccgttttcaacacttgtgccttggggtgttcattgaagctttgtgaaaactactgatgttttctcagtctccttaaagttacgtccatgctttaaaatgtctgtgtaggagagaagtggggtttataatgttttctctaagatatctttgctgctttccagactttgaaactattaagcttcttaactgcctcttaccggaaatacttctggggaaacttcatggtcccaaaatgtcattgccatacagcttcactagagttctttgaaccacagctgaaaagagctttgtattattttttaattccctccccagatatcatttaggagtattatataaaggtggtgggcaaaaacaatgtaaggagcctttccagttatcttgagttgcagctctgtagtttcttgaggccaaacacactgtattttacaagtcaaaatataatttacattaatcactatgttaatgagtatgtaaaacattcttttgcattgatgaattttgtatctgcttccattaaaagcataacagcc

SEQ ID NO: 20661 - DNA, 3735 bp, Homo sapiens
  source 1..3735: mol_type = unassigned DNA
agagggcagtcaagggcttctggctgacccgagcggagatctcgcgagactgtcagacgtatggcgagaggtgtgggaggaagattgtgttgtcgcgagaactctgcctttgggccgtaggttagtgtggggccgtgtctcagtccacccaaggtctcctcggatcgcctggagaggcactcggacctgttatgtctggacacattgcttcaacatagaacgcacatgaacaatgtggaggtctaggctggaatgggggcccagttgaccacttttgctctagctggagcagtgaggagaatgaataccttccaagaccagagtggcagctccagtaatagagaaccccttttgaggtgtagtgatgcacggagggacttggagcttgctattggtggagttctccgggctgaacagcaaattaaagataacttgcgagaggtcaaagctcagattcacagttgcataagccgtcacctggaatgtcttagaagccgtgaggtatggctgtatgaacaggtggaccttatttatcagcttaaagaggagacacttcaacagcaggctcagcagctctactcgttattgggccagttcaattgtcttactcatcaactggagtgtacccaaaacaaagatctagccaatcaagtctctgtgtgcctggagagactgggcagtttgacccttaagcctgaagattcaactgtcctgctctttgaagctgacacaattactctgcgccagaccatcaccacatttgggtctctcaaaaccattcaaattcctgagcacttgatggctcatgctagttcagcaaatattgggcccttcctggagaagagaggctgtatctccatgccagagcagaagtcagcatccggtattgtagctgtccctttcagcgaatggctccttggaagcaaacctgccagtggttatcaagctccttacatacccagcaccgacccccaggactggcttacccaaaagcagaccttggagaacagtcagacttcttccagagcctgcaatttcttcaataatgtcgggggaaacctaaagggcttagaaaactggctcctcaagagtgaaaaatcaagttatcaaaagtgtaacagccattccactactagttctttctccattgaaatggaaaaggttggagatcaagagcttcctgatcaagatgagatggacctatcagattggctagtgactccccaggaatcccataagctgcggaagcctgagaatggcagtcgtgaaaccagtgagaagtttaagctcttattccagtcctataatgtgaatgattggcttgtcaagactgactcctgtaccaactgtcagggaaaccagcccaaaggtgtggagattgaaaacctgggcaatctgaagtgcctgaatgaccacttggaggccaagaaaccattgtccacccccagcatggttacagaggattggcttgtccagaaccatcaggacccatgtaaggtagaggaggtgtgcagagccaatgagccctgcacaagctttgcagagtgtgtgtgtgatgagaattgtgagaaggaggctctgtataagtggcttctgaagaaagaaggaaaggataaaaatgggatgcctgtggaacccaaacctgagcctgagaagcataaagattccctgaatatgtggctctgtcctagaaaagaagtaatagaacaaactaaagcaccaaaggcaatgactccttctagaattgctgattccttccaagtcataaagaacagccccttgtcggagtggcttatcaggcccccatacaaagaaggaagtcccaaggaagtgcctggtactgaagacagagctggcaaacagaagtttaaaagccccatgaatacttcctggtgttcctttaacacagctgactgggtcctgccaggaaagaagatgggcaacctcagccagttatcttctggagaagacaagtggctgcttcgaaagaaggcccaggaagtattacttaattcacctctacaggaggaacataacttccccccagaccattatggcctccctgcagtttgtgatctctttgcctgtatgcagcttaaagttgataaagagaagtggttatatcgaactcctctacaggcatacttcaaaatgaactttcaagatgtaaccgttgggaattttcagatcccatgtggattctagtagtttatatacctacctcgaagatgtgaaggaatggacaagagttgagcagcctttctgctgattatcacacatcatgagctgagtgactgcagcttgccaaatctttgtgtttctgggtctgaccaattagcttagttcttctcctgcctaattttgaactagtaaagcaaagtgagtcatcagattatgagttactgtttaaaagaaaaatgctgtttattcatgctgaggtgattcagttccctccttcttacagaagtattttaattcaccccacactagaaatgcagcatctttgtggacgtctttttcacaagcctccaaggctccttagattgggtcgttactaaaagtacattaaaacactcttgtttatcgaagtatattgatgtattctaaagctagtaaacttccctaacgtttaattgccctacagatgcttctcttgctgtgggttttcttttgttagtggtctgaaataattattttcctgttctattaatacatagtgtattttgcacaaaaaaattaacctggtcaatagtgattaccaaaatatatattaataatcttggcaatttttgacattaattatgaaacattttagcccacgttagttctacattattcttcacttaaactcagctactgcaaattttgtctttctgtaaatgttattaaaatatccagtgagctctttagaaggactcagtattatttcaagactatttttgaggtaattctagccttttaaaatattctacagacctacggggcttaaaagaaccccagtaccgactaagcaaataggcaaaagacatgttggaaatgtagtatagtacttgaaacagtcactatcatagggataattggtgcatcctgtgtaaatggaagctgagcttgacacctggtgcttttaagtagggataaagtcatcctctcactgcaagcacagcatacctgtacctccaaaagtgacgttttagtgaacaggccgttttcaacacttgtgccttggggtgttcattgaagctttgtgaaaactactgatgttttctcagtctccttaaagttacgtccatgctttaaaatgtctgtgtaggagagaagtggggtttataatgttttctctaagatatctttgctgctttccagactttgaaactattaagcttcttaactgcctcttaccggaaatacttctggggaaacttcatggtcccaaaatgtcattgccatacagcttcactagagttctttgaaccacagctgaaaagagctttgtattattttttaattccctccccagatatcatttaggagtattatataaaggtggtgggcaaaaacaatgtaaggagcctttccagttatcttgagttgcagctctgtagtttcttgaggccaaacacactgtattttacaagtcaaaatataatttacattaatcactatgttaatgagtatgtaaaacattcttttgcattgatgaattttgtatctgcttccattaaaagcataacagcc

SEQ ID NO: 20662 - DNA, 7081 bp, Homo sapiens
  source 1..7081: mol_type = unassigned DNA
ccccctccccgccggctccgtgaggccctgccgggtcgggctgcgggcggccgggcgcgggcggcgggacagacgggcgcacgcgaggactgacggacggacgcaccgagggcggcgggcacgcacggcccgggccggcgctccaaggcccgcccgggagggccggggccgcgctcagaattttgatttggctgctgggctgctaccttgaaatccaagccctaaaaatgccagcttctttggacttagaagatgacctggataaatgataaaaattaagaaagagattttgaagttttcttattgtcctcttggcatatgcttctggaataatattcaccatggttttggatgaccttccaaacttagaagacatctatacttccttgtgttcatcaacaatggaagactcagagatggattttgactctggactagaagatgatgacacaaaaagtgatagtattttggaggattccacaatttttgtggccttcaaaggaaatatagatgataaagacttcaaatggaaattagatgcaatattgaaaaacgtgcccaatttgttacacatggagtccagcaagctaaaagtacagaaggtggagccctggaacagcgtgcgtgtgacattcaacatcccccgggaagcagcggagcggctacggatccttgctcagagcaacaaccagcagcttcgggatttagggattctctccgttcagattgaaggggaaggtgctattaacctggctttggctcagaaccgaagccaagatgtgagaatgaatggacccatgggagctggaaattcagttaggatggaggcgggatttcctatggcaagtggtccaggaataataaggatgaacaaccctgccactgttatgatacccccgggtggaaatgtgtcatcttccatgatggcaccaggccccaatccagagctgcagcccaggactcctcgccctgcttctcagtcagatgcaatggatccactcctctctgggctccatatacagcagcaaagtcatccctcaggatctttagctcccccacatcacccaatgcagcctgtctctgtgaacagacaaatgaacccagctaattttccccagctgcagcagcagcagcaacaacaacaacagcagcagcagcagcagcagcagcaacaacagcaacagcagcaacaacagttgcaggcaagacccccacagcaacatcagcagcaacagccacagggaattcgaccccagtttactgccccaactcaggtgcctgttcctccaggctggaaccagctgccttctggagcccttcaacctcctccagcccagggttctctgggcacaatgactgcaaaccaagggtggaagaaggctcccttgcccggcccaatgcaacagcaactccaggcaagaccatccttagccacggtacagacgccttcccaccctccccctccatatccctttggcagccagcaagcctcacaagcccacacaaactttcctcagatgagcaacccaggccagttcacagctcctcagatgaagagtttgcagggagggccctctagggtcccaactcccttgcagcagccccacctcaccaacaagtctcctgcctcctcaccctcctccttccagcagggatcccctgcatcctccccaacggttaaccaaactcagcagcagatgggaccaaggccacctcaaaataacccacttccccagggatttcagcagcctgtcagctctccgggtcggaatcctatggttcaacagggaaatgtgccacctaacttcatggtgatgcagcagcaaccaccaaaccaggggccacagagtttacatccaggcctaggaggaatgcctaaacgcctcccacctggcttctcagcaggacaggccaatccgaactttatgcaaggtcaggtgccttcgaccacagcaaccacccctgggaattcaggagcccctcagctgcaagcaaatcaaaatgtccagcatgcaggtggtcaaggagctggtcctcctcaaaaccagatgcaggtgtcccacgggccgccaaatatgatgcagcccagcctcatgggaattcatggcaacatgaacaatcagcaggctggtacttctggggttcctcaagtgaacctcagcaacatgcaaggccagccccagcagggcccaccatctcagctgatgggcatgcaccagcaaatcgtgccctcccagggccagatggtccagcaacaaggaaccttgaaccctcagaaccctatgatcctttcaagggcccagcttatgccacagggccagatgatggtgaaccccccgagccaaaatcttgggccctcgccccaaaggatgaccccacccaagcagatgctttcccagcagggcccacaaatgatggcgccacataaccagatgatggggcctcaggggcaggttttgctccaacagaacccaatgatagagcagattatgaccaatcaaatgcaggggaataagcagcagtttaacactcagaaccagtccaatgtcatgccgggaccagcccagataatgaggggaccaactccaaacatgcaaggaaatatggtgcagtttacgggacagatgtcaggacagatgctgccccagcaagggcctgtgaacaacagtccatctcaggttatgggcattcagggacaggtcctgcggccaccagggcccagcccacacatggcccagcagcatggtgatcctgctactacagcaaataacgatgtcagtttatctcagatgatgcctgatgttagcattcaacaaaccaacatggtcccccctcatgtgcaggccatgcagggaaacagtgcctcgggaaaccacttctcaggccatgggatgtctttcaatgcacctttcagtggagctcccaatggaaatcagatgtcctgtggtcaaaatccaggcttcccagtcaataaggatgtcacgctaacgagcccattgttggtcaacttattgcagagtgacatatctgcaggccattttggggtaaacaataagcaaaataataccaacgcaaataaaccgaagaagaagaaaccccctcggaagaagaaaaatagtcagcaagatctaaacaccccagatactcgcccagctggtctggaagaggctgatcagccaccgttgcctggagaacaaggaattaacttggataactcaggccctaaactgccagaattttcaaaccggccaccaggttatccttctcaaccagttgaacagaggccacttcagcagatgcctcctcaactcatgcagcatgtggcacccccaccacagccaccacagcagcagccacagccacaactgcctcagcagcagcagccaccacctcccagtcagccacagtctcagcagcagcagcagcagcagcaacaaatgatgatgatgctcatgatgcagcaggatcccaaatcagttaggcttccagtctctcaaaatgtccatcctccaaggggccccctgaaccccgactcccagagaatgcccatgcaacagagtggcagtgtgcctgtcatggtcagtctgcaaggacctgcctccgtgccaccatcacctgataaacaaagaatgccaatgcctgtgaatactcccttgggaagcaattcaaggaaaatggtctatcaggagagcccgcagaatccttccagctcgccactggcggagatggcctcactccctgaagcaagtggcagtgaagcaccatctgtcccaggaggcccaaacaacatgccttcacatgtagtacttccccagaatcagttaatgatgacagggccaaaacctggaccatcgcccctttcagcaactcaaggtgcaactccccagcaaccccctgtaaattccctgcccagctctcacggccaccacttcccaaatgtggctgcgccaacccagacatctaggcccaaaacaccaaacagagccagccccagaccctattatcctcagacacccaacaaccgccctcccagcacagaaccttcagaaatcagtctgtcaccagaaagactcaatgcctccatagcaggactcttccctccacagattaatattcctttacctcctaggccaaatttaaacaggggctttgatcaacaaggcctaaatccaacaactttgaaggccatcgggcaagcaccttcaaatcttaccatgaatccttccaattttgctaccccacaaactcacaaattagattctgtggtagtgaattctggaaagcagtctaattctggagcaacaaaacgggcaagtccaagcaacagtcgcaggtctagtcctgggtccagtaggaaaaccactccaagccctgggaggcaaaattcaaaagcccctaaacttactctggcctctcagacaaatgcagccctattgcagaatgtggagttgccgagaaatgtattggtcagtcccactcctctggccaatccccctgtacctgggagctttcctaacaacagtgggctgaatcctcagaattctactgtgtctgtggctgcagttgggggtgttgttgaggataacaaggagagcttgaatgtgcctcaggacagtgattgccagaattcccagagtaggaaggaacaggtaaacattgaactaaaagcagtccctgcccaagaagttaaaatggttgtccctgaagatcagtccaaaaaggatgggcagccttcggatcctaacaaacttcccagtgtcgaagagaacaaaaatttggtgtctcctgctatgagggaagcaccaacatcgttaagtcaacttcttgacaactctggagctcccaatgtgacaattaaaccccctgggcttacagatctggaagtaacacctccagtagtttctggggaggacctcaaaaaagcatctgtcattcccacactgcaggatctgtcttcttctaaagaaccttctaattccctaaacttacctcacagtaatgagctgtgttcatcccttgtgcatcccgaattgagtgaggtcagttctaacgttgcaccaagcatccctccagtaatgtcaagacctgttagctcttcctccatttccactcccttgcccccaaatcaaataactgtatttgtcacttccaatcccatcacaacttcagctaacacatcagcagctttgccaactcacttgcagtctgcattgatgtcaacagttgtcacaatgcccaatgcgggtagcaaggttatggtttctgagggacagtcagctgctcagtctaatgcccggcctcagttcattacacctgtctttatcaattcatcctcaataattcaggttatgaaaggatcacagccaagcacaattcctgcagccccactgacaaccaactctggcctgatgcctccctctgttgcagttgttggccctttacacatacctcagaacataaaattttcttctgctcctgtaccgcctaatgccctctccagtagtcctgctccaaacatccagacaggtcgacctttggtccttagctcacgagccacccctgttcagcttccttcccctccttgtacgtcttctccagttgtcccttctcatccccctgtgcagcaagtgaaagaattgaatccagatgaggctagccctcaggtgaacacctcagcagatcagaacactcttccctcttcacagtcaaccacaatggtttctccccttttgaccaatagtccagggtcctctggcaaccggcgaagcccagtctcgtctagtaagggcaaaggaaaagtggacaaaattggccaaattttgttgaccaaggcatgtaagaaagttacaggctctcttgagaaaggggaagaacaatatggtgcagatggagagactgaaggccaagggctagacaccacagctccggggctcatgggaacagagcagttatccacagagctggacagtaaaaccccaacgcccccagcacccactctgctaaaaatgacctctagccctgtgggcccgggcactgcctcagcaggacccagcttacctggcggtgctctccccaccagtgtacgctcgatagtaaccactctggtaccctccgagctcatctccgccgtaccgaccacaaaaagcaatcatggtggcatagcatctgagtcacttgcgggtggcctagtggaggagaaggtgggatcccatccagaacttctacccagcatagccccgtcgcagaatttagtctcaaaggaaacttcaaccacagcactgcaggcctctgttgccagaccagagctggaggtaaatgctgccatagtctctggacaaagcagtgagcccaaagagatagttgaaaagtccaaaatcccaggccgaagaaactcccgaactgaagagccaactgtggcctctgaaagtgtggaaaatggacatcgtaaacgatcttctcgacctgcttcagcctccagctctactaaagacataaccagtgcggtgcaatccaagcgaagaaaatccaagtaaacaagcaggactgcgacttgatacttggaaatgtgtgtgacttttacaaagagcaattttgagctgtgacttttttaaatcaatttctgtacagttagtaattttaataatgtggcccttttcctagtccctgcaacctgtttcataaagtgcaatggggaaagcaggactgttgagcccttttggtgttgcgagttgaagttcaaggtttctaaaatgttgtcttgtattgaaaggagctaatgccattataaatgttactagttttcacatttcctaagcagcctagagtacagggtgagcatttttagatctcctaatgatgtattgtgccgtggaagtactgtgtgtgaatagcagtagtgggggcaaaagcaatcttctcatttggaaatgttgtaaataattttattatatagtgttttggatgtatttgttgtagaaatggaccagtgaataaagagaatctaaggatttgtacaatgtgaaataacgtgttaaataaatgtcattgtcatagaacataaagttatgttattggtaaggga

SEQ ID NO: 20663 - DNA, 9311 bp, Homo sapiens
  source 1..9311: mol_type = unassigned DNA
ctccagcccaggcaacagagcgtgactccgtctcaaaaaaaaaaaaaaaagtgaaaggaaaatgaggggagaattctcattgataataagggcgaaaaggtttttttggcagagtaatagagttttggaaaccattgcaaagctgtcaagtgtggtgtagtttttggttaaggaaatcagaggtgtcagcagacataaaagacaggggaaaacatgggaagtgtcctacctatagtgtagaaaaagcacaactatctatgtcagaggtcgacagactgtggtccataggtcaaatctggcccacgatctgtttttgtaaataacgttttattggaacatagccacactcatttatttatatattgtccatatcttcttttgtggtaccaatagcagagttgagtagtcgtgacagagatgtgttgtgtcagctcacaaagctggaaatactctttacaaaaacatttgccaacccctgatctatgtgtttgagtgttggatgttcaacctctaatttgccatccaatgtctatatgatgatagagaatgaataaacgtcttggctctgccctttgggctggattacccatgctctgtgtacctgcagcataacacagacccctgaatatttatatcagtcagtgatggcaaggtctattgttctggagtgtactgtgtggtaactgtggtagtgccagctttacacggattagataatgctcgggcttgttttgccattttttttattgggttgtcttttacaaaagatttatttatatattctgattattaatcctttgttgttggtagatattacagatgtcatttcccagtttcttgcttattttaatttttttttttttttttttgagatgaagtcttgctctgtcgcccaggctggagtgcagtcgtgccatctcagctcattgtaacctccgtctcccaggttcaagtgattctcttgcctcagcctcccaagtagctgggactacaggcatgtgccaccacacctggctgatttttgtgtttttagtagggatggggtttcatcatgttggccaggctggtctcaaactcctgacctcaagtgatccacccgtcttggcctcctaaagtgctgggattacaggtgtgagccactgcgcctggcctgttgcttattttaaaacatctgttttaaggtgtcatttgttaaaaagttctgaattttagtatcaactttatcaatcttttcctttaagatttgcagttattctttgttttgaggcagggtctcgctctgtcaccgaggctggagtgcagtggtgcgatctcggctcactgcagcctcaacctcctgggctcaagcaaccctcccacctcccatgccagttgagaccacaggcatgcgccaccatgccctgctactttttgcattttttgtagaggcggggtttcgccatgttgcccaggctagtctggaactcctgagctcaagcagtccacaaagtgctgggattacaggtgtgagctactgtgcccagcctgcaattattctttatattctggaatacctactgttgttttcaatggttagatctttaatgtatctggaatggattcttatgtgtagtgtaaggtcgggtccagtttcattttttttccctatgtataaccagtgatcccagcatcatttattgaatggggcttgctttcaaattgtgagctctttttggtggagtctgtctcaggtccttattaagcactgctgcttgctgattgtgtgaccttggacaaataaaacctcattgcgcctcagtctttaaggataatagtaatctcatagggttttgtgaggattaaatgagtcaatatacataacgtgtaaaacagtgcttggcacctagaacatgctcaataaatattagctgtactttagcactactgttcatttctgattcctcagcacctggtacagagcaggggctcattttgctcaattaaattgccaaattaatttggttttcaggtcaatcagaatggtgagagttgggctgagtgttgcaggagatgcttccaaggagctacttagttttaggggctgccttagattatctgctaggatagaactcttctcacgccatcacttttgcagagaacttctgtagcagaggttgcaaactggcaacctgtggttggatttgacctgtataagtattttgtttggtttacacaatatttttaatgtcttaaaaatgtacacagacctctgagtttctgacttaaccttgaaaaattggaagatctgtcaacagcaagcccatattcatttatagcggtaaccagctgaaacttttaggtcctgggaggaatggagaggggtcccactgactaacttttctgagagtggtcagagagttcttaagcagaattttgatttggctgctgggctgctaccttgaaatccaagccctaaaaatgccagcttctttggacttagaagatgacctggataaatgataaaaattaagaaagagattttgaagttttcttattgtcctcttggcatatgcttctggaataatattcaccatggttttggatgaccttccaaacttagaagacatctatacttccttgtgttcatcaacaatggaagactcagagatggattttgactctggactagaagatgatgacacaaaaagtgatagtattttggaggattccacaatttttgtggccttcaaaggaaatatagatgataaagacttcaaatggaaattagatgcaatattgaaaaacgtgcccaatttgttacacatggagtccagcaagctaaaagtacagaaggtggagccctggaacagcgtgcgtgtgacattcaacatcccccgggaagcagcggagcggctacggatccttgctcagagcaacaaccagcagcttcgggatttagggattctctccgttcagattgaaggggaaggtgctattaacctggctttggctcagaaccgaagccaagatgtgagaatgaatggacccatgggagctggaaattcagttaggatggaggcgggatttcctatggcaagtggtccaggaataataaggatgaacaaccctgccactgttatgatacccccgggtggaaatgtgtcatcttccatgatggcaccaggccccaatccagagctgcagcccaggactcctcgccctgcttctcagtcagatgcaatggatccactcctctctgggctccatatacagcagcaaagtcatccctcaggatctttagctcccccacatcacccaatgcagcctgtctctgtgaacagacaaatgaacccagctaattttccccagctgcagcagcagcagcaacaacaacaacagcagcagcagcagcagcagcagcaacaacagcaacagcagcaacaacagttgcaggcaagacccccacagcaacatcagcagcaacagccacagggaattcgaccccagtttactgccccaactcaggtgcctgttcctccaggctggaaccagctgccttctggagcccttcaacctcctccagcccagggttctctgggcacaatgactgcaaaccaagggtggaagaaggctcccttgcccggcccaatgcaacagcaactccaggcaagaccatccttagccacggtacagacgccttcccaccctccccctccatatccctttggcagccagcaagcctcacaagcccacacaaactttcctcagatgagcaacccaggccagttcacagctcctcagatgaagagtttgcagggagggccctctagggtcccaactcccttgcagcagccccacctcaccaacaagtctcctgcctcctcaccctcctccttccagcagggatcccctgcatcctccccaacggttaaccaaactcagcagcagatgggaccaaggccacctcaaaataacccacttccccagggatttcagcagcctgtcagctctccgggtcggaatcctatggttcaacagggaaatgtgccacctaacttcatggtgatgcagcagcaaccaccaaaccaggggccacagagtttacatccaggcctaggaggaatgcctaaacgcctcccacctggcttctcagcaggacaggccaatccgaactttatgcaaggtcaggtgccttcgaccacagcaaccacccctgggaattcaggagcccctcagctgcaagcaaatcaaaatgtccagcatgcaggtggtcaaggagctggtcctcctcaaaaccagatgcaggtgtcccacgggccgccaaatatgatgcagcccagcctcatgggaattcatggcaacatgaacaatcagcaggctggtacttctggggttcctcaagtgaacctcagcaacatgcaaggccagccccagcagggcccaccatctcagctgatgggcatgcaccagcaaatcgtgccctcccagggccagatggtccagcaacaaggaaccttgaaccctcagaaccctatgatcctttcaagggcccagcttatgccacagggccagatgatggtgaaccccccgagccaaaatcttgggccctcgccccaaaggatgaccccacccaagcagatgctttcccagcagggcccacaaatgatggcgccacataaccagatgatggggcctcaggggcaggttttgctccaacagaacccaatgatagagcagattatgaccaatcaaatgcaggggaataagcagcagtttaacactcagaaccagtccaatgtcatgccgggaccagcccagataatgaggggaccaactccaaacatgcaaggaaatatggtgcagtttacgggacagatgtcaggacagatgctgccccagcaagggcctgtgaacaacagtccatctcaggttatgggcattcagggacaggtcctgcggccaccagggcccagcccacacatggcccagcagcatggtgatcctgctactacagcaaataacgatgtcagtttatctcagatgatgcctgatgttagcattcaacaaaccaacatggtcccccctcatgtgcaggccatgcagggaaacagtgcctcgggaaaccacttctcaggccatgggatgtctttcaatgcacctttcagtggagctcccaatggaaatcagatgtcctgtggtcaaaatccaggcttcccagtcaataaggatgtcacgctaacgagcccattgttggtcaacttattgcagagtgacatatctgcaggccattttggggtaaacaataagcaaaataataccaacgcaaataaaccgaagaagaagaaaccccctcggaagaagaaaaatagtcagcaagatctaaacaccccagatactcgcccagctggtctggaagaggctgatcagccaccgttgcctggagaacaaggaattaacttggataactcaggccctaaactgccagaattttcaaaccggccaccaggttatccttctcaaccagttgaacagaggccacttcagcagatgcctcctcaactcatgcagcatgtggcacccccaccacagccaccacagcagcagccacagccacaactgcctcagcagcagcagccaccacctcccagtcagccacagtctcagcagcagcagcagcagcagcaacaaatgatgatgatgctcatgatgcagcaggatcccaaatcagttaggcttccagtctctcaaaatgtccatcctccaaggggccccctgaaccccgactcccagagaatgcccatgcaacagagtggcagtgtgcctgtcatggtcagtctgcaaggacctgcctccgtgccaccatcacctgataaacaaagaatgccaatgcctgtgaatactcccttgggaagcaattcaaggaaaatggtctatcaggagagcccgcagaatccttccagctcgccactggcggagatggcctcactccctgaagcaagtggcagtgaagcaccatctgtcccaggaggcccaaacaacatgccttcacatgtagtacttccccagaatcagttaatgatgacagggccaaaacctggaccatcgcccctttcagcaactcaaggtgcaactccccagcaaccccctgtaaattccctgcccagctctcacggccaccacttcccaaatgtggctgcgccaacccagacatctaggcccaaaacaccaaacagagccagccccagaccctattatcctcagacacccaacaaccgccctcccagcacagaaccttcagaaatcagtctgtcaccagaaagactcaatgcctccatagcaggactcttccctccacagattaatattcctttacctcctaggccaaatttaaacaggggctttgatcaacaaggcctaaatccaacaactttgaaggccatcgggcaagcaccttcaaatcttaccatgaatccttccaattttgctaccccacaaactcacaaattagattctgtggtagtgaattctggaaagcagtctaattctggagcaacaaaacgggcaagtccaagcaacagtcgcaggtctagtcctgggtccagtaggaaaaccactccaagccctgggaggcaaaattcaaaagcccctaaacttactctggcctctcagacaaatgcagccctattgcagaatgtggagttgccgagaaatgtattggtcagtcccactcctctggccaatccccctgtacctgggagctttcctaacaacagtgggctgaatcctcagaattctactgtgtctgtggctgcagttgggggtgttgttgaggataacaaggagagcttgaatgtgcctcaggacagtgattgccagaattcccagagtaggaaggaacaggtaaacattgaactaaaagcagtccctgcccaagaagttaaaatggttgtccctgaagatcagtccaaaaaggatgggcagccttcggatcctaacaaacttcccagtgtcgaagagaacaaaaatttggtgtctcctgctatgagggaagcaccaacatcgttaagtcaacttcttgacaactctggagctcccaatgtgacaattaaaccccctgggcttacagatctggaagtaacacctccagtagtttctggggaggacctcaaaaaagcatctgtcattcccacactgcaggatctgtcttcttctaaagaaccttctaattccctaaacttacctcacagtaatgagctgtgttcatcccttgtgcatcccgaattgagtgaggtcagttctaacgttgcaccaagcatccctccagtaatgtcaagacctgttagctcttcctccatttccactcccttgcccccaaatcaaataactgtatttgtcacttccaatcccatcacaacttcagctaacacatcagcagctttgccaactcacttgcagtctgcattgatgtcaacagttgtcacaatgcccaatgcgggtagcaaggttatggtttctgagggacagtcagctgctcagtctaatgcccggcctcagttcattacacctgtctttatcaattcatcctcaataattcaggttatgaaaggatcacagccaagcacaattcctgcagccccactgacaaccaactctggcctgatgcctccctctgttgcagttgttggccctttacacatacctcagaacataaaattttcttctgctcctgtaccgcctaatgccctctccagtagtcctgctccaaacatccagacaggtcgacctttggtccttagctcacgagccacccctgttcagcttccttcccctccttgtacgtcttctccagttgtcccttctcatccccctgtgcagcaagtgaaagaattgaatccagatgaggctagccctcaggtgaacacctcagcagatcagaacactcttccctcttcacagtcaaccacaatggtttctccccttttgaccaatagtccagggtcctctggcaaccggcgaagcccagtctcgtctagtaagggcaaaggaaaagtggacaaaattggccaaattttgttgaccaaggcatgtaagaaagttacaggctctcttgagaaaggggaagaacaatatggtgcagatggagagactgaaggccaagggctagacaccacagctccggggctcatgggaacagagcagttatccacagagctggacagtaaaaccccaacgcccccagcacccactctgctaaaaatgacctctagccctgtgggcccgggcactgcctcagcaggacccagcttacctggcggtgctctccccaccagtgtacgctcgatagtaaccactctggtaccctccgagctcatctccgccgtaccgaccacaaaaagcaatcatggtggcatagcatctgagtcacttgcgggtggcctagtggaggagaaggtgggatcccatccagaacttctacccagcatagccccgtcgcagaatttagtctcaaaggaaacttcaaccacagcactgcaggcctctgttgccagaccagagctggaggtaaatgctgccatagtctctggacaaagcagtgagcccaaagagatagttgaaaagtccaaaatcccaggccgaagaaactcccgaactgaagagccaactgtggcctctgaaagtgtggaaaatggacatcgtaaacgatcttctcgacctgcttcagcctccagctctactaaagacataaccagtgcggtgcaatccaagcgaagaaaatccaagtaaacaagcaggactgcgacttgatacttggaaatgtgtgtgacttttacaaagagcaattttgagctgtgacttttttaaatcaatttctgtacagttagtaattttaataatgtggcccttttcctagtccctgcaacctgtttcataaagtgcaatggggaaagcaggactgttgagcccttttggtgttgcgagttgaagttcaaggtttctaaaatgttgtcttgtattgaaaggagctaatgccattataaatgttactagttttcacatttcctaagcagcctagagtacagggtgagcatttttagatctcctaatgatgtattgtgccgtggaagtactgtgtgtgaatagcagtagtgggggcaaaagcaatcttctcatttggaaatgttgtaaataattttattatatagtgttttggatgtatttgttgtagaaatggaccagtgaataaagagaatctaaggatttgtacaatgtgaaataacgtgttaaataaatgtcattgtcatagaacataaagttatgttattggtaaggga

SEQ ID NO: 20664 - DNA, 6933 bp, Homo sapiens
  source 1..6933: mol_type = unassigned DNA
gtgaggccctgccgggtcgggctgcgggcggccgggcgcgggcggcgggacagacgggcgcacgcgaggactgacggacggacgcaccgagggcggcgggcacgcacggcccgggccggcgctccaaggcccgcccgggagggccggggccgcgctcagaattttgatttggctgctgggctgctaccttgaaatccaagccctaaaaatgccagcttctttggacttagaagatgacctggataaatgataaaaattaagaaagagattttgaagttttcttattgtcctcttggcatatgcttctggaataatattcaccatggttttggatgaccttccaaacttagaagacatctatacttccttgtgttcatcaacaatggaagactcagagatggattttgactctggactagaagatgatgacacaaaaagtgatagtattttggaggattccacaatttttgtggccttcaaaggaaatatagatgataaagacttcaaatggaaattagatgcaatattgaaaaacgtgcccaatttgttacacatggagtccagcaagctaaaagtacagaaggtggagccctggaacagcgtgcgtgtgacattcaacatcccccgggaagcagcggagcggctacggatccttgctcagagcaacaaccagcagcttcgggatttagggattctctccgttcagattgaaggggaaggtgctattaacctggctttggctcagaaccgaagccaagatgtgagaatgaatggacccatgggagctggaaattcagttaggatggaggcgggatttcctatggcaagtggtccagatgcaatggatccactcctctctgggctccatatacagcagcaaagtcatccctcaggatctttagctcccccacatcacccaatgcagcctgtctctgtgaacagacaaatgaacccagctaattttccccagctgcagcagcagcagcaacaacaacaacagcagcagcagcagcagcagcagcaacaacagcaacagcagcaacaacagttgcaggcaagacccccacagcaacatcagcagcaacagccacagggaattcgaccccagtttactgccccaactcaggtgcctgttcctccaggctggaaccagctgccttctggagcccttcaacctcctccagcccagggttctctgggcacaatgactgcaaaccaagggtggaagaaggctcccttgcccggcccaatgcaacagcaactccaggcaagaccatccttagccacggtacagacgccttcccaccctccccctccatatccctttggcagccagcaagcctcacaagcccacacaaactttcctcagatgagcaacccaggccagttcacagctcctcagatgaagagtttgcagggagggccctctagggtcccaactcccttgcagcagccccacctcaccaacaagtctcctgcctcctcaccctcctccttccagcagggatcccctgcatcctccccaacggttaaccaaactcagcagcagatgggaccaaggccacctcaaaataacccacttccccagggatttcagcagcctgtcagctctccgggtcggaatcctatggttcaacagggaaatgtgccacctaacttcatggtgatgcagcagcaaccaccaaaccaggggccacagagtttacatccaggcctaggaggaatgcctaaacgcctcccacctggcttctcagcaggacaggccaatccgaactttatgcaaggtcaggtgccttcgaccacagcaaccacccctgggaattcaggagcccctcagctgcaagcaaatcaaaatgtccagcatgcaggtggtcaaggagctggtcctcctcaaaaccagatgcaggtgtcccacgggccgccaaatatgatgcagcccagcctcatgggaattcatggcaacatgaacaatcagcaggctggtacttctggggttcctcaagtgaacctcagcaacatgcaaggccagccccagcagggcccaccatctcagctgatgggcatgcaccagcaaatcgtgccctcccagggccagatggtccagcaacaaggaaccttgaaccctcagaaccctatgatcctttcaagggcccagcttatgccacagggccagatgatggtgaaccccccgagccaaaatcttgggccctcgccccaaaggatgaccccacccaagcagatgctttcccagcagggcccacaaatgatggcgccacataaccagatgatggggcctcaggggcaggttttgctccaacagaacccaatgatagagcagattatgaccaatcaaatgcaggggaataagcagcagtttaacactcagaaccagtccaatgtcatgccgggaccagcccagataatgaggggaccaactccaaacatgcaaggaaatatggtgcagtttacgggacagatgtcaggacagatgctgccccagcaagggcctgtgaacaacagtccatctcaggttatgggcattcagggacaggtcctgcggccaccagggcccagcccacacatggcccagcagcatggtgatcctgctactacagcaaataacgatgtcagtttatctcagatgatgcctgatgttagcattcaacaaaccaacatggtcccccctcatgtgcaggccatgcagggaaacagtgcctcgggaaaccacttctcaggccatgggatgtctttcaatgcacctttcagtggagctcccaatggaaatcagatgtcctgtggtcaaaatccaggcttcccagtcaataaggatgtcacgctaacgagcccattgttggtcaacttattgcagagtgacatatctgcaggccattttggggtaaacaataagcaaaataataccaacgcaaataaaccgaagaagaagaaaccccctcggaagaagaaaaatagtcagcaagatctaaacaccccagatactcgcccagctggtctggaagaggctgatcagccaccgttgcctggagaacaaggaattaacttggataactcaggccctaaactgccagaattttcaaaccggccaccaggttatccttctcaaccagttgaacagaggccacttcagcagatgcctcctcaactcatgcagcatgtggcacccccaccacagccaccacagcagcagccacagccacaactgcctcagcagcagcagccaccacctcccagtcagccacagtctcagcagcagcagcagcagcagcaacaaatgatgatgatgctcatgatgcagcaggatcccaaatcagttaggcttccagtctctcaaaatgtccatcctccaaggggccccctgaaccccgactcccagagaatgcccatgcaacagagtggcagtgtgcctgtcatggtcagtctgcaaggacctgcctccgtgccaccatcacctgataaacaaagaatgccaatgcctgtgaatactcccttgggaagcaattcaaggaaaatggtctatcaggagagcccgcagaatccttccagctcgccactggcggagatggcctcactccctgaagcaagtggcagtgaagcaccatctgtcccaggaggcccaaacaacatgccttcacatgtagtacttccccagaatcagttaatgatgacagggccaaaacctggaccatcgcccctttcagcaactcaaggtgcaactccccagcaaccccctgtaaattccctgcccagctctcacggccaccacttcccaaatgtggctgcgccaacccagacatctaggcccaaaacaccaaacagagccagccccagaccctattatcctcagacacccaacaaccgccctcccagcacagaaccttcagaaatcagtctgtcaccagaaagactcaatgcctccatagcaggactcttccctccacagattaatattcctttacctcctaggccaaatttaaacaggggctttgatcaacaaggcctaaatccaacaactttgaaggccatcgggcaagcaccttcaaatcttaccatgaatccttccaattttgctaccccacaaactcacaaattagattctgtggtagtgaattctggaaagcagtctaattctggagcaacaaaacgggcaagtccaagcaacagtcgcaggtctagtcctgggtccagtaggaaaaccactccaagccctgggaggcaaaattcaaaagcccctaaacttactctggcctctcagacaaatgcagccctattgcagaatgtggagttgccgagaaatgtattggtcagtcccactcctctggccaatccccctgtacctgggagctttcctaacaacagtgggctgaatcctcagaattctactgtgtctgtggctgcagttgggggtgttgttgaggataacaaggagagcttgaatgtgcctcaggacagtgattgccagaattcccagagtaggaaggaacaggtaaacattgaactaaaagcagtccctgcccaagaagttaaaatggttgtccctgaagatcagtccaaaaaggatgggcagccttcggatcctaacaaacttcccagtgtcgaagagaacaaaaatttggtgtctcctgctatgagggaagcaccaacatcgttaagtcaacttcttgacaactctggagctcccaatgtgacaattaaaccccctgggcttacagatctggaagtaacacctccagtagtttctggggaggacctcaaaaaagcatctgtcattcccacactgcaggatctgtcttcttctaaagaaccttctaattccctaaacttacctcacagtaatgagctgtgttcatcccttgtgcatcccgaattgagtgaggtcagttctaacgttgcaccaagcatccctccagtaatgtcaagacctgttagctcttcctccatttccactcccttgcccccaaatcaaataactgtatttgtcacttccaatcccatcacaacttcagctaacacatcagcagctttgccaactcacttgcagtctgcattgatgtcaacagttgtcacaatgcccaatgcgggtagcaaggttatggtttctgagggacagtcagctgctcagtctaatgcccggcctcagttcattacacctgtctttatcaattcatcctcaataattcaggttatgaaaggatcacagccaagcacaattcctgcagccccactgacaaccaactctggcctgatgcctccctctgttgcagttgttggccctttacacatacctcagaacataaaattttcttctgctcctgtaccgcctaatgccctctccagtagtcctgctccaaacatccagacaggtcgacctttggtccttagctcacgagccacccctgttcagcttccttcccctccttgtacgtcttctccagttgtcccttctcatccccctgtgcagcaagtgaaagaattgaatccagatgaggctagccctcaggtgaacacctcagcagatcagaacactcttccctcttcacagtcaaccacaatggtttctccccttttgaccaatagtccagggtcctctggcaaccggcgaagcccagtctcgtctagtaagggcaaaggaaaagtggacaaaattggccaaattttgttgaccaaggcatgtaagaaagttacaggctctcttgagaaaggggaagaacaatatggtgcagatggagagactgaaggccaagggctagacaccacagctccggggctcatgggaacagagcagttatccacagagctggacagtaaaaccccaacgcccccagcacccactctgctaaaaatgacctctagccctgtgggcccgggcactgcctcagcaggacccagcttacctggcggtgctctccccaccagtgtacgctcgatagtaaccactctggtaccctccgagctcatctccgccgtaccgaccacaaaaagcaatcatggtggcatagcatctgagtcacttgcgggtggcctagtggaggagaaggtgggatcccatccagaacttctacccagcatagccccgtcgcagaatttagtctcaaaggaaacttcaaccacagcactgcaggcctctgttgccagaccagagctggaggtaaatgctgccatagtctctggacaaagcagtgagcccaaagagatagttgaaaagtccaaaatcccaggccgaagaaactcccgaactgaagagccaactgtggcctctgaaagtgtggaaaatggacatcgtaaacgatcttctcgacctgcttcagcctccagctctactaaagacataaccagtgcggtgcaatccaagcgaagaaaatccaagtaaacaagcaggactgcgacttgatacttggaaatgtgtgtgacttttacaaagagcaattttgagctgtgacttttttaaatcaatttctgtacagttagtaattttaataatgtggcccttttcctagtccctgcaacctgtttcataaagtgcaatggggaaagcaggactgttgagcccttttggtgttgcgagttgaagttcaaggtttctaaaatgttgtcttgtattgaaaggagctaatgccattataaatgttactagttttcacatttcctaagcagcctagagtacagggtgagcatttttagatctcctaatgatgtattgtgccgtggaagtactgtgtgtgaatagcagtagtgggggcaaaagcaatcttctcatttggaaatgttgtaaataattttattatatagtgttttggatgtatttgttgtagaaatggaccagtgaataaagagaatctaaggatttgtacaatgtgaaataacgtgttaaataaatgtcattgtcatagaacataaagttatgttattggtaaggga

SEQ ID NO: 20665 - DNA, 2998 bp, Homo sapiens
  source 1..2998: mol_type = unassigned DNA
gatgcgctccccggcgcccagcagcagaggccaccgctcccagaaatgcatgcgaccgatccccttctcccggaccccaggagccggcgcccccgccctgtagggttacgactcactgattaaaaagagggactttttcaaatactttgcacttttgattgtgtattatggataccaaggaagagaagaaggaacggaaacaaagttattttgctcgatgacaatcaaaacaaaacacatgataaaaaagagaagaagatggtggttcagaagccccatgggactatggaatacactgctggaaaccaggacaccctaaactccatagcactgaaatttaacatcactcccaataaattggtggaactgaataaacttttcacacatactattgttccaggccaggtcctttttgtgccagatgccaactctccttccagtaccttaaggctatcatcatccagtcctggtgctactgtctctccttcatcatcagatgcagaatatgataaattgcctgatgctgacttagcacgaaaggccttgaaacccattgaaagagtcttatcgtctacttctgaagaagatgagccaggtgtggtgaaatttttaaaaatgaattgtcgatacttcaccgatggaaagggtgtggttggcggtgttatgatagtgactcctaacaacatcatgtttgaccctcataaatctgatcctctggttattgaaaatgggtgtgaggagtatggtctcatctgccccatggaagaggttgtttccattgcgctctacaatgacatttctcacatgaagatcaaagatgccttgccatcgcctggagaatgggaagacctggcttcagaaaaggatatcaacccattcagtaagttcaaatctatcaacaaggaaaaacgacagcagaatggagagaaaattatgacttcggattccagaccaatagtacctttggagaagtccacaggacatacacctacaaagccctcaggcagctctgtgtcagagaaattaaagaaactggactcctctagggagacatcccatggttctcccacagtgactaagctcagcaaggaaccttccgacacttcttctgcatttgaatctacagccaaagaaaactttctaggggaagatgatgattttgttgacttggaagaactttcttctcaaactggtggtggaatgcacaaaaaagacaccttgaaggagtgcctttctcttgacccagaggaacgaaagaaagctgagtcacaaataaacaattctgccgtggaaatgcaggtgcagtcagccctagcctttttgggaacagagaatgatgttgaactgaagggggcgctagatttagaaacctgtgagaagcaagatataatgccagaagtggacaagcagtctggttcgccagaaagccgagtagaaaacacactgaacatacatgaagatttagataaagttaaactcattgaatattacctgactaagaacaaagaagggccacaggtatctgaaaatttgcagaaaacagaattaagtgatggaaaaagtattgaaccagggggaatagacattacccttagtagttctctttcccaggcgggtgatcccataactgagggcaataaagagccagataagacctgggtgaaaaagggagagcccctcccggtaaaactgaactcttctacagaagcaaatgtgattaaagaggctctagactcctctttggaatctactctggacaacagctgtcaaggtgcacaaatggataataaatctgaagttcagttgtggctgttaaagagaattcaggtacccattgaagatatacttccttcaaaagaagaaaaaagcaagaccccacccatgttcctgtgcatcaaagtgggaaaaccaatgagaaaatcctttgccactcacactgcagccatggtccagcagtacggcaaacggagaaagcagccagagtactggtttgctgttcctcgggagagggtggatcatttgtacacattctttgttcagtggtctcccgatgtctatggaaaagatgccaaagagcaaggctttgtggtggtggagaaggaagaactgaacatgattgacaacttcttcagtgagccaacaaccaagagctgggagatcatcactgttgaagaggcaaagcgcaggaagagcacatgcagctactatgaagacgaggacgaagaggtgctgcctgtcctacggccccacagcgcgctcctggagaatatgcacatcgagcagctggcccgacgccttcctgcaagggtgcaagggtatccatggagactggcctatagcacgttagagcacgggaccagcttaaagacgctctaccggaaatcggcatcactagacagtcctgtcctattggtcatcaaagatatggataatcagatttttggagcatatgcaactcatcctttcaagttcagtgaccactattatggcacaggcgaaacttttctctacacattcagccctcattttaaggtctttaagtggagtggagaaaattcatactttatcaatggagacataagttctttagaacttggtggtggagggggacgatttggtttatggctagatgctgatttataccacggacgaagcaactcttgcagcactttcaataatgatattctttccaaaaaggaagacttcatagttcaggatctggaggtgtgggcatttgattgaaattcagactgccttaaaatataacattaaaaagactgggttcgatcagccctcctaaagctggctggaaaaagaagccccagcccagcctgcctcatcccaccccaatgcttcctttctgccatcatctcagagcatgatcacattgcagaaagattctggaaggtccatgtagagggcagacattgaagaaagaaacttaaaatccaggttgttgaaaagactttgtactcccacttcctccaaatccatacag

SEQ ID NO: 20666 - DNA, 3108 bp, Homo sapiens
  source 1..3108: mol_type = unassigned DNA
atgggtgctgcacacagtgtttgggaggtggatcatttgtacacattctttgttcagtggtctcccgatgtctatggaaaagatgccaaagagcaaggctttgtggtggtggagaaggaagaactgaacatgattgacaacttcttcagtgagccaacaaccaagagctgggagatcatcactgttgaagaggcaaagcgcaggaagagcacatgcagctactatgaagacgaggacgaagaggtgctgcctgtcctacggccccacagcgcgctcctggagaatatgcacatcgagcagctggcccgacgccttcctgcaagggtgcaagggtatccatggagactggcctatagcacgttagagcacgggaccagcttaaagacgctctaccggaaatcggcatcactagacagtcctgtcctattggtcatcaaagatatggataatcagatttttggagcatatgcaactcatcctttcaagttcagtgaccactattatggcacaggcgaaacttttctctacacattcagccctcattttaaggtctttaagtggagtggagaaaattcatactttatcaatggagacataagttctttagaacttggtggtggagggggacgatttggtttatggctagatgctgatttataccacggacgaagcaactcttgcagcactttcaataatgatattctttccaaaaaggaagacttcatagttcaggatctggaggtgtgggcatttgattgaaattcagactgccttaaaatataacattaaaaagactgggttcgatcagccctcctaaagctggctggaaaaagaagccccagcccagcctgcctcatcccaccccaatgcttcctttctgccatcatctcagagcatgatcacattgcagaaagattctggaaggtccatgtagagggcagacattgaagaaagaaacttaaaatccaggttgttgaaaagactttgtactcccacttcctccaaatccatacagtgaggaatcagagtgtttatagatatatgagttgaatgcaatttttatttttggtaactgtgaaaaataagatactgtggatatatacatgccttgtgtatttatcagcataattttcattaccaaaatgtacagctattatttgccatggaaaaggttagtctcatttagaaaaatcgaaagtgcacagcacttaaagggaatatatgaggtttttttttttttaaaaaaaaacttttatttattatttgtagtatattgtctgaaatgtgtcggcagttttttttcttttaatgtgtcaaatcttgaaatattaaatgtatacattttgtgctatgttttgggaacaaatctgtttgatttatatagttttatattgaattttttttgccctgattgtttagggtgataggtcttaagcagcatatatctatatatctgtatgtgggtatatagagatatatgtgtgtgtgtatgtatatgtacatatacatatatatgagtgtataattctaaatttctaaaaactcattatgaatgttcatcaatttgactattataggccagctttccatttagtcaataaaagcgtacatttttagttacttaccttgaacatattcgtgtgaaaaagaatacatcatttctcacagtcttaagttgatatttatagaaatgaatacctttgtgaacctagacttagaacaaatcctgcttttgaaaaaaaatgttttgcttcttacaaaatcatttgtgttaataacaaaaactttattttcggagtgttctttgtataacttttccaagcttttacattaacgagcaggcctctgtcttaaaagggactcagtatattaatttctgcattttttaaatcaaatgaaaaacgtcaaattggaccaattgtcttggtttcttgattcatttatttgagaaaaaaacaatacaaagaaatgcattcatatcaaaattggaatagaaaggaaaacctatttttaagatatcaacctattttcacatcataaaacatctattacataaaataaaggtccaggcatagtggctcttgcctgtaatcccagcactttgggaggccgaggcaggtggatcactcaaggtcacaagtttgagaccagtctggccaacatggtgaaaccccatctctactaaaagtacaaatattagccgactatgtggcgggcacctgtaatcccacctactcgggaggctgaggcaggagaattgcttgaatccgggaagcagaggttgtagtgagccaagatcgtgccactgcactctatcctgggtaacagcgagactctgtcttaaaaataataacaataataataataataaagacttacttaaccaatattattgattaccagacttttatgaaagccaaagactgcttgctagtaggaaaaaatttcaaataataaccaaagctgaaaaatggtctgtcataaattatttccccggtaatttttgaaaggaaaaatgtataacaagtactatttacatatctgcatttaaaaaagcaattcttagaatacttcctttacattattctcctattttagacattttgtgaaagagaacaaattgtccagtggcctcctgtcagatcaacaattattatactccttaattccatgcaaatttaaatgaatgctataaaattttaaatctgtagcctgggtgtacgtttcactcaagttctcctactgaggactcttgactaacagcatactggcagtttcaccttaacctgctcgttaaataatgtgttggtgtgagatatcaggaatgtctcatgatatcacgtttaccatttacaccatctgcaaccatatgctattaataaaatggaaaaaaacaaaatggtcattttgcatatacttcactctgacctagtttagtccatgatactataattgtgagagcatatccagatgctgtgttctctatgtaaaacagtattgtccattcagaaatgtgtgacccttcatttatggatattgactatatgtaatgcagtgctatcccaatattttcaataaaggactttatgcattcagtgattttctttc

SEQ ID NO: 20667 - DNA, 5521 bp, Homo sapiens
  source 1..5521: mol_type = unassigned DNA
agaaaccctcataaagtagatgcagagggcagtaagatataactcaactttgaaaatgtcagccgttatagttgaagaaatctgacccaagagacttcgctccgctgcaagatggaaggaagcttaagtaagacataaatttgtaatgaacttgctcacaacatccgccgccactgtgacttgcagtcatcatccattaccacaaaattagttgcaggatggctactcgtatccctccacacatgatcatcagtatttgcctcctgtgtcccaaccggcctgagtcaaggttacgactcactgattaaaaagagggactttttcaaatactttgcacttttgattgtgtattatggataccaaggaagagaagaaggaacggaaacaaagttattttgctcgactgaaaaagaaaaaacaagccaaacaaaatgcagagacagcctcagctgtagctacaaggactcatactgggaaggaagataataatacagtagttttagagccagacaagtgcaacattgctgtggaagaggaatatatgactgatgagaaaaaaaagagaaaaagtaatcagttaaaggagatcaggcgtacagaactaaagagatattatagtattgatgacaatcaaaacaaaacacatgataaaaaagagaagaagatggtggttcagaagccccatgggactatggaatacactgctggaaaccaggacaccctaaactccatagcactgaaatttaacatcactcccaataaattggtggaactgaataaacttttcacacatactattgttccaggccaggtcctttttgtgccagatgccaactctccttccagtaccttaaggctatcatcatccagtcctggtgctactgtctctccttcatcatcagatgcagaatatgataaattgcctgatgctgacttagcacgaaaggccttgaaacccattgaaagagtcttatcgtctacttctgaagaagatgagccaggtgtggtgaaatttttaaaaatgaattgtcgatacttcaccgatggaaagggtgtggttggcggtgttatgatagtgactcctaacaacatcatgtttgaccctcataaatctgatcctctggttattgaaaatgggtgtgaggagtatggtctcatctgccccatggaagaggttgtttccattgcgctctacaatgacatttctcacatgaagatcaaagatgccttgccatctgacctacctcaggatctttgtcctctgtacaggcctggagaatgggaagacctggcttcagaaaaggatatcaacccattcagtaagttcaaatctatcaacaaggaaaaacgacagcagaatggagagaaaattatgacttcggattccagaccaatagtacctttggagaagtccacaggacatacacctacaaagccctcaggcagctctgtgtcagagaaattaaagaaactggactcctctagggagacatcccatggttctcccacagtgactaagctcagcaaggaaccttccgacacttcttctgcatttgaatctacagccaaagaaaactttctaggggaagatgatgattttgttgacttggaagaactttcttctcaaactggtggtggaatgcacaaaaaagacaccttgaaggagtgcctttctcttgacccagaggaacgaaagaaagctgagtcacaaataaacaattctgccgtggaaatgcaggtgcagtcagccctagcctttttgggaacagagaatgatgttgaactgaagggggcgctagatttagaaacctgtgagaagcaagatataatgccagaagtggacaagcagtctggttcgccagaaagccgagtagaaaacacactgaacatacatgaagatttagataaagttaaactcattgaatattacctgactaagaacaaagaagggccacaggtatctgaaaatttgcagaaaacagaattaagtgatggaaaaagtattgaaccagggggaatagacattacccttagtagttctctttcccaggcgggtgatcccataactgagggcaataaagagccagataagacctgggtgaaaaagggagagcccctcccggtaaaactgaactcttctacagaagcaaatgtgattaaagaggctctagactcctctttggaatctactctggacaacagctgtcaaggtgcacaaatggataataaatctgaagttcagttgtggctgttaaagagaattcaggtacccattgaagatatacttccttcaaaagaagaaaaaagcaagaccccacccatgttcctgtgcatcaaagtgggaaaaccaatgagaaaatcctttgccactcacactgcagccatggtccagcagtacggcaaacggagaaagcagccagagtactggtttgctgttcctcgggagagggtggatcatttgtacacattctttgttcagtggtctcccgatgtctatggaaaagatgccaaagagcaaggctttgtggtggtggagaaggaagaactgaacatgattgacaacttcttcagtgagccaacaaccaagagctgggagatcatcactgttgaagaggcaaagcgcaggaagagcacatgcagctactatgaagacgaggacgaagaggtgctgcctgtcctacggccccacagcgcgctcctggagaatatgcacatcgagcagctggcccgacgccttcctgcaagggtgcaagggtatccatggagactggcctatagcacgttagagcacgggaccagcttaaagacgctctaccggaaatcggcatcactagacagtcctgtcctattggtcatcaaagatatggataatcagatttttggagcatatgcaactcatcctttcaagttcagtgaccactattatggcacaggcgaaacttttctctacacattcagccctcattttaaggtctttaagtggagtggagaaaattcatactttatcaatggagacataagttctttagaacttggtggtggagggggacgatttggtttatggctagatgctgatttataccacggacgaagcaactcttgcagcactttcaataatgatattctttccaaaaaggaagacttcatagttcaggatctggaggtgtgggcatttgattgaaattcagactgccttaaaatataacattaaaaagactgggttcgatcagccctcctaaagctggctggaaaaagaagccccagcccagcctgcctcatcccaccccaatgcttcctttctgccatcatctcagagcatgatcacattgcagaaagattctggaaggtccatgtagagggcagacattgaagaaagaaacttaaaatccaggttgttgaaaagactttgtactcccacttcctccaaatccatacagtgaggaatcagagtgtttatagatatatgagttgaatgcaatttttatttttggtaactgtgaaaaataagatactgtggatatatacatgccttgtgtatttatcagcataattttcattaccaaaatgtacagctattatttgccatggaaaaggttagtctcatttagaaaaatcgaaagtgcacagcacttaaagggaatatatgaggtttttttttttttaaaaaaaaacttttatttattatttgtagtatattgtctgaaatgtgtcggcagttttttttcttttaatgtgtcaaatcttgaaatattaaatgtatacattttgtgctatgttttgggaacaaatctgtttgatttatatagttttatattgaattttttttgccctgattgtttagggtgataggtcttaagcagcatatatctatatatctgtatgtgggtatatagagatatatgtgtgtgtgtatgtatatgtacatatacatatatatgagtgtataattctaaatttctaaaaactcattatgaatgttcatcaatttgactattataggccagctttccatttagtcaataaaagcgtacatttttagttacttaccttgaacatattcgtgtgaaaaagaatacatcatttctcacagtcttaagttgatatttatagaaatgaatacctttgtgaacctagacttagaacaaatcctgcttttgaaaaaaaatgttttgcttcttacaaaatcatttgtgttaataacaaaaactttattttcggagtgttctttgtataacttttccaagcttttacattaacgagcaggcctctgtcttaaaagggactcagtatattaatttctgcattttttaaatcaaatgaaaaacgtcaaattggaccaattgtcttggtttcttgattcatttatttgagaaaaaaacaatacaaagaaatgcattcatatcaaaattggaatagaaaggaaaacctatttttaagatatcaacctattttcacatcataaaacatctattacataaaataaaggtccaggcatagtggctcttgcctgtaatcccagcactttgggaggccgaggcaggtggatcactcaaggtcacaagtttgagaccagtctggccaacatggtgaaaccccatctctactaaaagtacaaatattagccgactatgtggcgggcacctgtaatcccacctactcgggaggctgaggcaggagaattgcttgaatccgggaagcagaggttgtagtgagccaagatcgtgccactgcactctatcctgggtaacagcgagactctgtcttaaaaataataacaataataataataataaagacttacttaaccaatattattgattaccagacttttatgaaagccaaagactgcttgctagtaggaaaaaatttcaaataataaccaaagctgaaaaatggtctgtcataaattatttccccggtaatttttgaaaggaaaaatgtataacaagtactatttacatatctgcatttaaaaaagcaattcttagaatacttcctttacattattctcctattttagacattttgtgaaagagaacaaattgtccagtggcctcctgtcagatcaacaattattatactccttaattccatgcaaatttaaatgaatgctataaaattttaaatctgtagcctgggtgtacgtttcactcaagttctcctactgaggactcttgactaacagcatactggcagtttcaccttaacctgctcgttaaataatgtgttggtgtgagatatcaggaatgtctcatgatatcacgtttaccatttacaccatctgcaaccatatgctattaataaaatggaaaaaaacaaaatggtcattttgcatatacttcactctgacctagtttagtccatgatactataattgtgagagcatatccagatgctgtgttctctatgtaaaacagtattgtccattcagaaatgtgtgacccttcatttatggatattgactatatgtaatgcagtgctatcccaatattttcaataaaggactttatgcattcagtga

SEQ ID NO: 20668 - DNA, 5455 bp, Homo sapiens
  source 1..5455: mol_type = unassigned DNA
cgatccggacgcggggccccgcgggcgcgcgcctcggagctcccgcctcctcctcttgctcctcctcggcgtacggtcctcccctgacccctccttccacccgccgagaggatgcgctccccggcgcccagcagcagaggccaccgctcccagaaatgcatgcgaccgatccccttctcccggaccccaggagccggcgcccccgccctgtagggttacgactcactgattaaaaagagggactttttcaaatactttgcacttttgattgtgtattatggataccaaggaagagaagaaggaacggaaacaaagttattttgctcgactgaaaaagaaaaaacaagccaaacaaaatgcagagacagcctcagctgtagctacaaggactcatactgggaaggaagataataatacagtagttttagagccagacaagtgcaacattgctgtggaagaggaatatatgactgatgagaaaaaaaagagaaaaagtaatcagttaaaggagatcaggcgtacagaactaaagagatattatagtattgatgacaatcaaaacaaaacacatgataaaaaagagaagaagatggtggttcagaagccccatgggactatggaatacactgctggaaaccaggacaccctaaactccatagcactgaaatttaacatcactcccaataaattggtggaactgaataaacttttcacacatactattgttccaggccaggtcctttttgtgccagatgccaactctccttccagtaccttaaggctatcatcatccagtcctggtgctactgtctctccttcatcatcagatgcagaatatgataaattgcctgatgctgacttagcacgaaaggccttgaaacccattgaaagagtcttatcgtctacttctgaagaagatgagccaggtgtggtgaaatttttaaaaatgaattgtcgatacttcaccgatggaaagggtgtggttggcggtgttatgatagtgactcctaacaacatcatgtttgaccctcataaatctgatcctctggttattgaaaatgggtgtgaggagtatggtctcatctgccccatggaagaggttgtttccattgcgctctacaatgacatttctcacatgaagatcaaagatgccttgccatctgacctacctcaggatctttgtcctctgtacaggcctggagaatgggaagacctggcttcagaaaaggatatcaacccattcagtaagttcaaatctatcaacaaggaaaaacgacagcagaatggagagaaaattatgacttcggattccagaccaatagtacctttggagaagtccacaggacatacacctacaaagccctcaggcagctctgtgtcagagaaattaaagaaactggactcctctagggagacatcccatggttctcccacagtgactaagctcagcaaggaaccttccgacacttcttctgcatttgaatctacagccaaagaaaactttctaggggaagatgatgattttgttgacttggaagaactttcttctcaaactggtggtggaatgcacaaaaaagacaccttgaaggagtgcctttctcttgacccagaggaacgaaagaaagctgagtcacaaataaacaattctgccgtggaaatgcaggtgcagtcagccctagcctttttgggaacagagaatgatgttgaactgaagggggcgctagatttagaaacctgtgagaagcaagatataatgccagaagtggacaagcagtctggttcgccagaaagccgagtagaaaacacactgaacatacatgaagatttagataaagttaaactcattgaatattacctgactaagaacaaagaagggccacaggtatctgaaaatttgcagaaaacagaattaagtgatggaaaaagtattgaaccagggggaatagacattacccttagtagttctctttcccaggcgggtgatcccataactgagggcaataaagagccagataagacctgggtgaaaaagggagagcccctcccggtaaaactgaactcttctacagaagcaaatgtgattaaagaggctctagactcctctttggaatctactctggacaacagctgtcaaggtgcacaaatggataataaatctgaagttcagttgtggctgttaaagagaattcaggtacccattgaagatatacttccttcaaaagaagaaaaaagcaagaccccacccatgttcctgtgcatcaaagtgggaaaaccaatgagaaaatcctttgccactcacactgcagccatggtccagcagtacggcaaacggagaaagcagccagagtactggtttgctgttcctcgggagagggtggatcatttgtacacattctttgttcagtggtctcccgatgtctatggaaaagatgccaaagagcaaggctttgtggtggtggagaaggaagaactgaacatgattgacaacttcttcagtgagccaacaaccaagagctgggagatcatcactgttgaagaggcaaagcgcaggaagagcacatgcagctactatgaagacgaggacgaagaggtgctgcctgtcctacggccccacagcgcgctcctggagaatatgcacatcgagcagctggcccgacgccttcctgcaagggtgcaagggtatccatggagactggcctatagcacgttagagcacgggaccagcttaaagacgctctaccggaaatcggcatcactagacagtcctgtcctattggtcatcaaagatatggataatcagatttttggagcatatgcaactcatcctttcaagttcagtgaccactattatggcacaggcgaaacttttctctacacattcagccctcattttaaggtctttaagtggagtggagaaaattcatactttatcaatggagacataagttctttagaacttggtggtggagggggacgatttggtttatggctagatgctgatttataccacggacgaagcaactcttgcagcactttcaataatgatattctttccaaaaaggaagacttcatagttcaggatctggaggtgtgggcatttgattgaaattcagactgccttaaaatataacattaaaaagactgggttcgatcagccctcctaaagctggctggaaaaagaagccccagcccagcctgcctcatcccaccccaatgcttcctttctgccatcatctcagagcatgatcacattgcagaaagattctggaaggtccatgtagagggcagacattgaagaaagaaacttaaaatccaggttgttgaaaagactttgtactcccacttcctccaaatccatacagtgaggaatcagagtgtttatagatatatgagttgaatgcaatttttatttttggtaactgtgaaaaataagatactgtggatatatacatgccttgtgtatttatcagcataattttcattaccaaaatgtacagctattatttgccatggaaaaggttagtctcatttagaaaaatcgaaagtgcacagcacttaaagggaatatatgaggtttttttttttttaaaaaaaaacttttatttattatttgtagtatattgtctgaaatgtgtcggcagttttttttcttttaatgtgtcaaatcttgaaatattaaatgtatacattttgtgctatgttttgggaacaaatctgtttgatttatatagttttatattgaattttttttgccctgattgtttagggtgataggtcttaagcagcatatatctatatatctgtatgtgggtatatagagatatatgtgtgtgtgtatgtatatgtacatatacatatatatgagtgtataattctaaatttctaaaaactcattatgaatgttcatcaatttgactattataggccagctttccatttagtcaataaaagcgtacatttttagttacttaccttgaacatattcgtgtgaaaaagaatacatcatttctcacagtcttaagttgatatttatagaaatgaatacctttgtgaacctagacttagaacaaatcctgcttttgaaaaaaaatgttttgcttcttacaaaatcatttgtgttaataacaaaaactttattttcggagtgttctttgtataacttttccaagcttttacattaacgagcaggcctctgtcttaaaagggactcagtatattaatttctgcattttttaaatcaaatgaaaaacgtcaaattggaccaattgtcttggtttcttgattcatttatttgagaaaaaaacaatacaaagaaatgcattcatatcaaaattggaatagaaaggaaaacctatttttaagatatcaacctattttcacatcataaaacatctattacataaaataaaggtccaggcatagtggctcttgcctgtaatcccagcactttgggaggccgaggcaggtggatcactcaaggtcacaagtttgagaccagtctggccaacatggtgaaaccccatctctactaaaagtacaaatattagccgactatgtggcgggcacctgtaatcccacctactcgggaggctgaggcaggagaattgcttgaatccgggaagcagaggttgtagtgagccaagatcgtgccactgcactctatcctgggtaacagcgagactctgtcttaaaaataataacaataataataataataaagacttacttaaccaatattattgattaccagacttttatgaaagccaaagactgcttgctagtaggaaaaaatttcaaataataaccaaagctgaaaaatggtctgtcataaattatttccccggtaatttttgaaaggaaaaatgtataacaagtactatttacatatctgcatttaaaaaagcaattcttagaatacttcctttacattattctcctattttagacattttgtgaaagagaacaaattgtccagtggcctcctgtcagatcaacaattattatactccttaattccatgcaaatttaaatgaatgctataaaattttaaatctgtagcctgggtgtacgtttcactcaagttctcctactgaggactcttgactaacagcatactggcagtttcaccttaacctgctcgttaaataatgtgttggtgtgagatatcaggaatgtctcatgatatcacgtttaccatttacaccatctgcaaccatatgctattaataaaatggaaaaaaacaaaatggtcattttgcatatacttcactctgacctagtttagtccatgatactataattgtgagagcatatccagatgctgtgttctctatgtaaaacagtattgtccattcagaaatgtgtgacccttcatttatggatattgactatatgtaatgcagtgctatcccaatattttcaataaaggactttatgcattcagtgattttctttc

SEQ ID NO: 20669 - DNA, 1321 bp, Homo sapiens
  source 1..1321: mol_type = unassigned DNA
gatgctgacttagcacgaaaggccttgaaacccattgaaagagtcttatcgtctacttctgaagaagatgagccaggtgtggtgaaatttttaaaaatgaattgtcgatacttcaccgatggaaagggtgtggttggcggtgttatgatagtgactcctaacaacatcatgtttgaccctcataaatctgatcctctggttattgaaaatgggtgtgaggagtatggtctcatctgccccatggaagaggttgtttccattgcgctctacaatgacatttctcacatgaagatcaaagatgccttgccatcgcctggagaatgggaagacctggcttcagaaaaggatatcaacccattcagtaagttcaaatctatcaacaaggaaaaacgacagcagaatggagagaaaattatgacttcggattccagaccaatagtacctttggagaagtccacaggacatacacctacaaagccctcaggcagctctgtgtcagagaaattaaagaaactggactcctctagggagacatcccatggttctcccacagtgactaagctcagcaaggaaccttccgacacttcttctgcatttgaatctacagccaaagaaaactttctaggggaagatgatgattttgttgacttggaagaactttcttctcaaactggtggtggaatgcacaaaaaagacaccttgaaggagtgcctttctcttgacccagaggaacgaaagaaagctgagtcacaaataaacaattctgccgtggaaatgcaggtgcagtcagccctagcctttttgggaacagagaatgatgttgaactgaagggggcgctagatttagaaacctgtgagaagcaagatataatgccagaagtggacaagcagtctggttcgccagaaagccgagtagaaaacacactgaacatacatgaagatttagataaagttaaactcattgaatattacctgactaagaacaaagaagggccacaggtatctgaaaatttgcagaaaacagaattaagtgatggaaaaagtattgaaccagggggaatagacattacccttagtagttctctttcccaggcgggtgatcccataactgagggcaataaagagccagataagacctgggtgaaaaagggagagcccctcccggtaaaactgaactcttctacagaagcaaatgtgattaaagaggctctagactcctctttggaatctactctggacaacagctgtcaaggtgcacaaatggataataaatctgaagttcagttgtggctgttaaagagaattcaggtacccattgaag

SEQ ID NO: 20670 - DNA, 765 bp, Homo sapiens
  source 1..765: mol_type = unassigned DNA
gacccctccttccacccgccgagaggatgcgctccccggcgcccagcagcagaggccaccgctcccagaaatgcatgcgaccgatccccttctcccggaccccaggagccggcgcccccgccctgtagggttacgactcactgattaaaaagagggactttttcaaatactttgcacttttgattgtgtattatggataccaaggaagagaagaaggaacggaaacaaagttattttgctcgactgaaaaagaaaaaacaagccaaacaaaatgcagagacagcctcagctgtagctacaaggactcatactgggaaggaagataataatacagtagttttagagccagacaagtgcaacattgctgtggaagaggaatatatgactgatgagaaaaaaaagagaaaaagtaatcagttaaaggagatcaggcgtacagaactaaagagatattatagtattgatgacaatcaaaacaaaacacatgataaaaaagagaagaagatggtggttcagaagccccatgggactatggaatacactgctggaaaccaggacaccctaaactccatagcactgaaatttaacatcactcccaataaattggtggaactgaataaacttttcacacatactattgttccaggccaggtcctttttgtgccagatgccaactctccttccagtaccttaaggctatcatcatccagtcctggtgctactgtctctccttcatcatcagatgcagaatatgataaattgcct

SEQ ID NO: 20671 - DNA, 488 bp, Homo sapiens
  source 1..488: mol_type = unassigned DNA
actccattttatttttcacattggccagtgtaaacttttaagtttacagttgctttgttatcttttcttacagggttacgactcactgattaaaaagagggactttttcaaatactttgcacttttgattgtgtattatggataccaaggaagagaagaaggaacggaaacaaagttattttgctcgactgaaaaagaaaaaacaagccaaacaaaatgcagagacagcctcagctgtagctacaaggactcatactgggaaggaagataataatacagtagttttagagccagacaagtgcaacattgctgtggaagaggaatatatgactgatgagaaaaaaaagagaaaaagtaatcagttaaaggagatcaggcgtacagaactaaagagatattatagtattgatgacaatcaaaacaaaacacatgataaaaaagagaagaagatggtggttcagaagccccatgggactatggaatacact

SEQ ID NO: 20672 - DNA, 548 bp, Homo sapiens
  source 1..548: mol_type = unassigned DNA
agaatttgcaagttaagacacatgtacctagccactgggacagggaggtcattgaggacctccagctgtgtgacccacagctgtgtgggtcagtttggtgtagttaaggggtctctgctggttctgttcttttaaatggtgccatgtgtacaaacaaggaacacttttctgatgattcaaaaaatactttgtcttcatcacagctcttttgagggttacgactcactgattaaaaagagggactttttcaaatactttgcacttttgattgtgtattatggataccaaggaagagaagaaggaacggaaacaaagttattttgctcgactgaaaaagaaaaaacaagccaaacaaaatgcagagacagcctcagctgtagctacaaggactcatactgggaaggaagataataatacagtagttttagagccagacaagtgcaacattgctgtggaagaggaatatatgactgatgagaaaaaaaagagaaaaagtaatcagttaaaggagatcaggcgtacagaactaaagagatattatagtattg

SEQ ID NO: 20673 - DNA, 2271 bp, Homo sapiens
  source 1..2271: mol_type = unassigned DNA
gcagagggcagtaagatataactcaactttgaaaatgtcagccgttatagttgaagaaatctgacccaagagacttcgctccgctgcaagatggaaggaagcttaagtaagacataaatttgtaatgaacttgctcacaacatccgccgccactgtgacttgcagtcatcatccattaccacaaaattagttgcaggatggctactcgtatccctccacacatgatcatcagtatttgcctcctgtgtcccaaccggcctgagtcaaggttacgactcactgattaaaaagagggactttttcaaatactttgcacttttgattgtgtattatggataccaaggaagagaagaaggaacggaaacaaagttattttgctcgactgaaaaagaaaaaacaagccaaacaaaatgcagagacagcctcagctgtagctacaaggactcatactgggaaggaagataataatacagtagttttagagccagacaagtgcaacattgctgtggaagaggaatatatgactgatgagaaaaaaaagagaaaaagtaatcagttaaaggagatcaggcgtacagaactaaagagatattatagtattgatgacaatcaaaacaaaacacatgataaaaaagagaagaagatggtggttcagaagccccatgggactatggaatacactgctggaaaccaggacaccctaaactccatagcactgaaatttaacatcactcccaataaattggtggaactgaataaacttttcacacatactattgttccaggccaggtcctttttgtgccagatgccaactctccttccagtaccttaaggctatcatcatccagtcctggtgctactgtctctccttcatcatcagatgcagaatatgataaattgcctgatgctgacttagcacgaaaggccttgaaacccattgaaagagtcttatcgtctacttctgaagaagatgagccaggtgtggtgaaatttttaaaaatgaattgtcgatacttcaccgatggaaagggtgtggttggcggtgttatgatagtgactcctaacaacatcatgtttgaccctcataaatctgatcctctggttattgaaaatgggtgtgaggagtatggtctcatctgccccatggaagaggttgtttccattgcgctctacaatgacatttctcacatgaagatcaaagatgccttgccatctgacctacctcaggatctttgtcctctgtacaggcctggagaatgggaagacctggcttcagaaaaggatatcaacccattcagtaagttcaaatctatcaacaaggaaaaacgacagcagaatggagagaaaattatgacttcggattccagaccaatagtacctttggagaagtccacaggacatacacctacaaagccctcaggcagctctgtgtcagagaaattaaagaaactggactcctctagggagacatcccatggttctcccacagtgactaagctcagcaaggaaccttccgacacttcttctgcatttgaatctacagccaaagaaaactttctaggggaagatgatgattttgttgacttggaagaactttcttctcaaactggtggtggaatgcacaaaaaagacaccttgaaggagtgcctttctcttgacccagaggaacgaaagaaagctgagtcacaaataaacaattctgccgtggaaatgcaggtgcagtcagccctagcctttttgggaacagagaatgatgttgaactgaagggggcgctagatttagaaacctgtgagaagcaagatataatgccagaagtggacaagcagtctggttcgccagaaagccgagtagaaaacacactgaacatacatgaagatttagataaagttaaactcattgaatattacctgactaagaacaaagaagggccacaggtatctgaaaatttgcagaaaacagaattaagtgatggaaaaagtattgaaccagggggaatagacattacccttagtagttctctttcccaggcgggtgatcccataactgagggcaataaagagccagataagacctgggtgaaaaagggagagcccctcccggtaaaactgaactcttctacagaagcaaatgtgattaaagaggctctagactcctctttggaatctactctggacaacagctgtcaaggtgcacaaatggataataaatctgaagttcagttgtggctgttaaagagaattcaggtacccattgaagatatacttccttc

SEQ ID NO: 20674 - DNA, 636 bp, Homo sapiens
  source 1..636: mol_type = unassigned DNA
tgctttctggtggcggagcaagcttggagacaagtagctttggagaatagctgagggtccatttccactgcagactaatccctgccaatgggtgctgcacacagtgtttgggaggtggatcatttgtacacattctttgttcagtggtctcccgatgtctatggaaaagatgccaaagagcaaggctttgtggtggtggagaaggaagaactgaacatgattgacaacttcttcagtgagccaacaaccaagagctgggagatcatcactgttgaagaggcaaagcgcaggaagagcacatgcagctactatgaagacgaggacgaagaggtgctgcctgtcctacggccccacagcgcgctcctggagaatatgcacatcgagcagctggcccgacgccttcctgcaagggtgcaagggtatccatggagactggcctatagcacgttagagcacgggaccagcttaaagacgctctaccggaaatcggcatcactagacagtcctgtcctattggtcatcaaagatatggataatcagatttttggagcatatgcaactcatcctttcaagttcagtgaccactattatggcacaggcgaaacttttctctacacattcagccctcattttaag

SEQ ID NO: 20675 - DNA, 3052 bp, Homo sapiens
  source 1..3052: mol_type = unassigned DNA
agagaaaacttgttcctcattagagagagagccacacttctcactgctcacaatgagaggccaaagattacccttggacatccagattttctattgtgccagacctgacgaagagccttttgtgaagatcatcactgttgaagaggcaaagcgcaggaagagcacatgcagctactatgaagacgaggacgaagaggtgctgcctgtcctacggccccacagcgcgctcctggagaatatgcacatcgagcagctggcccgacgccttcctgcaagggtgcaagggtatccatggagactggcctatagcacgttagagcacgggaccagcttaaagacgctctaccggaaatcggcatcactagacagtcctgtcctattggtcatcaaagatatggataatcagatttttggagcatatgcaactcatcctttcaagttcagtgaccactattatggcacaggcgaaacttttctctacacattcagccctcattttaaggtctttaagtggagtggagaaaattcatactttatcaatggagacataagttctttagaacttggtggtggagggggacgatttggtttatggctagatgctgatttataccacggacgaagcaactcttgcagcactttcaataatgatattctttccaaaaaggaagacttcatagttcaggatctggaggtgtgggcatttgattgaaattcagactgccttaaaatataacattaaaaagactgggttcgatcagccctcctaaagctggctggaaaaagaagccccagcccagcctgcctcatcccaccccaatgcttcctttctgccatcatctcagagcatgatcacattgcagaaagattctggaaggtccatgtagagggcagacattgaagaaagaaacttaaaatccaggttgttgaaaagactttgtactcccacttcctccaaatccatacagtgaggaatcagagtgtttatagatatatgagttgaatgcaatttttatttttggtaactgtgaaaaataagatactgtggatatatacatgccttgtgtatttatcagcataattttcattaccaaaatgtacagctattatttgccatggaaaaggttagtctcatttagaaaaatcgaaagtgcacagcacttaaagggaatatatgaggtttttttttttttaaaaaaaaacttttatttattatttgtagtatattgtctgaaatgtgtcggcagttttttttcttttaatgtgtcaaatcttgaaatattaaatgtatacattttgtgctatgttttgggaacaaatctgtttgatttatatagttttatattgaattttttttgccctgattgtttagggtgataggtcttaagcagcatatatctatatatctgtatgtgggtatatagagatatatgtgtgtgtgtatgtatatgtacatatacatatatatgagtgtataattctaaatttctaaaaactcattatgaatgttcatcaatttgactattataggccagctttccatttagtcaataaaagcgtacatttttagttacttaccttgaacatattcgtgtgaaaaagaatacatcatttctcacagtcttaagttgatatttatagaaatgaatacctttgtgaacctagacttagaacaaatcctgcttttgaaaaaaaatgttttgcttcttacaaaatcatttgtgttaataacaaaaactttattttcggagtgttctttgtataacttttccaagcttttacattaacgagcaggcctctgtcttaaaagggactcagtatattaatttctgcattttttaaatcaaatgaaaaacgtcaaattggaccaattgtcttggtttcttgattcatttatttgagaaaaaaacaatacaaagaaatgcattcatatcaaaattggaatagaaaggaaaacctatttttaagatatcaacctattttcacatcataaaacatctattacataaaataaaggtccaggcatagtggctcttgcctgtaatcccagcactttgggaggccgaggcaggtggatcactcaaggtcacaagtttgagaccagtctggccaacatggtgaaaccccatctctactaaaagtacaaatattagccgactatgtggcgggcacctgtaatcccacctactcgggaggctgaggcaggagaattgcttgaatccgggaagcagaggttgtagtgagccaagatcgtgccactgcactctatcctgggtaacagcgagactctgtcttaaaaataataacaataataataataataaagacttacttaaccaatattattgattaccagacttttatgaaagccaaagactgcttgctagtaggaaaaaatttcaaataataaccaaagctgaaaaatggtctgtcataaattatttccccggtaatttttgaaaggaaaaatgtataacaagtactatttacatatctgcatttaaaaaagcaattcttagaatacttcctttacattattctcctattttagacattttgtgaaagagaacaaattgtccagtggcctcctgtcagatcaacaattattatactccttaattccatgcaaatttaaatgaatgctataaaattttaaatctgtagcctgggtgtacgtttcactcaagttctcctactgaggactcttgactaacagcatactggcagtttcaccttaacctgctcgttaaataatgtgttggtgtgagatatcaggaatgtctcatgatatcacgtttaccatttacaccatctgcaaccatatgctattaataaaatggaaaaaaacaaaatggtcattttgcatatacttcactctgacctagtttagtccatgatactataattgtgagagcatatccagatgctgtgttctctatgtaaaacagtattgtccattcagaaatgtgtgacccttcatttatggatattgactatatgtaatgcagtgctatcccaatattttcaataaaggactttatgcattcagtga

SEQ ID NO: 20676 - DNA, 2978 bp, Homo sapiens
  source 1..2978: mol_type = unassigned DNA
agagaaaacttgttcctcattagagagagagccacacttctcactgctcacaatgagaggccaaagattacccttggacatccagattttctattgtgccagacctgacgaagagccttttgtgaagatcatcactgttgaagaggcaaagcgcaggaagagcacatgcagctactatgaagacgaggacgaagaggtgctgcctgtcctacggccccacagcgcgctcctggagaatatgcacatcgagcagctggcccgacgccttcctgcaagggtgcaagggtatccatggagactggcctatagcacgttagagcacgggaccagcttaaagacgctctaccggaaatcggcatcactagacagtcctgtcctattggtcatcaaagatatggataatcagatttttggagcatatgcaactcatcctttcaagttcagtgaccactattatggcacaggcgaaacttttctctacacattcagccctcattttaaggggacgatttggtttatggctagatgctgatttataccacggacgaagcaactcttgcagcactttcaataatgatattctttccaaaaaggaagacttcatagttcaggatctggaggtgtgggcatttgattgaaattcagactgccttaaaatataacattaaaaagactgggttcgatcagccctcctaaagctggctggaaaaagaagccccagcccagcctgcctcatcccaccccaatgcttcctttctgccatcatctcagagcatgatcacattgcagaaagattctggaaggtccatgtagagggcagacattgaagaaagaaacttaaaatccaggttgttgaaaagactttgtactcccacttcctccaaatccatacagtgaggaatcagagtgtttatagatatatgagttgaatgcaatttttatttttggtaactgtgaaaaataagatactgtggatatatacatgccttgtgtatttatcagcataattttcattaccaaaatgtacagctattatttgccatggaaaaggttagtctcatttagaaaaatcgaaagtgcacagcacttaaagggaatatatgaggtttttttttttttaaaaaaaaacttttatttattatttgtagtatattgtctgaaatgtgtcggcagttttttttcttttaatgtgtcaaatcttgaaatattaaatgtatacattttgtgctatgttttgggaacaaatctgtttgatttatatagttttatattgaattttttttgccctgattgtttagggtgataggtcttaagcagcatatatctatatatctgtatgtgggtatatagagatatatgtgtgtgtgtatgtatatgtacatatacatatatatgagtgtataattctaaatttctaaaaactcattatgaatgttcatcaatttgactattataggccagctttccatttagtcaataaaagcgtacatttttagttacttaccttgaacatattcgtgtgaaaaagaatacatcatttctcacagtcttaagttgatatttatagaaatgaatacctttgtgaacctagacttagaacaaatcctgcttttgaaaaaaaatgttttgcttcttacaaaatcatttgtgttaataacaaaaactttattttcggagtgttctttgtataacttttccaagcttttacattaacgagcaggcctctgtcttaaaagggactcagtatattaatttctgcattttttaaatcaaatgaaaaacgtcaaattggaccaattgtcttggtttcttgattcatttatttgagaaaaaaacaatacaaagaaatgcattcatatcaaaattggaatagaaaggaaaacctatttttaagatatcaacctattttcacatcataaaacatctattacataaaataaaggtccaggcatagtggctcttgcctgtaatcccagcactttgggaggccgaggcaggtggatcactcaaggtcacaagtttgagaccagtctggccaacatggtgaaaccccatctctactaaaagtacaaatattagccgactatgtggcgggcacctgtaatcccacctactcgggaggctgaggcaggagaattgcttgaatccgggaagcagaggttgtagtgagccaagatcgtgccactgcactctatcctgggtaacagcgagactctgtcttaaaaataataacaataataataataataaagacttacttaaccaatattattgattaccagacttttatgaaagccaaagactgcttgctagtaggaaaaaatttcaaataataaccaaagctgaaaaatggtctgtcataaattatttccccggtaatttttgaaaggaaaaatgtataacaagtactatttacatatctgcatttaaaaaagcaattcttagaatacttcctttacattattctcctattttagacattttgtgaaagagaacaaattgtccagtggcctcctgtcagatcaacaattattatactccttaattccatgcaaatttaaatgaatgctataaaattttaaatctgtagcctgggtgtacgtttcactcaagttctcctactgaggactcttgactaacagcatactggcagtttcaccttaacctgctcgttaaataatgtgttggtgtgagatatcaggaatgtctcatgatatcacgtttaccatttacaccatctgcaaccatatgctattaataaaatggaaaaaaacaaaatggtcattttgcatatacttcactctgacctagtttagtccatgatactataattgtgagagcatatccagatgctgtgttctctatgtaaaacagtattgtccattcagaaatgtgtgacccttcatttatggatattgactatatgtaatgcagtgctatcccaatattttcaataaaggactttatgcattcagtga

SEQ ID NO: 20677 - DNA, 567 bp, Homo sapiens
  source 1..567: mol_type = unassigned DNA
agagaaaacttgttcctcattagagagagagccacacttctcactgctcacaatgagaggccaaagattacccttggacatccagattttctattgtgccagacctgacgaagagccttttgtgaagatcatcactgttgaagaggcaaagcgcaggaagagcacatgcagctactatgaagacgaggacgaagaggtgctgcctgtcctacggccccacagcgcgctcctggagaatatgcacatcgagcagctggcccgacgccttcctgcaagggtgcaagggtatccatggagactggcctatagcacgttagagcacgggaccagcttaaagacgctctaccggaaatcggcatcactagacagtcctgtcctattggtcatcaaagatatggataatcagatttttggagcatatgcaactcatcctttcaagttcagtgaccactattatggcacaggcgaaacttttctctacacattcagccctcattttaagtggagtggagaaaattcatactttatcaatggagacataagttctttagaacttggtggtggagg

SEQ ID NO: 20678 - DNA, 581 bp, Homo sapiens
  source 1..581: mol_type = unassigned DNA
gacccctccttccacccgccgagaggatgcgctccccggcgcccagcagcagaggccaccgctcccagaaatgcatgcgaccgatccccttctcccggaccccaggagccggcgcccccgccctgtagattcccactctgtcgcccaggctggagtgcagtgatgtaatctcggctcactgcaacctccacttcccaggttcaagtgattctcctgcctcagcctccagagtagctgggattacagggttacgactcactgattaaaaagagggactttttcaaatactttgcacttttgattgtgtattatggataccaaggaagagaagaaggaacggaaacaaagttattttgctcgactgaaaaagaaaaaacaagccaaacaaaatgcagagacagcctcagctgtagctacaaggactcatactgggaaggaagataataatacagtagttttagagccagacaagtgcaacattgctgtggaagaggaatatatgactgatgagaaaaaaaagagaaaaagtaatcagttaaaggagatcaggcgtacagaactaaagagatattatagtattg

SEQ ID NO: 20679 - DNA, 8708 bp, Homo sapiens
  source 1..8708: mol_type = unassigned DNA
gagtctttgaggacacagcctcgctggaggcagtttctggtgccagtgacggggtggcccgtgagctgatgacgaggactggcttttaatccttggtggtgattaagagaaagcttattggggcctgggagcagctccccgccgacccccaccaccatgtcgggatccacacagcctgtggcacagacgtggagggccactgagccccgctacccgccccacagcctttcctacccagtgcagatcgcccggacgcacacggacgtcgggctcctggagtaccagcaccactcccgcgactatgcctcccacctgtcgcccggctccatcatccagccccagcggcggaggccctccctgctgtctgagttccagcccgggaatgaacggtcccaggagctccacctgcggccagagtcccactcatacctgcccgagctggggaagtcagagatggagttcattgaaagcaagcgccctcggctagagctgctgcctgaccccctgctgcgaccgtcacccctgctggccacgggccagcctgcgggatctgaagacctcaccaaggaccgtagcctgacgggcaagctggaaccggtgtctccccccagccccccgcacactgaccctgagctggagctggtgccgccacggctgtccaaggaggagctgatccagaacatggaccgcgtggaccgagagatcaccatggtagagcagcagatctctaagctgaagaagaagcagcaacagctggaggaggaggctgccaagccgcccgagcctgagaagcccgtgtcaccgccgcccatcgagtcgaagcaccgcagcctggtgcagatcatctacgacgagaaccggaagaaggctgaagctgcacatcggattctggaaggcctggggccccaggtggagctgccgctgtacaaccagccctccgacacccggcagtatcatgagaacatcaaaataaaccaggcgatgcggaagaagctaatcttgtacttcaagaggaggaatcacgctcggaaacaatgggagcagaagttctgccagcgctatgaccagctcatggaggcctgggagaagaaggtggagcgcatcgagaacaacccccggcggcgggccaaggagagcaaggtgcgcgagtactacgagaagcagttccctgagatccgcaagcagcgcgagctgcaggagcgcatgcagagcagggtgggccagcggggcagtgggctgtccatgtcggccgcccgcagcgagcacgaggtgtcagagatcatcgatggcctctcagagcaggagaacctggagaagcagatgcgccagctggccgtgatcccgcccatgctgtacgacgctgaccagcagcgcatcaagttcatcaacatgaacgggcttatggccgaccccatgaaggtgtacaaagaccgccaggtcatgaacatgtggagtgagcaggagaaggagaccttccgggagaagttcatgcagcatcccaagaactttggcctgatcgcatcattcctggagaggaagacagtggctgagtgcgtcctctattactacctgactaagaagaatgagaactataagagcctggtgagacggagctatcggcgccgcggcaagagccagcagcagcaacaacagcagcagcagcagcagcagcagcagcagcagcagcccatgccccgcagcagccaggaggagaaagatgagaaggagaaggaaaaggaggcggagaaggaggaggagaagccggaggtggagaacgacaaggaagacctcctcaaggagaagacagacgacacctcaggggaggacaacgacgagaaggaggctgtggcctccaaaggccgcaaaactgccaacagccagggaagacgcaaaggccgcatcacccgctcaatggctaatgaggccaacagcgaggaggccatcaccccccagcagagcgccgagctggcctccatggagctgaatgagagttctcgctggacagaagaagaaatggaaacagccaagaaaggtctcctggaacacggccgcaactggtcggccatcgcccggatggtgggctccaagactgtgtcgcagtgtaagaacttctacttcaactacaagaagaggcagaacctcgatgagatcttgcagcagcacaagctgaagatggagaaggagaggaacgcgcggaggaagaagaagaaagcgccggcggcggccagcgaggaggctgcattcccgcccgtggtggaggatgaggagatggaggcgtcgggcgtgagcggaaatgaggaggagatggtggaggaggctgaagccttacatgcctctgggaatgaggtgcccagaggggaatgcagtggcccagccactgtcaacaacagctcagacaccgagagcatcccctctcctcacactgaggccgccaaggacacagggcagaatgggcccaagcccccagccaccctgggcgccgacgggccacccccagggccacccaccccaccaccggaggacatcccggcccccactgagcccaccccggcctctgaagccaccggagcccctacgcccccaccagcacccccatcgccctctgcacctcctcctgtggtccccaaggaggagaaggaggaggagaccgcagcagcgcccccagtggaggagggggaggagcagaagccccccgcggctgaggagctggcagtggacacagggaaggccgaggagcccgtcaagagcgagtgcacggaggaagccgaggaggggccggccaagggcaaggacgcggaggccgctgaggccacggccgagggggcgctcaaggcagagaagaaggagggcgggagcggcagggccaccacagccaagagctcgggcgccccccaggacagcgactccagtgctacctgcagtgcagacgaggtggatgaggccgagggcggcgacaagaaccggctgctgtccccaaggcccagcctcctcaccccgactggcgacccccgggccaatgcctcaccccagaagccactggacctgaagcagctgaagcagcgagcggctgccatcccccccatcgtcaccaaagtccatgagcccccccgggaggacgcagctcccaccaagccagctcccccagccccaccgccaccgcaaaacctgcagccggagagcgacgcccctcagcagcctggcagcagcccccggggcaagagcaggagcccggcaccccccgccgacaaggaggcagagaagcctgtgttcttcccagccttcgcagccgaggcccagaagctgcctggggaccccccttgctggacttccggcctgcccttccccgtgcccccccgtgaggtgatcaaggcctccccgcatgccccggacccctcagccttctcctacgctccacctggtcacccactgcccctgggcctccatgacactgcccggcccgtcctgccgcgcccacccaccatctccaacccgcctcccctcatctcctctgccaagcaccccagcgtcctcgagaggcaaataggtgccatctcccaaggaatgtcggtccagctccacgtcccgtactcagagcatgccaaggccccggtgggccctgtcaccatggggctgcccctgcccatggaccccaaaaagctggcacccttcagcggagtgaagcaggagcagctgtccccacggggccaggctgggccaccggagagcctgggggtgcccacagcccaggaggcgtccgtgctgagagggacagctctgggctcagttccgggcggaagcatcaccaaaggcattcccagcacacgggtgccctcggacagcgccatcacataccgcggctccatcacccacggcacgccagctgacgtcctgtacaagggcaccatcaccaggatcatcggcgaggacagcccgagtcgcttggaccgcggccgggaggacagcctgcccaagggccacgtcatctacgaaggcaagaagggccacgtcttgtcctatgagggtggcatgtctgtgacccagtgctccaaggaggacggcagaagcagctcaggacccccccatgagacggccgcccccaagcgcacctatgacatgatggagggccgcgtgggcagagccatctcctcagccagcatcgaaggtctcatgggccgtgccatcccgccggagcgacacagcccccaccacctcaaagagcagcaccacatccgcgggtccatcacacaagggatccctcggtcctacgtggaggcacaggaggactacctgcgtcgggaggccaagctcctaaagcgggagggcacgcctccgcccccaccgccctcacgggacctgaccgaggcctacaagacgcaggccctgggccccctgaagctgaagccggcccatgagggcctggtggccacggtgaaggaggcgggccgctccatccatgagatcccgcgcgaggagctgcggcacacgcccgagctgcccctggccccgcggccgctcaaggagggctccatcacgcagggcaccccgctcaagtacgacaccggcgcgtccaccactggctccaaaaagcacgacgtacgctccctcatcggcagccccggccggacgttcccacccgtgcacccgctggatgtgatggccgacgcccgggcactggaacgtgcctgctacgaggagagcctgaagagccggccagggaccgccagcagctcggggggctccattgcgcgcggcgccccggtcattgtgcctgagctgggtaagccgcggcagagccccctgacctatgaggaccacggggcaccctttgccggccacctcccacgaggttcgcccgtgaccacgcgggagcccacgccgcgcctgcaggagggcagcctttcgtccagcaaggcatcccaggaccgaaagctgacgtcgacgcctcgtgagatcgccaagtccccgcacagcaccgtgcccgagcaccacccacaccccatctcgccctatgagcacctgcttcggggcgtgagtggcgtggacctgtatcgcagccacatccccctggccttcgaccccacctccataccccgcggcatccctctggacgcagccgctgcctactacctgccccgacacctggcccccaaccccacctacccgcacctgtacccaccctacctcatccgcggctaccccgacacggcggcgctggagaaccggcagaccatcatcaatgactacatcacctcgcagcagatgcaccacaacgcggccaccgccatggcccagcgagctgatatgctgaggggcctctcgccccgcgagtcctcgctggcactcaactacgctgcgggtccccgaggcatcatcgacctgtcccaagtgccacacctgcctgtgctcgtgcccccgacaccaggcaccccagccaccgccatggaccgccttgcctacctccccaccgcgccccagcccttcagcagccgccacagcagctccccactctccccaggaggtccaacacacttgacaaaaccaaccaccacgtcctcgtccgagcgggagcgagaccgggatcgagagcgggaccgggatcgggagcgggaaaagtccatcctcacgtccaccacgacggtggagcacgcacccatctggagacctggtacagagcagagcagcggcagcagcggcgggggtgggggcagcagcagccgccccgcctcccactcccatgcccaccagcactcgcccatctcccctcggacccaggatgccctccagcagagacccagtgtgcttcacaacacaggcatgaagggtatcatcaccgctgtggagcccagcacgcccacggtcctgaggtccacctccacctcctcacccgttcgcccggctgccacattcccacctgccacccactgcccactgggcggcaccctcgatggggtctaccctaccctcatggagcccgtcttgctgcccaaggaggccccccgggtcgcccggccagagcggccccgagcagacaccggccatgccttcctcgccaagcccccagcccgctccgggctggagcccgcctcctcccccagcaagggctcggagccccggcccctagtgcctcctgtctctggccacgccaccatcgcccgcacccctgcgaagaacctcgcacctcaccacgccagcccggacccgccggcgccacctgcctcggcctcggacccgcaccgggaaaagactcaaagtaaacccttttccatccaggaactggaactccgttctctgggttaccacggcagcagctacagccccgaaggggtggagcccgtcagccctgtgagctcacccagtctgacccacgacaaggggctccccaagcacctggaagagctcgacaagagccacctggagggggagctgcggcccaagcagccaggccccgtgaagcttggcggggaggccgcccacctcccacacctgcggccgctgcctgagagccagccctcgtccagcccgctgctccagaccgccccaggggtcaaaggtcaccagcgggtggtcaccctggcccagcacatcagtgaggtcatcacacaggactacacccggcaccacccacagcagctcagcgcacccctgcccgcccccctctactccttccctggggccagctgccccgtcctggacctccgccgcccacccagtgacctctacctcccgcccccggaccatggtgccccggcccgtggctccccccacagcgaagggggcaagaggtctccagagccaaacaagacgtcggtcttgggtggtggtgaggacggtattgaacctgtgtccccaccggagggcatgacggagccagggcactcccggagtgctgtgtacccgctgctgtaccgggatggggaacagacggagcccagcaggatgggctccaagtctccaggcaacaccagccagccgccagccttcttcagcaagctgaccgagagcaactccgccatggtcaagtccaagaagcaagagatcaacaagaagctgaacacccacaaccggaatgagcctgaatacaatatcagccagcctgggacggagatcttcaatatgcccgccatcaccggaacaggccttatgacctatagaagccaggcggtgcaggaacatgccagcaccaacatggggctggaggccataattagaaaggcactcatgggtaaatatgaccagtgggaagagtccccgccgctcagcgccaatgcttttaaccctctgaatgccagtgccagcctgcccgctgctatgcccataaccgctgctgacggacggagtgaccacacactcacctcgccaggtggcggcgggaaggccaaggtctctggcagacccagcagccgaaaagccaagtccccggccccgggcctggcatctggggaccggccaccctctgtctcctcagtgcactcggagggagactgcaaccgccggacgccgctcaccaaccgcgtgtgggaggacaggccctcgtccgcaggttccacgccattcccctacaaccccctgatcatgcggctgcaggcgggtgtcatggcttccccacccccaccgggcctccccgcgggcagcgggcccctcgctggcccccaccacgcctgggacgaggagcccaagccactgctctgctcgcagtacgagacactctccgacagcgagtgactcagaacagggcgggggggggggcggtgtcaggtcccagcgagccacaggaacggccctgcaggagcagggcggctgccgactcccccaaccaaggaaggagcccctgagtccgcctgcgcctccatccatctgtccgtccagagccggcatccttgcctgtctaaagccttaactaagactcccgccccgggctggccctgtgcagaccttactcaggggatgtttacctggtgctcgggaagggaggggaaggggccggggagggggcacggcaggcgtgtggcagccacacgcaggcggccagggcggccagggacccaaagcaggatgaccacgcacctccacgccactgcctcccccgaatgcatttggaaccaaagtctaaactgagctcgcagcccccgcgccctccctccgcctcccatcccgcttagcgctctggacagatggacgcaggccctgtccagcccccagtgcgctcgttccggtccccacagactgccccagccaacgagattgctggaaaccaagtcaggccaggtgggcggacaaaagggccaggtgcggcctggggggaacggatgctccgaggactggactgtttttttcacacatcgttgccgcagcggtgggaaggaaaggcagatgtaaatgatgtgttggtttacagggtatatttttgataccttcaatgaattaattcagatgttttacgcaaggaaggacttacccagtattactgctgctgtgcttttgatctctgcttaccgttcaagaggcgtgtgcaggccgacagtcggtgaccccatcactcgcaggaccaagggggcggggactgctggctcacgccccgctgtgtcctccctccctcccttccttgggcagaatgaattcgatgcgtattctgtggccgccatctgcgcagggtggtggtattctgtcatttacacacgtcgttctaattaaaaagcgaattatactcc

SEQ ID NO: 20680 - DNA, 8522 bp, Homo sapiens
  source 1..8522: mol_type = unassigned DNA
gagtctttgaggacacagcctcgctggaggcagtttctggtgccagtgacggggtggcccgtgagctgatgacgaggactggcttttaatccttggtggtgattaagagaaagcttattggggcctgggagcagctccccgccgacccccaccaccatgtcgggatccacacagcctgtggcacagacgtggagggccactgagccccgctacccgccccacagcctttcctacccagtgcagatcgcccggacgcacacggacgtcgggctcctggagtaccagcaccactcccgcgactatgcctcccacctgtcgcccggctccatcatccagccccagcggcggaggccctccctgctgtctgagttccagcccgggaatgaacggtcccaggagctccacctgcggccagagtcccactcatacctgcccgagctggggaagtcagagatggagttcattgaaagcaagcgccctcggctagagctgctgcctgaccccctgctgcgaccgtcacccctgctggccacgggccagcctgcgggatctgaagacctcaccaaggaccgtagcctgacgggcaagctggaaccggtgtctccccccagccccccgcacactgaccctgagctggagctggtgccgccacggctgtccaaggaggagctgatccagaacatggaccgcgtggaccgagagatcaccatggtagagcagcagatctctaagctgaagaagaagcagcaacagctggaggaggaggctgccaagccgcccgagcctgagaagcccgtgtcaccgccgcccatcgagtcgaagcaccgcagcctggtgcagatcatctacgacgagaaccggaagaaggctgaagctgcacatcggattctggaaggcctggggccccaggtggagctgccgctgtacaaccagccctccgacacccggcagtatcatgagaacatcaaaataaaccaggcgatgcggaagaagctaatcttgtacttcaagaggaggaatcacgctcggaaacaatgggagcagaagttctgccagcgctatgaccagctcatggaggcctgggagaagaaggtggagcgcatcgagaacaacccccggcggcgggccaaggagagcaaggtgcgcgagtactacgagaagcagttccctgagatccgcaagcagcgcgagctgcaggagcgcatgcagagcagggtgggccagcggggcagtgggctgtccatgtcggccgcccgcagcgagcacgaggtgtcagagatcatcgatggcctctcagagcaggagaacctggagaagcagatgcgccagctggccgtgatcccgcccatgctgtacgacgctgaccagcagcgcatcaagttcatcaacatgaacgggcttatggccgaccccatgaaggtgtacaaagaccgccaggtcatgaacatgtggagtgagcaggagaaggagaccttccgggagaagttcatgcagcatcccaagaactttggcctgatcgcatcattcctggagaggaagacagtggctgagtgcgtcctctattactacctgactaagaagaatgagaactataagagcctggtgagacggagctatcggcgccgcggcaagagccagcagcagcaacaacagcagcagcagcagcagcagcagcagcagcagcagcccatgccccgcagcagccaggaggagaaagatgagaaggagaaggaaaaggaggcggagaaggaggaggagaagccggaggtggagaacgacaaggaagacctcctcaaggagaagacagacgacacctcaggggaggacaacgacgagaaggaggctgtggcctccaaaggccgcaaaactgccaacagccagggaagacgcaaaggccgcatcacccgctcaatggctaatgaggccaacagcgaggaggccatcaccccccagcagagcgccgagctggcctccatggagctgaatgagagttctcgctggacagaagaagaaatggaaacagccaagaaaggtctcctggaacacggccgcaactggtcggccatcgcccggatggtgggctccaagactgtgtcgcagtgtaagaacttctacttcaactacaagaagaggcagaacctcgatgagatcttgcagcagcacaagctgaagatggagaaggagaggaacgcgcggaggaagaagaagaaagcgccggcggcggccagcgaggaggctgcattcccgcccgtggtggaggatgaggagatggaggcgtcgggcgtgagcggaaatgaggaggagatggtggaggaggctgaagccactgtcaacaacagctcagacaccgagagcatcccctctcctcacactgaggccgccaaggacacagggcagaatgggcccaagcccccagccaccctgggcgccgacgggccacccccagggccacccaccccaccaccggaggacatcccggcccccactgagcccaccccggcctctgaagccaccggagcccctacgcccccaccagcacccccatcgccctctgcacctcctcctgtggtccccaaggaggagaaggaggaggagaccgcagcagcgcccccagtggaggagggggaggagcagaagccccccgcggctgaggagctggcagtggacacagggaaggccgaggagcccgtcaagagcgagtgcacggaggaagccgaggaggggccggccaagggcaaggacgcggaggccgctgaggccacggccgagggggcgctcaaggcagagaagaaggagggcgggagcggcagggccaccacagccaagagctcgggcgccccccaggacagcgactccagtgctacctgcagtgcagacgaggtggatgaggccgagggcggcgacaagaaccggctgctgtccccaaggcccagcctcctcaccccgactggcgacccccgggccaatgcctcaccccagaagccactggacctgaagcagctgaagcagcgagcggctgccatcccccccatccaggtcaccaaagtccatgagcccccccgggaggacgcagctcccaccaagccagctcccccagccccaccgccaccgcaaaacctgcagccggagagcgacgcccctcagcagcctggcagcagcccccggggcaagagcaggagcccggcaccccccgccgacaaggaggcagagaagcctgtgttcttcccagccttcgcagccgaggcccagaagctgcctggggaccccccttgctggacttccggcctgcccttccccgtgcccccccgtgaggtgatcaaggcctccccgcatgccccggacccctcagccttctcctacgctccacctggtcacccactgcccctgggcctccatgacactgcccggcccgtcctgccgcgcccacccaccatctccaacccgcctcccctcatctcctctgccaagcaccccagcgtcctcgagaggcaaataggtgccatctcccaaggaatgtcggtccagctccacgtcccgtactcagagcatgccaaggccccggtgggccctgtcaccatggggctgcccctgcccatggaccccaaaaagctggcacccttcagcggagtgaagcaggagcagctgtccccacggggccaggctgggccaccggagagcctgggggtgcccacagcccaggaggcgtccgtgctgagagggacagctctgggctcagttccgggcggaagcatcaccaaaggcattcccagcacacgggtgccctcggacagcgccatcacataccgcggctccatcacccacggcacgccagctgacgtcctgtacaagggcaccatcaccaggatcatcggcgaggacagcccgagtcgcttggaccgcggccgggaggacagcctgcccaagggccacgtcatctacgaaggcaagaagggccacgtcttgtcctatgagggtggcatgtctgtgacccagtgctccaaggaggacggcagaagcagctcaggacccccccatgagacggccgcccccaagcgcacctatgacatgatggagggccgcgtgggcagagccatctcctcagccagcatcgaaggtctcatgggccgtgccatcccgccggagcgacacagcccccaccacctcaaagagcagcaccacatccgcgggtccatcacacaagggatccctcggtcctacgtggaggcacaggaggactacctgcgtcgggaggccaagctcctaaagcgggagggcacgcctccgcccccaccgccctcacgggacctgaccgaggcctacaagacgcaggccctgggccccctgaagctgaagccggcccatgagggcctggtggccacggtgaaggaggcgggccgctccatccatgagatcccgcgcgaggagctgcggcacacgcccgagctgcccctggccccgcggccgctcaaggagggctccatcacgcagggcaccccgctcaagtacgacaccggcgcgtccaccactggctccaaaaagcacgacgtacgctccctcatcggcagccccggccggacgttcccacccgtgcacccgctggatgtgatggccgacgcccgggcactggaacgtgcctgctacgaggagagcctgaagagccggccagggaccgccagcagctcggggggctccattgcgcgcggcgccccggtcattgtgcctgagctgggtaagccgcggcagagccccctgacctatgaggaccacggggcaccctttgccggccacctcccacgaggttcgcccgtgaccacgcgggagcccacgccgcgcctgcaggagggcagcctttcgtccagcaaggcatcccaggaccgaaagctgacgtcgacgcctcgtgagatcgccaagtccccgcacagcaccgtgcccgagcaccacccacaccccatctcgccctatgagcacctgcttcggggcgtgagtggcgtggacctgtatcgcagccacatccccctggccttcgaccccacctccataccccgcggcatccctctggacgcagccgctgcctactacctgccccgacacctggcccccaaccccacctacccgcacctgtacccaccctacctcatccgcggctaccccgacacggcggcgctggagaaccggcagaccatcatcaatgactacatcacctcgcagcagatgcaccacaacgcggccaccgccatggcccagcgagctgatatgctgaggggcctctcgccccgcgagtcctcgctggcactcaactacgctgcgggtccccgaggcatcatcgacctgtcccaagtgccacacctgcctgtgctcgtgcccccgacaccaggcaccccagccaccgccatggaccgccttgcctacctccccaccgcgccccagcccttcagcagccgccacagcagctccccactctccccaggaggtccaacacacttgacaaaaccaaccaccacgtcctcgtccgagcgggagcgagaccgggatcgagagcgggaccgggatcgggagcgggaaaagtccatcctcacgtccaccacgacggtggagcacgcacccatctggagacctggtacagagcagagcagcggcagcagcggcgggggtgggggcagcagcagccgccccgcctcccactcccatgcccaccagcactcgcccatctcccctcggacccaggatgccctccagcagagacccagtgtgcttcacaacacaggcatgaagggtatcatcaccgctgtggagcccagcacgcccacggtcctgaggtccacctccacctcctcacccgttcgcccggctgccacattcccacctgccacccactgcccactgggcggcaccctcgatggggtctaccctaccctcatggagcccgtcttgctgcccaaggaggccccccgggtcgcccggccagagcggccccgagcagacaccggccatgccttcctcgccaagcccccagcccgctccgggctggagcccgcctcctcccccagcaagggctcggagccccggcccctagtgcctcctgtctctggccacgccaccatcgcccgcacccctgcgaagaacctcgcacctcaccacgccagcccggacccgccggcgccacctgcctcggcctcggacccgcaccgggaaaagactcaaagtaaacccttttccatccaggaactggaactccgttctctgggttaccacggcagcagctacagccccgaaggggtggagcccgtcagccctgtgagctcacccagtctgacccacgacaaggggctccccaagcacctggaagagctcgacaagagccacctggagggggagctgcggcccaagcagccaggccccgtgaagcttggcggggaggccgcccacctcccacacctgcggccgctgcctgagagccagccctcgtccagcccgctgctccagaccgccccaggggtcaaaggtcaccagcgggtggtcaccctggcccagcacatcagtgaggtcatcacacaggactacacccggcaccacccacagcagctcagcgcacccctgcccgcccccctctactccttccctggggccagctgccccgtcctggacctccgccgcccacccagtgacctctacctcccgcccccggaccatggtgccccggcccgtggctccccccacagcgaagggggcaagaggtctccagagccaaacaagacgtcggtcttgggtggtggtgaggacggtattgaacctgtgtccccaccggagggcatgacggagccagggcactcccggagtgctgtgtacccgctgctgtaccgggatggggaacagacggagcccagcaggatgggctccaagtctccaggcaacaccagccagccgccagccttcttcagcaagctgaccgagagcaactccgccatggtcaagtccaagaagcaagagatcaacaagaagctgaacacccacaaccggaatgagcctgaatacaatatcagccagcctgggacggagatcttcaatatgcccgccatcaccggaacaggccttatgacctatagaagccaggcggtgcaggaacatgccagcaccaacatggggctggaggccataattagaaaggcactcatgggtggcggcgggaaggccaaggtctctggcagacccagcagccgaaaagccaagtccccggccccgggcctggcatctggggaccggccaccctctgtctcctcagtgcactcggagggagactgcaaccgccggacgccgctcaccaaccgcgtgtgggaggacaggccctcgtccgcaggttccacgccattcccctacaaccccctgatcatgcggctgcaggcgggtgtcatggcttccccacccccaccgggcctccccgcgggcagcgggcccctcgctggcccccaccacgcctgggacgaggagcccaagccactgctctgctcgcagtacgagacactctccgacagcgagtgactcagaacagggcgggggggggggcggtgtcaggtcccagcgagccacaggaacggccctgcaggagcagggcggctgccgactcccccaaccaaggaaggagcccctgagtccgcctgcgcctccatccatctgtccgtccagagccggcatccttgcctgtctaaagccttaactaagactcccgccccgggctggccctgtgcagaccttactcaggggatgtttacctggtgctcgggaagggaggggaaggggccggggagggggcacggcaggcgtgtggcagccacacgcaggcggccagggcggccagggacccaaagcaggatgaccacgcacctccacgccactgcctcccccgaatgcatttggaaccaaagtctaaactgagctcgcagcccccgcgccctccctccgcctcccatcccgcttagcgctctggacagatggacgcaggccctgtccagcccccagtgcgctcgttccggtccccacagactgccccagccaacgagattgctggaaaccaagtcaggccaggtgggcggacaaaagggccaggtgcggcctggggggaacggatgctccgaggactggactgtttttttcacacatcgttgccgcagcggtgggaaggaaaggcagatgtaaatgatgtgttggtttacagggtatatttttgataccttcaatgaattaattcagatgttttacgcaaggaaggacttacccagtattactgctgctgtgcttttgatctctgcttaccgttcaagaggcgtgtgcaggccgacagtcggtgaccccatcactcgcaggaccaagggggcggggactgctggctcacgccccgctgtgtcctccctccctcccttccttgggcagaatgaattcgatgcgtattctgtggccgccatctgcgcagggtggtggtattctgtcatttacacacgtcgttctaattaaaaagcgaattatactcc

SEQ ID NO: 20681 - DNA, 8660 bp, Homo sapiens
  source 1..8660: mol_type = unassigned DNA
gagtctttgaggacacagcctcgctggaggcagtttctggtgccagtgacggggtggcccgtgagctgatgacgaggactggcttttaatccttggtggtgattaagagaaagcttattggggcctgggagcagctccccgccgacccccaccaccatgtcgggatccacacagcctgtggcacagacgtggagggccactgagccccgctacccgccccacagcctttcctacccagtgcagatcgcccggacgcacacggacgtcgggctcctggagtaccagcaccactcccgcgactatgcctcccacctgtcgcccggctccatcatccagccccagcggcggaggccctccctgctgtctgagttccagcccgggaatgaacggtcccaggagctccacctgcggccagagtcccactcatacctgcccgagctggggaagtcagagatggagttcattgaaagcaagcgccctcggctagagctgctgcctgaccccctgctgcgaccgtcacccctgctggccacgggccagcctgcgggatctgaagacctcaccaaggaccgtagcctgacgggcaagctggaaccggtgtctccccccagccccccgcacactgaccctgagctggagctggtgccgccacggctgtccaaggaggagctgatccagaacatggaccgcgtggaccgagagatcaccatggtagagcagcagatctctaagctgaagaagaagcagcaacagctggaggaggaggctgccaagccgcccgagcctgagaagcccgtgtcaccgccgcccatcgagtcgaagcaccgcagcctggtgcagatcatctacgacgagaaccggaagaaggctgaagctgcacatcggattctggaaggcctggggccccaggtggagctgccgctgtacaaccagccctccgacacccggcagtatcatgagaacatcaaaataaaccaggcgatgcggaagaagctaatcttgtacttcaagaggaggaatcacgctcggaaacaatgggagcagaagttctgccagcgctatgaccagctcatggaggcctgggagaagaaggtggagcgcatcgagaacaacccccggcggcgggccaaggagagcaaggtgcgcgagtactacgagaagcagttccctgagatccgcaagcagcgcgagctgcaggagcgcatgcagagcagggtgggccagcggggcagtgggctgtccatgtcggccgcccgcagcgagcacgaggtgtcagagatcatcgatggcctctcagagcaggagaacctggagaagcagatgcgccagctggccgtgatcccgcccatgctgtacgacgctgaccagcagcgcatcaagttcatcaacatgaacgggcttatggccgaccccatgaaggtgtacaaagaccgccaggtcatgaacatgtggagtgagcaggagaaggagaccttccgggagaagttcatgcagcatcccaagaactttggcctgatcgcatcattcctggagaggaagacagtggctgagtgcgtcctctattactacctgactaagaagaatgagaactataagagcctggtgagacggagctatcggcgccgcggcaagagccagcagcagcaacaacagcagcagcagcagcagcagcagcagcagcagcagcccatgccccgcagcagccaggaggagaaagatgagaaggagaaggaaaaggaggcggagaaggaggaggagaagccggaggtggagaacgacaaggaagacctcctcaaggagaagacagacgacacctcaggggaggacaacgacgagaaggaggctgtggcctccaaaggccgcaaaactgccaacagccagggaagacgcaaaggccgcatcacccgctcaatggctaatgaggccaacagcgaggaggccatcaccccccagcagagcgccgagctggcctccatggagctgaatgagagttctcgctggacagaagaagaaatggaaacagccaagaaaggtctcctggaacacggccgcaactggtcggccatcgcccggatggtgggctccaagactgtgtcgcagtgtaagaacttctacttcaactacaagaagaggcagaacctcgatgagatcttgcagcagcacaagctgaagatggagaaggagaggaacgcgcggaggaagaagaagaaagcgccggcggcggccagcgaggaggctgcattcccgcccgtggtggaggatgaggagatggaggcgtcgggcgtgagcggaaatgaggaggagatggtggaggaggctgaagccactgtcaacaacagctcagacaccgagagcatcccctctcctcacactgaggccgccaaggacacagggcagaatgggcccaagcccccagccaccctgggcgccgacgggccacccccagggccacccaccccaccaccggaggacatcccggcccccactgagcccaccccggcctctgaagccaccggagcccctacgcccccaccagcacccccatcgccctctgcacctcctcctgtggtccccaaggaggagaaggaggaggagaccgcagcagcgcccccagtggaggagggggaggagcagaagccccccgcggctgaggagctggcagtggacacagggaaggccgaggagcccgtcaagagcgagtgcacggaggaagccgaggaggggccggccaagggcaaggacgcggaggccgctgaggccacggccgagggggcgctcaaggcagagaagaaggagggcgggagcggcagggccaccacagccaagagctcgggcgccccccaggacagcgactccagtgctacctgcagtgcagacgaggtggatgaggccgagggcggcgacaagaaccggctgctgtccccaaggcccagcctcctcaccccgactggcgacccccgggccaatgcctcaccccagaagccactggacctgaagcagctgaagcagcgagcggctgccatcccccccatccaggtcaccaaagtccatgagcccccccgggaggacgcagctcccaccaagccagctcccccagccccaccgccaccgcaaaacctgcagccggagagcgacgcccctcagcagcctggcagcagcccccggggcaagagcaggagcccggcaccccccgccgacaaggaggcagagaagcctgtgttcttcccagccttcgcagccgaggcccagaagctgcctggggaccccccttgctggacttccggcctgcccttccccgtgcccccccgtgaggtgatcaaggcctccccgcatgccccggacccctcagccttctcctacgctccacctggtcacccactgcccctgggcctccatgacactgcccggcccgtcctgccgcgcccacccaccatctccaacccgcctcccctcatctcctctgccaagcaccccagcgtcctcgagaggcaaataggtgccatctcccaaggaatgtcggtccagctccacgtcccgtactcagagcatgccaaggccccggtgggccctgtcaccatggggctgcccctgcccatggaccccaaaaagctggcacccttcagcggagtgaagcaggagcagctgtccccacggggccaggctgggccaccggagagcctgggggtgcccacagcccaggaggcgtccgtgctgagagggacagctctgggctcagttccgggcggaagcatcaccaaaggcattcccagcacacgggtgccctcggacagcgccatcacataccgcggctccatcacccacggcacgccagctgacgtcctgtacaagggcaccatcaccaggatcatcggcgaggacagcccgagtcgcttggaccgcggccgggaggacagcctgcccaagggccacgtcatctacgaaggcaagaagggccacgtcttgtcctatgagggtggcatgtctgtgacccagtgctccaaggaggacggcagaagcagctcaggacccccccatgagacggccgcccccaagcgcacctatgacatgatggagggccgcgtgggcagagccatctcctcagccagcatcgaaggtctcatgggccgtgccatcccgccggagcgacacagcccccaccacctcaaagagcagcaccacatccgcgggtccatcacacaagggatccctcggtcctacgtggaggcacaggaggactacctgcgtcgggaggccaagctcctaaagcgggagggcacgcctccgcccccaccgccctcacgggacctgaccgaggcctacaagacgcaggccctgggccccctgaagctgaagccggcccatgagggcctggtggccacggtgaaggaggcgggccgctccatccatgagatcccgcgcgaggagctgcggcacacgcccgagctgcccctggccccgcggccgctcaaggagggctccatcacgcagggcaccccgctcaagtacgacaccggcgcgtccaccactggctccaaaaagcacgacgtacgctccctcatcggcagccccggccggacgttcccacccgtgcacccgctggatgtgatggccgacgcccgggcactggaacgtgcctgctacgaggagagcctgaagagccggccagggaccgccagcagctcggggggctccattgcgcgcggcgccccggtcattgtgcctgagctgggtaagccgcggcagagccccctgacctatgaggaccacggggcaccctttgccggccacctcccacgaggttcgcccgtgaccacgcgggagcccacgccgcgcctgcaggagggcagcctttcgtccagcaaggcatcccaggaccgaaagctgacgtcgacgcctcgtgagatcgccaagtccccgcacagcaccgtgcccgagcaccacccacaccccatctcgccctatgagcacctgcttcggggcgtgagtggcgtggacctgtatcgcagccacatccccctggccttcgaccccacctccataccccgcggcatccctctggacgcagccgctgcctactacctgccccgacacctggcccccaaccccacctacccgcacctgtacccaccctacctcatccgcggctaccccgacacggcggcgctggagaaccggcagaccatcatcaatgactacatcacctcgcagcagatgcaccacaacgcggccaccgccatggcccagcgagctgatatgctgaggggcctctcgccccgcgagtcctcgctggcactcaactacgctgcgggtccccgaggcatcatcgacctgtcccaagtgccacacctgcctgtgctcgtgcccccgacaccaggcaccccagccaccgccatggaccgccttgcctacctccccaccgcgccccagcccttcagcagccgccacagcagctccccactctccccaggaggtccaacacacttgacaaaaccaaccaccacgtcctcgtccgagcgggagcgagaccgggatcgagagcgggaccgggatcgggagcgggaaaagtccatcctcacgtccaccacgacggtggagcacgcacccatctggagacctggtacagagcagagcagcggcagcagcggcgggggtgggggcagcagcagccgccccgcctcccactcccatgcccaccagcactcgcccatctcccctcggacccaggatgccctccagcagagacccagtgtgcttcacaacacaggcatgaagggtatcatcaccgctgtggagcccagcacgcccacggtcctgaggtccacctccacctcctcacccgttcgcccggctgccacattcccacctgccacccactgcccactgggcggcaccctcgatggggtctaccctaccctcatggagcccgtcttgctgcccaaggaggccccccgggtcgcccggccagagcggccccgagcagacaccggccatgccttcctcgccaagcccccagcccgctccgggctggagcccgcctcctcccccagcaagggctcggagccccggcccctagtgcctcctgtctctggccacgccaccatcgcccgcacccctgcgaagaacctcgcacctcaccacgccagcccggacccgccggcgccacctgcctcggcctcggacccgcaccgggaaaagactcaaagtaaacccttttccatccaggaactggaactccgttctctgggttaccacggcagcagctacagccccgaaggggtggagcccgtcagccctgtgagctcacccagtctgacccacgacaaggggctccccaagcacctggaagagctcgacaagagccacctggagggggagctgcggcccaagcagccaggccccgtgaagcttggcggggaggccgcccacctcccacacctgcggccgctgcctgagagccagccctcgtccagcccgctgctccagaccgccccaggggtcaaaggtcaccagcgggtggtcaccctggcccagcacatcagtgaggtcatcacacaggactacacccggcaccacccacagcagctcagcgcacccctgcccgcccccctctactccttccctggggccagctgccccgtcctggacctccgccgcccacccagtgacctctacctcccgcccccggaccatggtgccccggcccgtggctccccccacagcgaagggggcaagaggtctccagagccaaacaagacgtcggtcttgggtggtggtgaggacggtattgaacctgtgtccccaccggagggcatgacggagccagggcactcccggagtgctgtgtacccgctgctgtaccgggatggggaacagacggagcccagcaggatgggctccaagtctccaggcaacaccagccagccgccagccttcttcagcaagctgaccgagagcaactccgccatggtcaagtccaagaagcaagagatcaacaagaagctgaacacccacaaccggaatgagcctgaatacaatatcagccagcctgggacggagatcttcaatatgcccgccatcaccggaacaggccttatgacctatagaagccaggcggtgcaggaacatgccagcaccaacatggggctggaggccataattagaaaggcactcatgggtaaatatgaccagtgggaagagtccccgccgctcagcgccaatgcttttaaccctctgaatgccagtgccagcctgcccgctgctatgcccataaccgctgctgacggacggagtgaccacacactcacctcgccaggtggcggcgggaaggccaaggtctctggcagacccagcagccgaaaagccaagtccccggccccgggcctggcatctggggaccggccaccctctgtctcctcagtgcactcggagggagactgcaaccgccggacgccgctcaccaaccgcgtgtgggaggacaggccctcgtccgcaggttccacgccattcccctacaaccccctgatcatgcggctgcaggcgggtgtcatggcttccccacccccaccgggcctccccgcgggcagcgggcccctcgctggcccccaccacgcctgggacgaggagcccaagccactgctctgctcgcagtacgagacactctccgacagcgagtgactcagaacagggcgggggggggggcggtgtcaggtcccagcgagccacaggaacggccctgcaggagcagggcggctgccgactcccccaaccaaggaaggagcccctgagtccgcctgcgcctccatccatctgtccgtccagagccggcatccttgcctgtctaaagccttaactaagactcccgccccgggctggccctgtgcagaccttactcaggggatgtttacctggtgctcgggaagggaggggaaggggccggggagggggcacggcaggcgtgtggcagccacacgcaggcggccagggcggccagggacccaaagcaggatgaccacgcacctccacgccactgcctcccccgaatgcatttggaaccaaagtctaaactgagctcgcagcccccgcgccctccctccgcctcccatcccgcttagcgctctggacagatggacgcaggccctgtccagcccccagtgcgctcgttccggtccccacagactgccccagccaacgagattgctggaaaccaagtcaggccaggtgggcggacaaaagggccaggtgcggcctggggggaacggatgctccgaggactggactgtttttttcacacatcgttgccgcagcggtgggaaggaaaggcagatgtaaatgatgtgttggtttacagggtatatttttgataccttcaatgaattaattcagatgttttacgcaaggaaggacttacccagtattactgctgctgtgcttttgatctctgcttaccgttcaagaggcgtgtgcaggccgacagtcggtgaccccatcactcgcaggaccaagggggcggggactgctggctcacgccccgctgtgtcctccctccctcccttccttgggcagaatgaattcgatgcgtattctgtggccgccatctgcgcagggtggtggtattctgtcatttacacacgtcgttctaattaaaaagcgaattatactcc

SEQ ID NO: 20682 - DNA, 8520 bp, Homo sapiens
  source 1..8520: mol_type = unassigned DNA
gagtctttgaggacacagcctcgctggaggcagtttctggtgccagtgacggggtggcccgtgagctgatgacgaggactggcttttaatccttggtggtgattaagagaaagcttattggggcctgggagcagctccccgccgacccccaccaccatgtcgggatccacacagcctgtggcacagacgtggagggccactgagccccgctacccgccccacagcctttcctacccagtgcagatcgcccggacgcacacggacgtcgggctcctggagtaccagcaccactcccgcgactatgcctcccacctgtcgcccggctccatcatccagccccagcggcggaggccctccctgctgtctgagttccagcccgggaatgaacggtcccaggagctccacctgcggccagagtcccactcatacctgcccgagctggggaagtcagagatggagttcattgaaagcaagcgccctcggctagagctgctgcctgaccccctgctgcgaccgtcacccctgctggccacgggccagcctgcgggatctgaagacctcaccaaggaccgtagcctgacgggcaagctggaaccggtgtctccccccagccccccgcacactgaccctgagctggagctggtgccgccacggctgtccaaggaggagctgatccagaacatggaccgcgtggaccgagagatcaccatggtagagcagcagatctctaagctgaagaagaagcagcaacagctggaggaggaggctgccaagccgcccgagcctgagaagcccgtgtcaccgccgcccatcgagtcgaagcaccgcagcctggtgcagatcatctacgacgagaaccggaagaaggctgaagctgcacatcggattctggaaggcctggggccccaggtggagctgccgctgtacaaccagccctccgacacccggcagtatcatgagaacatcaaaataaaccaggcgatgcggaagaagctaatcttgtacttcaagaggaggaatcacgctcggaaacaatgggagcagaagttctgccagcgctatgaccagctcatggaggcctgggagaagaaggtggagcgcatcgagaacaacccccggcggcgggccaaggagagcaaggtgcgcgagtactacgagaagcagttccctgagatccgcaagcagcgcgagctgcaggagcgcatgcagagggtgggccagcggggcagtgggctgtccatgtcggccgcccgcagcgagcacgaggtgtcagagatcatcgatggcctctcagagcaggagaacctggagaagcagatgcgccagctggccgtgatcccgcccatgctgtacgacgctgaccagcagcgcatcaagttcatcaacatgaacgggcttatggccgaccccatgaaggtgtacaaagaccgccaggtcatgaacatgtggagtgagcaggagaaggagaccttccgggagaagttcatgcagcatcccaagaactttggcctgatcgcatcattcctggagaggaagacagtggctgagtgcgtcctctattactacctgactaagaagaatgagaactataagagcctggtgagacggagctatcggcgccgcggcaagagccagcagcagcaacaacagcagcagcagcagcagcagcagcagcagcagcagcccatgccccgcagcagccaggaggagaaagatgagaaggagaaggaaaaggaggcggagaaggaggaggagaagccggaggtggagaacgacaaggaagacctcctcaaggagaagacagacgacacctcaggggaggacaacgacgagaaggaggctgtggcctccaaaggccgcaaaactgccaacagccagggaagacgcaaaggccgcatcacccgctcaatggctaatgaggccaacagcgaggaggccatcaccccccagcagagcgccgagctggcctccatggagctgaatgagagttctcgctggacagaagaagaaatggaaacagccaagaaaggtctcctggaacacggccgcaactggtcggccatcgcccggatggtgggctccaagactgtgtcgcagtgtaagaacttctacttcaactacaagaagaggcagaacctcgatgagatcttgcagcagcacaagctgaagatggagaaggagaggaacgcgcggaggaagaagaagaaagcgccggcggcggccagcgaggaggctgcattcccgcccgtggtggaggatgaggagatggaggcgtcgggcgtgagcggaaatgaggaggagatggtggaggaggctgaagccactgtcaacaacagctcagacaccgagagcatcccctctcctcacactgaggccgccaaggacacagggcagaatgggcccaagcccccagccaccctgggcgccgacgggccacccccagggccacccaccccaccaccggaggacatcccggcccccactgagcccaccccggcctctgaagccaccggagcccctacgcccccaccagcacccccatcgccctctgcacctcctcctgtggtccccaaggaggagaaggaggaggagaccgcagcagcgcccccagtggaggagggggaggagcagaagccccccgcggctgaggagctggcagtggacacagggaaggccgaggagcccgtcaagagcgagtgcacggaggaagccgaggaggggccggccaagggcaaggacgcggaggccgctgaggccacggccgagggggcgctcaaggcagagaagaaggagggcgggagcggcagggccaccacagccaagagctcgggcgccccccaggacagcgactccagtgctacctgcagtgcagacgaggtggatgaggccgagggcggcgacaagaaccggctgctgtccccaaggcccagcctcctcaccccgactggcgacccccgggccaatgcctcaccccagaagccactggacctgaagcagctgaagcagcgagcggctgccatcccccccatccaggtcaccaaagtccatgagcccccccgggaggacgcagctcccaccaagccagctcccccagccccaccgccaccgcaaaacctgcagccggagagcgacgcccctcagcagcctggcagcagcccccggggcaagagcaggagcccggcaccccccgccgacaaggaggcagagaagcctgtgttcttcccagccttcgcagccgaggcccagaagctgcctggggaccccccttgctggacttccggcctgcccttccccgtgcccccccgtgaggtgatcaaggcctccccgcatgccccggacccctcagccttctcctacgctccacctggtcacccactgcccctgggcctccatgacactgcccggcccgtcctgccgcgcccacccaccatctccaacccgcctcccctcatctcctctgccaagcaccccagcgtcctcgagaggcaaataggtgccatctcccaaggaatgtcggtccagctccacgtcccgtactcagagcatgccaaggccccggtgggccctgtcaccatggggctgcccctgcccatggaccccaaaaagctggcacccttcagcggagtgaagcaggagcagctgtccccacggggccaggctgggccaccggagagcctgggggtgcccacagcccaggaggcgtccgtgctgagagggacagctctgggctcagttccgggcggaagcatcaccaaaggcattcccagcacacgggtgccctcggacagcgccatcacataccgcggctccatcacccacggcacgccagctgacgtcctgtacaagggcaccatcaccaggatcatcggcgaggacagcccgagtcgcttggaccgcggccgggaggacagcctgcccaagggccacgtcatctacgaaggcaagaagggccacgtcttgtcctatgagggtggcatgtctgtgacccagtgctccaaggaggacggcagaagcagctcaggacccccccatgagacggccgcccccaagcgcacctatgacatgatggagggccgcgtgggcagagccatctcctcagccagcatcgaaggtctcatgggccgtgccatcccgccggagcgacacagcccccaccacctcaaagagcagcaccacatccgcgggtccatcacacaagggatccctcggtcctacgtggaggcacaggaggactacctgcgtcgggaggccaagctcctaaagcgggagggcacgcctccgcccccaccgccctcacgggacctgaccgaggcctacaagacgcaggccctgggccccctgaagctgaagccggcccatgagggcctggtggccacggtgaaggaggcgggccgctccatccatgagatcccgcgcgaggagctgcggcacacgcccgagctgcccctggccccgcggccgctcaaggagggctccatcacgcagggcaccccgctcaagtacgacaccggcgcgtccaccactggctccaaaaagcacgacgtacgctccctcatcggcagccccggccggacgttcccacccgtgcacccgctggatgtgatggccgacgcccgggcactggaacgtgcctgctacgaggagagcctgaagagccggccagggaccgccagcagctcggggggctccattgcgcgcggcgccccggtcattgtgcctgagctgggtaagccgcggcagagccccctgacctatgaggaccacggggcaccctttgccggccacctcccacgaggttcgcccgtgaccacgcgggagcccacgccgcgcctgcaggagggcagcctttcgtccagcaaggcatcccaggaccgaaagctgacgtcgacgcctcgtgagatcgccaagtccccgcacagcaccgtgcccgagcaccacccacaccccatctcgccctatgagcacctgcttcggggcgtgagtggcgtggacctgtatcgcagccacatccccctggccttcgaccccacctccataccccgcggcatccctctggacgcagccgctgcctactacctgccccgacacctggcccccaaccccacctacccgcacctgtacccaccctacctcatccgcggctaccccgacacggcggcgctggagaaccggcagaccatcatcaatgactacatcacctcgcagcagatgcaccacaacgcggccaccgccatggcccagcgagctgatatgctgaggggcctctcgccccgcgagtcctcgctggcactcaactacgctgcgggtccccgaggcatcatcgacctgtcccaagtgccacacctgcctgtgctcgtgcccccgacaccaggcaccccagccaccgccatggaccgccttgcctacctccccaccgcgccccagcccttcagcagccgccacagcagctccccactctccccaggaggtccaacacacttgacaaaaccaaccaccacgtcctcgtccgagcgggagcgagaccgggatcgagagcgggaccgggatcgggagcgggaaaagtccatcctcacgtccaccacgacggtggagcacgcacccatctggagacctggtacagagcagagcagcggcagcagcggcgggggtgggggcagcagcagccgccccgcctcccactcccatgcccaccagcactcgcccatctcccctcggacccaggatgccctccagcagagacccagtgtgcttcacaacacaggcatgaagggtatcatcaccgctgtggagcccagcacgcccacggtcctgaggtccacctccacctcctcacccgttcgcccggctgccacattcccacctgccacccactgcccactgggcggcaccctcgatggggtctaccctaccctcatggagcccgtcttgctgcccaaggaggccccccgggtcgcccggccagagcggccccgagcagacaccggccatgccttcctcgccaagcccccagcccgctccgggctggagcccgcctcctcccccagcaagggctcggagccccggcccctagtgcctcctgtctctggccacgccaccatcgcccgcacccctgcgaagaacctcgcacctcaccacgccagcccggacccgccggcgccacctgcctcggcctcggacccgcaccgggaaaagactcaaagtaaacccttttccatccaggaactggaactccgttctctgggttaccacggcagcagctacagccccgaaggggtggagcccgtcagccctgtgagctcacccagtctgacccacgacaaggggctccccaagcacctggaagagctcgacaagagccacctggagggggagctgcggcccaagcagccaggccccgtgaagcttggcggggaggccgcccacctcccacacctgcggccgctgcctgagagccagccctcgtccagcccgctgctccagaccgccccaggggtcaaaggtcaccagcgggtggtcaccctggcccagcacatcagtgaggtcatcacacaggactacacccggcaccacccacagcagctcagcgcacccctgcccgcccccctctactccttccctggggccagctgccccgtcctggacctccgccgcccacccagtgacctctacctcccgcccccggaccatggtgccccggcccgtggctccccccacagcgaagggggcaagaggtctccagagccaaacaagacgtcggtcttgggtggtggtgaggacggtattgaacctgtgtccccaccggagggcatgacggagccagggcactcccggagtgctgtgtacccgctgctgtaccgggatggggaacagacggagcccagcaggatgggctccaagtctccaggcaacaccagccagccgccagccttcttcagcaagctgaccgagagcaactccgccatggtcaagtccaagaagcaagagatcaacaagaagctgaacacccacaaccggaatgagcctgaatacaatatcagccagcctgggacggagatcttcaatatgcccgccatcaccggaacaggccttatgacctatagaagccaggcggtgcaggaacatgccagcaccaacatggggctggaggccataattagaaaggcactcatgggtggcggcgggaaggccaaggtctctggcagacccagcagccgaaaagccaagtccccggccccgggcctggcatctggggaccggccaccctctgtctcctcagtgcactcggagggagactgcaaccgccggacgccgctcaccaaccgcgtgtgggaggacaggccctcgtccgcaggttccacgccattcccctacaaccccctgatcatgcggctgcaggcgggtgtcatggcttccccacccccaccgggcctccccgcgggcagcgggcccctcgctggcccccaccacgcctgggacgaggagcccaagccactgctctgctcgcagtacgagacactctccgacagcgagtgactcagaacagggcgggggggggggcggtgtcaggtcccagcgagccacaggaacggccctgcaggagcagggcggctgccgactcccccaaccaaggaaggagcccctgagtccgcctgcgcctccatccatctgtccgtccagagccggcatccttgcctgtctaaagccttaactaagactcccgccccgggctggccctgtgcagaccttactcaggggatgtttacctggtgctcgggaagggaggggaaggggccggggagggggcacggcaggcgtgtggcagccacacgcaggcggccagggcggccagggacccaaagcaggatgaccacgcacctccacgccactgcctcccccgaatgcatttggaaccaaagtctaaactgagctcgcagcccccgcgccctccctccgcctcccatcccgcttagcgctctggacagatggacgcaggccctgtccagcccccagtgcgctcgttccggtccccacagactgccccagccaacgagattgctggaaaccaagtcaggccaggtgggcggacaaaagggccaggtgcggcctggggggaacggatgctccgaggactggactgtttttttcacacatcgttgccgcagcggtgggaaggaaaggcagatgtaaatgatgtgttggtttacagggtatatttttgataccttcaatgaattaattcagatgttttacgcaaggaaggacttacccagtattactgctgctgtgcttttgatctctgcttaccgttcaagaggcgtgtgcaggccgacagtcggtgaccccatcactcgcaggaccaagggggcggggactgctggctcacgccccgctgtgtcctccctccctcccttccttgggcagaatgaattcgatgcgtattctgtggccgccatctgcgcagggtggtggtattctgtcatttacacacgtcgttctaattaaaaagcgaattatactcca

SEQ ID NO: 20683 - DNA, 8533 bp, Homo sapiens
  source 1..8533: mol_type = unassigned DNA
catgtcgggatccacacagcctgtggcacagacgtggagggccactgagccccgctacccgccccacagcctttcctacccagtgcagatcgcccggacgcacacggacgtcgggctcctggagtaccagcaccactcccgcgactatgcctcccacctgtcgcccggctccatcatccagccccagcggcggaggccctccctgctgtctgagttccagcccgggaatgaacggtcccaggagctccacctgcggccagagtcccactcatacctgcccgagctggggaagtcagagatggagttcattgaaagcaagcgccctcggctagagctgctgcctgaccccctgctgcgaccgtcacccctgctggccacgggccagcctgcgggatctgaagacctcaccaaggaccgtagcctgacgggcaagctggaaccggtgtctccccccagccccccgcacactgaccctgagctggagctggtgccgccacggctgtccaaggaggagctgatccagaacatggaccgcgtggaccgagagatcaccatggtagagcagcagatctctaagctgaagaagaagcagcaacagctggaggaggaggctgccaagccgcccgagcctgagaagcccgtgtcaccgccgcccatcgagtcgaagcaccgcagcctggtgcagatcatctacgacgagaaccggaagaaggctgaagctgcacatcggattctggaaggcctggggccccaggtggagctgccgctgtacaaccagccctccgacacccggcagtatcatgagaacatcaaaataaaccaggcgatgcggaagaagctaatcttgtacttcaagaggaggaatcacgctcggaaacaatgggagcagaagttctgccagcgctatgaccagctcatggaggcctgggagaagaaggtggagcgcatcgagaacaacccccggcggcgggccaaggagagcaaggtgcgcgagtactacgagaagcagttccctgagatccgcaagcagcgcgagctgcaggagcgcatgcagagcagggtgggccagcggggcagtgggctgtccatgtcggccgcccgcagcgagcacgaggtgtcagagatcatcgatggcctctcagagcaggagaacctggagaagcagatgcgccagctggccgtgatcccgcccatgctgtacgacgctgaccagcagcgcatcaagttcatcaacatgaacgggcttatggccgaccccatgaaggtgtacaaagaccgccaggtcatgaacatgtggagtgagcaggagaaggagaccttccgggagaagttcatgcagcatcccaagaactttggcctgatcgcatcattcctggagaggaagacagtggctgagtgcgtcctctattactacctgactaagaagaatgagaactataagagcctggtgagacggagctatcggcgccgcggcaagagccagcagcagcaacaacagcagcagcagcagcagcagcagcagcagcagcagcccatgccccgcagcagccaggaggagaaagatgagaaggagaaggaaaaggaggcggagaaggaggaggagaagccggaggtggagaacgacaaggaagacctcctcaaggagaagacagacgacacctcaggggaggacaacgacgagaaggaggctgtggcctccaaaggccgcaaaactgccaacagccagggaagacgcaaaggccgcatcacccgctcaatggctaatgaggccaacagcgaggaggccatcaccccccagcagagcgccgagctggcctccatggagctgaatgagagttctcgctggacagaagaagaaatggaaacagccaagaaaggtctcctggaacacggccgcaactggtcggccatcgcccggatggtgggctccaagactgtgtcgcagtgtaagaacttctacttcaactacaagaagaggcagaacctcgatgagatcttgcagcagcacaagctgaagatggagaaggagaggaacgcgcggaggaagaagaagaaagcgccggcggcggccagcgaggaggctgcattcccgcccgtggtggaggatgaggagatggaggcgtcgggcgtgagcggaaatgaggaggagatggtggaggaggctgaagccttacatgcctctgggaatgaggtgcccagaggggaatgcagtggcccagccactgtcaacaacagctcagacaccgagagcatcccctctcctcacactgaggccgccaaggacacagggcagaatgggcccaagcccccagccaccctgggcgccgacgggccacccccagggccacccaccccaccaccggaggacatcccggcccccactgagcccaccccggcctctgaagccaccggagcccctacgcccccaccagcacccccatcgccctctgcacctcctcctgtggtccccaaggaggagaaggaggaggagaccgcagcagcgcccccagtggaggagggggaggagcagaagccccccgcggctgaggagctggcagtggacacagggaaggccgaggagcccgtcaagagcgagtgcacggaggaagccgaggaggggccggccaagggcaaggacgcggaggccgctgaggccacggccgagggggcgctcaaggcagagaagaaggagggcgggagcggcagggccaccacagccaagagctcgggcgccccccaggacagcgactccagtgctacctgcagtgcagacgaggtggatgaggccgagggcggcgacaagaaccggctgctgtccccaaggcccagcctcctcaccccgactggcgacccccgggccaatgcctcaccccagaagccactggacctgaagcagctgaagcagcgagcggctgccatcccccccatccaggtcaccaaagtccatgagcccccccgggaggacgcagctcccaccaagccagctcccccagccccaccgccaccgcaaaacctgcagccggagagcgacgcccctcagcagcctggcagcagcccccggggcaagagcaggagcccggcaccccccgccgacaaggaggccttcgcagccgaggcccagaagctgcctggggaccccccttgctggacttccggcctgcccttccccgtgcccccccgtgaggtgatcaaggcctccccgcatgccccggacccctcagccttctcctacgctccacctggtcacccactgcccctgggcctccatgacactgcccggcccgtcctgccgcgcccacccaccatctccaacccgcctcccctcatctcctctgccaagcaccccagcgtcctcgagaggcaaataggtgccatctcccaaggaatgtcggtccagctccacgtcccgtactcagagcatgccaaggccccggtgggccctgtcaccatggggctgcccctgcccatggaccccaaaaagctggcacccttcagcggagtgaagcaggagcagctgtccccacggggccaggctgggccaccggagagcctgggggtgcccacagcccaggaggcgtccgtgctgagagggacagctctgggctcagttccgggcggaagcatcaccaaaggcattcccagcacacgggtgccctcggacagcgccatcacataccgcggctccatcacccacggcacgccagctgacgtcctgtacaagggcaccatcaccaggatcatcggcgaggacagcccgagtcgcttggaccgcggccgggaggacagcctgcccaagggccacgtcatctacgaaggcaagaagggccacgtcttgtcctatgagggtggcatgtctgtgacccagtgctccaaggaggacggcagaagcagctcaggacccccccatgagacggccgcccccaagcgcacctatgacatgatggagggccgcgtgggcagagccatctcctcagccagcatcgaaggtctcatgggccgtgccatcccgccggagcgacacagcccccaccacctcaaagagcagcaccacatccgcgggtccatcacacaagggatccctcggtcctacgtggaggcacaggaggactacctgcgtcgggaggccaagctcctaaagcgggagggcacgcctccgcccccaccgccctcacgggacctgaccgaggcctacaagacgcaggccctgggccccctgaagctgaagccggcccatgagggcctggtggccacggtgaaggaggcgggccgctccatccatgagatcccgcgcgaggagctgcggcacacgcccgagctgcccctggccccgcggccgctcaaggagggctccatcacgcagggcaccccgctcaagtacgacaccggcgcgtccaccactggctccaaaaagcacgacgtacgctccctcatcggcagccccggccggacgttcccacccgtgcacccgctggatgtgatggccgacgcccgggcactggaacgtgcctgctacgaggagagcctgaagagccggccagggaccgccagcagctcggggggctccattgcgcgcggcgccccggtcattgtgcctgagctgggtaagccgcggcagagccccctgacctatgaggaccacggggcaccctttgccggccacctcccacgaggttcgcccgtgaccacgcgggagcccacgccgcgcctgcaggagggcagcctttcgtccagcaaggcatcccaggaccgaaagctgacgtcgacgcctcgtgagatcgccaagtccccgcacagcaccgtgcccgagcaccacccacaccccatctcgccctatgagcacctgcttcggggcgtgagtggcgtggacctgtatcgcagccacatccccctggccttcgaccccacctccataccccgcggcatccctctggacgcagccgctgcctactacctgccccgacacctggcccccaaccccacctacccgcacctgtacccaccctacctcatccgcggctaccccgacacggcggcgctggagaaccggcagaccatcatcaatgactacatcacctcgcagcagatgcaccacaacgcggccaccgccatggcccagcgagctgatatgctgaggggcctctcgccccgcgagtcctcgctggcactcaactacgctgcgggtccccgaggcatcatcgacctgtcccaagtgccacacctgcctgtgctcgtgcccccgacaccaggcaccccagccaccgccatggaccgccttgcctacctccccaccgcgccccagcccttcagcagccgccacagcagctccccactctccccaggaggtccaacacacttgacaaaaccaaccaccacgtcctcgtccgagcgggagcgagaccgggatcgagagcgggaccgggatcgggagcgggaaaagtccatcctcacgtccaccacgacggtggagcacgcacccatctggagacctggtacagagcagagcagcggcagcagcggcgggggtgggggcagcagcagccgccccgcctcccactcccatgcccaccagcactcgcccatctcccctcggacccaggatgccctccagcagagacccagtgtgcttcacaacacaggcatgaagggtatcatcaccgctgtggagcccagcacgcccacggtcctgaggtccacctccacctcctcacccgttcgcccggctgccacattcccacctgccacccactgcccactgggcggcaccctcgatggggtctaccctaccctcatggagcccgtcttgctgcccaaggaggccccccgggtcgcccggccagagcggccccgagcagacaccggccatgccttcctcgccaagcccccagcccgctccgggctggagcccgcctcctcccccagcaagggctcggagccccggcccctagtgcctcctgtctctggccacgccaccatcgcccgcacccctgcgaagaacctcgcacctcaccacgccagcccggacccgccggcgccacctgcctcggcctcggacccgcaccgggaaaagactcaaagtaaacccttttccatccaggaactggaactccgttctctgggttaccacggcagcagctacagccccgaaggggtggagcccgtcagccctgtgagctcacccagtctgacccacgacaaggggctccccaagcacctggaagagctcgacaagagccacctggagggggagctgcggcccaagcagccaggccccgtgaagcttggcggggaggccgcccacctcccacacctgcggccgctgcctgagagccagccctcgtccagcccgctgctccagaccgccccaggggtcaaaggtcaccagcgggtggtcaccctggcccagcacatcagtgaggtcatcacacaggactacacccggcaccacccacagcagctcagcgcacccctgcccgcccccctctactccttccctggggccagctgccccgtcctggacctccgccgcccacccagtgacctctacctcccgcccccggaccatggtgccccggcccgtggctccccccacagcgaagggggcaagaggtctccagagccaaacaagacgtcggtcttgggtggtggtgaggacggtattgaacctgtgtccccaccggagggcatgacggagccagggcactcccggagtgctgtgtacccgctgctgtaccgggatggggaacagacggagcccagcaggatgggctccaagtctccaggcaacaccagccagccgccagccttcttcagcaagctgaccgagagcaactccgccatggtcaagtccaagaagcaagagatcaacaagaagctgaacacccacaaccggaatgagcctgaatacaatatcagccagcctgggacggagatcttcaatatgcccgccatcaccggaacaggccttatgacctatagaagccaggcggtgcaggaacatgccagcaccaacatggggctggaggccataattagaaaggcactcatgggtaaatatgaccagtgggaagagtccccgccgctcagcgccaatgcttttaaccctctgaatgccagtgccagcctgcccgctgctatgcccataaccgctgctgacggacggagtgaccacacactcacctcgccaggtggcggcgggaaggccaaggtctctggcagacccagcagccgaaaagccaagtccccggccccgggcctggcatctggggaccggccaccctctgtctcctcagtgcactcggagggagactgcaaccgccggacgccgctcaccaaccgcgtgtgggaggacaggccctcgtccgcaggttccacgccattcccctacaaccccctgatcatgcggctgcaggcgggtgtcatggcttccccacccccaccgggcctccccgcgggcagcgggcccctcgctggcccccaccacgcctgggacgaggagcccaagccactgctctgctcgcagtacgagacactctccgacagcgagtgactcagaacagggcgggggggggggcggtgtcaggtcccagcgagccacaggaacggccctgcaggagcagggcggctgccgactcccccaaccaaggaaggagcccctgagtccgcctgcgcctccatccatctgtccgtccagagccggcatccttgcctgtctaaagccttaactaagactcccgccccgggctggccctgtgcagaccttactcaggggatgtttacctggtgctcgggaagggaggggaaggggccggggagggggcacggcaggcgtgtggcagccacacgcaggcggccagggcggccagggacccaaagcaggatgaccacgcacctccacgccactgcctcccccgaatgcatttggaaccaaagtctaaactgagctcgcagcccccgcgccctccctccgcctcccatcccgcttagcgctctggacagatggacgcaggccctgtccagcccccagtgcgctcgttccggtccccacagactgccccagccaacgagattgctggaaaccaagtcaggccaggtgggcggacaaaagggccaggtgcggcctggggggaacggatgctccgaggactggactgtttttttcacacatcgttgccgcagcggtgggaaggaaaggcagatgtaaatgatgtgttggtttacagggtatatttttgataccttcaatgaattaattcagatgttttacgcaaggaaggacttacccagtattactgctgctgtgcttttgatctctgcttaccgttcaagaggcgtgtgcaggccgacagtcggtgaccccatcactcgcaggaccaagggggcggggactgctggctcacgccccgctgtgtcctccctccctcccttccttgggcagaatgaattcgatgcgtattctgtggccgccatctgcgcagggtggtggtattctgtcatttacacacgtcgttctaattaaaaagcgaattatactcca

SEQ ID NO: 20684 - DNA, 8475 bp, Homo sapiens
  source 1..8475: mol_type = unassigned DNA
gagtctttgaggacacagcctcgctggaggcagtttctggtgccagtgacggggtggcccgtgagctgatgacgaggactggcttttaatccttggtggtgattaagagaaagcttattggggcctgggagcagctccccgccgacccccaccaccatgtcgggatccacacagcctgtggcacagacgtggagggccactgagccccgctacccgccccacagcctttcctacccagtgcagatcgcccggacgcacacggacgtcgggctcctggagtaccagcaccactcccgcgactatgcctcccacctgtcgcccggctccatcatccagccccagcggcggaggccctccctgctgtctgagttccagcccgggaatgaacggtcccaggagctccacctgcggccagagtcccactcatacctgcccgagctggggaagtcagagatggagttcattgaaagcaagcgccctcggctagagctgctgcctgaccccctgctgcgaccgtcacccctgctggccacgggccagcctgcgggatctgaagacctcaccaaggaccgtagcctgacgggcaagctggaaccggtgtctccccccagccccccgcacactgaccctgagctggagctggtgccgccacggctgtccaaggaggagctgatccagaacatggaccgcgtggaccgagagatcaccatggtagagcagcagatctctaagctgaagaagaagcagcaacagctggaggaggaggctgccaagccgcccgagcctgagaagcccgtgtcaccgccgcccatcgagtcgaagcaccgcagcctggtgcagatcatctacgacgagaaccggaagaaggctgaagctgcacatcggattctggaaggcctggggccccaggtggagctgccgctgtacaaccagccctccgacacccggcagtatcatgagaacatcaaaataaaccaggcgatgcggaagaagctaatcttgtacttcaagaggaggaatcacgctcggaaacaatgggagcagaagttctgccagcgctatgaccagctcatggaggcctgggagaagaaggtggagcgcatcgagaacaacccccggcggcgggccaaggagagcaaggtgcgcgagtactacgagaagcagttccctgagatccgcaagcagcgcgagctgcaggagcgcatgcagagggtgggccagcggggcagtgggctgtccatgtcggccgcccgcagcgagcacgaggtgtcagagatcatcgatggcctctcagagcaggagaacctggagaagcagatgcgccagctggccgtgatcccgcccatgctgtacgacgctgaccagcagcgcatcaagttcatcaacatgaacgggcttatggccgaccccatgaaggtgtacaaagaccgccaggtcatgaacatgtggagtgagcaggagaaggagaccttccgggagaagttcatgcagcatcccaagaactttggcctgatcgcatcattcctggagaggaagacagtggctgagtgcgtcctctattactacctgactaagaagaatgagaactataagagcctggtgagacggagctatcggcgccgcggcaagagccagcagcagcaacaacagcagcagcagcagcagcagcagcagcagcagcagcccatgccccgcagcagccaggaggagaaagatgagaaggagaaggaaaaggaggcggagaaggaggaggagaagccggaggtggagaacgacaaggaagacctcctcaaggagaagacagacgacacctcaggggaggacaacgacgagaaggaggctgtggcctccaaaggccgcaaaactgccaacagccagggaagacgcaaaggccgcatcacccgctcaatggctaatgaggccaacagcgaggaggccatcaccccccagcagagcgccgagctggcctccatggagctgaatgagagttctcgctggacagaagaagaaatggaaacagccaagaaaggtctcctggaacacggccgcaactggtcggccatcgcccggatggtgggctccaagactgtgtcgcagtgtaagaacttctacttcaactacaagaagaggcagaacctcgatgagatcttgcagcagcacaagctgaagatggagaaggagaggaacgcgcggaggaagaagaagaaagcgccggcggcggccagcgaggaggctgcattcccgcccgtggtggaggatgaggagatggaggcgtcgggcgtgagcggaaatgaggaggagatggtggaggaggctgaagccactgtcaacaacagctcagacaccgagagcatcccctctcctcacactgaggccgccaaggacacagggcagaatgggcccaagcccccagccaccctgggcgccgacgggccacccccagggccacccaccccaccaccggaggacatcccggcccccactgagcccaccccggcctctgaagccaccggagcccctacgcccccaccagcacccccatcgccctctgcacctcctcctgtggtccccaaggaggagaaggaggaggagaccgcagcagcgcccccagtggaggagggggaggagcagaagccccccgcggctgaggagctggcagtggacacagggaaggccgaggagcccgtcaagagcgagtgcacggaggaagccgaggaggggccggccaagggcaaggacgcggaggccgctgaggccacggccgagggggcgctcaaggcagagaagaaggagggcgggagcggcagggccaccacagccaagagctcgggcgccccccaggacagcgactccagtgctacctgcagtgcagacgaggtggatgaggccgagggcggcgacaagaaccggctgctgtccccaaggcccagcctcctcaccccgactggcgacccccgggccaatgcctcaccccagaagccactggacctgaagcagctgaagcagcgagcggctgccatcccccccatccaggtcaccaaagtccatgagcccccccgggaggacgcagctcccaccaagccagctcccccagccccaccgccaccgcaaaacctgcagccggagagcgacgcccctcagcagcctggcagcagcccccggggcaagagcaggagcccggcaccccccgccgacaaggaggcagagaagcctgtgttcttcccagccttcgcagccgaggcccagaagctgcctggggaccccccttgctggacttccggcctgcccttccccgtgcccccccgtgaggtgatcaaggcctccccgcatgccccggacccctcagccttctcctacgctccacctggtcacccactgcccctgggcctccatgacactgcccggcccgtcctgccgcgcccacccaccatctccaacccgcctcccctcatctcctctgccaagcaccccagcgtcctcgagaggcaaataggtgccatctcccaaggaatgtcggtccagctccacgtcccgtactcagagcatgccaaggccccggtgggccctgtcaccatggggctgcccctgcccatggaccccaaaaagctggcacccttcagcggagtgaagcaggagcagctgtccccacggggccaggctgggccaccggagagcctgggggtgcccacagcccaggaggcgtccgtgctgagagggacagctctgggctcagttccgggcggaagcatcaccaaaggcattcccagcacacgggtgccctcggacagcgccatcacataccgcggctccatcacccacggcacgccagctgacgtcctgtacaagggcaccatcaccaggatcatcggcgaggacagcccgagtcgcttggaccgcggccgggaggacagcctgcccaagggccacgtcatctacgaaggcaagaagggccacgtcttgtcctatgagggtggcatgtctgtgacccagtgctccaaggaggacggcagaagcagctcaggacccccccatgagacggccgcccccaagcgcacctatgacatgatggagggccgcgtgggcagagccatctcctcagccagcatcgaaggtctcatgggccgtgccatcccgccggagcgacacagcccccaccacctcaaagagcagcaccacatccgcgggtccatcacacaagggatccctcggtcctacgtggaggcacaggaggactacctgcgtcgggaggccaagctcctaaagcgggagggcacgcctccgcccccaccgccctcacgggacctgaccgaggcctacaagacgcaggccctgggccccctgaagctgaagccggcccatgagggcctggtggccacggtgaaggaggcgggccgctccatccatgagatcccgcgcgaggagctgcggcacacgcccgagctgcccctggccccgcggccgctcaaggagggctccatcacgcagggcaccccgctcaagtacgacaccggcgcgtccaccactggctccaaaaagcacgacgtacgctccctcatcggcagccccggccggacgttcccacccgtgcacccgctggatgtgatggccgacgcccgggcactggaacgtgcctgctacgaggagagcctgaagagccggccagggaccgccagcagctcggggggctccattgcgcgcggcgccccggtcattgtgcctgagctgggtaagccgcggcagagccccctgacctatgaggaccacggggcaccctttgccggccacctcccacgaggttcgcccgtgaccacgcgggagcccacgccgcgcctgcaggagggcagcctttcgtccagcaaggcatcccaggaccgaaagctgacgtcgacgcctcgtgagatcgccaagtccccgcacagcaccgtgcccgagcaccacccacaccccatctcgccctatgagcacctgcttcggggcgtgagtggcgtggacctgtatcgcagccacatccccctggccttcgaccccacctccataccccgcggcatccctctggacgcagccgctgcctactacctgccccgacacctggcccccaaccccacctacccgcacctgtacccaccctacctcatccgcggctaccccgacacggcggcgctggagaaccggcagaccatcatcaatgactacatcacctcgcagcagatgcaccacaacgcggccaccgccatggcccagcgagctgatatgctgaggggcctctcgccccgcgagtcctcgctggcactcaactacgctgcgggtccccgaggcatcatcgacctgtcccaagtgccacacctgcctgtgctcgtgcccccgacaccaggcaccccagccaccgccatggaccgccttgcctacctccccaccgcgccccagcccttcagcagccgccacagcagctccccactctccccaggaggtccaacacacttgacaaaaccaaccaccacgtcctcgtccgagcgggagcgagaccgggatcgagagcgggaccgggatcgggagcgggaaaagtccatcctcacgtccaccacgacggtggagcacgcacccatctggagacctggtacagagcagagcagcggcagcagcggcgggggtgggggcagcagcagccgccccgcctcccactcccatgcccaccagcactcgcccatctcccctcggacccaggatgccctccagcagagacccagtgtgcttcacaacacaggcatgaagggtatcatcaccgctgtggagcccagcacgcccacggtcctgaggtccacctccacctcctcacccgttcgcccggctgccacattcccacctgccacccactgcccactgggcggcaccctcgatggggtctaccctaccctcatggagcccgtcttgctgcccaaggaggccccccgggtcgcccggccagagcggccccgagcagacaccggccatgccttcctcgccaagcccccagcccgctccgggctggagcccgcctcctcccccagcaagggctcggagccccggcccctagtgcctcctgtctctggccacgccaccatcgcccgcacccctgcgaagaacctcgcacctcaccacgccagcccggacccgccggcgccacctgcctcggcctcggacccgcaccgggaaaagactcaaagtaaacccttttccatccaggaactggaactccgttctctgggttaccacggcagcagctacagccccgaaggggtggagcccgtcagccctgtgagctcacccagtctgacccacgacaaggggctccccaagcacctggaagagctcgacaagagccacctggagggggagctgcggcccaagcagccaggccccgtgaagcttggcggggaggccgcccacctcccacacctgcggccgctgcctgagagccagccctcgtccagcccgctgctccagaccgccccaggggtcaaaggtcaccagcgggtggtcaccctggcccagcacatcagtgaggtcatcacacaggactacacccggcaccacccacagcagctcagcgcacccctgcccgcccccctctactccttccctggggccagctgccccgtcctggacctccgccgcccacccagtgacctctacctcccgcccccggaccatggtgccccggcccgtggctccccccacagcgaagggggcaagaggtctccagagccaaacaagacgtcggtcttgggtggtggtgaggacggtattgaacctgtgtccccaccggagggcatgacggagccagggcactcccggagtgctgtgtacccgctgctgtaccgggatggggaacagacggagcccagcaggatgggctccaagtctccaggcaacaccagccagccgccagccttcttcagcaagctgaccgagagcaactccgccatggtcaagtccaagaagcaagagatcaacaagaagctgaacacccacaaccggaatgagcctgaatacaatatcagccagcctgggacggagatcttcaatatgcccgccatcaccggaacaggccttatgacctatagaagccaggcggtgcaggaacatgccagcaccaacatggggctggaggccataattagaaaggcactcatgggtaaatatgaccagtgggaagagtccccgccgctcagcgccaatgcttttaaccctctgaatgccagtgccagcctgcccgctgctatgcccataaccgctgctgacggacggagtgaccacacactcacctcgccaggtggcggcgggaaggccaaggtctctggcagacccagcagccgaaaagccaagtccccggccccgggcctggcatctggggaccggccaccctctgtctcctcagtgcactcggagggagactgcaaccgccggacgccgctcaccaaccgcgtgtgggaggacaggccctcgtccgcaggttccacgccattcccctacaaccccctgatcatgcggctgcaggcgggtgtcatggcttccccacccccaccgggcctccccgcgggcagcgggcccctcgctggcccccaccacgcctgggacgaggagcccaagccactgctctgctcgcagtacgagacactctccgacagcgagtgactcagaacagggcgggggggggggcggtgtcaggtcccagcgagccacaggaacggccctgcaggagcagggcggctgccgactcccccaaccaaggaaggagcccctgagtccgcctgcgcctccatccatctgtccgtccagagccggcatccttgcctgtctaaagccttaactaagactcccgccccgggctggccctgtgcagaccttactcaggggatgtttacctggtgctcgggaagggaggggaaggggccggggagggggcacggcaggcgtgtggcagccacacgcaggcggccagggcggccagggacccaaagcaggatgaccacgcacctccacgccactgcctcccccgaatgcatttggaaccaaagtctaaactgagctcgcagcccccgcgccctccctccgcctcccatcccgcttagcgctctggacagatggacgcaggccctgtccagcccccagtgcgctcgttccggtccccacagactgccccagccaacgagattgctggaaaccaagtcaggccaggtgggcggacaaaagggccaggtgcggcctggggggaacggatgctccgaggactggactgtttttttcacacatcgttgccgcagcggtgggaaggaaaggcagatgtaaatgatgtgttggtttacagggtatatttttgataccttcaatgaattaattcagatgttttacgcaaggaaggacttacccagtattactgctgctgtgcttttgatctctgcttaccgttcaagaggcgtgtgcaggccgacagtcggt

SEQ ID NO: 20685 - DNA, 8529 bp, Homo sapiens
  source 1..8529: mol_type = unassigned DNA
catgtcgggatccacacagcctgtggcacagacgtggagggccactgagccccgctacccgccccacagcctttcctacccagtgcagatcgcccggacgcacacggacgtcgggctcctggagtaccagcaccactcccgcgactatgcctcccacctgtcgcccggctccatcatccagccccagcggcggaggccctccctgctgtctgagttccagcccgggaatgaacggtcccaggagctccacctgcggccagagtcccactcatacctgcccgagctggggaagtcagagatggagttcattgaaagcaagcgccctcggctagagctgctgcctgaccccctgctgcgaccgtcacccctgctggccacgggccagcctgcgggatctgaagacctcaccaaggaccgtagcctgacgggcaagctggaaccggtgtctccccccagccccccgcacactgaccctgagctggagctggtgccgccacggctgtccaaggaggagctgatccagaacatggaccgcgtggaccgagagatcaccatggtagagcagcagatctctaagctgaagaagaagcagcaacagctggaggaggaggctgccaagccgcccgagcctgagaagcccgtgtcaccgccgcccatcgagtcgaagcaccgcagcctggtgcagatcatctacgacgagaaccggaagaaggctgaagctgcacatcggattctggaaggcctggggccccaggtggagctgccgctgtacaaccagccctccgacacccggcagtatcatgagaacatcaaaataaaccaggcgatgcggaagaagctaatcttgtacttcaagaggaggaatcacgctcggaaacaatgggagcagaagttctgccagcgctatgaccagctcatggaggcctgggagaagaaggtggagcgcatcgagaacaacccccggcggcgggccaaggagagcaaggtgcgcgagtactacgagaagcagttccctgagatccgcaagcagcgcgagctgcaggagcgcatgcagagcagggtgggccagcggggcagtgggctgtccatgtcggccgcccgcagcgagcacgaggtgtcagagatcatcgatggcctctcagagcaggagaacctggagaagcagatgcgccagctggccgtgatcccgcccatgctgtacgacgctgaccagcagcgcatcaagttcatcaacatgaacgggcttatggccgaccccatgaaggtgtacaaagaccgccaggtcatgaacatgtggagtgagcaggagaaggagaccttccgggagaagttcatgcagcatcccaagaactttggcctgatcgcatcattcctggagaggaagacagtggctgagtgcgtcctctattactacctgactaagaagaatgagaactataagagcctggtgagacggagctatcggcgccgcggcaagagccagcagcagcaacaacagcagcagcagcagcagcagcagcagcagcagcagcccatgccccgcagcagccaggaggagaaagatgagaaggagaaggaaaaggaggcggagaaggaggaggagaagccggaggtggagaacgacaaggaagacctcctcaaggagaagacagacgacacctcaggggaggacaacgacgagaaggaggctgtggcctccaaaggccgcaaaactgccaacagccagggaagacgcaaaggccgcatcacccgctcaatggctaatgaggccaacagcgaggaggccatcaccccccagcagagcgccgagctggcctccatggagctgaatgagagttctcgctggacagaagaagaaatggaaacagccaagaaaggtctcctggaacacggccgcaactggtcggccatcgcccggatggtgggctccaagactgtgtcgcagtgtaagaacttctacttcaactacaagaagaggcagaacctcgatgagatcttgcagcagcacaagctgaagatggagaaggagaggaacgcgcggaggaagaagaagaaagcgccggcggcggccagcgaggaggctgcattcccgcccgtggtggaggatgaggagatggaggcgtcgggcgtgagcggaaatgaggaggagatggtggaggaggctgaagccttacatgcctctgggaatgaggtgcccagaggggaatgcagtggcccagccactgtcaacaacagctcagacaccgagagcatcccctctcctcacactgaggccgccaaggacacagggcagaatgggcccaagcccccagccaccctgggcgccgacgggccacccccagggccacccaccccaccacggaggacatcccggcccactgagcccaccccggcctctgaagccaccggagcccctacgcccccaccagcacccccatcgccctctgcacctcctcctgtggtccccaaggaggagaaggaggaggagaccgcagcagcgcccccagtggaggagggggaggagcagaagccccccgcggctgaggagctggcagtggacacagggaaggccgaggagcccgtcaagagcgagtgcacggaggaagccgaggaggggccggccaagggcaaggacgcggaggccgctgaggccacggccgagggggcgctcaaggcagagaagaaggagggcgggagcggcagggccaccacagccaagagctcgggcgccccccaggacagcgactccagtgctacctgcagtgcagacgaggtggatgaggccgagggcggcgacaagaaccggctgctgtccccaaggcccagcctcctcaccccgactggcgacccccgggccaatgcctcaccccagaagccactggacctgaagcagctgaagcagcgagcggctgccatcccccccatccaggtcaccaaagtccatgagcccccccgggaggacgcagctcccaccaagccagctcccccagccccaccgccaccgcaaaacctgcagccggagagcgacgcccctcagcagcctggcagcagcccccggggcaagagcaggagcccggcaccccccgccgacaaggaggccttcgcagccgaggcccagaagctgcctggggaccccccttgctggacttccggcctgcccttccccgtgcccccccgtgaggtgatcaaggcctccccgcatgccccggacccctcagccttctcctacgctccacctggtcacccactgcccctgggcctccatgacactgcccggcccgtcctgccgcgcccacccaccatctccaacccgcctcccctcatctcctctgccaagcaccccagcgtcctcgagaggcaaataggtgccatctcccaaggaatgtcggtccagctccacgtcccgtactcagagcatgccaaggccccggtgggccctgtcaccatggggctgcccctgcccatggaccccaaaaagctggcacccttcagcggagtgaagcaggagcagctgtccccacggggccaggctgggccaccggagagcctgggggtgcccacagcccaggaggcgtccgtgctgagagggacagctctgggctcagttccgggcggaagcatcaccaaaggcattcccagcacacgggtgccctcggacagcgccatcacataccgcggctccatcacccacggcacgccagctgacgtcctgtacaagggcaccatcaccaggatcatcggcgaggacagcccgagtcgcttggaccgcggccgggaggacagcctgcccaagggccacgtcatctacgaaggcaagaagggccacgtcttgtcctatgagggtggcatgtctgtgacccagtgctccaaggaggacggcagaagcagctcaggacccccccatgagacggccgcccccaagcgcacctatgacatgatggagggccgcgtgggcagagccatctcctcagccagcatcgaaggtctcatgggccgtgccatcccgccggagcgacacagcccccaccacctcaaagagcagcaccacatccgcgggtccatcacacaagggatccctcggtcctacgtggaggcacaggaggactacctgcgtcgggaggccaagctcctaaagcgggagggcacgcctccgcccccaccgccctcacgggacctgaccgaggcctacaagacgcaggccctgggccccctgaagctgaagccggcccatgagggcctggtggccacggtgaaggaggcgggccgctccatccatgagatcccgcgcgaggagctgcggcacacgcccgagctgcccctggccccgcggccgctcaaggagggctccatcacgcagggcaccccgctcaagtacgacaccggcgcgtccaccactggctccaaaaagcacgacgtacgctccctcatcggcagccccggccggacgttcccacccgtgcacccgctggatgtgatggccgacgcccgggcactggaacgtgcctgctacgaggagagcctgaagagccggccagggaccgccagcagctcggggggctccattgcgcgcggcgccccggtcattgtgcctgagctgggtaagccgcggcagagccccctgacctatgaggaccacggggcaccctttgccggccacctcccacgaggttcgcccgtgaccacgcgggagcccacgccgcgcctgcaggagggcagcctttcgtccagcaaggcatcccaggaccgaaagctgacgtcgacgcctcgtgagatcgccaagtccccgcacagcaccgtgcccgagcaccacccacaccccatctcgccctatgagcacctgcttcggggcgtgagtggcgtggacctgtatcgcagccacatccccctggccttcgaccccacctccataccccgcggcatccctctggacgcagccgctgcctactacctgccccgacacctggcccccaaccccacctacccgcacctgtacccaccctacctcatccgcggctaccccgacacggcggcgctggagaaccggcagaccatcatcaatgactacatcacctcgcagcagatgcaccacaacgcggccaccgccatggcccagcgagctgatatgctgaggggcctctcgccccgcgagtcctcgctggcactcaactacgctgcgggtccccgaggcatcatcgacctgtcccaagtgccacacctgcctgtgctcgtgcccccgacaccaggcaccccagccaccgccatggaccgccttgcctacctccccaccgcgccccagcccttcagcagccgccacagcagctccccactctccccaggaggtccaacacacttgacaaaaccaaccaccacgtcctcgtccgagcgggagcgagaccgggatcgagagcgggaccgggatcgggagcgggaaaagtccatcctcacgtccaccacgacggtggagcacgcacccatctggagacctggtacagagcagagcagcggcagcagcggcgggggtgggggcagcagcagccgccccgcctcccactcccatgcccaccagcactcgcccatctcccctcggacccaggatgccctccagcagagacccagtgtgcttcacaacacaggcatgaagggtatcatcaccgctgtggagcccagcacgcccacggtcctgaggtccacctccacctcctcacccgttcgcccggctgccacattcccacctgccacccactgcccactgggcggcaccctcgatggggtctaccctaccctcatggagcccgtcttgctgcccaaggaggccccccgggtcgcccggccagagcggccccgagcagacaccggccatgccttcctcgccaagcccccagcccgctccgggctggagcccgcctcctcccccagcaagggctcggagccccggcccctagtgcctcctgtctctggccacgccaccatcgcccgcacccctgcgaagaacctcgcacctcaccacgccagcccggacccgccggcgccacctgcctcggcctcggacccgcaccgggaaaagactcaaagtaaacccttttccatccaggaactggaactccgttctctgggttaccacggcagcagctacagccccgaaggggtggagcccgtcagccctgtgagctcacccagtctgacccacgacaaggggctccccaagcacctggaagagctcgacaagagccacctggagggggagctgcggcccaagcagccaggccccgtgaagcttggcggggaggccgcccacctcccacacctgcggccgctgcctgagagccagccctcgtccagcccgctgctccagaccgccccaggggtcaaaggtcaccagcgggtggtcaccctggcccagcacatcagtgaggtcatcacacaggactacacccggcaccacccacagcagctcagcgcacccctgcccgcccccctctactccttccctggggccagctgccccgtcctggacctccgccgcccacccagtgacctctacctcccgcccccggaccatggtgccccggcccgtggctccccccacagcgaagggggcaagaggtctccagagccaaacaagacgtcggtcttgggtggtggtgaggacggtattgaacctgtgtccccaccggagggcatgacggagccagggcactcccggagtgctgtgtacccgctgctgtaccgggatggggaacagacggagcccagcaggatgggctccaagtctccaggcaacaccagccagccgccagccttcttcagcaagctgaccgagagcaactccgccatggtcaagtccaagaagcaagagatcaacaagaagctgaacacccacaaccggaatgagcctgaatacaatatcagccagcctgggacggagatcttcaatatgcccgccatcaccggaacaggccttatgacctatagaagccaggcggtgcaggaacatgccagcaccaacatggggctggaggccataattagaaaggcactcatgggtaaatatgaccagtgggaagagtccccgccgctcagcgccaatgcttttaaccctctgaatgccagtgccagcctgcccgctgctatgcccataaccgctgctgacggacggagtgaccacacactcacctcgccaggtggcggcgggaaggccaaggtctctggcagacccagcagccgaaaagccaagtccccggccccgggcctggcatctggggaccggccaccctctgtctcctcagtgcactcggagggagactgcaaccgccggacgccgctcaccaaccgcgtgtgggaggacaggccctcgtccgcaggttccacgccattcccctacaaccccctgatcatgcggctgcaggcgggtgtcatggcttccccacccccaccgggcctccccgcgggcagcgggcccctcgctggcccccaccacgcctgggacgaggagcccaagccactgctctgctcgcagtacgagacactctccgacagcgagtgactcagaacagggcgggggggggggcggtgtcaggtcccagcgagccacaggaacggccctgcaggagcagggcggctgccgactcccccaaccaaggaaggagcccctgagtccgcctgcgcctccatccatctgtccgtccagagccggcatccttgcctgtctaaagccttaactaagactcccgccccgggctggccctgtgcagaccttactcaggggatgtttacctggtgctcgggaagggaggggaaggggccggggagggggcacggcaggcgtgtggcagccacacgcaggcggccagggcggccagggacccaaagcaggatgaccacgcacctccacgccactgcctcccccgaatgcatttggaaccaaagtctaaactgagctcgcagcccccgcgccctccctccgcctcccatcccgcttagcgctctggacagatggacgcaggccctgtccagcccccagtgcgctcgttccggtccccacagactgccccagccaacgagattgctggaaaccaagtcaggccaggtgggcggacaaaagggccaggtgcggcctggggggaacggatgctccgaggactggactgtttttttcacacatcgttgccgcagcggtgggaaggaaaggcagatgtaaatgatgtgttggtttacagggtatatttttgataccttcaatgaattaattcagatgttttacgcaaggaaggacttacccagtattactgctgctgtgcttttgatctctgcttaccgttcaagaggcgtgtgcaggccgacagtcggtgaccccatcactcgcaggaccaagggggcggggactgctggctcacgccccgctgtgtcctccctccctcccttccttgggcagaatgaattcgatgcgtattctgtggccgccatctgcgcagggtggtggtattctgtcatttacacacgtcgttctaattaaaaagcgaattatactcc

SEQ ID NO: 20686 - DNA, 2807 bp, Homo sapiens
  source 1..2807: mol_type = unassigned DNA
ttacagtcaggagccacccactgcccactgggcggcaccctcgatggggtctaccctaccctcatggagcccgtcttgctgcccaaggaggccccccgggtcgcccggccagagcggccccgagcagacaccggccatgccttcctcgccaagcccccagcccgctccgggctggagcccgcctcctcccccagcaagggctcggagccccggcccctagtgcctcctgtctctggccacgccaccatcgcccgcacccctgcgaagaacctcgcacctcaccacgccagcccggacccgccggcgccacctgcctcggcctcggacccgcaccgggaaaagactcaaagtaaacccttttccatccaggaactggaactccgttctctgggttaccacggcagcagctacagccccgaaggggtggagcccgtcagccctgtgagctcacccagtctgacccacgacaaggggctccccaagcacctggaagagctcgacaagagccacctggagggggagctgcggcccaagcagccaggccccgtgaagcttggcggggaggccgcccacctcccacacctgcggccgctgcctgagagccagccctcgtccagcccgctgctccagaccgccccaggggtcaaaggtcaccagcgggtggtcaccctggcccagcacatcagtgaggtcatcacacaggactacacccggcaccacccacagcagctcagcgcacccctgcccgcccccctctactccttccctggggccagctgccccgtcctggacctccgccgcccacccagtgacctctacctcccgcccccggaccatggtgccccggcccgtggctccccccacagcgaagggggcaagaggtctccagagccaaacaagacgtcggtcttgggtggtggtgaggacggtattgaacctgtgtccccaccggagggcatgacggagccagggcactcccggagtgctgtgtacccgctgctgtaccgggatggggaacagacggagcccagcaggatgggctccaagtctccaggcaacaccagccagccgccagccttcttcagcaagctgaccgagagcaactccgccatggtcaagtccaagaagcaagagatcaacaagaagctgaacacccacaaccggaatgagcctgaatacaatatcagccagcctgggacggagatcttcaatatgcccgccatcaccggaacaggccttatgacctatagaagccaggcggtgcaggaacatgccagcaccaacatggggctggaggccataattagaaaggcactcatgggtaaatatgaccagtgggaagagtccccgccgctcagcgccaatgcttttaaccctctgaatgccagtgccagcctgcccgctgctatgcccataaccgctgctgacggacggagtgaccacacactcacctcgccaggtggcggcgggaaggccaaggtctctggcagacccagcagccgaaaagccaagtccccggccccgggcctggcatctggggaccggccaccctctgtctcctcagtgcactcggagggagactgcaaccgccggacgccgctcaccaaccgcgtgtgggaggacaggccctcgtccgcaggttccacgccattcccctacaaccccctgatcatgcggctgcaggcgggtgtcatggcttccccacccccaccgggcctccccgcgggcagcgggcccctcgctggcccccaccacgcctgggacgaggagcccaagccactgctctgctcgcagtacgagacactctccgacagcgagtgactcagaacagggcgggggggggggcggtgtcaggtcccagcgagccacaggaacggccctgcaggagcagggcggctgccgactcccccaaccaaggaaggagcccctgagtccgcctgcgcctccatccatctgtccgtccagagccggcatccttgcctgtctaaagccttaactaagactcccgccccgggctggccctgtgcagaccttactcaggggatgtttacctggtgctcgggaagggaggggaaggggccggggagggggcacggcaggcgtgtggcagccacacgcaggcggccagggcggccagggacccaaagcaggatgaccacgcacctccacgccactgcctcccccgaatgcatttggaaccaaagtctaaactgagctcgcagcccccgcgccctccctccgcctcccatcccgcttagcgctctggacagatggacgcaggccctgtccagcccccagtgcgctcgttccggtccccacagactgccccagccaacgagattgctggaaaccaagtcaggccaggtgggcggacaaaagggccaggtgcggcctggggggaacggatgctccgaggactggactgtttttttcacacatcgttgccgcagcggtgggaaggaaaggcagatgtaaatgatgtgttggtttacagggtatatttttgataccttcaatgaattaattcagatgttttacgcaaggaaggacttacccagtattactgctgctgtgcttttgatctctgcttaccgttcaagaggcgtgtgcaggccgacagtcggtgaccccatcactcgcaggaccaagggggcggggactgctggctcacgccccgctgtgtcctccctccctcccttccttgggcagaatgaattcgatgcgtattctgtggccgccatctgcgcagggtggtggtattctgtcatttacacacgtcgttctaattaaaaagcgaattatactcc

SEQ ID NO: 20687 - DNA, 3809 bp, Homo sapiens
  source 1..3809: mol_type = unassigned DNA
gcgacgtcacgctcggctataaaaggcgcggctcggggcccttgcggcgctggaggagctcgaggctgaggctgccggggggctgtgggctaccgggccgccggcgcctcagcgatgttttactcagggctcctcactgagggcggccgcaaggagaccgacatgcgggaggcggcgtcactgcgacagcagcgccggatgaagcaggcggtgcagttcatccacaaggactccgccgacctgctgcccctggacggcctcaagaagctgggctcgtccaaggacatgcaacctcataatattctgcagaggcgcctcatggaaaccaacctgtctaagctccgaagcggtccccgtgtcccttgggcctctaagacgaacaaactcaatcaggctaagtctgaggggctaaagaagtctgaggaggatgacatgattttggtttcttgccagtgtgctggaaaggatgtgaaagccttggttgacacaggctgcctatataatctcatctctttggcctgtgtggacagattgggactcaaggagcatgtcaaatcccacaagcatgaaggagaaaagctttctctaccccggcatctcaaagtagtgggccagattgagcacctagtgatcacactgggctccctccgcctggactgcccagcagctgtggttgatgacaatgagaaaaacttgtcccttggtctacagactctccgatctctgaagtgcatcataaacttggataagcaccggctgatcatggggaagacagacaaggaagaaatcccttttgtggagacagtctctttgaatgaagacaacacttcagaagcataactacagcctgcagcatgtctgcacgtgtgcatgcatacacaccgggttgacagatagagaaaactgggtttgaaccaaatgccgtagtgacttgctgtggaccaagtccttccatctaatagaagctccaggggctccttcccattcagacctctctagactatagtctatgcttagagatcttgtctggttatggccattgttttttactactttgatcacttaacttatagaccttttttgacactgccagtctcacttgtggcctatttctctgcttcttccaggaatttgcttttattagtcaagtataggggctgccaggttctgtgtctccatagatatatgtgcttcttttcctatagctaaatgtataataaacaggaacctgacctttacctcctttcagctgtttcaaacaggtgccaggatacctatgtcttagaattagagtttcttcaaattgattcattgatttctcaagtatggattatgtgaaagagcccagggacattatccattacagtttaactctttcatttaaaggtccagagaggcaagtgaattgtctaagttcatatattaggtcagtgactgaagggaccaagaacgcagacctgatttccaagccaagactcccatgctgcctcatttgtattcaagcctttaacaggagggcaaagaggtgagaatgtgttaaaaaaaaaaaaaaaaaggcagagcatgggaggaatattctctggagatggatgctaggatgatttgggtagctctccctcctgtgtgccaagcccagtaaaagttccttgccccaaactgtcacatttaggccctcatcttggtgcctaaaaacgagcgtacaaagatgaatgaaatggtttctcactgtgaacctcttggaggaaaggaggaaccacagacagaggaatattaatccctctctgatatggaattgaaggcttaagtaaatcagagtgtcactgtcagacgttgattactcccaagatccgatcagcatttctgcccatcctattatgtgtctgtcaaggactgaagtagctggaaaccaggagtagagaaagatggggggaaaaaaagagcaaggccagaatagaagggagtagactgagtagaatcagttggtggagaggcctatctagataaacctttctgggaggcagggaatgacattttcaggcagggaattgagatgttcagttctgtcctgatacaaggaaagaggcagagcaggagccggcaatgttaaggacaactttttataactgcccagtatttcctgacccctgtcaaaggttggggagaatacaaggtttcttgaagctttttgactggggtgtcacattaggcacacaggtgtctataatggaatctccccttcagtttggtcatagaagtgcttggacaagtcagaaaaatagctagctgtgggtatccctttaagatattcccaagtctaccctgtgtcatagcagtagttctcagagtgtttgtttaaaggatcccactttgaactttgccaagtactaccaactaccttgtctggtgttcagcaactgcccctactgaacagccctttggaactctgaatgatttgggcctcacagaagctccctaaagcctaggaacttggtgactatcatttgaacaactaggcagccatactgcagtcagttgtcatggggtcattccctaggcccccttcctatcagcctctacctaaagaagctagataggaagctaagcacagccatggttgggaggctatatctaaagctcatgaggggtgatcccggggttaccagccttcagcactccctctagcaacaccccattctcttacctagcggggatttgtacctttccactgaggcctctccatgctccttccctacctttcatggcaatactttggcctgcctcttatcctggtactaagttgaagtaaagctcaccctttacttccctacttgaaagttctactctgagccttgactcttagccacagtgaggcatgttgaaggttcctgctggtttattctttttttttttttttttttagacagagtctcactctgttgcccaggctggagtgcagtggcacgatctcggttcactgcaagctccgcctcccgggttcatgccattctcctgcctcagcctcccaagtagctgggactacaggcacctgccaccacgcctggctaattttttgtatttttagtagagacgggtttcaccgtgttagctaggatggtctcgatctcctgaccttgtggtccgcccacctcagcctcccaaagtgctgggattacaggcgtgagccaccgcacccggccttcattcactttctttaaatgcctccaagttgattattctcctagctcatatctccttgatgtgcatgagggagcactgggtctaatttttgggggctgagaaggtaagaaggtgaggtcagtttttcccaggagtcctaaaaaattctggtaccttacattgagggtgtgggagaaagggtgtcatagttctgaaaataggcagtagcatgaagcaccagacctgtctcattccttattagatgtctatctcaaataacagagtttgaaaaatattggttttatcatttgatatttccatgcctgactcgggaaaataacattttctgacttctttctattttcttgccctgcacagaccctacctggtacaattttctatttcttagctcaaagtgtctatacaatgggttgcctggtatgtcagctgccctcactcttgtgtaatagaaatatattgccaggctggggacgtggaggagacgaactggattcctccctcctcctgttgccaggcctctctgcattggcactttatcctttcagtgtttctggctgtgttgggttcatttgtgagactgatgtaacaataaagtgaaatcttcccctctg

SEQ ID NO: 20688 - DNA, 1156 bp, Homo sapiens
  source 1..1156: mol_type = unassigned DNA
ctggaagtgagagcagatccctaaccatgagcaccagccaaccaggggcctgcccatgccagggagctgcaagccgccccgccattctctacgcacttctgagctccagcctcaaggctgtcccccgaccccgtagccgctgcctatgtaggcagcaccggcccgtccagctatgtgcacctcatcgcacctgccgggaggccttggatgttctggccaagacagtggccttcctcaggaacctgccatccttctggcagctgcctccccaggaccagcggcggctgctgcagggttgctggggccccctcttcctgcttgggttggcccaagatgctgtgacctttgaggtggctgaggccccggtgcccagcatactcaagaagattctgctggaggagcccagcagcagtggaggcagtggccaactgccagacagaccccagccctccctggctgcggtgcagtggcttcaatgctgtctggagtccttctggagcctggagcttagccccaaggaatatgcctgcctgaaagggaccatcctcttcaaccccgatgtgccaggcctccaagccgcctcccacattgggcacctgcagcaggaggctcactgggtgctgtgtgaagtcctggaaccctggtgcccagcagcccaaggccgcctgacccgtgtcctcctcacggcctccaccctcaagtccattccgaccagcctgcttggggacctcttctttcgccctatcattggagatgttgacatcgctggccttcttggggacatgcttttgctcaggtgacctgttccagcccaggcagagatcaggtgggcagaggctggcagtgctgattcagcctggccatccccagaggtgacccaatgctcctggagggggcaagcctgtatagacagcacttggctccttaggaacagctcttcactcagccacaccccacattggacttccttggtttggacacagtgttccagctgcctgggaggcttttggtggtccccacagcctctgggccaagactcctgtcccttcttgggatgagaatgaaagcttaggctgcttattggaccagaagtcctatcgactttatacagaactgaattaagttattgatttttgtaataaaaggtatgaaacac

SEQ ID NO: 20689 - DNA, 2772 bp, Homo sapiens
  source 1..2772: mol_type = unassigned DNA
gggcacgaggcgctccctgggatcacatggtacctgctccagtgccgcgtgcggcccgggaaccctgggctgctggcgcctgcgcagagccctctgtcccagggaaaggctcgggcaaaaggcggctgagattggcagagtgaaatattactgccgagggaacgtagcagggcacacgtctcgcctctttgcgactcggtgccccgtttctccccatcacctacttacttcctggttgcaacctctcttcctctgggacttttgcaccgggagctccagattcgccaccccgcagcgctgcggagccggcaggcagaggcaccccgtacactgcagagacccgaccctccttgctaccttctagccagaactactgcaggctgattccccctacacactctctctgctcttcccatgcaaagcagaactccgttgcctcaacgtccaacccttctgcagggctgcagtccggccaccccaagaccttgctgcagggtgcttcggatcctgatcgtgagtcgcggggtccactccccgcccttagccagtgcccagggggcaacagcggcgatcgcaacctctagtttgagtcaaggtccagtttgaatgaccgctctcagctggtgaagacatgacgaccctggactccaacaacaacacaggtggcgtcatcacctacattggctccagtggctcctccccaagccgcaccagccctgaatccctctatagtgacaactccaatggcagcttccagtccctgacccaaggctgtcccacctacttcccaccatcccccactggctccctcacccaagacccggctcgctcctttgggagcattccacccagcctgagtgatgacggctccccttcttcctcatcttcctcgtcgtcatcctcctcctccttctataatgggagcccccctgggagtctacaagtggccatggaggacagcagccgagtgtcccccagcaagagcaccagcaacatcaccaagctgaatggcatggtgttactgtgtaaagtgtgtggggacgttgcctcgggcttccactacggtgtgcacgcctgcgagggctgcaagggctttttccgtcggagcatccagcagaacatccagtacaaaaggtgtctgaagaatgagaattgctccatcgtccgcatcaatcgcaaccgctgccagcaatgtcgcttcaagaagtgtctctctgtgggcatgtctcgagacgctgtgcgttttgggcgcatccccaaacgagagaagcagcggatgcttgctgagatgcagagtgccatgaacctggccaacaaccagttgagcagccagtgcccgctggagacttcacccacccagcaccccaccccaggccccatgggcccctcgccaccccctgctccggtcccctcacccctggtgggcttctcccagtttccacaacagctgacgcctcccagatccccaagccctgagcccacagtggaggatgtgatatcccaggtggcccgggcccatcgagagatcttcacctacgcccatgacaagctgggcagctcacctggcaacttcaatgccaaccatgcatcaggtagccctccagccaccaccccacatcgctgggaaaatcagggctgcccacctgcccccaatgacaacaacaccttggctgcccagcgtcataacgaggccctaaatggtctgcgccaggctccctcctcctaccctcccacctggcctcctggccctgcacaccacagctgccaccagtccaacagcaacgggcaccgtctatgccccacccacgtgtatgcagccccagaaggcaaggcacctgccaacagtccccggcagggcaactcaaagaatgttctgctggcatgtcctatgaacatgtacccgcatggacgcagtgggcgaacggtgcaggagatctgggaggatttctccatgagcttcacgcccgctgtgcgggaggtggtagagtttgccaaacacatcccgggcttccgtgacctttctcagcatgaccaagtcaccctgcttaaggctggcacctttgaggtgctgatggtgcgctttgcttcgttgttcaacgtgaaggaccagacagtgatgttcctaagccgcaccacctacagcctgcaggagcttggtgccatgggcatgggagacctgctcagtgccatgttcgacttcagcgagaagctcaactccctggcgcttaccgaggaggagctgggcctcttcaccgcggtggtgcttgtctctgcagaccgctcgggcatggagaattccgcttcggtggagcagctccaggagacgctgctgcgggctcttcgggctctggtgctgaagaaccggcccttggagacttcccgcttcaccaagctgctgctcaagctgccggacctgcggaccctgaacaacatgcattccgagaagctgctgtccttccgggtggacgcccagtgacccgcccggccggccttctgccgctgcccccttgtacagaatcgaactctgcacttctctctcctttacgagacgaaaaggaaaagcaaaccagaatcttatttatattgttataaaatattccaagatgagcctctggccccctgagccttcttgtaaatacctgcctccctcccccatcaccgaacttcccctcctcccctatttaaaccactctgtctcccccacaaccctcccctggccctctgatttgttctgttcctgtctcaaatccaatagttcacagctgagctggc

SEQ ID NO: 20690 - DNA, 2066 bp, Homo sapiens
  source 1..2066: mol_type = unassigned DNA
aagtttcacgctccgcccctcttccggacgtgacgcaagggcggggttgccggaagaagtggcgaagttacttttgagggtatttgagtagcggcggtgtgtcaggggctaaagaggaggacgaagaaaagcagagcaagggaacccagggcaacaggagtagttcactccgcgagaggccgtccacgagacccccgcgcgcagccatgagccccgccccccgctgttgcttggagaggggcgggacctggagagaggctgctccgtgaccccaccatgtcctctcctaccacgagttccctggatacccccctgcctggaaatggcccccctcagcctggcgccccttcttcttcacccactgtaaaggaggagggtccggagccgtggcccgggggtccggaccctgatgtcccaggcactgatgaggccagctcagcctgcagcacagactgggtcatcccagatcccgaagaggaaccagagcgcaagcgaaagaagggcccagccccgaagatgctgggccacgagctttgccgtgtctgtggggacaaggcctccggcttccactacaacgtgctcagctgcgaaggctgcaagggcttcttccggcgcagtgtggtccgtggtggggccaggcgctatgcctgccggggtggcggaacctgccagatggacgctttcatgcggcgcaagtgccagcagtgccggctgcgcaagtgcaaggaggcagggatgagggagcagtgcgtcctttctgaagaacagatccggaagaagaagattcggaaacagcagcaggagtcacagtcacagtcgcagtcacctgtggggccgcagggcagcagcagctcagcctctgggcctggggcttcccctggtggatctgaggcaggcagccagggctccggggaaggcgagggtgtccagctaacagcggctcaagaactaatgatccagcagttggtggcggcccaactgcagtgcaacaaacgctccttctccgaccagcccaaagtcacgccctggcccctgggcgcagacccccagtcccgagatgcccgccagcaacgctttgcccacttcacggagctggccatcatctcagtccaggagatcgtggacttcgctaagcaagtgcctggtttcctgcagctgggccgggaggaccagatcgccctcctgaaggcatccactatcgagatcatgctgctagagacagccaggcgctacaaccacgagacagagtgtatcaccttcttgaaggacttcacctacagcaaggacgacttccaccgtgcaggcctgcaggtggagttcatcaaccccatcttcgagttctcgcgggccatgcggcggctgggcctggacgacgctgagtacgccctgctcatcgccatcaacatcttctcggccgaccggcccaacgtgcaggagccgggccgcgtggaggcgttgcagcagccctacgtggaggcgctgctgtcctacacgcgcatcaagaggccgcaggaccagctgcgcttcccgcgcatgctcatgaagctggtgagcctgcgcacgctgagctctgtgcactcggagcaggtcttcgccttgcggctccaggacaagaagctgccgcctctgctgtcggagatctgggacgtccacgagtgaggggctggccacccagccccacagccttgcctgaccaccctccagcagatagacgccggcaccccttcctcttcctagggtggaaggggccctgggccgagcctgtagacctatcggctctcatcccttgggataagccccagtccaggtccaggaggctccctccctgcccagcgagtcttccagaaggggtgaaagggttgcaggtcccgaccactgacccttcccggctgccctccctccccagcttacacctcaagcccagcacgcagtgcaccttgaacagagggaggggaggacccatggctctcccccctagcccgggagaccagggccttcctcttcctctgcttttatttaataaaaactaaaaacagaaacaggaaaataaaatatgaatacaatcc

SEQ ID NO: 20691 - DNA, 1952 bp, Homo sapiens
  source 1..1952: mol_type = unassigned DNA
ggcgaagttacttttgagggtatttgagtagcggcggtgtgtcaggggctaaagaggaggacgaagaaaagcagagcaagggaacccagggcaacaggagtagttcactccgcgagaggccgtccacgagacccccgcgcgcagccatgagccccgccccccgctgttgcttggagaggggcgggacctggagagaggctgctccgtgaccccaccatgtcctctcctaccacgagttccctggatacccccctgcctggaaatggcccccctcagcctggcgccccttcttcttcacccactgtaaaggaggagggtccggagccgtggcccgggggtccggaccctgatgtcccaggcactgatgaggccagctcagcctgcagcacagactgggtcatcccagatcccgaagaggaaccagagcgcaagcgaaagaagggcccagccccgaagatgctgggccacgagctttgccgtgtctgtggggacaaggcctccggcttccactacaacgtgctcagctgcgaaggctgcaagggcttcttccggcgcagtgtggtccgtggtggggccaggcgctatgcctgccggggtggcggaacctgccagatggacgctttcatgcggcgcaagtgccagcagtgccggctgcgcaagtgcaaggaggcagggatgagggagcagtgcgtcctttctgaagaacagatccggaagaagaagattcggaaacagcagcaggagtcacagtcacagtcgcagtcacctgtggggccgcagggcagcagcagctcagcctctgggcctggggcttcccctggtggatctgaggcaggcagccagggctccggggaaggcgagggtgtccagctaacagcggctcaagaactaatgatccagcagttggtggcggcccaactgcagtgcaacaaacgctccttctccgaccagcccaaagtcacgccctggcccctgggcgcagacccccagtcccgagatgcccgccagcaacgctttgcccacttcacggagctggccatcatctcagtccaggagatcgtggacttcgctaagcaagtgcctggtttcctgcagctgggccgggaggaccagatcgccctcctgaaggcatccactatcgagatcatgctgctagagacagccaggcgctacaaccacgagacagagtgtatcaccttcttgaaggacttcacctacagcaaggacgacttccaccgtgcaggcctgcaggtggagttcatcaaccccatcttcgagttctcgcgggccatgcggcggctgggcctggacgacgctgagtacgccctgctcatcgccatcaacatcttctcggccgaccggcccaacggagccgggccgcgtggaggcgttgcagcagccctacgtggaggcgctgctgtcctacacgcgcatcaagaggccgcagaccagctgcgcttcccgcgcatgctcatgaagctggtgagcctgcgcacgctgagctctgtgcactcggagcaggtcttcgccttgcggctccaggacaagaagctgccgcctctgctgtcggagatctgggacgtccacgagtgaggggctggccacccagccccacagccttgcctgaccaccctccagcagatagacgccggcaccccttcctcttcctagggtggaaggggccctgggccgagcctgtagacctatcggctctcatcccttgggataagccccagtccaggtccaggaggctccctccctgcccagcgagtcttccagaaggggtgaaagggttgcaggtcccgaccactgacccttcccggctgccctccctccccagcttacacctcaagcccagcacgcagtgcaccttgaacagagggaggggaggacccatggctctcccccctagcccgggagaccagggccttcctcttcctctgcttttattt

SEQ ID NO: 20692 - DNA, 1466 bp, Homo sapiens
  source 1..1466: mol_type = unassigned DNA
gacgcaagggcggggttgccggaagaagtggcgaagttacttttgagggtatttgagtagcggcggtgtgtcaggggctaaagaggaggacgaagaaaagcagagcaagggaacccagggcaacaggagtagttcactccgcgagaggccgtccacgagacccccgcgcgcagccatgagccccgccccccgctgttgcttggagaggggcgggacctggagagaggctgctccgtgaccccaccatgtcctctcctaccacgagttccctggatacccccctgcctggaaatggcccccctcagcctggcgccccttcttcttcacccactgtaaaggaggagggtccggagccgtggcccgggggtccggaccctgatgtcccaggcactgatgaggccagctcagcctgcagcacagactggggcgtcctttctgaagaacagatccggaagaagaagattcggaaacagcagcaggagtcacagtcacagtcgcagtcacctgtggggccgcagggcagcagcagctcagcctctgggcctggggcttcccctggtggatctgaggcaggcagccagggctccggggaaggcgagggtgtccagctaacagcggctcaagaactaatgatccagcagttggtggcggcccaactgcagtgcaacaaacgctccttctccgaccagcccaaagtcacgccctggcccctgggcgcagacccccagtcccgagatgcccgccagcaacgctttgcccacttcacggagctggccatcatctcagtccaggagatcgtggacttcgctaagcaagtgcctggtttcctgcagctgggccgggaggaccagatcgccctcctgaaggcatccactatcgagatcatgctgctagagacagccaggcgctacaaccacgagacagagtgtatcaccttcttgaaggacttcacctacagcaaggacgacttccaccgtgcaggcctgcaggtggagttcatcaaccccatcttcgagttctcgcgggccatgcggcggctgggcctggacgacgctgagtacgccctgctcatcgccatcaacatcttctcggccgaccggcccaacgtgcaggagccgggccgcgtggaggcgttgcagcagccctacgtggaggcgctgctgtcctacacgcgcatcaagaggccgcaggaccagctgcgcttcccgcgcatgctcatgaagctggtgagcctgcgcacgctgagctctgtgcactcggagcaggtcttcgccttgcggctccaggacaagaagctgccgcctctgctgtcggagatctgggacgtccacgagtgaggggctggccacccagccccacagccttgcctgaccaccctccagcagatagacgccggcaccccttcctcttcctagggtggaaggggccctgggccgagcctgtagacctatcggctctcatccctt

SEQ ID NO: 20693 - DNA, 2362 bp, Homo sapiens
  source 1..2362: mol_type = unassigned DNA
agatgagactgcatggggcgggaactagagatggaggactttcccgcgcaagggggacaggctggactgaaagaggacacgggaagaacaaagacttagactcgaagccctcggatggtggcccttgcatgcttcagttcatgatgttggagactatttccccacccttgcggaaaaaccttctctctgtgccatgcagctactgccagggatggaggatggcgggaattggcaactaaagactgtcctcctaccctcttcagtgtgtccttcagcaatatgaagttaaaaccagtcttgctctgtccccaggctggagtgcagtggcacgatcttggctcactgcaacctccgcctcacgggttccagcgattctcctgcctcagtctcctgagtagctgggactacaggctcagagaagcgcatgaatgagctaaagccacaaagcgcggggctggaggtttggctcccaagaagcgaggaaatgggttcggaactcttctgccaagtcccagtagatctacccggtaaacttccggtgagtttccaacttccgtgcggggcagcagcttcggctggtcctaagcggaccggaagttcgtcaagtttcacgctccgcccctcttccggacgtgacgcaagggcggggttgccggaagaagtggcgaagttacttttgagggtatttgagtagcggcggtgtgtcaggggctaaagaggaggacgaagaaaagcagagcaagggaacccagggcaacaggagtagttcactccgcgagaggccgtccacgagacccccgcgcgcagccatgagccccgccccccgctgttgcttggagaggggcgggacctggagagaggctgctccgtgaccccaccatgtcctctcctaccacgagttccctggatacccccctgcctggaaatggcccccctcagcctggcgccccttcttcttcacccactgtaaaggaggagggtccggagccgtggcccgggggtccggaccctgatgtcccaggcactgatgaggccagctcagcctgcagcacagactgggtcatcccagatcccgaagaggaaccagagcgcaagcgaaagaagggcccagccccgaagatgctgggccacgagctttgccgtgtctgtggggacaaggcctccggcttccactacaacgtgctcagctgcgaaggctgcaagggcttcttccggcgcagtgtggcgtcctttctgaagaacagatccggaagaagaagattcggaaacagcagcaggagtcacagtcacagtcgcagtcacctgtggggccgcagggcagcagcagctcagcctctgggcctggggcttcccctggtggatctgaggcaggcagccagggctccggggaaggcgagggtgtccagctaacagcggctcaagaactaatgatccagcagttggtggcggcccaactgcagtgcaacaaacgctccttctccgaccagcccaaagtcacgctgggccgggaggaccagatcgccctcctgaaggcatccactatcgagatcatgctgctagagacagccaggcgctacaaccacgagacagagtgtatcaccttcttgaaggacttcacctacagcaaggacgacttccaccgtgcaggcctgcaggtggagttcatcaaccccatcttcgagttctcgcgggccatgcggcggctgggcctggacgacgctgagtacgccctgctcatcgccatcaacatcttctcggccgaccggcccaacgtgcaggagccgggccgcgtggaggcgttgcagcagccctacgtggaggcgctgctgtcctacacgcgcatcaagaggccgcaggaccagctgcgcttcccgcgcatgctcatgaagctggtgagcctgcgcacgctgagctctgtgcactcggagcaggtcttcgccttgcggctccaggacaagaagctgccgcctctgctgtcggagatctgggacgtccacgagtgaggggctggccacccagccccacagccttgcctgaccaccctccagcagatagacgccggcaccccttcctcttcctagggtggaaggggccctgggccgagcctgtagacctatcggctctcatcccttgggataagccccagtccaggtccaggaggctccctccctgcccagcgagtcttccagaaggggtgaaagggttgcaggtcccgaccactgacccttcccggctgccctccctccccagcttacacctcaagcccagcacgcagtgcaccttgaacagagggaggggaggacccatggctctcccccctagcccgggagaccagggccttcctcttcctctgcttttattt

SEQ ID NO: 20694 - DNA, 2743 bp, Homo sapiens
  source 1..2743: mol_type = unassigned DNA
ggcctgctgggttagtgctggcagccccctgaggccaaggacagcagcatgacagtcaccaggactcaccacttcaaggaggggtccctcagagcacctgccatacccctgcacagtgctgcggctgagttggcttcaaaccatccaagaggcccagaagcaaacctggaggtgagacccaaagaaagctggaaccatgctgactttgtacactgtgaggacacagagtctgttcctggaaagcccagtgtcaacgcagatgaggaagtcggaggtccccaaatctgccgtgtatgtggggacaaggccactggctatcacttcaatgtcatgacatgtgaaggatgcaagggctttttcaggagggccatgaaacgcaacgcccggctgaggtgccccttccggaagggcgcctgcgagatcacccggaagacccggcgacagtgccaggcctgccgcctgcgcaagtgcctggagagcggcatgaagaaggagatgatcatgtccgacgaggccgtggaggagaggcgggccttgatcaagcggaagaaaagtgaacggacagggactcagccactgggagtgcaggggctgacagaggagcagcggatgatgatcagggagctgatggacgctcagatgaaaacctttgacactaccttctcccatttcaagaatttccggctgccaggggtgcttagcagtggctgcgagttgccagagtctctgcaggccccatcgagggaagaagctgccaagtggagccaggtccggaaagatctgtgctctttgaaggtctctctgcagctgcggggggaggatggcagtgtctggaactacaaacccccagccgacagtggcgggaaagagatcttctccctgctgccccacatggctgacatgtcaacctacatgttcaaaggcatcatcagctttgccaaagtcatctcctacttcagggacttgcccatcgaggaccagatctccctgctgaagggggccgctttcgagctgtgtcaactgagattcaacacagtgttcaatgcggagactggaacctgggagtgtggccggctgtcctactgcttggaagacactgcaggtggcttccagcaacttctactggagcccatgctgaaattccactacatgctgaagaagctgcagctgcatgaggaggagtatgtgctgatgcaggccatctccctcttctccccagaccgcccaggtgtgctgcagcaccgcgtggtggaccagctgcaggagcaattcgccattactctgaagtcctacattgaatgcaatcggccccagcctgctcataggttcttgttcctgaagatcatggctatgctcaccgagctccgcagcatcaatgctcagcacacccagcggctgctgcgcatccaggacatacacccctttgctacgcccctcatgcaggagttgttcggcatcacaggtagctgagcggctgcccttgggtgacacctccgagaggcagccagacccagagccctctgagccgccactcccgggccaagacagatggacactgccaagagccgacaatgccctgctggcctgtctccctagggaattcctgctatgacagctggctagcattcctcaggaaggacatgggtgccccccacccccagttcagtctgtagggagtgaagccacagactcttacgtggagagtgcactgacctgtaggtcaggaccatcagagaggcaaggttgccctttccttttaaaaggccctgtggtctggggagaaatccctcagatcccactaaagtgtcaaggtgtggaagggaccaagcgaccaaggatgggccatctggggtctatgcccacatacccacgtttgttcgcttcctgagtcttttcattgctacctctaatagtcctgtctcccacttcccactcgttcccctcctcttccgagctgctttgtgggctccaggcctgtactcatcggcaggcgcatgagtatctgtgggagtcctctagagagatgagaagccaggaggcctgcaccaaatgtcagaagcttggcatgacctcattccggccacatcattctgtgtctctgcatccatttgaacacattattaagcaccgataataggtagcctgctgtggggtatacagcattgactcagatatagatcctgagctcacagagtttatagttaaaaaaacaaacagaaacacaaacgatttggatcaaaaggagaaatgataagtgacaaaagcagcacaaggaatttccctgtgtggatgctgagctgtgatggcgggcactgggtacccaagtgaaggttcccaaggacatgagtctgtaggagcaagggcacaaactgcagctgtgagtgcgtgtgtgtgatttggtgtaggtaggtctgtttgccacttgatggggcctgggtttgttcctggggctggaatgctgggtatgctctgtgacaaggctacgctgacaatcagttaaacacaccggagaagaaccatttacatgcaccttatatttctgtgtacacatctattctcaaagctaaagggtatgaaagtgcctgccttgtttatagccacttgtgagtaaaaatttttttgcattttcacaaattatactttatataaggcattccacacctaagaactagttttgggaaatgtagccctgggtttaatgtcaaatcaaggcaaaaggaattaaataatgtacttttggcta

SEQ ID NO: 20695 - DNA, 4417 bp, Homo sapiens
  source 1..4417: mol_type = unassigned DNA
ttcttaaccctttccagctttcccaccctctttggctttagccatggccttctgatctgtgtttctcaggggacctgcaggccccagatatagccccatgctgtcctcctaccccagagcacactgttcaggctacttccactggtactgaaatccagtatttcacttactctttttctttccaatatcctcatgacattcaatatttcacttactctaggtcctccctgcctaaggcccaagtcaactttctgtccagtgggatttgtaatccaatacctcctagccctagcagaatcccatgtggataatcagaaatgtgactggaaaaaggacagagctctatggctgtgggtcccagtccccactgctggcagtaagtccccagcagtgagctgtgtaagcaccttacattctgcgcttggttgaaaacagcaaggcaagcatccacttgagaaatgtcaacccctaggaaatcccagcctcaagtctttctcatcccttgggaagtgcaaattggatagagaagaaaccaattaaaaacaaaacaaacaaatcatacttagatattctggcttttctcaccagggctggattaaagcatgtacttcaaaataataacaacttaagtcaataaataaatgtaaggaagtccaaatgttcacctgaagacaactgtggtcattttttggcaatcccaggttctcttttctacctgtttgctcaatcgtggtctccctctccctctcttgttggggcccatgcccctgctttactgttgccagaggcttgtacttgtttgccttttaggtaggagcagttacttccactcccctcacctgccataaagcatctttataaacaaagcaagtagaagaaacacatcctggtatccaccacattcggcttttgttgattctgttcacttgggagcacctgctgctagggaataagaaggttgaggctgaagagtgaggactcttcagctcccctctggcaggacccgggagaggaaagagccctcagctggtccatcctccccactcctggtcagccttctgttctgagatcaaagtggtggggtcacattctcgagaactgtgctcagccccctcatctcacaccctttccctctccctgtgtgcctgcccccctcttacataaccatgctggtgattggcaccgtcataaatcaatactttgctcactttcacatcaagtaacactatccagggaggtggtttcaacaaaggaggaagtataaggagatctaggttcaaattaatgttgcccctagtggtaaaggacagagaccctcagactgatgaaatgcactcagaattacttagacaaagcggatatttgccactctcttccccttttcctgtgtttttgtagtgaagagacctgaaagaaaaaagtagggagaacataatgagaacaaatacggtaatctcttcatttgctagttcaagtgctggacttgggacttaggaggggcaatggagccgcttagtgcctacatctgacttggactgaaatataggtgagagacaagattgtctcatatccggggaaatcataacctatgactaggacgggaagaggaagcactgcctttacttcagtgggaatctcggcctcagcctgcaagccaagtgttcacagtgagaaaagcaagagaataagctaatactcctgtcctgaacaaggcagcggctccttggtaaagctactccttgatcgatcctttgcaccggattgttcaaagtggaccccaggggagaagtcggagcaaagaacttaccaccaagcagtccaagaggcccagaagcaaacctggaggtgagacccaaagaaagctggaaccatgctgactttgtacactgtgaggacacagagtctgttcctggaaagcccagtgtcaacgcagatgaggaagtcggaggtccccaaatctgccgtgtatgtggggacaaggccactggctatcacttcaatgtcatgacatgtgaaggatgcaagggctttttcaggagggccatgaaacgcaacgcccggctgaggtgccccttccggaagggcgcctgcgagatcacccggaagacccggcgacagtgccaggcctgccgcctgcgcaagtgcctggagagcggcatgaagaaggagatgatcatgtccgacgaggccgtggaggagaggcgggccttgatcaagcggaagaaaagtgaacggacagggactcagccactgggagtgcaggggctgacagaggagcagcggatgatgatcagggagctgatggacgctcagatgaaaacctttgacactaccttctcccatttcaagaatttccggctgccaggggtgcttagcagtggctgcgagttgccagagtctctgcaggccccatcgagggaagaagctgccaagtggagccaggtccggaaagatctgtgctctttgaaggtctctctgcagctgcggggggaggatggcagtgtctggaactacaaacccccagccgacagtggcgggaaagagatcttctccctgctgccccacatggctgacatgtcaacctacatgttcaaaggcatcatcagctttgccaaagtcatctcctacttcagggacttgcccatcgaggaccagatctccctgctgaagggggccgctttcgagctgtgtcaactgagattcaacacagtgttcaatgcggagactggaacctgggagtgtggccggctgtcctactgcttggaagacactgcaggtggcttccagcaacttctactggagcccatgctgaaattccactacatgctgaagaagctgcagctgcatgaggaggagtatgtgctgatgcaggccatctccctcttctccccagaccgcccaggtgtgctgcagcaccgcgtggtggaccagctgcaggagcaattcgccattactctgaagtcctacattgaatgcaatcggccccagcctgctcataggttcttgttcctgaagatcatggctatgctcaccgagctccgcagcatcaatgctcagcacacccagcggctgctgcgcatccaggacatacacccctttgctacgcccctcatgcaggagttgttcggcatcacaggtagctgagcggctgcccttgggtgacacctccgagaggcagccagacccagagccctctgagccgccactcccgggccaagacagatggacactgccaagagccgacaatgccctgctggcctgtctccctagggaattcctgctatgacagctggctagcattcctcaggaaggacatgggtgccccccacccccagttcagtctgtagggagtgaagccacagactcttacgtggagagtgcactgacctgtaggtcaggaccatcagagaggcaaggttgccctttccttttaaaaggccctgtggtctggggagaaatccctcagatcccactaaagtgtcaaggtgtggaagggaccaagcgaccaaggatgggccatctggggtctatgcccacatacccacgtttgttcgcttcctgagtcttttcattgctacctctaatagtcctgtctcccacttcccactcgttcccctcctcttccgagctgctttgtgggctccaggcctgtactcatcggcaggcgcatgagtatctgtgggagtcctctagagagatgagaagccaggaggcctgcaccaaatgtcagaagcttggcatgacctcattccggccacatcattctgtgtctctgcatccatttgaacacattattaagcaccgataataggtagcctgctgtggggtatacagcattgactcagatatagatcctgagctcacagagtttatagttaaaaaaacaaacagaaacacaaacgatttggatcaaaaggagaaatgataagtgacaaaagcagcacaaggaatttccctgtgtggatgctgagctgtgatggcgggcactgggtacccaagtgaaggttcccaaggacatgagtctgtaggagcaagggcacaaactgcagctgtgagtgcgtgtgtgtgatttggtgtaggtaggtctgtttgccacttgatggggcctgggtttgttcctggggctggaatgctgggtatgctctgtgacaaggctacgctgacaatcagttaaacacaccggagaagaaccatttacatgcaccttatatttctgtgtacacatctattctcaaagctaaagggtatgaaagtgcctgccttgtttatagccacttgtgagtaaaaatttttttgcattttcacaaattatactttatataaggcattccacacctaagaactagttttgggaaatgtagccctgggtttaatgtcaaatcaaggcaaaaggaattaaataatgtacttttggcta

SEQ ID NO: 20696 - DNA, 4306 bp, Homo sapiens
  source 1..4306: mol_type = unassigned DNA
ttcttaaccctttccagctttcccaccctctttggctttagccatggccttctgatctgtgtttctcaggggacctgcaggccccagatatagccccatgctgtcctcctaccccagagcacactgttcaggctacttccactggtactgaaatccagtatttcacttactctttttctttccaatatcctcatgacattcaatatttcacttactctaggtcctccctgcctaaggcccaagtcaactttctgtccagtgggatttgtaatccaatacctcctagccctagcagaatcccatgtggataatcagaaatgtgactggaaaaaggacagagctctatggctgtgggtcccagtccccactgctggcagtaagtccccagcagtgagctgtgtaagcaccttacattctgcgcttggttgaaaacagcaaggcaagcatccacttgagaaatgtcaacccctaggaaatcccagcctcaagtctttctcatcccttgggaagtgcaaattggatagagaagaaaccaattaaaaacaaaacaaacaaatcatacttagatattctggcttttctcaccagggctggattaaagcatgtacttcaaaataataacaacttaagtcaataaataaatgtaaggaagtccaaatgttcacctgaagacaactgtggtcattttttggcaatcccaggttctcttttctacctgtttgctcaatcgtggtctccctctccctctcttgttggggcccatgcccctgctttactgttgccagaggcttgtacttgtttgccttttaggtaggagcagttacttccactcccctcacctgccataaagcatctttataaacaaagcaagtagaagaaacacatcctggtatccaccacattcggcttttgttgattctgttcacttgggagcacctgctgctagggaataagaaggttgaggctgaagagtgaggactcttcagctcccctctggcaggacccgggagaggaaagagccctcagctggtccatcctccccactcctggtcagccttctgttctgagatcaaagtggtggggtcacattctcgagaactgtgctcagccccctcatctcacaccctttccctctccctgtgtgcctgcccccctcttacataaccatgctggtgattggcaccgtcataaatcaatactttgctcactttcacatcaagtaacactatccagggaggtggtttcaacaaaggaggaagtataaggagatctaggttcaaattaatgttgcccctagtggtaaaggacagagaccctcagactgatgaaatgcactcagaattacttagacaaagcggatatttgccactctcttccccttttcctgtgtttttgtagtgaagagacctgaaagaaaaaagtagggagaacataatgagaacaaatacggtaatctcttcatttgctagttcaagtgctggacttgggacttaggaggggcaatggagccgcttagtgcctacatctgacttggactgaaatataggtgagagacaagattgtctcatatccggggaaatcataacctatgactaggacgggaagaggaagcactgcctttacttcagtgggaatctcggcctcagcctgcaagccaagtgttcacagtgagaaaagcaagagaataagctaatactcctgtcctgaacaaggcagcggctccttggtaaagctactccttgatcgatcctttgcaccggattgttcaaagtggaccccaggggagaagtcggagcaaagaacttaccaccaagcagtccaagaggcccagaagcaaacctggaggtgagacccaaagaaagctggaaccatgctgactttgtacactgtgaggacacagagtctgttcctggaaagcccagtgtcaacgcagatgaggaagtcggaggtccccaaatctgccgtgtatgtggggacaaggccactggctatcacttcaatgtcatgacatgtgaaggatgcaagggctttttcaggagggccatgaaacgcaacgcccggctgaggtgccccttccggaagggcgcctgcgagatcacccggaagacccggcgacagtgccaggcctgccgcctgcgcaagtgcctggagagcggcatgaagaaggagatgatcatgtccgacgaggccgtggaggagaggcgggccttgatcaagcggaagaaaagtgaacggacagggactcagccactgggagtgcaggggctgacagaggagcagcggatgatgatcagggagctgatggacgctcagatgaaaacctttgacactaccttctcccatttcaagaatttccgggtctctctgcagctgcggggggaggatggcagtgtctggaactacaaacccccagccgacagtggcgggaaagagatcttctccctgctgccccacatggctgacatgtcaacctacatgttcaaaggcatcatcagctttgccaaagtcatctcctacttcagggacttgcccatcgaggaccagatctccctgctgaagggggccgctttcgagctgtgtcaactgagattcaacacagtgttcaatgcggagactggaacctgggagtgtggccggctgtcctactgcttggaagacactgcaggtggcttccagcaacttctactggagcccatgctgaaattccactacatgctgaagaagctgcagctgcatgaggaggagtatgtgctgatgcaggccatctccctcttctccccagaccgcccaggtgtgctgcagcaccgcgtggtggaccagctgcaggagcaattcgccattactctgaagtcctacattgaatgcaatcggccccagcctgctcataggttcttgttcctgaagatcatggctatgctcaccgagctccgcagcatcaatgctcagcacacccagcggctgctgcgcatccaggacatacacccctttgctacgcccctcatgcaggagttgttcggcatcacaggtagctgagcggctgcccttgggtgacacctccgagaggcagccagacccagagccctctgagccgccactcccgggccaagacagatggacactgccaagagccgacaatgccctgctggcctgtctccctagggaattcctgctatgacagctggctagcattcctcaggaaggacatgggtgccccccacccccagttcagtctgtagggagtgaagccacagactcttacgtggagagtgcactgacctgtaggtcaggaccatcagagaggcaaggttgccctttccttttaaaaggccctgtggtctggggagaaatccctcagatcccactaaagtgtcaaggtgtggaagggaccaagcgaccaaggatgggccatctggggtctatgcccacatacccacgtttgttcgcttcctgagtcttttcattgctacctctaatagtcctgtctcccacttcccactcgttcccctcctcttccgagctgctttgtgggctccaggcctgtactcatcggcaggcgcatgagtatctgtgggagtcctctagagagatgagaagccaggaggcctgcaccaaatgtcagaagcttggcatgacctcattccggccacatcattctgtgtctctgcatccatttgaacacattattaagcaccgataataggtagcctgctgtggggtatacagcattgactcagatatagatcctgagctcacagagtttatagttaaaaaaacaaacagaaacacaaacgatttggatcaaaaggagaaatgataagtgacaaaagcagcacaaggaatttccctgtgtggatgctgagctgtgatggcgggcactgggtacccaagtgaaggttcccaaggacatgagtctgtaggagcaagggcacaaactgcagctgtgagtgcgtgtgtgtgatttggtgtaggtaggtctgtttgccacttgatggggcctgggtttgttcctggggctggaatgctgggtatgctctgtgacaaggctacgctgacaatcagttaaacacaccggagaagaaccatttacatgcaccttatatttctgtgtacacatctattctcaaagctaaagggtatgaaagtgcctgccttgtttatagccacttgtgagtaaaaatttttttgcattttcacaaattatactttatataaggcattccacacctaagaactagttttgggaaatgtagccctgggtttaatgtcaaatcaaggcaaaaggaattaaataatgtacttttggcta

SEQ ID NO: 20697 - DNA, 2406 bp, Homo sapiens
  source 1..2406: mol_type = unassigned DNA
ccgctcccacctcggcgtctcgtctctcgcccgctgccccgcgagcccgcggcccccgggctcccgccatccgccgacaccgggagcccgggctccccgcgccctgccctccgcgccgggggccgcccgccgcagacacgggacccgcttcgaggccgctttggcgccaaatcctgaggtaacacgtacacagacctctcggccggaatctccagggatgaccagcccctccccacgcatccagataatctccaccgactctgctgtagcctcacctcagcgcattcagggctctgaacctgcctctggcccattgagtgttttcacatctttgaacaaagagaagattgtcacagaccagcagacaggacagaaaatccagatagtcaccgcagtggacgcctccggatcccccaaacagcagttcatcctgaccagcccagatggagctggaactgggaaggtgatcctggcttccccagagacatccagcgccaagcaactcatattcaccacctcagacaacctcgtccctggcaggatccagattgtcacggattctgcctctgtggagcgtttactggggaagacggacgtccagcggccccaggtggtagagtactgtgtggtctgtggcgacaaagcctccggccgtcactatggggctgtcagttgtgaaggttgcaaaggtttcttcaaaaggagtgtgaggaaaaatttgacctacagctgccggagcaaccaagactgcatcatcaataaacatcaccggaaccgctgtcagttttgccggctgaaaaaatgcttagagatgggcatgaaaatggaatctgtgcagagtgaacggaagcccttcgatgtgcaacgggagaaaccaagcaattgtgctgcttcaactgagaaaatctatatccggaaagacctgagaagtcccctgatagctactcccacgtttgtggcagacaaagatggagcaagacaaacaggtcttcttgatccagggatgcttgtgaacatccagcagcctttgatacgtgaggatggtacagttctcctggccacggattctaaggctgaaacaagccagggagctctgggcacactggcaaatgtagtgacctcccttgccaacctaagtgaatctttgaacaacggtgacacttcagaaatccagccagaggaccagtctgcaagtgagataactcgggcatttgataccttagctaaagcacttaataccacagacagctcctcttctccaagcttggcagatgggatagacaccagtggaggagggagcatccacgtcatcagcagagaccagtcgacacccatcattgaggttgaaggccccctcctttcagacacacacgtcacatttaagctaacaatgcccagtccaatgccagagtacctcaacgtgcactacatctgtgagtctgcatcccgtctgcttttcctctcaatgcactgggctcggtcaatcccagcctttcaggcacttgggcaggactgcaacaccagccttgtgcgggcctgctggaatgagctcttcaccctcggcctggcccagtgtgcccaggtcatgagtctctccaccatcctggctgccattgtcaaccacctgcagaacagcatccaggaagataaactttctggtgaccggataaagcaagtcatggagcacatctggaagctgcaggagttctgtaacagcatggcgaagctggatatagatggctatgagtatgcataccttaaagctatagttctctttagccccgatcatccaggtttgaccagcacaagccagattgaaaaattccaagaaaaggcacagatggagttgcaggactatgttcagaaaacctactcagaagacacctaccgattggcccggatcctcgttcgcctgccggcactcaggctgatgagctccaacataacagaagaacttttttttactggtctcattggcaatgtttcgatagacagcataatcccctacatcctcaagatggagacagcagagtataatggccagatcaccggagccagtctatagcgcaaaccacacacctgccaaggagcaacagaatccttccaggaccgttcacatacaaagaaaagtagtggtattttggtatgtgcaaatatttccatatgttagccatttcctgtctggtttctccttatctgttaatcccagacaatagcaattaaaagactagtaggatcctttcctgacataagaaatgttttaatgccttttgatgaagcagcagattttggaacaatcttttaactcaatttgtatttagaaattctcaaagggcaaaaaacaaaaaaaaaggttttataatgtcagagactagtattaaagaaaactgaaagaacctgagagaa

SEQ ID NO: 20698 - DNA, 1937 bp, Homo sapiens
  source 1..1937: mol_type = unassigned DNA
aggttctctaatgatcttggttcaccatggctacaaatatggaggggctggttcagcacagagtggggacccagcaggtggctgaggtaacacgtacacagacctctcggccggaatctccagggatgaccagcccctccccacgcatccagataatctccaccgactctgctgtagcctcacctcagcgcattcagattgtcacagaccagcagacaggacagaaaatccagatagtcaccgcagtggacgcctccggatcccccaaacagcagttcatcctgaccagcccagatggagctggaactgggaaggtgatcctggcttccccagagacatccagcgccaagcaactcatattcaccacctcagacaacctcgtccctggcaggatccagattgtcacggattctgcctctgtggagcgtttactggggaagacggacgtccagcggccccaggtggtagagtactgtgtggtctgtggcgacaaagcctccggccgtcactatggggctgtcagttgtgaaggttgcaaaggtttcttcaaaaggagtgtgaggaaaaatttgacctacagctgccggagcaaccaagactgcatcatcaataaacatcaccggaaccgctgtcagttttgccggctgaaaaaatgcttagagatgggcatgaaaatggaatctgtgcagagtgaacggaagcccttcgatgtgcaacgggagaaaccaagcaattgtgctgcttcaactgagaaaatctatatccggaaagacctgagaagtcccctgatagctactcccacgtttgtggcagacaaagatggagcaagacaaacaggtcttcttgatccagggatgcttgtgaacatccagcagcctttgatacgtgaggatggtacagttctcctggccacggattctaaggctgaaacaagccagggagctctgggcacactggcaaatgtagtgacctcccttgccaacctaagtgaatctttgaacaacggtgacacttcagaaatccagccagaggaccagtctgcaagtgagataactcgggcatttgataccttagctaaagcacttaataccacagacagctcctcttctccaagcttggcagatgggatagacaccagtggaggagggagcatccacgtcatcagcagagaccagtcgacacccatcattgaggttgaaggccccctcctttcagacacacacgtcacatttaagctaacaatgcccagtccaatgccagagtacctcaacgtgcactacatctgtgagtctgcatcccgtctgcttttcctctcaatgcactgggctcggtcaatcccagcctttcaggcacttgggcaggactgcaacaccagccttgtgcgggcctgctggaatgagctcttcaccctcggcctggcccagtgtgcccaggtcatgagtctctccaccatcctggctgccattgtcaaccacctgcagaacagcatccaggaagataaactttctggtgaccggataaagcaagtcatggagcacatctggaagctgcaggagttctgtaacagcatggcgaagctggatatagatggctatgagtatgcataccttaaagctatagttctctttagccccgatcatccaggtttgaccagcacaagccagattgaaaaattccaagaaaaggcacagatggagttgcaggactatgttcagaaaacctactcagaagacacctaccgattggcccggatcctcgttcgcctgccggcactcaggctgatgagctccaacataacagaagaacttttttttactggtctcattggcaatgtttcgatagacagcataatcccctacatcctcaagatggagacagcagagtataatggccagatcaccggagccagtctatagcgcaaaccacacacctgccaa

SEQ ID NO: 20699 - DNA, 1791 bp, Homo sapiens
  source 1..1791: mol_type = unassigned DNA
atgaccagcccctccccacgcatccagataatctccaccgactctgctgtagcctcacctcagcgcattcagattgtcacagaccagcagacaggacagaaaatccagatagtcaccgcagtggacgcctccggatcccccaaacagcagttcatcctgaccagcccagatggagctggaactgggaaggtgatcctggcttccccagagacatccagcgccaagcaactcatattcaccacctcagacaacctcgtccctggcaggatccagattgtcacggattctgcctctgtggagcgtttactggggaagacggacgtccagcggccccaggtggtagagtactgtgtggtctgtggcgacaaagcctccggccgtcactatggggctgtcagttgtgaaggttgcaaaggtttcttcaaaaggagtgtgaggaaaaatttgacctacagctgccggagcaaccaagactgcatcatcaataaacatcaccggaaccgctgtcagttttgccggctgaaaaaatgcttagagatgggcatgaaaatggaatctgtgcagagtgaacggaagcccttcgatgtgcaacgggagaaaccaagcaattgtgctgcttcaactgagaaaatctatatccggaaagacctgagaagtcccctgatagctactcccacgtttgtggcagacaaagatggagcaagacaaacaggtcttcttgatccagggatgcttgtgaacatccagcagcctttgatacgtgaggatggtacagttctcctggccacggattctaaggctgaaacaagccagggagctctgggcacactggcaaatgtagtgacctcccttgccaacctaagtgaatctttgaacaacggtgacacttcagaaatccagccagaggaccagtctgcaagtgagataactcgggcatttgataccttagctaaagcacttaataccacagacagctcctcttctccaagcttggcagatgggatagacaccagtggaggagggagcatccacgtcatcagcagagaccagtcgacacccatcattgaggttgaaggccccctcctttcagacacacacgtcacatttaagctaacaatgcccagtccaatgccagagtacctcaacgtgcactacatctgtgagtctgcatcccgtctgcttttcctctcaatgcactgggctcggtcaatcccagcctttcaggcacttgggcaggactgcaacaccagccttgtgcgggcctgctggaatgagctcttcaccctcggcctggcccagtgtgcccaggtcatgagtctctccaccatcctggctgccattgtcaaccacctgcagaacagcatccaggaagataaactttctggtgaccggataaagcaagtcatggagcacatctggaagctgcaggagttctgtaacagcatggcgaagctggatatagatggctatgagtatgcataccttaaagctatagttctctttagccccgatcatccaggtttgaccagcacaagccagattgaaaaattccaagaaaaggcacagatggagttgcaggactatgttcagaaaacctactcagaagacacctaccgattggcccggatcctcgttcgcctgccggcactcaggctgatgagctccaacataacagaagaacttttttttactggtctcattggcaatgtttcgatagacagcataatcccctacatcctcaagatggagacagcagagtataatggccagatcaccggagccagtctatag

SEQ ID NO: 20700 - DNA, 2494 bp, Homo sapiens
  source 1..2494: mol_type = unassigned DNA
aacattcgccctcctcctaccagcgcgcgggcggcggcggcggcggcaccggggtcacgaactctgacctttcactgacaaaaacaataacaaacccccccttctccgcgaccccggcggcgcccccgggcccgtccccgccaccccgctcccacctcggcgtctcgtctctcgcccgctgccccgcgagcccgcggcccccgggctcccgccatccgccgacaccgggagcccgggctccccgcgccctgccctccgcgccgggggccgcccgccgcagacacgggacccgcttcgaggccgctttggcgccaaatcctgaggtaacacgtacacagacctctcggccggaatctccagggatgaccagcccctccccacgcatccagataatctccaccgactctgctgtagcctcacctcagcgcattcagattgtcacagaccagcagacaggacagaaaatccagatagtcaccgcagtggacgcctccggatcccccaaacagcagttcatcctgaccagcccagatggagctggaactgggaaggtgatcctggcttccccagagacatccagcgccaagcaactcatattcaccacctcagacaacctcgtccctggcaggatccagattgtcacggattctgcctctgtggagcgtttactggggaagacggacgtccagcggccccaggtggtagagtactgtgtggtctgtggcgacaaagcctccggccgtcactatggggctgtcagttgtgaaggttgcaaaggtttcttcaaaaggagtgtgaggaaaaatttgacctacagctgccggagcaaccaagactgcatcatcaataaacatcaccggaaccgctgtcagttttgccggctgaaaaaatgcttagagatgggcatgaaaatggaatctgtgcagagtgaacggaagcccttcgatgtgcaacgggagaaaccaagcaattgtgctgcttcaactgagaaaatctatatccggaaagacctgagaagtcccctgatagctactcccacgtttgtggcagacaaagatggagcaagacaaacaggtcttcttgatccagggatgcttgtgaacatccagcagcctttgatacgtgaggatggtacagttctcctggccacggattctaaggctgaaacaagccagggagctctgggcacactggcaaatgtagtgacctcccttgccaacctaagtgaatctttgaacaacggtgacacttcagaaatccagccagaggaccagtctgcaagtgagataactcgggcatttgataccttagctaaagcacttaataccacagacagctcctcttctccaagcttggcagatgggatagacaccagtggaggagggagcatccacgtcatcagcagagaccagtcgacacccatcattgaggttgaaggccccctcctttcagacacacacgtcacatttaagctaacaatgcccagtccaatgccagagtacctcaacgtgcactacatctgtgagtctgcatcccgtctgcttttcctctcaatgcactgggctcggtcaatcccagcctttcaggcacttgggcaggactgcaacaccagccttgtgcgggcctgctggaatgagctcttcaccctcggcctggcccagtgtgcccaggtcatgagtctctccaccatcctggctgccattgtcaaccacctgcagaacagcatccaggaagataaactttctggtgaccggataaagcaagtcatggagcacatctggaagctgcaggagttctgtaacagcatggcgaagctggatatagatggctatgagtatgcataccttaaagctatagttctctttagccccgatcatccaggtttgaccagcacaagccagattgaaaaattccaagaaaaggcacagatggagttgcaggactatgttcagaaaacctactcagaagacacctaccgattggcccggatcctcgttcgcctgccggcactcaggctgatgagctccaacataacagaagaacttttttttactggtctcattggcaatgtttcgatagacagcataatcccctacatcctcaagatggagacagcagagtataatggccagatcaccggagccagtctatagcgcaaaccacacacctgccaaggagcaacagaatccttccaggaccgttcacatacaaagaaaagtagtggtattttggtatgtgcaaatatttccatatgttagccatttcctgtctggtttctccttatctgttaatcccagacaatagcaattaaaagactagtaggatcctttcctgacataagaaatgttttaatgccttttgatgaagcagcagattttggaacaatcttttaactcaatttgtatttagaaattctcaaagggcaaaaaacaaaaaaaaaggttttataatgtcagagactagtattaaagaaaactgaaagaacctgagagaa

SEQ ID NO: 20701 - DNA, 495 bp, Homo sapiens
  source 1..495: mol_type = unassigned DNA
gcccccgggcccgtccccgccaccccgctcccacctcggcgtctcgtctctcgcccgctgccccgcgagcccgcggcccccgggctcccgccatccgccgacaccgggagcccgggctccccgcgccctgccctccgcgccgggggccgcccgccgcagacacgggacccgcttcgaggccgctttggcgccaaatcctgaggaccgcctatggctgcggtagcagtgagagaagctctcagaaggtgcacattcctccttgttcatttttaagcagcttccaaagctgctgttgatgatgcctgatgctgctttgaaggcagaaaaccaacagtgagatcaagaattgtaacacgtacacagacctctcggccggaatctccagggatgaccagcccctccccacgcatccagataatctccaccgactctgctgtagcctcacctcagcgcattcagggctctgaacctgcctctggcccattgagtgttttc

SEQ ID NO: 20702 - DNA, 739 bp, Homo sapiens
  source 1..739: mol_type = unassigned DNA
gttctctaatgatcttggttcaccatggctacaaatatggaggggctggttcagcacagagtggggacccagcaggtggctgaggtaacacgtacacagacctctcggccggaatctccagggatgaccagcccctccccacgcatccagataatctccaccgactctgctgtagcctcacctcagcgcattcagggctctgaacctgcctctggcccattgagtgttttcacatctttgaacaaagagaagattgtcacagaccagcagacaggacagaaaatccagatagtcaccgcagtggacgcctccggatcccccaaacagcagttcatcctgaccagcccagatggagctggaactgggaaggtgatcctggcttccccagagacatccagcgccaagcaactcatattcaccacctcagacaacctcgtccctggcaggatccagattgtcacggattctgcctctgtggagcgtttactggggaagacggacgtccagcggccccaggtggtagagtactgtgtggtctgtggcgacaaagcctccggccgtcactatggggctgtcagttgtgaaggttgcaaaggtttcttcaaaaggagtgtgaggaaaaatttgacctacagctgccggagcaaccaagactgcatcatcaataaacatcaccggaaccgctgtcagttttgccggctgaaaaaatgcttagagatgggcatgaaaatggaatgtg

SEQ ID NO: 20703 - DNA, 2612 bp, Homo sapiens
  source 1..2612: mol_type = unassigned DNA
agaaatgtttcgagctggggcagagggagcagagaaggagccctcaccgcggccggaatgcagagcggaccctggcccaggactgggtttccctttaggctcgggcctaccctggccctcgctgttggaatctccaggaggccgcattttagatatcccctgcaaagtgtgtggcgaccgcagctcggggaagcactacggggtctacgcctgcgacggctgctcaggttttttcaaacggagcatccgaaggaataggacctatgtctgcaaatctggaaaccagggaggctgtccggtggacaagacgcacagaaaccagtgcagggcgtgtcggctgaagaagtgtttggaagtcaacatgaacaaagacgccgtgcagcacgagcgggggcctcggacgtccaccatccgcaagcaagtggccctctacttccgtggacacaaggaggagaacggggccgccgcgcactttccctcggcggcgctccctgcgccggccttcttcaccgcggtcacgcagctggagccgcacggcctggagctggccgcggtgtccaccactccagagcggcagaccctcgtgagcctggctcagcccacgcccaagtacccccatgaagtgaatgggaccccaatgtatctctatgaagtggccacggagtcggtgtgtgaatcagctgccagacttctcttcatgagcatcaagtgggctaagagtgtgccagccttctccacgctgtctttgcaagaccagctgatgcttttggaagatgcttggagagaactgtttgttctaggaatagcacaatgggccattccggttgatgctaacactctactggctgtatctggcatgaacggtgacaacacagattcccagaagctgaacaagatcatatctgaaatacaggctttacaagaggtggtggctcgatttagacaactccggttagatgctactgaatttgcctgtctaaaatgcatcgtcactttcaaagccgttcctacacatagtggttctgaactgagaagtttccggaatgctgccgccattgcagcccttcaagatgaggctcagctaacgctcaacagctacatccataccagatatcccactcaaccctgtcgctttggaaaactcctgttgcttttgccagctttacgttctattagcccatcaactatagaagaagtgtttttcaaaaaaaccatcggcaatgtgccaattacaagactgctttcagatatgtacaaatccagtgatatctaagctcacaagatacccacttttcaggatgggacagtatcagatgaacttcaacccatggagaacaagcctcaactaacaaacccttcaggaagcatataccggggaatgtgtagccttcaggaaaaaaatgccaattgacacaaagcattccagtagctatgacctgccgccctgaccaggatagggcgggtgggaaggagaggggtgcaacaggaccgcctgcactgaaaactcactgctgccatgccctgggagggggcaaactgggggttgccacaggccgtgccattctgcctcttacctggaagatcaggctgaacgatcaaaagctgaaacataagtagtgctttctcttcctttttagcatacaaagtttggtaaccaaatatagctctgtgtataacatcgtactgcggccttcaaaactacgttatgttggagcatttattttaaaaataatggtaggttttaaattaaaagtgttatcaaaagtttcccctctattgtaatacattattaagtggccttcagaactgagttaataagtgaaaagtagcttatgccatgtgatttgctttttctctatcttcttttttcttttctttctctttcttttgttctttcttcttcttttttaataccataggccaggcaaccttgtcaaaggaattgatggacaaaatgagattctcaccaggacttcaggttggataacatgtcaaaaagagaagagctttactaaaagaacataagtcaagggaggatgaataaaaacagcaaaaccaaataaagtggagatgagtgattgagtgaggtagattgctgtcccgttaacatagtgctgaaaccaaaggcagtgggggtccaaactcgtggtgcagcaagtcacaccagacaggaaacgaatatggacgtaattgcagaaggaacttcaaggagatgaatgaatgctaaaagggttcttgactgatccattgctaacagcctgagactcttcaatgcctttccgaaaactggtttctagtaaagccttgaatgaacacacacacacacacacacacacacacacacacacacacacacacacaccgtcctacactttaagctgctcctttggtatgactctatacttatggaaatgtagaaacaaacatttttaaatagctgctgtacttttcacattttgatttattaggtactagcactgaggaaaaaaaattcagcacttggactatcataggatgagtaaaacttttcttgtacaaagtgaattaactgatttgtgaagttaaaaggttgtactcattgtatttacaaagaataaaaatatattgaattt

SEQ ID NO: 20704 - DNA, 3212 bp, Homo sapiens
  source 1..3212: mol_type = unassigned DNA
ggagatattacaggggacccagcccgcagcgacaggcacaaagtcacggggtaatgaacttcggggacccttcgccgctgcgtgcgcggctctccccggaaacccggacctggccgcctcttccctcggaagatttcccagcaatctagttttcccactctgcgcttgggttccggcagcgcggagcccgtctgcctctgagactgcggtagtgttttccttctttccttgggagaccagcggtcggcagagattgcccacactctgcatgcctatgtagagggagagatcgaagactgagtgacaggaatggggaaaaagagggatttcgctccgtaggaaggccattttcgtgtctccatctctgtctttcaacatccctctcttgctgttcttccttcttcctcagtcttcctgtccatctctccatctgtctgtccatgtgtgtgtccatatcaagcagcattcccagcagctgcggttttgcaagagccgggaagaaacttaaggatgcttaaatttccactgttggacgaattctgagcgcccagggagcagcgcagcgcgcgactgacacccacctgtcccgcccaggagccttgcaggctggagggcagctggagagcggcggcgcccggcggcgaggcgggcgctgccggccgggactcgggcagcgcccaccaaccgctccgccccgggacagccagcatgagcaagccagccggatcaacaagccgcattttagatatcccctgcaaagtgtgtggcgaccgcagctcggggaagcactacggggtctacgcctgcgacggctgctcaggttttttcaaacggagcatccgaaggaataggacctatgtctgcaaatctggaaaccagggaggctgtccggtggacaagacgcacagaaaccagtgcagggcgtgtcggctgaagaagtgtttggaagtcaacatgaacaaagacgccgtgcagcacgagcgggggcctcggacgtccaccatccgcaagcaagtggccctctacttccgtggacacaaggaggagaacggggccgccgcgcactttccctcggcggcgctccctgcgccggccttcttcaccgcggtcacgcagctggagccgcacggcctggagctggccgcggtgtccaccactccagagcggcagaccctcgtgagcctggctcagcccacgcccaagtacccccatgaagtgaatgggaccccaatgtatctctatgaagtggccacggagtcggtgtgtgaatcagctgccagacttctcttcatgagcatcaagtgggctaagagtgtgccagccttctccacgctgtctttgcaagaccagctgatgcttttggaagatgcttggagagaactgtttgttctaggaatagcacaatgggccattccggttgatgctaacactctactggctgtatctggcatgaacggtgacaacacagattcccagaagctgaacaagatcatatctgaaatacaggctttacaagaggtggtggctcgatttagacaactccggttagatgctactgaatttgcctgtctaaaatgcatcgtcactttcaaagccgttcctacacatagtggttctgaactgagaagtttccggaatgctgccgccattgcagcccttcaagatgaggctcagctaacgctcaacagctacatccataccagatatcccactcaaccctgtcgctttggaaaactcctgttgcttttgccagctttacgttctattagcccatcaactatagaagaagtgtttttcaaaaaaaccatcggcaatgtgccaattacaagactgctttcagatatgtacaaatccagtgatatctaagctcacaagatacccacttttcaggatgggacagtatcagatgaacttcaacccatggagaacaagcctcaactaacaaacccttcaggaagcatataccggggaatgtgtagccttcaggaaaaaaatgccaattgacacaaagcattccagtagctatgacctgccgccctgaccaggatagggcgggtgggaaggagaggggtgcaacaggaccgcctgcactgaaaactcactgctgccatgccctgggagggggcaaactgggggttgccacaggccgtgccattctgcctcttacctggaagatcaggctgaacgatcaaaagctgaaacataagtagtgctttctcttcctttttagcatacaaagtttggtaaccaaatatagctctgtgtataacatcgtactgcggccttcaaaactacgttatgttggagcatttattttaaaaataatggtaggttttaaattaaaagtgttatcaaaagtttcccctctattgtaatacattattaagtggccttcagaactgagttaataagtgaaaagtagcttatgccatgtgatttgctttttctctatcttcttttttcttttctttctctttcttttgttctttcttcttcttttttaataccataggccaggcaaccttgtcaaaggaattgatggacaaaatgagattctcaccaggacttcaggttggataacatgtcaaaaagagaagagctttactaaaagaacataagtcaagggaggatgaataaaaacagcaaaaccaaataaagtggagatgagtgattgagtgaggtagattgctgtcccgttaacatagtgctgaaaccaaaggcagtgggggtccaaactcgtggtgcagcaagtcacaccagacaggaaacgaatatggacgtaattgcagaaggaacttcaaggagatgaatgaatgctaaaagggttcttgactgatccattgctaacagcctgagactcttcaatgcctttccgaaaactggtttctagtaaagccttgaatgaacacacacacacacacacacacacacacacacacacacacacacacacaccgtcctacactttaagctgctcctttggtatgactctatacttatggaaatgtagaaacaaacatttttaaatagctgctgtacttttcacattttgatttattaggtactagcactgaggaaaaaaaattcagcacttggactatcataggatgagtaaaacttttcttgtacaaagtgaattaactgatttgtgaagttaaaaggttgtactcattgtatttacaaagaataaaaatatattgaatttaaatgaa

SEQ ID NO: 20705 - DNA, 517 bp, Homo sapiens
  source 1..517: mol_type = unassigned DNA
aggactgggtcgagcagacagagctgcagcccccgccttgcccggcttctcgcggctggagagcagagcgatgtcacccggagccccgcctgggtggtaacgagaccctggccagtcacccctgcagcccagactaacttctttcaacagcctctgatggccgcattttagatatcccctgcaaagtgtgtggcgaccgcagctcggggaagcactacggggtctacgcctgcgacggctgctcaggttttttcaaacggagcatccgaaggaataggacctatgtctgcaaatctggaaaccagggaggctgtccggtggacaagacgcacagaaaccagtgcagggcgtgtcggctgaagaagtgtttggaagtcaacatgaacaaagacgccgtgcagcacgagcgggggcctcggacgtccaccatccgcaagcaagtggccctctacttccgtggacacaaggaggagaacggggccgccgcgcactttccctcggcggcgctccctgcgcc

SEQ ID NO: 20706 - DNA, 3732 bp, Homo sapiens
  source 1..3732: mol_type = unassigned DNA
cctctttctcccccctctctccctcctctcctctctctctcctctcttctctgaacctctcttctctttctcttttcttacatattctactagttgttttccccttcttcttctcctttctctcctttttctccctcctccttgtctcttttactccattcctgcagaagagagagggctaaacttaaagaaaaaaaaaaggaggaggaggaggaggaggcacccccttcgtattcttcttatcgttattttatacatatatgattttttttggagggagggtgttggttgccggctgaagagcacttatttaaaatactaaaaaaagaacatttttgggcgatctccagggtttttttaactagctctgtgtgttatagcagaagaagcagaagaaggagcaagaaagaggaaaagaagaggattatttattcgacctactttggatgtctctctcgcttttcctttttcctttttttggcaattattttcttctgatttttattttttctatttcgctgtgatttcgtcgccggcgtgaattatcccgtatttttctcccccttccgtcacctcccgaaagaagaaggcagcgagagcccggcgccaccggcacaacaaaaagagcaaagtgtgtgatcttcctcgccggctgcctcccgctctccagcgctgccttcctgaatggctggctgcgtccggccctggacctggccccccgacacccgcgcgccctgatcgccggcggcagcctcgcccagcgccctgctcggctcaccgcgctccccgcactcccgagcccggcgagggctcccgccgggacagcggcggcgccgcgggcggccccggcctccgctcgcgctccggctgcggccccgactcctgctcggactccggcccgggtcccggctcctccagcggcgctcgccgcagcagctccggcggcagctccagcggcgcctgcagccgcgacctcctcctcctccgccgccgccgccgcctccgccctcgccggcttcctctatgtcggctcagcccgcgcgctgcgcgtagcccgagcggccggcgggcgggcgcccggcgcgggtgagcgactgtgtgtgcgagtgtgtgtgtgcgcgggggtgcgggcgaggcggagggcgagtgtgtgcgcgcgccgtggcccatgcccgccgcccccggcgctgcgccccgcgccgctcccggctgccgcctgtgccatttctgattttgcaacttggggaagaagaaaaaagcgagagaagggagcttgctcgccggggggtggggaggggggaaggagagcgcggcccccccaggaacggagcgcggggggagcgggcgaggggagcaggggtgttggggggggagcctgagagcctgggggggctgcaaaaagagagaaagaaaacagcaggaaccacaacaaaacgccagcagggcgggcgggcgcgcagcagcagcggggcggccgaggcagtagcggcggcagcggcggcggcggcggaggcagcggccggtgtccggctcgggctcggctcctgcgaccccggggcgcccggcgggccccccgccccctccccctccccccttccccttccccttcccctcccagcgcgcccgcgcgccccgcggccctcggcgagcagctcggctccccccagcgctccccgggcccaaagatatggcaatggtagttagcagctggcgagatccgcaggacgacgtggccgggggcaaccccggcggccccaaccccgcagcgcaggcggcccgcggcggcggcggcggcgccggcgagcagcagcagcaggcgggctcgggcgcgccgcacacgccgcagaccccgggccagcccggagcgcccgccacccccggcacggcgggggacaagggccagggcccgcccggttcgggccagagccagcagcacatcgagtgcgtggtgtgcggggacaagtcgagcggcaagcactacggccaattcacctgcgagggctgcaaaagtttcttcaagaggagcgtccgcaggaacttaacttacacatgccgtgccaacaggaactgtcccatcgaccagcaccaccgcaaccagtgccaatactgccgcctcaagaagtgcctcaaagtgggcatgaggcgggaagcggttcagcgaggaagaatgcctccaacccagcccaatccaggccagtacgcactcaccaacggggaccccctcaacggccactgctacctgtccggctacatctcgctgctgctgcgcgccgagccctaccccacgtcgcgctacggcagccagtgcatgcagcccaacaacattatgggcatcgagaacatctgcgagctggccgcgcgcctgctcttcagcgccgtcgagtgggcccgcaacatccccttcttcccggatctgcagatcaccgaccaggtgtccctgctacgcctcacctggagcgagctgttcgtgctcaacgcggcccagtgctctatgccgctgcacgtggcgccgttgctggccgccgccggcctgcatgcctcgcccatgtctgccgaccgcgtcgtggccttcatggaccacatccgcatcttccaggagcaggtggagaagctcaaggcgctacacgtcgactcagccgagtacagctgcctcaaagccatcgtgctgttcacgtcagacgcctgtggcctgtcggatgcggcccacatcgagagcctgcaggagaagtcgcagtgcgcactggaggagtacgtgaggagccagtaccccaaccagcccagccgttttggcaaactgctgctgcgactgccctcgctgcgcaccgtgtcctcctccgtcatcgagcagctcttcttcgtccgtttggtaggtaaaacccccatcgaaactctcatccgcgatatgttactgtctgggagcagcttcaactggccttacatgtccatccagtgctcctagaccttgggcgcttcccacctgccccgtccccctagagactcagaggacccacctgggccaaggactccaaagccgcggggacaccgggaagtgcagcgggccaggcaggctgggtgggagggaggagggccgagacaggagcagcccacccagcagaaatacaatccgagctacaaagcatgggaaaaagagactcttttaggatcagatctgtgagcacgttggcgaggaaaaacaaaacaaacaaaaaaaagaaccttgtgtctgtctggtgaaaaaaagaaaaacaaattggaagagaggaccatgagaattttaataaaacagaaggaaactaatggaccttccaggatttattgtggacggatgtggatatattctgtacaggaacaacacatatggaagtggactgaagcctatgtagaaacacacacacactgaacattgttattcattttgtaaaatactagtctttattttcattttttgtaaaatttaaacatcgtatgcgcataaagaaaaaggaaacaagaattaggggaaaataacattttccaaataattataaaaaattgtcctgtgtctatgtatctatatctgttttgtatttttttctggttccaaaccagatttcctgtgattctatactaataatttttgatataaccctttgcttcttataatgagtgcgatatatgttgtcgaggctgttcttcaagaattaaaattgaagtgaaaatttaaacaaaaataaaagaatttagcaaaaccca

SEQ ID NO: 20707 - DNA, 5275 bp, Homo sapiens
  source 1..5275: mol_type = unassigned DNA
agccccggcgcctataaatcgcattccctcccgcgcccccctttttagcatatttgatcactttgattctctgttcttttctctccgcggtgtgtgtgtgcgtgcgcgcgtgtgtgttttcttcttctcctcctcctctccccgagttgcctcctttctccgggtgccgtactgccttttttcccctctttcattctttctctccgtctttttctcccccctctgcgcacgaaggatgtgcttctaggtggtgatctgccctcctctctctcttttatcatttctcccccgccgccggcgagttgactctttccctatgtgtgtgaggcggcggcggcagcagcagcagcagcggctccggcggcggcagcagcggcagcagcgacttcagcggcggcggcggcgctagacgcagcggctccgggcccgacccggcggcttcggcggcggctccggcggcagcggcggcccgggcggcccgcagggaacggcgagcggcctccacccagcgactgcgggcggcggcggccggagagagcgaggcgcgcgccggacgcccggggcaggcggcggcggcggcggcccagcgccaggacgacgccgcgcagcgcccgacgcggaccactttcatgctgattcccccggacccgggcagcgctccggccactccgcgggccgccggcctccgccccggcctgcctggctccctgggcgcgcccgcacccggcgcctccgatctcctagtcctcctgatttcgatggctttcctgaatggctgactgtgggctgccctggacttggcccccggacagtcgcctctcctcctcctctacctcctccttcaccaccacctcctcttcctcctcctcctcctcctcctcctccgccaactcctcggctgcacaccagctctaagagcgagagtgaacgagagagggagggagagagtgagagcgagcgagatctttggagagatttttttttttgcctcctacttctgtcttgaagccagacaatcgacttcagctctccctcccctccctctttctccacgttctgctcccactcgctctcctgtccccttcccctcccctcccggcggaaagccccccgaaaccaacaaagctgagccgagagaaacaaacaaaacaaacacaccgggccagacaagccatcgacaaaactttgcaaaagcaaaaacaaaaaaggaaaaactaaccaacctcaaccaaccagcccccgagccacccggggcgccctcccgcgccctcttgcaccctcgcacacacaaaaggcggcgcgccggagcccgagacccggggagccgccgccgccccgccgccgcccgcagccaggggagcaggaagtccggacgcagcccccatagatatggcaatggtagtcagcacgtggcgcgacccccaggacgaggtgcccggctcacagggcagccaggcctcgcaggcgccgcccgtgcccggcccgccgcccggcgccccgcacacgccacagacgcccggccaagggggcccagccagcacgccagcccagacggcggccggtggccagggcggccctggcggcccgggtagcgacaagcagcagcagcagcaacacatcgagtgcgtggtgtgcggagacaagtcgagcggcaagcactacggccagttcacgtgcgagggctgcaagagcttcttcaagcgcagcgtgcggaggaacctgagctacacgtgccgcgccaaccggaactgtcccatcgaccagcaccatcgcaaccagtgccagtactgccgcctcaaaaagtgcctcaaagtgggcatgagacgggaagcggtgcagaggggcaggatgccgccgacccagccgacccacgggcagttcgcgctgaccaacggggatcccctcaactgccactcgtacctgtccggatatatttccctgctgttgcgcgcggagccctatcccacgtcgcgcttcggcagccaatgcatgcagcccaacaacatcatgggtatcgagaacatttgcgaactggccgcgaggatgctcttcagcgccgtcgagtgggcccggaacatccccttcttccccgacctgcagatcacggaccaggtggccctgcttcgcctcacctggagcgagctgtttgtgttgaatgcggcgcagtgctccatgcccctccacgtcgccccgctcctggccgccgccggcctgcatgcttcgcccatgtccgccgaccgggtggtcgcctttatggaccacatacggatcttccaagagcaagtggagaagctcaaggcgctgcacgttgactcagccgagtacagctgcctcaaggccatagtcctgttcacctcagatgcctgtggtctctctgatgtagcccatgtggaaagcttgcaggaaaagtctcagtgtgctttggaagaatacgttaggagccagtaccccaaccagccgacgagattcggaaagcttttgcttcgcctcccttccctccgcaccgtctcctcctcagtcatagagcaattgtttttcgtccgtttggtaggtaaaacccccatcgaaaccctcatccgggatatgttactgtccggcagcagttttaactggccgtatatggcaattcaataaataaataaaataagaagggggagtgaaacagagaaagaaaaggcaaaagactggtttgtttgcttaatttccttctgttaagaaaggatataaaaggatgttacaagtttgctaaaagaagagaggggaagaatttaatggactgtgaatttcaaaaaaaaaaaaaaagactgtcaaatgaacttttacagaatgcattaaaaaaaaaaaaaaactcctgtgtcggtcagaacaacttgctacttatcatttttgtataaaaaggaaattagtctttttctttttttggtaaatttttgaaaaatattgctaaaagtgcatttaaggagattgggagacaattagcagaatggagaaagtaagtcttttttttttccaaattattaattgtcctgtgtctatgtacctctagctgttcttttttgtacttttctggttccaaaccagtttattctgtggttctataataagttttgatataatcttggcttcttaaaaactgtgtatcattaaaatatatgttctgcaagaattaaaactgagtccatgaaaataccataggaagacataaaactttaaaaggcaactcaaagatgatggaaacgcacttacaagtggtgaccaaaatttttaggtgaagtcgagcactctaattagagaactggaggaaccacatataacacttaacttcccctaccctgcccctccccaaaagaaaccatgacaaacctagcttttaaaaaatattttaagaaagagaatgaactgtggaatttattggcagccaaggaatgtgtccaagacacatgctgaggttttgaataaaaagtgaacttttgtaatttgaattgggtcccgcttagttcttgaattgttatgaaaatcctatatctgtttgtatatttgcaaaccctttgtattataattgttgatattttccctttttaaaaaataccattgaaatcagcatgacaaaaataacactgttggcacttataggtaacgtgattgattcagtatcttagagtttacagtttgtgttttaaaaaaactgaaggttttttttttaagtgcaacatttctgtatactgtaaaagttataataactgaactgtttggtcgagtctttgtgtgttatattccaaggaaaattgaaagtattcagaaattaaaatattatttgatatctgaaacctggctgtccccactcactgtctttacatctagaagagcccctgtgagctctcgcttagctggccgggcggggggtggtgggggggggcatttgtttactcccctcagtcagtttgttcaaaggtggactactgtatttgcctgtttaatttgggtgtgtgtgtgttggggggggagctgaagttaatggtttatctatggtttaggaagtgccatactgatatagtaaaccacccccattcacctaatcctccttttaattaaaaatggattttccaggaaaaaaaaaaaggcccttatatttgtcacacttaagtgcctgcttagggaaggtattgtgaaaaagtattagaaatcttgagatcagtatctattttatgatcagaaaaaaatactcttttgtacatttctgacagttactcagaagatcgttcaagcaagctaatcacagcattgtaactagaggacagttgtttgcagtgagtttttccttaagtaggtacgattttttaaaatattctgtgattctactctagcgtggttgttgagagagtttcaaattcagtgatacaggttctaagactgaaaggtctacttttaatgtatatatgataacttgcagttggtttccctctcccctccccccctttaccttcagtctgtgagagcatgaccacagggtcaagggaatcttttccattggagttatgtacataaaaacacatcgacattttgacatttcagattgtgtggctacaatctgtactgctcttgggatcctttgtccttagaagccaaattaaggaagagaaagcaggacagagaaaaagaaagaaggaaggagggaaactttacagggtgtgctgatttggaagtagtaactatttcttttggagtctttttttcatttttcctctttctcttttcctggtttggaggaagctcggtgctgggagcttgcaattttgttcttattcaaggtttccaacccacccccccaccgccagtacttcatcatgttgtggtttaattctaattggtgggggggggggaggactagtgagggaggtgaaagaacagggataattttgtaaagtgtattaaacgttaatattcagatccagtcaatacatgcagaccagtaaaatctgatttgtgcagagttctccatctgactctcacttatttctgtagatatatacatatataaatacaagtatgttcttacggcacagtattgctgacctttagttcgaggttttgtcggttgttgttgattttcttcctcttgcaagtgctatccatgtgagtgtgtgaagtttctctaataagtaaaacacaggcccttttccttgtttgttttgtgttagtttattgtaaacagccatttgttgtaaattattattggcattaaattataatttatgattttcaaagcaaaagacaa

SEQ ID NO: 20708 - DNA, 3501 bp, Homo sapiens
  source 1..3501: mol_type = unassigned DNA
ctccttccctcgtcctgggtcccggggtcctgggtacgtttggctagcctgctctggcggtgcagaggggcaggatgccgccgacccagccgacccacgggcagttcgcgctgaccaacggggatcccctcaactgccactcgtacctgtccggatatatttccctgctgttgcgcgcggagccctatcccacgtcgcgcttcggcagccaatgcatgcagcccaacaacatcatgggtatcgagaacatttgcgaactggccgcgaggatgctcttcagcgccgtcgagtgggcccggaacatccccttcttccccgacctgcagatcacggaccaggtggccctgcttcgcctcacctggagcgagctgtttgtgttgaatgcggcgcagtgctccatgcccctccacgtcgccccgctcctggccgccgccggcctgcatgcttcgcccatgtccgccgaccgggtggtcgcctttatggaccacatacggatcttccaagagcaagtggagaagctcaaggcgctgcacgttgactcagccgagtacagctgcctcaaggccatagtcctgttcacctcagatgcctgtggtctctctgatgtagcccatgtggaaagcttgcaggaaaagtctcagtgtgctttggaagaatacgttaggagccagtaccccaaccagccgacgagattcggaaagcttttgcttcgcctcccttccctccgcaccgtctcctcctcagtcatagagcaattgtttttcgtccgtttggtaggtaaaacccccatcgaaaccctcatccgggatatgttactgtccggcagcagttttaactggccgtatatggcaattcaataaataaataaaataagaagggggagtgaaacagagaaagaaaaggcaaaagactggtttgtttgcttaatttccttctgttaagaaaggatataaaaggatgttacaagtttgctaaaagaagagaggggaagaatttaatggactgtgaatttcaaaaaaaaaaaaaaagactgtcaaatgaacttttacagaatgcattaaaaaaaaaaaaaaactcctgtgtcggtcagaacaacttgctacttatcatttttgtataaaaaggaaattagtctttttctttttttggtaaatttttgaaaaatattgctaaaagtgcatttaaggagattgggagacaattagcagaatggagaaagtaagtcttttttttttccaaattattaattgtcctgtgtctatgtacctctagctgttcttttttgtacttttctggttccaaaccagtttattctgtggttctataataagttttgatataatcttggcttcttaaaaactgtgtatcattaaaatatatgttctgcaagaattaaaactgagtccatgaaaataccataggaagacataaaactttaaaaggcaactcaaagatgatggaaacgcacttacaagtggtgaccaaaatttttaggtgaagtcgagcactctaattagagaactggaggaaccacatataacacttaacttcccctaccctgcccctccccaaaagaaaccatgacaaacctagcttttaaaaaatattttaagaaagagaatgaactgtggaatttattggcagccaaggaatgtgtccaagacacatgctgaggttttgaataaaaagtgaacttttgtaatttgaattgggtcccgcttagttcttgaattgttatgaaaatcctatatctgtttgtatatttgcaaaccctttgtattataattgttgatattttccctttttaaaaaataccattgaaatcagcatgacaaaaataacactgttggcacttataggtaacgtgattgattcagtatcttagagtttacagtttgtgttttaaaaaaactgaaggttttttttttaagtgcaacatttctgtatactgtaaaagttataataactgaactgtttggtcgagtctttgtgtgttatattccaaggaaaattgaaagtattcagaaattaaaatattatttgatatctgaaacctggctgtccccactcactgtctttacatctagaagagcccctgtgagctctcgcttagctggccgggcggggggtggtgggggggggcatttgtttactcccctcagtcagtttgttcaaaggtggactactgtatttgcctgtttaatttgggtgtgtgtgtgttggggggggagctgaagttaatggtttatctatggtttaggaagtgccatactgatatagtaaaccacccccattcacctaatcctccttttaattaaaaatggattttccaggaaaaaaaaaaaggcccttatatttgtcacacttaagtgcctgcttagggaaggtattgtgaaaaagtattagaaatcttgagatcagtatctattttatgatcagaaaaaaatactcttttgtacatttctgacagttactcagaagatcgttcaagcaagctaatcacagcattgtaactagaggacagttgtttgcagtgagtttttccttaagtaggtacgattttttaaaatattctgtgattctactctagcgtggttgttgagagagtttcaaattcagtgatacaggttctaagactgaaaggtctacttttaatgtatatatgataacttgcagttggtttccctctcccctccccccctttaccttcagtctgtgagagcatgaccacagggtcaagggaatcttttccattggagttatgtacataaaaacacatcgacattttgacatttcagattgtgtggctacaatctgtactgctcttgggatcctttgtccttagaagccaaattaaggaagagaaagcaggacagagaaaaagaaagaaggaaggagggaaactttacagggtgtgctgatttggaagtagtaactatttcttttggagtctttttttcatttttcctctttctcttttcctggtttggaggaagctcggtgctgggagcttgcaattttgttcttattcaaggtttccaacccacccccccaccgccagtacttcatcatgttgtggtttaattctaattggtgggggggggggaggactagtgagggaggtgaaagaacagggataattttgtaaagtgtattaaacgttaatattcagatccagtcaatacatgcagaccagtaaaatctgatttgtgcagagttctccatctgactctcacttatttctgtagatatatacatatataaatacaagtatgttcttacggcacagtattgctgacctttagttcgaggttttgtcggttgttgttgattttcttcctcttgcaagtgctatccatgtgagtgtgtgaagtttctctaataagtaaaacacaggcccttttccttgtttgttttgtgttagtttattgtaaacagccatttgttgtaaattattattggcattaaattataatttatgattttcaaagcaaaagacaa

SEQ ID NO: 20709 - DNA, 2214 bp, Homo sapiens
  source 1..2214: mol_type = unassigned DNA
aggatcactccagacatctcctacctacggtttggggttttttttcttaaaggcgaggcttgcattcctcagcagctatgtacaaagctccctgaaaccttgtctctctaaagttagtgtgcagggttttccaaggctgagagagcctaatacatggggaagcacttccttgaggtggaagatctctcccttcacctttcctctttttccctgcaggctagtgcctactttttatcagtttgcacaatcgcttagataaacaccgaggaggagattctctttaattatcaaagacacatcttttcagggggccaacaaagcatttatttcacccgccaaactaaaggagagttattccagtttaggaggaagatgcaagcggtttgggaccttgaacaaggcaaatatggttttgcggtgcagaggggcaggatgccgccgacccagccgacccacgggcagttcgcgctgaccaacggggatcccctcaactgccactcgtacctgtccggatatatttccctgctgttgcgcgcggagccctatcccacgtcgcgcttcggcagccaatgcatgcagcccaacaacatcatgggtatcgagaacatttgcgaactggccgcgaggatgctcttcagcgccgtcgagtgggcccggaacatccccttcttccccgacctgcagatcacggaccaggtggccctgcttcgcctcacctggagcgagctgtttgtgttgaatgcggcgcagtgctccatgcccctccacgtcgccccgctcctggccgccgccggcctgcatgcttcgcccatgtccgccgaccgggtggtcgcctttatggaccacatacggatcttccaagagcaagtggagaagctcaaggcgctgcacgttgactcagccgagtacagctgcctcaaggccatagtcctgttcacctcagatgcctgtggtctctctgatgtagcccatgtggaaagcttgcaggaaaagtctcagtgtgctttggaagaatacgttaggagccagtaccccaaccagccgacgagattcggaaagcttttgcttcgcctcccttccctccgcaccgtctcctcctcagtcatagagcaattgtttttcgtccgtttggtaggtaaaacccccatcgaaaccctcatccgggatatgttactgtccggcagcagttttaactggccgtatatggcaattcaataaataaataaaataagaagggggagtgaaacagagaaagaaaaggcaaaagactggtttgtttgcttaatttccttctgttaagaaaggatataaaaggatgttacaagtttgctaaaagaagagaggggaagaatttaatggactgtgaatttcaaaaaaaaaaaaaaagactgtcaaatgaacttttacagaatgcattaaaaaaaaaaaaaaactcctgtgtcggtcagaacaacttgctacttatcatttttgtataaaaaggaaattagtctttttctttttttggtaaatttttgaaaaatattgctaaaagtgcatttaaggagattgggagacaattagcagaatggagaaagtaagtcttttttttttccaaattattaattgtcctgtgtctatgtacctctagctgttcttttttgtacttttctggttccaaaccagtttattctgtggttctataataagttttgatataatcttggcttcttaaaaactgtgtatcattaaaatatatgttctgcaagaattaaaactgagtccatgaaaataccataggaagacataaaactttaaaaggcaactcaaagatgatggaaacgcacttacaagtggtgaccaaaatttttaggtgaagtcgagcactctaattagagaactggaggaaccacatataacacttaacttcccctaccctgcccctccccaaaagaaaccatgacaaacctagcttttaaaaaatattttaagaaagagaatgaactgtggaatttattggcagccaaggaatgtgtccaagacacatgctgaggttttgaataaaaagtgaacttttgtaatttgaattgggtcccgcttagttcttgaattgttatgaaaatcctatatctgtttgtatatttgcaaaccctttgtattataattgttgatattttccctttttaaaaaataccattgaaatcagcatgacaaaaataacactgttggcactta

SEQ ID NO: 20710 - DNA, 1712 bp, Homo sapiens
  source 1..1712: mol_type = unassigned DNA
gcgaggggccctgggcggctgctttcgctctgcgcgagttgggtctttgtgatataaaattcgccgagcgccgcgagccgtgctttgccaatggcgcgctcggcgcggggcgcgggctccgggttggggcgagccaacgccggggtttctttgtgtttctgcgagagcgactctcccggtccggagtcagataacagcctgggcccgagcctcgccggctttccccggcccttacaggccctgcccaggctccgctagtgccggccgcctgctccctgcctctcccggcttcctctctctttagccggcctctctctctccgccctctccctccgtctctttctccgagcacactgattagacagacgccagacctccgctctctgcttgtctctcactgggggggttccccgccgggctggggctggggcttcggggtttgtgggagagtcgttccggagtggccacaggccgtctggggtggaccctcgtgccttttgcaaaagcgcctcaccctccccccagactcgcccctcccgctccctctcctccaatcaataagaaatatcagctgtttagcagtaaagaagaaagatgccctcagaatgctacatcccgcccacagcgccggggaccccgaggcaaggtggccaattctgggtcctcggcggaccagccccgagcgggcctcggagcggtgcagaggggcaggatgccgccgacccagccgacccacgggcagttcgcgctgaccaacggggatcccctcaactgccactcgtacctgtccggatatatttccctgctgttgcgcgcggagccctatcccacgtcgcgcttcggcagccaatgcatgcagcccaacaacatcatgggtatcgagaacatttgcgaactggccgcgaggatgctcttcagcgccgtcgagtgggcccggaacatccccttcttccccgacctgcagatcacggaccaggtggccctgcttcgcctcacctggagcgagctgtttgtgttgaatgcggcgcagtgctccatgcccctccacgtcgccccgctcctggccgccgccggcctgcatgcttcgcccatgtccgccgaccgggtggtcgcctttatggaccacatacggatcttccaagagcaagtggagaagctcaaggcgctgcacgttgactcagccgagtacagctgcctcaaggccatagtcctgttcacctcagatgcctgtggtctctctgatgtagcccatgtggaaagcttgcaggaaaagtctcagtgtgctttggaagaatacgttaggagccagtaccccaaccagccgacgagattcggaaagcttttgcttcgcctcccttccctccgcaccgtctcctcctcagtcatagagcaattgtttttcgtccgtttggtaggtaaaacccccatcgaaaccctcatccgggatatgttactgtccggcagcagttttaactggccgtatatggcaattcaataaataaataaaataagaagggggagtgaaacagagaaagaaaaggcaaaagactggtttgtttgcttaatttccttctgttaagaaaggatataaaaggatgttacaagtttgctaaaagaagagaggggaagaatttaatggactgtgaatttcaaaaaaaaaaaaaaagactgtcaaatgaacttttacagaatgcattaaaaaaaaaaaaaaa

SEQ ID NO: 20711 - DNA, 1804 bp, Homo sapiens
  source 1..1804: mol_type = unassigned DNA
gtgcagcccgtgccccccgcgcgccggggccgaatgcgcgccgcgtagggtcccccgggccgagaggggtgcccggagggaagagcgcggtgggggcgccccggccccgctgccctggggctatggccatggtgaccggcggctggggcggccccggcggcgacacgaacggcgtggacaaggcgggcggctacccgcgcgcggccgaggacgactcggcctcgccccccggtgccgccagcgacgccgagccgggcgacgaggagcggccggggctgcaggtggactgcgtggtgtgcggggacaagtcgagcggcaagcattacggtgtcttcacctgcgagggctgcaagagctttttcaagcgaagcatccgccgcaacctcagctacacctgccggtccaaccgtgactgccagatcgaccagcaccaccggaaccagtgccagtactgccgtctcaagaagtgcttccgggtgggcatgaggaaggaggcggtgcagcgcggccgcatcccgcactcgctgcctggtgccgtggccgcctcctcgggcagccccccgggctcggcgctggcggcagtggcgagcggcggagacctcttcccggggcagccggtgtccgaactgatcgcgcagctgctgcgcgctgagccctaccctgcggcggccggacgcttcggcgcagggggcggcgcggcgggcgcggtgctgggcatcgacaacgtgtgcgagctggcggcgcggctgctcttcagcaccgtggagtgggcgcgccacgcgcccttcttccccgagctgccggtggccgaccaggtggcgctgctgcgcctgagctggagcgagctcttcgtgctgaacgcggcgcaggcggcgctgcccctgcacacggcgccgctactggccgccgccggcctccacgccgcgcctatggccgccgagcgcgccgtggctttcatggaccaggtgcgcgccttccaggagcaggtggacaagctgggccgcctgcaggtcgactcggccgagtatggctgcctcaaggccatcgcgctcttcacgcccgacgcctgtggcctctcagacccggcccacgttgagagcctgcaggagaaggcgcaggtggccctcaccgagtatgtgcgggcgcagtacccgtcccagccccagcgcttcgggcgcctgctgctgcggctccccgccctgcgcgcggtccctgcctccctcatctcccagctgttcttcatgcgcctggtggggaagacgcccattgagacactgatcagagacatgctgctgtcggggagtaccttcaactggccctacggctcgggccagtgaccatgacggggccacgtgtgctgtggccaggcctgcagacagacctcaagggacagggaatgctgaggcctcgaggggcctcccggggcccaggactctggcttctctcctcagacttctattttttaaagactgtgaaatgtttgtcttttctgttttttaaatgatcatgaaaccaaaaagagactgatcatccaggcctcagcctcatcctccccaggacccctgtccaggatggagggtccaatcctaggacagccttgttcctcagcacccctagcatgaacttgtgggatggtggggttggcttccctggcatgatggacaaaggcctggcgtcggccagaggggctgctccagtgggcaggggtagctagcgtgtgccaggcagatcctctggacacgtaacctatgtcagacactacatgatgactcaaggccaataataaagacatttcctacctgca

SEQ ID NO: 20712 - DNA, 1392 bp, Homo sapiens
  source 1..1392: mol_type = unassigned DNA
atggccatggtgaccggcggctggggcggccccggcggcgacgccgagccgggcgacgaggagcggccggggctgcaggtggactgcgtggtgtgcggggacaagtcgagcggcaagcattacggtgtcttcacctgcgagggctgcaagagctttttcaagcgaagcatccgccgcaacctcagctacacctgccggtccaaccgtgactgccagatcgaccagcaccaccggaaccagtgccagtactgccgtctcaagaagtgcttccgggtgggcatgaggaaggaggcggtgcagcgcggccgcatcccgcactcgctgcctggtgccgtggccgcctcctcgggcagccccccgggctcggcgctggcggcagtggcgagcggcggagacctcttcccggggcagccggtgtccgaactgatcgcgcagctgctgcgcgctgagccctaccctgcggcggccggacgcttcggcgcagggggcggcgcggcgggcgcggtgctgggcatcgacaacgtgtgcgagctggcggcgcggctgctcttcagcaccgtggagtgggcgcgccacgcgcccttcttccccgagctgccggtggccgaccaggtggcgctgctgcgcctgagctggagcgagctcttcgtgctgaacgcggcgcaggcggcgctgcccctgcacacggcgccgctactggccgccgccggcctccacgccgcgcctatggccgccgagcgcgccgtggctttcatggaccaggtgcgcgccttccaggagcaggtggacaagctgggccgcctgcaggtcgactcggccgagtatggctgcctcaaggccatcgcgctcttcacgcccgacgcctgtggcctctcagacccggcccacgttgagagcctgcaggagaaggcgcaggtggccctcaccgagtatgtgcgggcgcagtacccgtcccagccccagcgcttcgggcgcctgctgctgcggctccccgccctgcgcgcggtccctgcctccctcatctcccagctgttcttcatgcgcctggtggggaagacgcccattgagacactgatcagagacatgctgctgtcggggagtaccttcaactggccctacggctcgggccagtgaccatgacggggccacgtgtgctgtggccaggcctgcagacagacctcaagggacagggaatgctgaggcctcgaggggcctcccggggcccaggactctggcttctctcctcagacttctattttttaaagactgtgaaatgtttgtcttttctgttttttaaatgatcatgaaaccaaaaagagactgatcatccaggcctcagcctcatcctccccaggacccctgtccaggatggagggtccaatcctaggacag

SEQ ID NO: 20713 - DNA, 3150 bp, Homo sapiens
  source 1..3150: mol_type = unassigned DNA
cgggagccaacttcaggctgctcagaggaagcccgtgcagtcagtcacctgggtgcaagagcgttgctgcctcgggctctcccgctgcagggagagcggcactcgctggcctggatgtggttggatttaggggggctccgcagcaggggtttcgtggcggtggcaagcgctgcaacaggtagacggcgagagacggaccccggccgaggcagcgatggagaccaaaggctaccacagtctccctgaaggtctagatatggaaagacggtggggtcaagtttctcaggctgtggagcgttcttccctgggacctacagagaggaccgatgagaataactacatggagattgtcaacgtaagctgtgtttccggtgctattccaaacaacagtactcaaggaagcagcaaagaaaaacaagaactactcccttgccttcagcaagacaataatcggcctgggattttaacatctgatattaaaactgagctggaatctaaggaactttcagcaactgtagctgagtccatgggtttatatatggattctgtaagagatgctgactattcctatgagcagcagaaccaacaaggaagcatgagtccagctaagatttatcagaatgttgaacagctggtgaaattttacaaaggaaatggccatcgtccttccactctaagttgtgtgaacacgcccttgagatcatttatgtctgactctgggagctccgtgaatggtggcgtcatgcgcgccgttgttaaaagccctatcatgtgtcatgagaaaagcccgtctgtttgcagccctctgaacatgacatcttcggtttgcagccctgctggaatcaactctgtgtcctccaccacagccagctttggcagttttccagtgcacagcccaatcacccagggaactcctctgacatgctcccctaatgttgaaaatcgaggctccaggtcgcacagccctgcacatgctagcaatgtgggctctcctctctcaagtccgttaagtagcatgaaatcctcaatttccagccctccaagtcactgcagtgtaaaatctccagtctccagtcccaataatgtcactctgagatcctctgtgtctagccctgcaaatattaacaactcaaggtgctctgtttccagcccttcgaacactaataacagatccacgctttccagtccggcagccagtactgtgggatctatctgtagccctgtaaacaatgccttcagctacactgcttctggcacctctgctggatccagtacattgcgggatgtggttcccagtccagacacgcaggagaaaggtgctcaagaggtcccttttcctaagactgaggaagtagagagtgccatctcaaatggtgtgactggccagcttaatattgtccagtacataaaaccagaaccagatggagcttttagcagctcatgtctaggaggaaatagcaaaataaattcggattcttcattctcagtaccaataaagcaagaatcaaccaagcattcatgttcaggcacctcttttaaagggaatccaacagtaaacccgtttccatttatggatggctcgtatttttcctttatggatgataaagactattattccctatcaggaattttaggaccacctgtgcccggctttgatggtaactgtgaaggcagcggattcccagtgggtattaaacaagaaccagatgatgggagctattacccagaggccagcatcccttcctctgctattgttggggtgaattcaggtggacagtccttccactacaggattggtgctcaaggtacaatatctttatcacgatcggctagagaccaatctttccaacacctgagttcctttcctcctgtcaatactttagtggagtcatggaaatcacacggcgacctgtcgtctagaagaagtgatgggtatccggtcttagaatacattccagaaaatgtatcaagctctactttacgaagtgtttctactggatcttcaagaccttcaaaaatatgtttggtgtgtggggatgaggcttcaggatgccattatggggtagtcacctgtggcagctgcaaagttttcttcaaaagagcagtggaagggcaacacaactatttatgtgctggaagaaatgattgcatcattgataagattcgacgaaagaattgtcctgcttgcagacttcagaaatgtcttcaagctggaatgaatttaggagagagaagatgcatcagtctgccatgtatgaactatgccaggggatgcaccaaatcagccttcagttcgttcgactgcagctcacctttgaagaatacaccatcatgaaagttttgctgctactaagcacaattccaaaggatggcctcaaaagccaggctgcatttgaagaaatgaggacaaattacatcaaagaactgaggaagatggtaactaagtgtcccaacaattctgggcagagctggcagaggttctaccaactgaccaagctgctggactccatgcatgacctggtgagcgacctgctggaattctgcttctacaccttccgagagtcccatgcgctgaaggtagagttccccgcaatgctggtggagatcatcagcgaccagctgcccaaggtggagtcggggaacgccaagccgctctacttccaccggaagtgactgcccgctgcccagaagaactttgccttaagtttccctgtgttgttccacacccagaaggacccaagaaaacctgtttttaacatgtgatggttgattcacacttgttcaacagtttctcaagtttaaagtcatgtcagaggtttggagccgggaaagctgtttttccgtggatttggcgagaccagagcagtctgaaggattccccacctccaatcccccagcgcttagaaacatgttcctgttcctcgggatgaaaagccatatctagtcaataactctgattttgatattttcacagatggaagaagttttaactatgccgtgtagtttctggtatcgttcgcttgttttaaaagggttcaaggactaacgaacgttttaaagcttacccttggtttgcacataaaacgtatagtcaatatggggcattaatattcttttgttattaaaaaaacacaaaaaaataataaaaaa

SEQ ID NO: 20714 - DNA, 5712 bp, Homo sapiens
  source 1..5712: mol_type = unassigned DNA
attgctctacccaccgtcagcagggcgactgccactgccgggattatcatcctctccatcctcaccgccgatcagccaatattggacttgctggtggcggcggcagcagcggcggcgggagtctagccgttccccttcccccgccccagcctccccaccatgtcctagaaaagcgatggagaccaaaggctaccacagtctccctgaaggtctagatatggaaagacggtggggtcaagtttctcaggctgtggagcgttcttccctgggacctacagagaggaccgatgagaataactacatggagattgtcaacgtaagctgtgtttccggtgctattccaaacaacagtactcaaggaagcagcaaagaaaaacaagaactactcccttgccttcagcaagacaataatcggcctgggattttaacatctgatattaaaactgagctggaatctaaggaactttcagcaactgtagctgagtccatgggtttatatatggattctgtaagagatgctgactattcctatgagcagcagaaccaacaaggaagcatgagtccagctaagatttatcagaatgttgaacagctggtgaaattttacaaaggaaatggccatcgtccttccactctaagttgtgtgaacacgcccttgagatcatttatgtctgactctgggagctccgtgaatggtggcgtcatgcgcgccgttgttaaaagccctatcatgtgtcatgagaaaagcccgtctgtttgcagccctctgaacatgacatcttcggtttgcagccctgctggaatcaactctgtgtcctccaccacagccagctttggcagttttccagtgcacagcccaatcacccagggaactcctctgacatgctcccctaatgttgaaaatcgaggctccaggtcgcacagccctgcacatgctagcaatgtgggctctcctctctcaagtccgttaagtagcatgaaatcctcaatttccagccctccaagtcactgcagtgtaaaatctccagtctccagtcccaataatgtcactctgagatcctctgtgtctagccctgcaaatattaacaactcaaggtgctctgtttccagcccttcgaacactaataacagatccacgctttccagtccggcagccagtactgtgggatctatctgtagccctgtaaacaatgccttcagctacactgcttctggcacctctgctggatccagtacattgcgggatgtggttcccagtccagacacgcaggagaaaggtgctcaagaggtcccttttcctaagactgaggaagtagagagtgccatctcaaatggtgtgactggccagcttaatattgtccagtacataaaaccagaaccagatggagcttttagcagctcatgtctaggaggaaatagcaaaataaattcggattcttcattctcagtaccaataaagcaagaatcaaccaagcattcatgttcaggcacctcttttaaagggaatccaacagtaaacccgtttccatttatggatggctcgtatttttcctttatggatgataaagactattattccctatcaggaattttaggaccacctgtgcccggctttgatggtaactgtgaaggcagcggattcccagtgggtattaaacaagaaccagatgatgggagctattacccagaggccagcatcccttcctctgctattgttggggtgaattcaggtggacagtccttccactacaggattggtgctcaaggtacaatatctttatcacgatcggctagagaccaatctttccaacacctgagttcctttcctcctgtcaatactttagtggagtcatggaaatcacacggcgacctgtcgtctagaagaagtgatgggtatccggtcttagaatacattccagaaaatgtatcaagctctactttacgaagtgtttctactggatcttcaagaccttcaaaaatatgtttggtgtgtggggatgaggcttcaggatgccattatggggtagtcacctgtggcagctgcaaagttttcttcaaaagagcagtggaagggcaacacaactatttatgtgctggaagaaatgattgcatcattgataagattcgacgaaagaattgtcctgcttgcagacttcagaaatgtcttcaagctggaatgaatttaggagcacgaaagtcaaagaagttgggaaagttaaaagggattcacgaggagcagccacagcagcagcagcccccacccccacccccacccccgcaaagcccagaggaagggacaacgtacatcgctcctgcaaaagaaccctcggtcaacacagcactggttcctcagctctccacaatctcacgagcgctcacaccttcccccgttatggtccttgaaaacattgaacctgaaattgtatatgcaggctatgacagctcaaaaccagatacagccgaaaatctgctctccacgctcaaccgcttagcaggcaaacagatgatccaagtcgtgaagtgggcaaaggtacttccaggatttaaaaacttgcctcttgaggaccaaattaccctaatccagtattcttggatgtgtctatcatcatttgccttgagctggagatcgtacaaacatacgaacagccaatttctctattttgcaccagacctagtctttaatgaagagaagatgcatcagtctgccatgtatgaactatgccaggggatgcaccaaatcagccttcagttcgttcgactgcagctcacctttgaagaatacaccatcatgaaagttttgctgctactaagcacaattccaaaggatggcctcaaaagccaggctgcatttgaagaaatgaggacaaattacatcaaagaactgaggaagatggtaactaagtgtcccaacaattctgggcagagctggcagaggttctaccaactgaccaagctgctggactccatgcatgacctggtgagcgacctgctggaattctgcttctacaccttccgagagtcccatgcgctgaaggtagagttccccgcaatgctggtggagatcatcagcgaccagctgcccaaggtggagtcggggaacgccaagccgctctacttccaccggaagtgactgcccgctgcccagaagaactttgccttaagtttccctgtgttgttccacacccagaaggacccaagaaaacctgtttttaacatgtgatggttgattcacacttgttcaacagtttctcaagtttaaagtcatgtcagaggtttggagccgggaaagctgtttttccgtggatttggcgagaccagagcagtctgaaggattccccacctccaatcccccagcgcttagaaacatgttcctgttcctcgggatgaaaagccatatctagtcaataactctgattttgatattttcacagatggaagaagttttaactatgccgtgtagtttctggtatcgttcgcttgttttaaaagggttcaaggactaacgaacgttttaaagcttacccttggtttgcacataaaacgtatagtcaatatggggcattaatattcttttgttattaaaaaaacacaaaaaaataataaaaaaatatatacagattcctgttgtgtaataacagaactcgtggcgtggggcagcagctgcctctgagccctcgctcgtccacggtcttctgcatcactggtatacacactcgttagcgtccatttcttatttaattagaatggataagatgatgttaaatgccttggtttgatttctagtatctattgtgttggctttacaaataattttttgcagtcttttgctgtgctgtacattactgtatgtataaattatgaaggacctgaaataaggtataaggatcttttgtaaatgagacacatacaaaaaaaatctttaatggttaataggatgaatgggaaagtatttttgaaagaattctattttgctggagactatttaagtactatctttgtctaaacaaggtaatttttttttgtaaagtgcaatgtcctgcatgcataatgaaccgtttacagtgtatttaagaaagggaaagctgtgccttttttagcttcatatctaatttaccattattttacagtctctgttgtaaataaccacactgaaacctcttcggttgtcttgaaacctttctactttttctgtactttttgttttgttcttggtctcccgcttggggcatttgtgggactccagcacgttttctggcttctgcttcatcctgctccatcggggaatgacacactgcggtgtctgcagctcctggaaggtgtcatttgacaacacatgtgggagaggaggtccttggagtgctgcagctttgggaaagctgcctcgtttcccttttcctctagaagcagaaccagctctacgagagtgagactgggaacttgatggctcagagagcatcttttcctcccattttagaaaatcagattttctcctgtgggaaaaaaaaattccatgcactctctctctgttaaagatcagctattcccttctgatcttggaaagaggttctgcactcctggaaccggtcacaggaacgcacagatcatggcaggatgcgctgggacggcccatcttggcaaggttcagtctgaatggcatggagaccgggagatagaggggttttagatttttaaaaggtaggttttaaaaataagttttatacataaacagttttggagaaaaattacagatcatataagcaagacagtggcactaaaatgtttaattcattaatctgtttgtttggcactgatgcaatgtatggcttttctcttgccccaaatcacaaacatatgtatctttggggaaactaacaatatgattgcactaaataaactactttgaatagaggccaaattaatcttttaaaaatgatgataatcatcaggtttactcagtgaaatcatattaattattttccaaaatctaaaagctgtagctggagaagcccatggccacgaggaagcagcaattaattagatcaacacttttctccagggttcaccatgcaggcaacattaccttgtctttcaaaagacacctgccttatgcaaggggaaacctgtgaaagctgcactcagagggaggagtttttcttacataatttgcaatttcaggaatttaatttataggcagatctttaaatacagtcaacttacggtgcacagtaatatgaaagccacactttgaaggtaataaatacacagcatgcagactgggagttgctagcaaacaaatggcttacttacaaaagcagcttttagttcagacttagtttttataaaatgggaattctgacttacttaaccaggtttgggatggagatggtctgcatcagctttttgtattaacaaagttactggctctttgtgtgtctccaggtaactttgcttgattaaacagcaaagccatattctaaattcactgttgaatgcctgtcccagtccaaattgtctgtctgctcttatttttgtaccatattgctcttaaaaatcttggtttggtacagttcataattcaccaaaagttcatataatttaaagaaacactaaattagtttaaaatgaagcaatttatatctttatgcaaaaacatatgtctgtctttgcaaaggactgtaagcagattacaataaatcctttactttaatcacc

SEQ ID NO: 20715 - DNA, 5909 bp, Homo sapiens
  source 1..5909: mol_type = unassigned DNA
aaaagggccagccctccagctggcccactccccctccgggctttcgcccgccctctctccctcccttttttgcccgccctggccctgcccctgcccctgccccctcctctcagcccctccgcgcccggggtgtcattgggcccgggagacgggagccaacttcaggctgctcagaggaagcccgtgcagtcagtcacctgggtgcaagagcgttgctgcctcgggctctcccgctgcagggagagcggcactcgctggcctggatgtggttggatttaggggggctccgcagcaggggtttcgtggcggtggcaagcgctgcaacaggtagacggcgagagacggaccccggccgaggcagcgatggagaccaaaggctaccacagtctccctgaaggtctagatatggaaagacggtggggtcaagtttctcaggctgtggagcgttcttccctgggacctacagagaggaccgatgagaataactacatggagattgtcaacgtaagctgtgtttccggtgctattccaaacaacagtactcaaggaagcagcaaagaaaaacaagaactactcccttgccttcagcaagacaataatcggcctgggattttaacatctgatattaaaactgagctggaatctaaggaactttcagcaactgtagctgagtccatgggtttatatatggattctgtaagagatgctgactattcctatgagcagcagaaccaacaaggaagcatgagtccagctaagatttatcagaatgttgaacagctggtgaaattttacaaaggaaatggccatcgtccttccactctaagttgtgtgaacacgcccttgagatcatttatgtctgactctgggagctccgtgaatggtggcgtcatgcgcgccgttgttaaaagccctatcatgtgtcatgagaaaagcccgtctgtttgcagccctctgaacatgacatcttcggtttgcagccctgctggaatcaactctgtgtcctccaccacagccagctttggcagttttccagtgcacagcccaatcacccagggaactcctctgacatgctcccctaatgttgaaaatcgaggctccaggtcgcacagccctgcacatgctagcaatgtgggctctcctctctcaagtccgttaagtagcatgaaatcctcaatttccagccctccaagtcactgcagtgtaaaatctccagtctccagtcccaataatgtcactctgagatcctctgtgtctagccctgcaaatattaacaactcaaggtgctctgtttccagcccttcgaacactaataacagatccacgctttccagtccggcagccagtactgtgggatctatctgtagccctgtaaacaatgccttcagctacactgcttctggcacctctgctggatccagtacattgcgggatgtggttcccagtccagacacgcaggagaaaggtgctcaagaggtcccttttcctaagactgaggaagtagagagtgccatctcaaatggtgtgactggccagcttaatattgtccagtacataaaaccagaaccagatggagcttttagcagctcatgtctaggaggaaatagcaaaataaattcggattcttcattctcagtaccaataaagcaagaatcaaccaagcattcatgttcaggcacctcttttaaagggaatccaacagtaaacccgtttccatttatggatggctcgtatttttcctttatggatgataaagactattattccctatcaggaattttaggaccacctgtgcccggctttgatggtaactgtgaaggcagcggattcccagtgggtattaaacaagaaccagatgatgggagctattacccagaggccagcatcccttcctctgctattgttggggtgaattcaggtggacagtccttccactacaggattggtgctcaaggtacaatatctttatcacgatcggctagagaccaatctttccaacacctgagttcctttcctcctgtcaatactttagtggagtcatggaaatcacacggcgacctgtcgtctagaagaagtgatgggtatccggtcttagaatacattccagaaaatgtatcaagctctactttacgaagtgtttctactggatcttcaagaccttcaaaaatatgtttggtgtgtggggatgaggcttcaggatgccattatggggtagtcacctgtggcagctgcaaagttttcttcaaaagagcagtggaaggtaaatgttcatggcaacacaactatttatgtgctggaagaaatgattgcatcattgataagattcgacgaaagaattgtcctgcttgcagacttcagaaatgtcttcaagctggaatgaatttaggagcacgaaagtcaaagaagttgggaaagttaaaagggattcacgaggagcagccacagcagcagcagcccccacccccacccccacccccgcaaagcccagaggaagggacaacgtacatcgctcctgcaaaagaaccctcggtcaacacagcactggttcctcagctctccacaatctcacgagcgctcacaccttcccccgttatggtccttgaaaacattgaacctgaaattgtatatgcaggctatgacagctcaaaaccagatacagccgaaaatctgctctccacgctcaaccgcttagcaggcaaacagatgatccaagtcgtgaagtgggcaaaggtacttccaggatttaaaaacttgcctcttgaggaccaaattaccctaatccagtattcttggatgtgtctatcatcatttgccttgagctggagatcgtacaaacatacgaacagccaatttctctattttgcaccagacctagtctttaatgaagagaagatgcatcagtctgccatgtatgaactatgccaggggatgcaccaaatcagccttcagttcgttcgactgcagctcacctttgaagaatacaccatcatgaaagttttgctgctactaagcacaattccaaaggatggcctcaaaagccaggctgcatttgaagaaatgaggacaaattacatcaaagaactgaggaagatggtaactaagtgtcccaacaattctgggcagagctggcagaggttctaccaactgaccaagctgctggactccatgcatgacctggtgagcgacctgctggaattctgcttctacaccttccgagagtcccatgcgctgaaggtagagttccccgcaatgctggtggagatcatcagcgaccagctgcccaaggtggagtcggggaacgccaagccgctctacttccaccggaagtgactgcccgctgcccagaagaactttgccttaagtttccctgtgttgttccacacccagaaggacccaagaaaacctgtttttaacatgtgatggttgattcacacttgttcaacagtttctcaagtttaaagtcatgtcagaggtttggagccgggaaagctgtttttccgtggatttggcgagaccagagcagtctgaaggattccccacctccaatcccccagcgcttagaaacatgttcctgttcctcgggatgaaaagccatatctagtcaataactctgattttgatattttcacagatggaagaagttttaactatgccgtgtagtttctggtatcgttcgcttgttttaaaagggttcaaggactaacgaacgttttaaagcttacccttggtttgcacataaaacgtatagtcaatatggggcattaatattcttttgttattaaaaaaacacaaaaaaataataaaaaaatatatacagattcctgttgtgtaataacagaactcgtggcgtggggcagcagctgcctctgagccctcgctcgtccacggtcttctgcatcactggtatacacactcgttagcgtccatttcttatttaattagaatggataagatgatgttaaatgccttggtttgatttctagtatctattgtgttggctttacaaataattttttgcagtcttttgctgtgctgtacattactgtatgtataaattatgaaggacctgaaataaggtataaggatcttttgtaaatgagacacatacaaaaaaaatctttaatggttaataggatgaatgggaaagtatttttgaaagaattctattttgctggagactatttaagtactatctttgtctaaacaaggtaatttttttttgtaaagtgcaatgtcctgcatgcataatgaaccgtttacagtgtatttaagaaagggaaagctgtgccttttttagcttcatatctaatttaccattattttacagtctctgttgtaaataaccacactgaaacctcttcggttgtcttgaaacctttctactttttctgtactttttgttttgttcttggtctcccgcttggggcatttgtgggactccagcacgttttctggcttctgcttcatcctgctccatcggggaatgacacactgcggtgtctgcagctcctggaaggtgtcatttgacaacacatgtgggagaggaggtccttggagtgctgcagctttgggaaagctgcctcgtttcccttttcctctagaagcagaaccagctctacgagagtgagactgggaacttgatggctcagagagcatcttttcctcccattttagaaaatcagattttctcctgtgggaaaaaaaaattccatgcactctctctctgttaaagatcagctattcccttctgatcttggaaagaggttctgcactcctggaaccggtcacaggaacgcacagatcatggcaggatgcgctgggacggcccatcttggcaaggttcagtctgaatggcatggagaccgggagatagaggggttttagatttttaaaaggtaggttttaaaaataagttttatacataaacagttttggagaaaaattacagatcatataagcaagacagtggcactaaaatgtttaattcattaatctgtttgtttggcactgatgcaatgtatggcttttctcttgccccaaatcacaaacatatgtatctttggggaaactaacaatatgattgcactaaataaactactttgaatagaggccaaattaatcttttaaaaatgatgataatcatcaggtttactcagtgaaatcatattaattattttccaaaatctaaaagctgtagctggagaagcccatggccacgaggaagcagcaattaattagatcaacacttttctccagggttcaccatgcaggcaacattaccttgtctttcaaaagacacctgccttatgcaaggggaaacctgtgaaagctgcactcagagggaggagtttttcttacataatttgcaatttcaggaatttaatttataggcagatctttaaatacagtcaacttacggtgcacagtaatatgaaagccacactttgaaggtaataaatacacagcatgcagactgggagttgctagcaaacaaatggcttacttacaaaagcagcttttagttcagacttagtttttataaaatgggaattctgacttacttaaccaggtttgggatggagatggtctgcatcagctttttgtattaacaaagttactggctctttgtgtgtctccaggtaactttgcttgattaaacagcaaagccatattctaaattcactgttgaatgcctgtcccagtccaaattgtctgtctgctcttatttttgtaccatattgctcttaaaaatcttggtttggtacagttcataattcaccaaaagttcatataatttaaagaaacactaaattagtttaaaatgaagcaatttatatctttatgcaaaaacatatgtctgtctttgcaaaggactgtaagcagattacaataaatcctttactttaatc

SEQ ID NO: 20716 - DNA, 5893 bp, Homo sapiens
  source 1..5893: mol_type = unassigned DNA
aaaagggccagccctccagctggcccactccccctccgggctttcgcccgccctctctccctcccttttttgcccgccctggccctgcccctgcccctgccccctcctctcagcccctccgcgcccggggtgtcattgggcccgggagacgggagccaacttcaggctgctcagaggaagcccgtgcagtcagtcacctgggtgcaagagcgttgctgcctcgggctctcccgctgcagggagagcggcactcgctggcctggatgtggttggatttaggggggctccgcagcaggggtttcgtggcggtggcaagcgctgcaacaggtagacggcgagagacggaccccggccgaggcagcgatggagaccaaaggctaccacagtctccctgaaggtctagatatggaaagacggtggggtcaagtttctcaggctgtggagcgttcttccctgggacctacagagaggaccgatgagaataactacatggagattgtcaacgtaagctgtgtttccggtgctattccaaacaacagtactcaaggaagcagcaaagaaaaacaagaactactcccttgccttcagcaagacaataatcggcctgggattttaacatctgatattaaaactgagctggaatctaaggaactttcagcaactgtagctgagtccatgggtttatatatggattctgtaagagatgctgactattcctatgagcagcagaaccaacaaggaagcatgagtccagctaagatttatcagaatgttgaacagctggtgaaattttacaaaggaaatggccatcgtccttccactctaagttgtgtgaacacgcccttgagatcatttatgtctgactctgggagctccgtgaatggtggcgtcatgcgcgccgttgttaaaagccctatcatgtgtcatgagaaaagcccgtctgtttgcagccctctgaacatgacatcttcggtttgcagccctgctggaatcaactctgtgtcctccaccacagccagctttggcagttttccagtgcacagcccaatcacccagggaactcctctgacatgctcccctaatgttgaaaatcgaggctccaggtcgcacagccctgcacatgctagcaatgtgggctctcctctctcaagtccgttaagtagcatgaaatcctcaatttccagccctccaagtcactgcagtgtaaaatctccagtctccagtcccaataatgtcactctgagatcctctgtgtctagccctgcaaatattaacaactcaaggtgctctgtttccagcccttcgaacactaataacagatccacgctttccagtccggcagccagtactgtgggatctatctgtagccctgtaaacaatgccttcagctacactgcttctggcacctctgctggatccagtacattgcgggatgtggttcccagtccagacacgcaggagaaaggtgctcaagaggtcccttttcctaagactgaggaagtagagagtgccatctcaaatggtgtgactggccagcttaatattgtccagtacataaaaccagaaccagatggagcttttagcagctcatgtctaggaggaaatagcaaaataaattcggattcttcattctcagtaccaataaagcaagaatcaaccaagcattcatgttcaggcacctcttttaaagggaatccaacagtaaacccgtttccatttatggatggctcgtatttttcctttatggatgataaagactattattccctatcaggaattttaggaccacctgtgcccggctttgatggtaactgtgaaggcagcggattcccagtgggtattaaacaagaaccagatgatgggagctattacccagaggccagcatcccttcctctgctattgttggggtgaattcaggtggacagtccttccactacaggattggtgctcaaggtacaatatctttatcacgatcggctagagaccaatctttccaacacctgagttcctttcctcctgtcaatactttagtggagtcatggaaatcacacggcgacctgtcgtctagaagaagtgatgggtatccggtcttagaatacattccagaaaatgtatcaagctctactttacgaagtgtttctactggatcttcaagaccttcaaaaatatgtttggtgtgtggggatgaggcttcaggatgccattatggggtagtcacctgtggcagctgcaaagttttcttcaaaagagcagtggaagggcaacacaactatttatgtgctggaagaaatgattgcatcattgataagattcgacgaaagaattgtcctgcttgcagacttcagaaatgtcttcaagctggaatgaatttaggagcacgaaagtcaaagaagttgggaaagttaaaagggattcacgaggagcagccacagcagcagcagcccccacccccacccccacccccgcaaagcccagaggaagggacaacgtacatcgctcctgcaaaagaaccctcggtcaacacagcactggttcctcagctctccacaatctcacgagcgctcacaccttcccccgttatggtccttgaaaacattgaacctgaaattgtatatgcaggctatgacagctcaaaaccagatacagccgaaaatctgctctccacgctcaaccgcttagcaggcaaacagatgatccaagtcgtgaagtgggcaaaggtacttccaggatttaaaaacttgcctcttgaggaccaaattaccctaatccagtattcttggatgtgtctatcatcatttgccttgagctggagatcgtacaaacatacgaacagccaatttctctattttgcaccagacctagtctttaatgaagagaagatgcatcagtctgccatgtatgaactatgccaggggatgcaccaaatcagccttcagttcgttcgactgcagctcacctttgaagaatacaccatcatgaaagttttgctgctactaagcacaattccaaaggatggcctcaaaagccaggctgcatttgaagaaatgaggacaaattacatcaaagaactgaggaagatggtaactaagtgtcccaacaattctgggcagagctggcagaggttctaccaactgaccaagctgctggactccatgcatgacctggtgagcgacctgctggaattctgcttctacaccttccgagagtcccatgcgctgaaggtagagttccccgcaatgctggtggagatcatcagcgaccagctgcccaaggtggagtcggggaacgccaagccgctctacttccaccggaagtgactgcccgctgcccagaagaactttgccttaagtttccctgtgttgttccacacccagaaggacccaagaaaacctgtttttaacatgtgatggttgattcacacttgttcaacagtttctcaagtttaaagtcatgtcagaggtttggagccgggaaagctgtttttccgtggatttggcgagaccagagcagtctgaaggattccccacctccaatcccccagcgcttagaaacatgttcctgttcctcgggatgaaaagccatatctagtcaataactctgattttgatattttcacagatggaagaagttttaactatgccgtgtagtttctggtatcgttcgcttgttttaaaagggttcaaggactaacgaacgttttaaagcttacccttggtttgcacataaaacgtatagtcaatatggggcattaatattcttttgttattaaaaaaacacaaaaaaataataaaaaaatatatacagattcctgttgtgtaataacagaactcgtggcgtggggcagcagctgcctctgagccctcgctcgtccacggtcttctgcatcactggtatacacactcgttagcgtccatttcttatttaattagaatggataagatgatgttaaatgccttggtttgatttctagtatctattgtgttggctttacaaataattttttgcagtcttttgctgtgctgtacattactgtatgtataaattatgaaggacctgaaataaggtataaggatcttttgtaaatgagacacatacaaaaaaaatctttaatggttaataggatgaatgggaaagtatttttgaaagaattctattttgctggagactatttaagtactatctttgtctaaacaaggtaatttttttttgtaaagtgcaatgtcctgcatgcataatgaaccgtttacagtgtatttaagaaagggaaagctgtgccttttttagcttcatatctaatttaccattattttacagtctctgttgtaaataaccacactgaaacctcttcggttgtcttgaaacctttctactttttctgtactttttgttttgttcttggtctcccgcttggggcatttgtgggactccagcacgttttctggcttctgcttcatcctgctccatcggggaatgacacactgcggtgtctgcagctcctggaaggtgtcatttgacaacacatgtgggagaggaggtccttggagtgctgcagctttgggaaagctgcctcgtttcccttttcctctagaagcagaaccagctctacgagagtgagactgggaacttgatggctcagagagcatcttttcctcccattttagaaaatcagattttctcctgtgggaaaaaaaaattccatgcactctctctctgttaaagatcagctattcccttctgatcttggaaagaggttctgcactcctggaaccggtcacaggaacgcacagatcatggcaggatgcgctgggacggcccatcttggcaaggttcagtctgaatggcatggagaccgggagatagaggggttttagatttttaaaaggtaggttttaaaaataagttttatacataaacagttttggagaaaaattacagatcatataagcaagacagtggcactaaaatgtttaattcattaatctgtttgtttggcactgatgcaatgtatggcttttctcttgccccaaatcacaaacatatgtatctttggggaaactaacaatatgattgcactaaataaactactttgaatagaggccaaattaatcttttaaaaatgatgataatcatcaggtttactcagtgaaatcatattaattattttccaaaatctaaaagctgtagctggagaagcccatggccacgaggaagcagcaattaattagatcaacacttttctccagggttcaccatgcaggcaacattaccttgtctttcaaaagacacctgccttatgcaaggggaaacctgtgaaagctgcactcagagggaggagtttttcttacataatttgcaatttcaggaatttaatttataggcagatctttaaatacagtcaacttacggtgcacagtaatatgaaagccacactttgaaggtaataaatacacagcatgcagactgggagttgctagcaaacaaatggcttacttacaaaagcagcttttagttcagacttagtttttataaaatgggaattctgacttacttaaccaggtttgggatggagatggtctgcatcagctttttgtattaacaaagttactggctctttgtgtgtctccaggtaactttgcttgattaaacagcaaagccatattctaaattcactgttgaatgcctgtcccagtccaaattgtctgtctgctcttatttttgtaccatattgctcttaaaaatcttggtttggtacagttcataattcaccaaaagttcatataatttaaagaaacactaaattagtttaaaatgaagcaatttatatctttatgcaaaaacatatgtctgtctttgcaaaggactgtaagcagattacaataaatcctttacttt

SEQ ID NO: 20717 - DNA, 2967 bp, Homo sapiens
  source 1..2967: mol_type = unassigned DNA
atggagaccaaaggctaccacagtctccctgaaggtctagatatggaaagacggtggggtcaagtttctcaggctgtggagcgttcttccctgggacctacagagaggaccgatgagaataactacatggagattgtcaacgtaagctgtgtttccggtgctattccaaacaacagtactcaaggaagcagcaaagaaaaacaagaactactcccttgccttcagcaagacaataatcggcctgggattttaacatctgatattaaaactgagctggaatctaaggaactttcagcaactgtagctgagtccatgggtttatatatggattctgtaagagatgctgactattcctatgagcagcagaaccaacaaggaagcatgagtccagctaagatttatcagaatgttgaacagctggtgaaattttacaaaggaaatggccatcgtccttccactctaagttgtgtgaacacgcccttgagatcatttatgtctgactctgggagctccgtgaatggtggcgtcatgcgcgccgttgttaaaagccctatcatgtgtcatgagaaaagcccgtctgtttgcagccctctgaacatgacatcttcggtttgcagccctgctggaatcaactctgtgtcctccaccacagccagctttggcagttttccagtgcacagcccaatcacccagggaactcctctgacatgctcccctaatgttgaaaatcgaggctccaggtcgcacagccctgcacatgctagcaatgtgggctctcctctctcaagtccgttaagtagcatgaaatcctcaatttccagccctccaagtcactgcagtgtaaaatctccagtctccagtcccaataatgtcactctgagatcctctgtgtctagccctgcaaatattaacaactcaaggtgctctgtttccagcccttcgaacactaataacagatccacgctttccagtccggcagccagtactgtgggatctatctgtagccctgtaaacaatgccttcagctacactgcttctggcacctctgctggatccagtacattgcgggatgtggttcccagtccagacacgcaggagaaaggtgctcaagaggtcccttttcctaagactgaggaagtagagagtgccatctcaaatggtgtgactggccagcttaatattgtccagtacataaaaccagaaccagatggagcttttagcagctcatgtctaggaggaaatagcaaaataaattcggattcttcattctcagtaccaataaagcaagaatcaaccaagcattcatgttcaggcacctcttttaaagggaatccaacagtaaacccgtttccatttatggatggctcgtatttttcctttatggatgataaagactattattccctatcaggaattttaggaccacctgtgcccggctttgatggtaactgtgaaggcagcggattcccagtgggtattaaacaagaaccagatgatgggagctattacccagaggccagcatcccttcctctgctattgttggggtgaattcaggtggacagtccttccactacaggattggtgctcaaggtacaatatctttatcacgatcggctagagaccaatctttccaacacctgagttcctttcctcctgtcaatactttagtggagtcatggaaatcacacggcgacctgtcgtctagaagaagtgatgggtatccggtcttagaatacattccagaaaatgtatcaagctctactttacgaagtgtttctactggatcttcaagaccttcaaaaatatgtttggtgtgtggggatgaggcttcaggatgccattatggggtagtcacctgtggcagctgcaaagttttcttcaaaagagcagtggaaggtaaatgttcatggcaacacaactatttatgtgctggaagaaatgattgcatcattgataagattcgacgaaagaattgtcctgcttgcagacttcagaaatgtcttcaagctggaatgaatttaggagcacgaaagtcaaagaagttgggaaagttaaaagggattcacgaggagcagccacagcagcagcagcccccacccccacccccacccccgcaaagcccagaggaagggacaacgtacatcgctcctgcaaaagaaccctcggtcaacacagcactggttcctcagctctccacaatctcacgagcgctcacaccttcccccgttatggtccttgaaaacattgaacctgaaattgtatatgcaggctatgacagctcaaaaccagatacagccgaaaatctgctctccacgctcaaccgcttagcaggcaaacagatgatccaagtcgtgaagtgggcaaaggtacttccaggatttaaaaacttgcctcttgaggaccaaattaccctaatccagtattcttggatgtgtctatcatcatttgccttgagctggagatcgtacaaacatacgaacagccaatttctctattttgcaccagacctagtctttaatgaagagaagatgcatcagtctgccatgtatgaactatgccaggggatgcaccaaatcagccttcagttcgttcgactgcagctcacctttgaagaatacaccatcatgaaagttttgctgctactaagcacaattccaaaggatggcctcaaaagccaggctgcatttgaagaaatgaggacaaattacatcaaagaactgaggaagatggtaactaagtgtcccaacaattctgggcagagctggcagaggttctaccaactgaccaagctgctggactccatgcatgacctggtgagcgacctgctggaattctgcttctacaccttccgagagtcccatgcgctgaaggtagagttccccgcaatgctggtggagatcatcagcgaccagctgcccaaggtggagtcggggaacgccaagccgctctacttccaccggaagtga

SEQ ID NO: 20718 - DNA, 3822 bp, Homo sapiens
  source 1..3822: mol_type = unassigned DNA
ggtttcgtggcggtggcaagcgctgcaacaggtagacggcgagagacggaccccggccgaggcagcgatggagaccaaaggctaccacagtctccctgaaggtctagatatggaaagacggtggggtcaagtttctcaggctgtggagcgttcttccctgggacctacagagaggaccgatgagaataactacatggagattgtcaacgtaagctgtgtttccggtgctattccaaacaacagtactcaaggaagcagcaaagaaaaacaagaactactcccttgccttcagcaagacaataatcggcctgggattttaacatctgatattaaaactgagctggaatctaaggaactttcagcaactgtagctgagtccatgggtttatatatggattctgtaagagatgctgactattcctatgagcagcagaaccaacaaggaagcatgagtccagctaagatttatcagaatgttgaacagctggtgaaattttacaaaggaaatggccatcgtccttccactctaagttgtgtgaacacgcccttgagatcatttatgtctgactctgggagctccgtgaatggtggcgtcatgcgcgccgttgttaaaagccctatcatgtgtcatgagaaaagcccgtctgtttgcagccctctgaacatgacatcttcggtttgcagccctgctggaatcaactctgtgtcctccaccacagccagctttggcagttttccagtgcacagcccaatcacccagggaactcctctgacatgctcccctaatgttgaaaatcgaggctccaggtcgcacagccctgcacatgctagcaatgtgggctctcctctctcaagtccgttaagtagcatgaaatcctcaatttccagccctccaagtcactgcagtgtaaaatctccagtctccagtcccaataatgtcactctgagatcctctgtgtctagccctgcaaatattaacaactcaaggtgctctgtttccagcccttcgaacactaataacagatccacgctttccagtccggcagccagtactgtgggatctatctgtagccctgtaaacaatgccttcagctacactgcttctggcacctctgctggatccagtacattgcgggatgtggttcccagtccagacacgcaggagaaaggtgctcaagaggtcccttttcctaagactgaggaagtagagagtgccatctcaaatggtgtgactggccagcttaatattgtccagtacataaaaccagaaccagatggagcttttagcagctcatgtctaggaggaaatagcaaaataaattcggattcttcattctcagtaccaataaagcaagaatcaaccaagcattcatgttcaggcacctcttttaaagggaatccaacagtaaacccgtttccatttatggatggctcgtatttttcctttatggatgataaagactattattccctatcaggaattttaggaccacctgtgcccggctttgatggtaactgtgaaggcagcggattcccagtgggtattaaacaagaaccagatgatgggagctattacccagaggccagcatcccttcctctgctattgttggggtgaattcaggtggacagtccttccactacaggattggtgctcaaggtacaatatctttatcacgatcggctagagaccaatctttccaacacctgagttcctttcctcctgtcaatactttagtggagtcatggaaatcacacggcgacctgtcgtctagaagaagtgatgggtatccggtcttagaatacattccagaaaatgtatcaagctctactttacgaagtgtttctactggatcttcaagaccttcaaaaatatgtttggtgtgtggggatgaggcttcaggatgccattatggggtagtcacctgtggcagctgcaaagttttcttcaaaagagcagtggaagggcaacacaactatttatgtgctggaagaaatgattgcatcattgataagattcgacgaaagaattgtcctgcttgcagacttcagaaatgtcttcaagctggaatgaatttaggaggatttaaaaacttgcctcttgaggaccaaattaccctaatccagtattcttggatgtgtctatcatcatttgccttgagctggagatcgtacaaacatacgaacagccaatttctctattttgcaccagacctagtctttaatgaagagaagatgcatcagtctgccatgtatgaactatgccaggggatgcaccaaatcagccttcagttcgttcgactgcagctcacctttgaagaatacaccatcatgaaagttttgctgctactaagcacaattccaaaggatggcctcaaaagccaggctgcatttgaagaaatgaggacaaattacatcaaagaactgaggaagatggtaactaagtgtcccaacaattctgggcagagctggcagaggttctaccaactgaccaagctgctggactccatgcatgacctggtgagcgacctgctggaattctgcttctacaccttccgagagtcccatgcgctgaaggtagagttccccgcaatgctggtggagatcatcagcgaccagctgcccaaggtggagtcggggaacgccaagccgctctacttccaccggaagtgactgcccgctgcccagaagaactttgccttaagtttccctgtgttgttccacacccagaaggacccaagaaaacctgtttttaacatgtgatggttgattcacacttgttcaacagtttctcaagtttaaagtcatgtcagaggtttggagccgggaaagctgtttttccgtggatttggcgagaccagagcagtctgaaggattccccacctccaatcccccagcgcttagaaacatgttcctgttcctcgggatgaaaagccatatctagtcaataactctgattttgatattttcacagatggaagaagttttaactatgccgtgtagtttctggtatcgttcgcttgttttaaaagggttcaaggactaacgaacgttttaaagcttacccttggtttgcacataaaacgtatagtcaatatggggcattaatattcttttgttattaaaaaaacacaaaaaaataataaaaaaatatatacagattcctgttgtgtaataacagaactcgtggcgtggggcagcagctgcctctgagccctcgctcgtccacggtcttctgcatcactggtatacacactcgttagcgtccatttcttatttaattagaatggataagatgatgttaaatgccttggtttgatttctagtatctattgtgttggctttacaaataattttttgcagtcttttgctgtgctgtacattactgtatgtataaattatgaaggacctgaaataaggtataaggatcttttgtaaatgagacacatacaaaaaaaatctttaatggttaataggatgaatgggaaagtatttttgaaagaattctattttgctggagactatttaagtactatctttgtctaaacaaggtaatttttttttgtaaagtgcaatgtcctgcatgcataatgaaccgtttacagtgtatttaagaaagggaaagctgtgccttttttagcttcatatctaatttaccattattttacagtctctgttgtaaataaccacactgaaacctcttcggttgtcttgaaacctttctactttttctgtactttttgttttgttcttggtctcccgcttggggcatttgtgggactccagcacgttttctggcttctgcttcatcctgctccatcggg

SEQ ID NO: 20719 - DNA, 2283 bp, Homo sapiens
  source 1..2283: mol_type = unassigned DNA
aaaagggccagccctccagctggcccactccccctccgggctttcgcccgccctctctccctcccttttttgcccgccctggccctgcccctgcccctgccccctcctctcagcccctccgcgcccggggtgtcattgggcccgggagacgggagccaacttcaggctgctcagaggaagcccgtgcagtcagtcacctgggtgcaagagcgttgctgcctcgggctctcccgctgcagggagagcggcactcgctggcctggatgtggttggatttaggggggctccgcagcaggggtttcgtggcggtggcaagcgctgcaacaggtagacggcgagagacggaccccggccgaggcagcgatggagaccaaaggctaccacagtctccctgaaggtctagatatggaaagacggtggggtcaagtttctcaggctgtggagcgttcttccctgggacctacagagaggaccgatgagaataactacatggagattgtcaacgtaagctgtgtttccggtgctattccaaacaacagtactcaaggaagcagcaaagaaaaacaagaactactcccttgccttcagcaagacaataatcggcctgggattttaacatctgatattaaaactgagctggaatctaaggaactttcagcaactgtagctgagtccatgggtttatatatggattctgtaagagatgctgactattcctatgagcagcagaaccaacaaggaagcatgagtccagctaagatttatcagaatgttgaacagctggtgaaattttacaaaggaaatggccatcgtccttccactctaagttgtgtgaacacgcccttgagatcatttatgtctgactctgggagctccgtgaatggtggcgtcatgcgcgccgttgttaaaagccctatcatgtgtcatgagaaaagcccgtctgtttgcagccctctgaacatgacatcttcggtttgcagccctgctggaatcaactctgtgtcctccaccacagccagctttggcagttttccagtgcacagcccaatcacccagggaactcctctgacatgctcccctaatgttgaaaatcgaggctccaggtcgcacagccctgcacatgctagcaatgtgggctctcctctctcaagtccgttaagtagcatgaaatcctcaatttccagccctccaagtcactgcagtgtaaaatctccagtctccagtcccaataatgtcactctgagatcctctgtgtctagccctgcaaatattaacaactcaaggtgctctgtttccagcccttcgaacactaataacagatccacgctttccagtccggcagccagtactgtgggatctatctgtagccctgtaaacaatgccttcagctacactgcttctggcacctctgctggatccagtacattgcgggatgtggttcccagtccagacacgcaggagaaaggtgctcaagaggtcccttttcctaagactgaggaagtagagagtgccatctcaaatggtgtgactggccagcttaatattgtccagtacataaaaccagaaccagatggagcttttagcagctcatgtctaggaggaaatagcaaaataaattcggattcttcattctcagtaccaataaagcaagaatcaaccaagcattcatgttcaggcacctcttttaaagggaatccaacagtaaacccgtttccatttatggatggctcgtatttttcctttatggatgataaagactattattccctatcaggaattttaggaccacctgtgcccggctttgatggtaactgtgaaggcagcggattcccagtgggtattaaacaagaaccagatgatgggagctattacccagaggccagcatcccttcctctgctattgttggggtgaattcaggtggacagtccttccactacaggattggtgctcaaggtacaatatctttatcacgatcggctagagaccaatctttccaacacctgagttcctttcctcctgtcaatactttagtggagtcatggaaatcacacggcgacctgtcgtctagaagaagtgatgggtatccggtcttagaatacattccagaaaatgtatcaagctctactttacgaagtgtttctactggatcttcaagaccttcaaaaaaaaatatatacagattcctgttgtgtaataacagaactcgtggcgtggggcagcagctgcctctgagccctcgctcgtccacggtcttctgcatcactggtatacacactcgttag

SEQ ID NO: 20720 - DNA, 2668 bp, Homo sapiens
  source 1..2668: mol_type = unassigned DNA
ggagcgcttaagaggagggtcgggctcggccggggagtcccagtggcggaggctacgaaacttgggggagtgcacagaagaacttcgggagcgcacgcgggaccagggaccaggctgagactcggggcgccagtccgggcaggggcagcgggagccggccgggtagggtgcagcctgaggcttgttcagcagaacaggtgcaagccacattgttgccaagacctgcctgaagccggattctccccactgcctccttcaaccccgcctcttcctcctcctgtgggactgctcccccctcctgtgaggctagatagatgccctgtatccaagcccaatatgggacaccagcaccgagtccgggaccccgtgaccacctggcaagcgaccccctgacccctgagttcatcaagcccaccatggacctggccagccccgaggcagcccccgctgcccccactgccctgcccagcttcagcaccttcatggacggctacacaggagagtttgacaccttcctctaccagctgccaggaacagtccagccatgctcctcagcctcctcctcggcctcctccacatcctcgtcctcagccacctcccctgcctctgcctccttcaagttcgaggacttccaggtgtacggctgctaccccggccccctgagcggcccagtggatgaggccctgtcctccagtggctctgactactatggcagcccctgctcggccccgtcgccctccacgcccagcttccagccgccccagctctctccctgggatggctccttcggccacttctcgcccagccagacttacgaaggcctgcgggcatggacagagcagctgcccaaagcctctgggcccccacagcctccagccttcttttccttcagtcctcccaccggccccagccccagcctggcccagagccccctgaagttgttcccctcacaggccacccaccagctgggggagggagagagctattccatgcctacggccttcccaggtttggcacccacttctccacaccttgagggctcggggatactggatacacccgtgacctcaaccaaggcccggagcggggccccaggtggaagtgaaggccgctgtgctgtgtgtggggacaacgcttcatgccagcattatggtgtccgcacatgtgagggctgcaagggcttcttcaagcgcacagtgcagaaaaacgccaagtacatctgcctggctaacaaggactgccctgtggacaagaggcggcgaaaccgctgccagttctgccgcttccagaagtgcctggcggtgggcatggtgaaggaagttgtccgaacagacagcctgaaggggcggcggggccggctaccttcaaaacccaagcagcccccagatgcctcccctgccaatctcctcacttccctggtccgtgcacacctggactcagggcccagcactgccaaactggactactccaagttccaggagctggtgctgccccactttgggaaggaagatgctggggatgtacagcagttctacgacctgctctccggttctctggaggtcatccgcaagtgggcggagaagatccctggctttgctgagctgtcaccggctgaccaggacctgttgctggagtcggccttcctggagctcttcatcctccgcctggcgtacaggtctaagccaggcgagggcaagctcatcttctgctcaggcctggtgctacaccggctgcagtgtgcccgtggcttcggggactggattgacagtatcctggccttctcaaggtccctgcacagcttgcttgtcgatgtccctgccttcgcctgcctctctgcccttgtcctcatcaccgaccggcatgggctgcaggagccgcggcgggtggaggagctgcagaaccgcatcgccagctgcctgaaggagcacgtggcagctgtggcgggcgagccccagccagccagctgcctgtcacgtctgttgggcaaactgcccgagctgcggaccctgtgcacccagggcctgcagcgcatcttctacctcaagctggaggacttggtgccccctccacccatcattgacaagatcttcatggacacgctgcccttctgacccctgcctgggaacacgtgtgcacatgcgcactctcatatgccaccccatgtgcctttagtccacggacccccagagcacccccaagcctgggcttgagctgcagaatgactccaccttctcacctgctccaggaggtttgcagggagctcaagcccttggggagggggatgccttcatgggggtgaccccacgatttgtcttatcccccccagcctggccccggcctttatgttttttgtaagataaaccgtttttaacacatagcgccgtgctgtaaataagcccagtgctgctgtaaatacaggaagaaagagcttgaggtgggagcggggctgggaggaagggatgggccccgccttcctgggcagcctttccagcctcctgctggctctctcttcctaccctccttccacatgtacataaactgtcactctaggaagaagacaaatgacagattctgacatttatatttgtgtattttcctggatttatagtatgtgacttttctgattaatatatttaatatattgaataaaaaatagacatgtagttgg

SEQ ID NO: 20721 - DNA, 2132 bp, Homo sapiens
  source 1..2132: mol_type = unassigned DNA
ttcctggtgtaagctttggtatggatggtggccgtctccctacagactgggagctgttagagggcagggatcctagctgacacatctatgtcctcgccttggttggaggcctccaccatggacagaggccaggccctgcccctcccaggcagcctggctccttctgctgggccctgaaggcagacgggataatgtggttggccaaggcctgttggtccatccagagtgagatgccctgtatccaagcccaatatgggacaccagcaccgagtccgggaccccgtgaccacctggcaagcgaccccctgacccctgagttcatcaagcccaccatggacctggccagccccgaggcagcccccgctgcccccactgccctgcccagcttcagcaccttcatggacggctacacaggagagtttgacaccttcctctaccagctgccaggaacagtccagccatgctcctcagcctcctcctcggcctcctccacatcctcgtcctcagccacctcccctgcctctgcctccttcaagttcgaggacttccaggtgtacggctgctaccccggccccctgagcggcccagtggatgaggccctgtcctccagtggctctgactactatggcagcccctgctcggccccgtcgccctccacgcccagcttccagccgccccagctctctccctgggatggctccttcggccacttctcgcccagccagacttacgaaggcctgcgggcatggacagagcagctgcccaaagcctctgggcccccacagcctccagccttcttttccttcagtcctcccaccggccccagccccagcctggcccagagccccctgaagttgttcccctcacaggccacccaccagctgggggagggagagagctattccatgcctacggccttcccaggtttggcacccacttctccacaccttgagggctcggggatactggatacacccgtgacctcaaccaaggcccggagcggggccccaggtggaagtgaaggccgctgtgctgtgtgtggggacaacgcttcatgccagcattatggtgtccgcacatgtgagggctgcaagggcttcttcaagcgcacagtgcagaaaaacgccaagtacatctgcctggctaacaaggactgccctgtggacaagaggcggcgaaaccgctgccagttctgccgcttccagaagtgcctggcggtgggcatggtgaaggaagttgtccgaacagacagcctgaaggggcggcggggccggctaccttcaaaacccaagcagcccccagatgcctcccctgccaatctcctcacttccctggtccgtgcacacctggactcagggcccagcactgccaaactggactactccaagttccaggagctggtgctgccccactttgggaaggaagatgctggggatgtacagcagttctacgacctgctctccggttctctggaggtcatccgcaagtgggcggagaagatccctggctttgctgagctgtcaccggctgaccaggacctgttgctggagtcggccttcctggagctcttcatcctccgcctggcgtacaggtctaagccaggcgagggcaagctcatcttctgctcaggcctggtgctacaccggctgcagtgtgcccgtggcttcggggactggattgacagtatcctggccttctcaaggtccctgcacagcttgcttgtcgatgtccctgccttcgcctgcctctctgcccttgtcctcatcaccgaccggcatgggctgcaggagccgcggcgggtggaggagctgcagaaccgcatcgccagctgcctgaaggagcacgtggcagctgtggcgggcgagccccagccagccagctgcctgtcacgtctgttgggcaaactgcccgagctgcggaccctgtgcacccagggcctgcagcgcatcttctacctcaagctggaggacttggtgccccctccacccatcattgacaagatcttcatggacacgctgcccttctgacccctgcctgggaacacgtgtgcacatgcgcactctcatatgccaccccatgtgcctttagtccacggacccccagagcacccccaagcctgggcttgagctgca

SEQ ID NO: 20722 - DNA, 2639 bp, Homo sapiens
  source 1..2639: mol_type = unassigned DNA
agtcccagtggcggaggctacgaaacttgggggagtgcacagaagaacttcgggagcgcacgcgggaccagggaccaggctgagactcggggcgccagtccgggcaggggcagcgggagccggccgggtagggtgcagcctgaggcttgttcagcagaacaggtgcaagccacattgttgccaagacctgcctgaagccggattctccccactgcctccttcaaccccgcctcttcctcctcctgtgggactgctcccccctcctgtgaggctagatagatgccctgtatccaagcccaatatgggacaccagcaccgagtccgggaccccgtgaccacctggcaagcgaccccctgacccctgagttcatcaagcccaccatggacctggccagccccgaggcagcccccgctgcccccactgccctgcccagcttcagcaccttcatggacggctacacaggagagtttgacaccttcctctaccagctgccaggaacagtccagccatgctcctcagcctcctcctcggcctcctccacatcctcgtcctcagccacctcccctgcctctgcctccttcaagttcgaggacttccaggtgtacggctgctaccccggccccctgagcggcccagtggatgaggccctgtcctccagtggctctgactactatggcagcccctgctcggccccgtcgccctccacgcccagcttccagccgccccagctctctccctgggatggctccttcggccacttctcgcccagccagacttacgaaggcctgcgggcatggacagagcagctgcccaaagcctctgggcccccacagcctccagccttcttttccttcagtcctcccaccggccccagccccagcctggcccagagccccctgaagttgttcccctcacaggccacccaccagctgggggagggagagagctattccatgcctacggccttcccaggtttggcacccacttctccacaccttgagggctcggggatactggatacacccgtgacctcaaccaaggcccggagcggggccccaggtggaagtgaaggccgctgtgctgtgtgtggggacaacgcttcatgccagcattatggtgtccgcacatgtgagggctgcaagggcttcttcaagcgcacagtgcagaaaaacgccaagtacatctgcctggctaacaaggactgccctgtggacaagaggcggcgaaaccgctgccagttctgccgcttccagaagtgcctggcggtgggcatggtgaaggaagttgtccgaacagacagcctgaaggggcggcggggccggctaccttcaaaacccaagcagcccccagatgcctcccctgccaatctcctcacttccctggtccgtgcacacctggactcagggcccagcactgccaaactggactactccaagttccaggagctggtgctgccccactttgggaaggaagatgctggggatgtacagcagttctacgacctgctctccggttctctggaggtcatccgcaagtgggcggagaagatccctggctttgctgagctgtcaccggctgaccaggacctgttgctggagtcggccttcctggagctcttcatcctccgcctggcgtacaggtctaagccaggcgagggcaagctcatcttctgctcaggcctggtgctacaccggctgcagtgtgcccgtggcttcggggactggattgacagtatcctggccttctcaaggtccctgcacagcttgcttgtcgatgtccctgccttcgcctgcctctctgcccttgtcctcatcaccgaccggcatgggctgcaggagccgcggcgggtggaggagctgcagaaccgcatcgccagctgcctgaaggagcacgtggcagctgtggcgggcgagccccagccagccagctgcctgtcacgtctgttgggcaaactgcccgagctgcggaccctgtgcacccagggcctgcagcgcatcttctacctcaagctggaggacttggtgccccctccacccatcattgacaagatcttcatggacacgctgcccttctgacccctgcctgggaacacgtgtgcacatgcgcactctcatatgccaccccatgtgcctttagtccacggacccccagagcacccccaagcctgggcttgagctgcagaatgactccaccttctcacctgctccaggaggtttgcagggagctcaagcccttggggagggggatgccttcatgggggtgaccccacgatttgtcttatcccccccagcctggccccggcctttatgttttttgtaagataaaccgtttttaacacatagcgccgtgctgtaaataagcccagtgctgctgtaaatacaggaagaaagagcttgaggtgggagcggggctgggaggaagggatgggccccgccttcctgggcagcctttccagcctcctgctggctctctcttcctaccctccttccacatgtacataaactgtcactctaggaagaagacaaatgacagattctgacatttatatttgtgtattttcctggatttatagtatgtgacttttctgattaatatatttaatatattgaataaaaaatagacatgtagttggaactga

SEQ ID NO: 20723 - DNA, 2518 bp, Homo sapiens
  source 1..2518: mol_type = unassigned DNA
ggagcgcttaagaggagggtcgggctcggccggggagtcccagtggcggaggctacgaaacttgggggagtgcacagaagaacttcgggagcgcacgcgggaccagggaccaggctgagactcggggcgccagtccgggcaggggcagcgggagccggccggagatgccctgtatccaagcccaatatgggacaccagcaccgagtccgggaccccgtgaccacctggcaagcgaccccctgacccctgagttcatcaagcccaccatggacctggccagccccgaggcagcccccgctgcccccactgccctgcccagcttcagcaccttcatggacggctacacaggagagtttgacaccttcctctaccagctgccaggaacagtccagccatgctcctcagcctcctcctcggcctcctccacatcctcgtcctcagccacctcccctgcctctgcctccttcaagttcgaggacttccaggtgtacggctgctaccccggccccctgagcggcccagtggatgaggccctgtcctccagtggctctgactactatggcagcccctgctcggccccgtcgccctccacgcccagcttccagccgccccagctctctccctgggatggctccttcggccacttctcgcccagccagacttacgaaggcctgcgggcatggacagagcagctgcccaaagcctctgggcccccacagcctccagccttcttttccttcagtcctcccaccggccccagccccagcctggcccagagccccctgaagttgttcccctcacaggccacccaccagctgggggagggagagagctattccatgcctacggccttcccaggtttggcacccacttctccacaccttgagggctcggggatactggatacacccgtgacctcaaccaaggcccggagcggggccccaggtggaagtgaaggccgctgtgctgtgtgtggggacaacgcttcatgccagcattatggtgtccgcacatgtgagggctgcaagggcttcttcaagcgcacagtgcagaaaaacgccaagtacatctgcctggctaacaaggactgccctgtggacaagaggcggcgaaaccgctgccagttctgccgcttccagaagtgcctggcggtgggcatggtgaaggaagttgtccgaacagacagcctgaaggggcggcggggccggctaccttcaaaacccaagcagcccccagatgcctcccctgccaatctcctcacttccctggtccgtgcacacctggactcagggcccagcactgccaaactggactactccaagttccaggagctggtgctgccccactttgggaaggaagatgctggggatgtacagcagttctacgacctgctctccggttctctggaggtcatccgcaagtgggcggagaagatccctggctttgctgagctgtcaccggctgaccaggacctgttgctggagtcggccttcctggagctcttcatcctccgcctggcgtacaggtctaagccaggcgagggcaagctcatcttctgctcaggcctggtgctacaccggctgcagtgtgcccgtggcttcggggactggattgacagtatcctggccttctcaaggtccctgcacagcttgcttgtcgatgtccctgccttcgcctgcctctctgcccttgtcctcatcaccgaccggcatgggctgcaggagccgcggcgggtggaggagctgcagaaccgcatcgccagctgcctgaaggagcacgtggcagctgtggcgggcgagccccagccagccagctgcctgtcacgtctgttgggcaaactgcccgagctgcggaccctgtgcacccagggcctgcagcgcatcttctacctcaagctggaggacttggtgccccctccacccatcattgacaagatcttcatggacacgctgcccttctgacccctgcctgggaacacgtgtgcacatgcgcactctcatatgccaccccatgtgcctttagtccacggacccccagagcacccccaagcctgggcttgagctgcagaatgactccaccttctcacctgctccaggaggtttgcagggagctcaagcccttggggagggggatgccttcatgggggtgaccccacgatttgtcttatcccccccagcctggccccggcctttatgttttttgtaagataaaccgtttttaacacatagcgccgtgctgtaaataagcccagtgctgctgtaaatacaggaagaaagagcttgaggtgggagcggggctgggaggaagggatgggccccgccttcctgggcagcctttccagcctcctgctggctctctcttcctaccctccttccacatgtacataaactgtcactctaggaagaagacaaatgacagattctgacatttatatttgtgtattttcctggatttatagtatgtgacttttctgattaatatatttaatatattgaataaaaaatagacatgtagttgg

SEQ ID NO: 20724 - DNA, 3511 bp, Homo sapiens
  source 1..3511: mol_type = unassigned DNA
tttctccgccggctgcgggaaccggttccaggagcgcgggagctcgtctgccaggagacccagccgggagggaccgatgctgcgtgatgcaaccccttcgagggactgagtcaagaaaccaaggctgggggtctcgtggagtcaggcggagctggggattaggactcggggcttgtgtctcccaggcgtgtttttttgttgttgttttgtttttttgccgcaacatcttccttatactgggtggggtgggggcgggggtggtctgtatttccagacctcctccatggtggtctggctgtgtggagggcagggcacagttccttgacttggctcattcccccccaacgccccccctttcttttttttttgagatggagtctcgctctgttgcccaggctggagtgcagtagcgtgatctcggctcactgcaatctccgtctcccgggttcaagcgaatctcctgcctcagcctccagagtagctgggactacaggcacccaccaccacgcccggctaatttttgtatttttagtagagacagggtttcaccatattggccaggctggtctggaactcctgaccttgtgatccgcctgcctcggcctcctaaagtgctgggattacaggcgtgagccaccgcgcctggcaggctcattccctttttatgccttcgtttttgatagatgacctggggatgggagaaatgctgcagaggtggtttatttacagtgaattgttaatttggttgtggggctagtattaggggcacattgggaaaacacaggctgggcagaggttggtaggttcacaacagttatgcccactgggtgctgatggatttgggggctgtcgtcggcctggcttggggccctagtggtggggctacaaggcttgctcctagatctactccaagtgaacatttaagatcagtgacttggatggagacttaaaaaggaagtcagctgactccgtgtagtcatccagagctgtgaggaatgacaagtgcacagtataaaatcaagattctaattgaaggcctccaccatggacagaggccaggccctgcccctcccaggcagcctggctccttctgctgggccctgaaggcagacgggataatgtggttggccaaggcctgttggtccatccagagtgagatgccctgtatccaagcccaatatgggacaccagcaccgagtccgggaccccgtgaccacctggcaagcgaccccctgacccctgagttcatcaagcccaccatggacctggccagccccgaggcagcccccgctgcccccactgccctgcccagcttcagcaccttcatggacggctacacaggagagtttgacaccttcctctaccagctgccaggaacagtccagccatgctcctcagcctcctcctcggcctcctccacatcctcgtcctcagccacctcccctgcctctgcctccttcaagttcgaggacttccaggtgtacggctgctaccccggccccctgagcggcccagtggatgaggccctgtcctccagtggctctgactactatggcagcccctgctcggccccgtcgccctccacgcccagcttccagccgccccagctctctccctgggatggctccttcggccacttctcgcccagccagacttacgaaggcctgcgggcatggacagagcagctgcccaaagcctctgggcccccacagcctccagccttcttttccttcagtcctcccaccggccccagccccagcctggcccagagccccctgaagttgttcccctcacaggccacccaccagctgggggagggagagagctattccatgcctacggccttcccaggtttggcacccacttctccacaccttgagggctcggggatactggatacacccgtgacctcaaccaaggcccggagcggggccccaggtggaagtgaaggccgctgtgctgtgtgtggggacaacgcttcatgccagcattatggtgtccgcacatgtgagggctgcaagggcttcttcaagcgcacagtgcagaaaaacgccaagtacatctgcctggctaacaaggactgccctgtggacaagaggcggcgaaaccgctgccagttctgccgcttccagaagtgcctggcggtgggcatggtgaaggaagttgtccgaacagacagcctgaaggggcggcggggccggctaccttcaaaacccaagcagcccccagatgcctcccctgccaatctcctcacttccctggtccgtgcacacctggactcagggcccagcactgccaaactggactactccaagttccaggagctggtgctgccccactttgggaaggaagatgctggggatgtacagcagttctacgacctgctctccggttctctggaggtcatccgcaagtgggcggagaagatccctggctttgctgagctgtcaccggctgaccaggacctgttgctggagtcggccttcctggagctcttcatcctccgcctggcgtacaggtctaagccaggcgagggcaagctcatcttctgctcaggcctggtgctacaccggctgcagtgtgcccgtggcttcggggactggattgacagtatcctggccttctcaaggtccctgcacagcttgcttgtcgatgtccctgccttcgcctgcctctctgcccttgtcctcatcaccgaccggcatgggctgcaggagccgcggcgggtggaggagctgcagaaccgcatcgccagctgcctgaaggagcacgtggcagctgtggcgggcgagccccagccagccagctgcctgtcacgtctgttgggcaaactgcccgagctgcggaccctgtgcacccagggcctgcagcgcatcttctacctcaagctggaggacttggtgccccctccacccatcattgacaagatcttcatggacacgctgcccttctgacccctgcctgggaacacgtgtgcacatgcgcactctcatatgccaccccatgtgcctttagtccacggacccccagagcacccccaagcctgggcttgagctgcagaatgactccaccttctcacctgctccaggaggtttgcagggagctcaagcccttggggagggggatgccttcatgggggtgaccccacgatttgtcttatcccccccagcctggccccggcctttatgttttttgtaagataaaccgtttttaacacatagcgccgtgctgtaaataagcccagtgctgctgtaaatacaggaagaaagagcttgaggtgggagcggggctgggaggaagggatgggccccgccttcctgggcagcctttccagcctcctgctggctctctcttcctaccctccttccacatgtacataaactgtcactctaggaagaagacaaatgacagattctgacatttatatttgtgtattttcctggatttatagtatgtgacttttctgattaatatatttaatatattgaataaaaaatagacatgtagttgg

SEQ ID NO: 20725 - DNA, 1101 bp, Homo sapiens
  source 1..1101: mol_type = unassigned DNA
agtggcggaggctacgaaacttgggggagtgcacagaagaacttcgggagcgcacgcgggaccagggaccaggctgagactcggggcgccagtccgggcaggggcagcgggagccggccggagatgccctgtatccaagcccaatatgggacaccagcaccgagtccgggaccccgtgaccacctggcaagcgaccccctgacccctgagttcatcaagcccaccatggacctggccagccccgaggcagcccccgctgcccccactgccctgcccagcttcagcaccttcatggacggctacacaggagagtttgacaccttcctctaccagctgccaggaacagtccagccatgctcctcagcctcctcctcggcctcctccacatcctcgtcctcagccacctcccctgcctctgcctccttcaagttcgaggacttccaggtgtacggctgctaccccggccccctgagcggcccagtggatgaggccctgtcctccagtggctctgactactatggcagcccctgctcggccccgtcgccctccacgcccagcttccagccgccccagctctctccctgggatggctccttcggccacttctcgcccagccagacttacgaaggcctgcgggcatggacagagcagctgcccaaagcctctgggcccccacagcctccagccttcttttccttcagtcctcccaccggccccagccccagcctggcccagagccccctgaagttgttcccctcacaggccacccaccagctgggggagggagagagctattccatgcctacggccttcccaggtttggcacccacttctccacaccttgagggctcggggatactggatacacccgtgacctcaaccaaggcccggagcggggccccaggtggaagtgaaggccgctgtgctgtgtgtggggacaacgcttcatgccagcattatggtgtccgcacatgtgagggctgcaagggcttcttcaaggtaccgcgcagccccaggtggggccttttgttggaaatggagagaggctggcctcatcccattgggacctgtggtctccccctgggttctcctcctagctaa

SEQ ID NO: 20726 - DNA, 2029 bp, Homo sapiens
  source 1..2029: mol_type = unassigned DNA
tgtaggcctccaccatggacagaggccaggccctgcccctcccaggcagcctggctccttctgctgggccctgaaggcagacgggataatgtggttggccaaggcctgttggtccatccagagtgagatgccctgtatccaagcccaatatgggacaccagcaccgagtccgggaccccgtgaccacctggcaagcgaccccctgacccctgagttcatcaagcccaccatggacctggccagccccgaggcagcccccgctgcccccactgccctgcccagcttcagcaccttcatggacggctacacaggagagtttgacaccttcctctaccagctgccaggaacagtccagccatgctcctcagcctcctcctcggcctcctccacatcctcgtcctcagccacctcccctgcctctgcctccttcaagttcgaggacttccaggtgtacggctgctaccccggccccctgagcggcccagtggatgaggccctgtcctccagtggctctgactactatggcagcccctgctcggccccgtcgccctccacgcccagcttccagccgccccagctctctccctgggatggctccttcggccacttctcgcccagccagacttacgaaggcctgcgggcatggacagagcagctgcccaaagcctctgggcccccacagcctccagccttcttttccttcagtcctcccaccggccccagccccagcctggcccagagccccctgaagttgttcccctcacaggccacccaccagctgggggagggagagagctattccatgcctacggccttcccaggtttggcacccacttctccacaccttgagggctcggggatactggatacacccgtgacctcaaccaaggcccggagcggggccccaggtggaagtgaaggccgctgtgctgtgtgtggggacaacgcttcatgccagcattatggtgtccgcacatgtgagggctgcaagggcttcttcaagcgcacagtgcagaaaaacgccaagtacatctgcctggctaacaaggactgccctgtggacaagaggcggcgaaaccgctgccagttctgccgcttccagaagtgcctggcggtgggcatggtgaaggaagttgtccgaacagacagcctgaaggggcggcggggccggctaccttcaaaacccaagcagcccccagatgcctcccctgccaatctcctcacttccctggtccgtgcacacctggactcagggcccagcactgccaaactggactactccaagttccaggagctggtgctgccccactttgggaaggaagatgctggggatgtacagcagttctacgacctgctctccggttctctggaggtcatccgcaagtgggcggagaagatccctggctttgctgagctgtcaccggctgaccaggacctgttgctggagtcggccttcctggagctcttcatcctccgcctggcgtacaggtctaagccaggcgagggcaagctcatcttctgctcaggcctggtgctacaccggctgcagtgtgcccgtggcttcggggactggattgacagtatcctggccttctcaaggtccctgcacagcttgcttgtcgatgtccctgccttcgcctgcctctctgcccttgtcctcatcaccgaccggcatgggctgcaggagccgcggcgggtggaggagctgcagaaccgcatcgccagctgcctgaaggagcacgtggcagctgtggcgggcgagccccagccagccagctgcctgtcacgtctgttgggcaaactgcccgagctgcggaccctgtgcacccagggcctgcagcgcatcttctacctcaagctggaggacttggtgccccctccacccatcattgacaagatcttcatggacacgctgcccttctgacccctgcctgggaacacgtgtgcacatgcgcactctcatatgccaccccatgtgcctttagtccacggacccccagagcacccccaagcctgggcttgagctgca

SEQ ID NO: 20727 - DNA, 3472 bp, Homo sapiens
  source 1..3472: mol_type = unassigned DNA
acataaacaaaggcacattggcggccagggccagtccgcccggcggctcgcgcacggctccgcggtcccttttgcctgtccagccggccgcctgtccctgctccctccctccgtgaggtgtccgggttcccttcgcccagctctcccacccctacccgaccccggcgcccgggctcccagagggaactgcacttcggcagagttgaatgaatgaagacagacgcggagaactcctaaggaggagattggacaggctggactccccattgcttttctaaaaatcttggaaactttgtccttcattgaattacgacactgtccacctttaatttcctcgaaaacgcctgtaactcggctgaagccatgccttgtgttcaggcgcagtatgggtcctcgcctcaaggagccagccccgcttctcagagctacagttaccactcttcgggagaatacagctccgatttcttaactccagagtttgtcaagtttagcatggacctcaccaacactgaaatcactgccaccacttctctccccagcttcagtacctttatggacaactacagcacaggctacgacgtcaagccaccttgcttgtaccaaatgcccctgtccggacagcagtcctccattaaggtagaagacattcagatgcacaactaccagcaacacagccacctgcccccccagtctgaggagatgatgccgcactccgggtcggtttactacaagccctcctcgcccccgacgcccaccaccccgggcttccaggtgcagcacagccccatgtgggacgacccgggatctctccacaacttccaccagaactacgtggccactacgcacatgatcgagcagaggaaaacgccagtctcccgcctctccctcttctcctttaagcaatcgccccctggcaccccggtgtctagttgccagatgcgcttcgacgggcccctgcacgtccccatgaacccggagcccgccggcagccaccacgtggtggacgggcagaccttcgctgtgcccaaccccattcgcaagcccgcgtccatgggcttcccgggcctgcagatcggccacgcgtctcagctgctcgacacgcaggtgccctcaccgccgtcgcggggctccccctccaacgaggggctgtgcgctgtgtgtggggacaacgcggcctgccaacactacggcgtgcgcacctgtgagggctgcaaaggcttctttaagcgcacagtgcaaaaaaatgcaaaatacgtgtgtttagcaaataaaaactgcccagtggacaagcgtcgccggaatcgctgtcagtactgccgatttcagaagtgcctggctgttgggatggtcaaagaagtggttcgcacagacagtttaaaaggccggagaggtcgtttgccctcgaaaccgaagagcccacaggagccctctcccccttcgcccccggtgagtctgatcagtgccctcgtcagggcccatgtcgactccaacccggctatgaccagcctggactattccaggttccaggcgaaccctgactatcaaatgagtggagatgacacccagcatatccagcaattctatgatctcctgactggctccatggagatcatccggggctgggcagagaagatccctggcttcgcagacctgcccaaagccgaccaagacctgctttttgaatcagctttcttagaactgtttgtccttcgattagcatacaggtccaacccagtggagggtaaactcatcttttgcaatggggtggtcttgcacaggttgcaatgcgttcgtggctttggggaatggattgattccattgttgaattctcctccaacttgcagaatatgaacatcgacatttctgccttctcctgcattgctgccctggctatggtcacagagagacacgggctcaaggaacccaagagagtggaagaactgcaaaacaagattgtaaattgtctcaaagaccacgtgactttcaacaatggggggttgaaccgccccaattatttgtccaaactgttggggaagctcccagaacttcgtaccctttgcacacaggggctacagcgcattttctacctgaaattggaagacttggtgccaccgccagcaataattgacaaacttttcctggacactttacctttctaagacctcctcccaagcacttcaaaggaactggaatgataatggaaactgtcaagagggggcaagtcacatgggcagagatagccgtgtgagcagtctcagctcaagctgccccccatttctgtaaccctcctagcccccttgatccctaaagaaaacaaacaaacaaacaaaaactgttgctatttcctaacctgcaggcagaacctgaaagggcattttggctccggggcatcctggatttagaacatggactacacacaatacagtggtataaactttttattctcagtttaaaaatcagtttgttgttcagaagaaagattgctataatgtataatgggaaatgtttggccatgcttggttgttgcagttcagacaaatgtaacacacacacacatacacacacacacacacacacagagacacatcttaaggggacccacaagtattgccctttaacaagacttcaaagttttctgctgtaaagaaagctgtaatatatagtaaaactaaatgttgcgtgggtggcatgagttgaagaaggcaaaggcttgtaaatttacccaatgcagtttggctttttaaattattttgtgcctatttatgaataaatattacaaattctaaaagataagtgtgtttgcaaaaaaaaagaaaataaatacataaaaaagggacaagcatgttgattctaggttgaaaatgttataggcacttgctacttcagtaatgtctatattatataaatagtatttcagacactatgtagtctgttagattttataaagattggtagttatctgagcttaaacattttctcaattgtaaaataggtgggcacaagtattacacatcagaaaatcctgacaaaagggacacatagtgtttgtaacaccgtccaacattccttgtttgtaagtgttgtatgtaccgttgatgttgataaaaagaaagtttatatcttgattattttgttgtctaaagctaaacaaaacttgcatgcagcagcttttgactgtttccagagtgcttataatatacataactccctggaaataactgagcactttgaattttttttatgtctaaaattgtcagttaatttattattttgtttgagtaagaattttaatattgccatattctgtagtatttttctttgtatatttctagtatggcacatgatatgagtcactgcctttttttctatggtgtatgacagttagagatgctgattttttttctgataaattctttctttgagaaagacaattttaatgtttacaacaataaaccatgtaaatgaacagaa

SEQ ID NO: 20728 - DNA, 2878 bp, Homo sapiens
  source 1..2878: mol_type = unassigned DNA
ctccccggctcccttcttggtcggccgcgaccccccgaaaggtaacaggcctctttcgcccccggccaggacctgggccctgtgggctttttttttttccattttatcagtaagttccccttgtcccagcctccgctttcacttcccgcgttccctccaccccaaaaaccgccccaacatgtccagagaggggcatctacccagccgcccagccaggggcgaccactttgtgagccccggggagcgggacccgtaccaggcgcgcccagcgggggatgcggtgaccgaggggccgggagcgccgggcagggaggagattggacaggctggactccccattgcttttctaaaaatcttggaaactttgtccttcattgaattacgacactgtccacctttaatttcctcgaaaacgcctgtaactcggctgaagccatgccttgtgttcaggcgcagtatgggtcctcgcctcaaggagccagccccgcttctcagagctacagttaccactcttcgggagaatacagctccgatttcttaactccagagtttgtcaagtttagcatggacctcaccaacactgaaatcactgccaccacttctctccccagcttcagtacctttatggacaactacagcacaggctacgacgtcaagccaccttgcttgtaccaaatgcccctgtccggacagcagtcctccattaaggtagaagacattcagatgcacaactaccagcaacacagccacctgcccccccagtctgaggagatgatgccgcactccgggtcggtttactacaagccctcctcgcccccgacgcccaccaccccgggcttccaggtgcagcacagccccatgtgggacgacccgggatctctccacaacttccaccagaactacgtggccactacgcacatgatcgagcagaggaaaacgccagtctcccgcctctccctcttctcctttaagcaatcgccccctggcaccccggtgtctagttgccagatgcgcttcgacgggcccctgcacgtccccatgaacccggagcccgccggcagccaccacgtggtggacgggcagaccttcgctgtgcccaaccccattcgcaagcccgcgtccatgggcttcccgggcctgcagatcggccacgcgtctcagctgctcgacacgcaggtgccctcaccgccgtcgcggggctccccctccaacgaggggctgtgcgctgtgtgtggggacaacgcggcctgccaacactacggcgtgcgcacctgtgagggctgcaaaggcttctttaagcgcacagtgcaaaaaaatgcaaaatacgtgtgtttagcaaataaaaactgcccagtggacaagcgtcgccggaatcgctgtcagtactgccgatttcagaagtgcctggctgttgggatggtcaaagaagtggttcgcacagacagtttaaaaggccggagaggtcgtttgccctcgaaaccgaagagcccacaggagccctctcccccttcgcccccggtgagtctgatcagtgccctcgtcagggcccatgtcgactccaacccggctatgaccagcctggactattccaggttccaggcgaaccctgactatcaaatgagtggagatgacacccagcatatccagcaattctatgatctcctgactggctccatggagatcatccggggctgggcagagaagatccctggcttcgcagacctgcccaaagccgaccaagacctgctttttgaatcagctttcttagaactgtttgtccttcgattagcatacaggtccaacccagtggagggtaaactcatcttttgcaatggggtggtcttgcacaggttgcaatgcgttcgtggctttggggaatggattgattccattgttgaattctcctccaacttgcagaatatgaacatcgacatttctgccttctcctgcattgctgccctggctatggtcacagagagacacgggctcaaggaacccaagagagtggaagaactgcaaaacaagattgtaaattgtctcaaagaccacgtgactttcaacaatggggggttgaaccgccccaattatttgtccaaactgttggggaagctcccagaacttcgtaccctttgcacacaggggctacagcgcattttctacctgaaattggaagacttggtgccaccgccagcaataattgacaaacttttcctggacactttacctttctaagacctcctcccaagcacttcaaaggaactggaatgataatggaaactgtcaagagggggcaagtcacatgggcagagatagccgtgtgagcagtctcagctcaagctgccccccatttctgtaaccctcctagcccccttgatccctaaagaaaacaaacaaacaaacaaaaactgttgctatttcctaacctgcaggcagaacctgaaagggcattttggctccggggcatcctggatttagaacatggactacacacaatacagtggtataaactttttattctcagtttaaaaatcagtttgttgttcagaagaaagattgctataatgtataatgggaaatgtttggccatgcttggttgttgcagttcagacaaatgtaacacacacacacatacacacacacacacacacacagagacacatcttaaggggacccacaagtattgccctttaacaagacttcaaagttttctgctgtaaagaaagctgtaatatatagtaaaactaaatgttgcgtgggtggcatgagttgaagaaggcaaaggcttgtaaatttacccaatgcagtttggctttttaaattattttgtgcctatttatgaataaatattacaaattctaaaagataagtgtgtttgcaa

SEQ ID NO: 20729 - DNA, 2265 bp, Homo sapiens
  source 1..2265: mol_type = unassigned DNA
ggagattggacaggctggactccccattgcttttctaaaaatcttggaaactttgtccttcattgaattacgacactgtccacctttaatttcctcgaaaacgcctgtaactcggctgaagcttcagtacctttatggacaactacagcacaggctacgacgtcaagccaccttgcttgtaccaaatgcccctgtccggacagcagtcctccattaaggtagaagacattcagatgcacaactaccagcaacacagccacctgcccccccagtctgaggagatgatgccgcactccgggtcggtttactacaagccctcctcgcccccgacgcccaccaccccgggcttccaggtgcagcacagccccatgtgggacgacccgggatctctccacaacttccaccagaactacgtggccactacgcacatgatcgagcagaggaaaacgccagtctcccgcctctccctcttctcctttaagcaatcgccccctggcaccccggtgtctagttgccagatgcgcttcgacgggcccctgcacgtccccatgaacccggagcccgccggcagccaccacgtggtggacgggcagaccttcgctgtgcccaaccccattcgcaagcccgcgtccatgggcttcccgggcctgcagatcggccacgcgtctcagctgctcgacacgcaggtgccctcaccgccgtcgcggggctccccctccaacgaggggctgtgcgctgtgtgtggggacaacgcggcctgccaacactacggcgtgcgcacctgtgagggctgcaaaggcttctttaagcgcacagtgcaaaaaaatgcaaaatacgtgtgtttagcaaataaaaactgcccagtggacaagcgtcgccggaatcgctgtcagtactgccgatttcagaagtgcctggctgttgggatggtcaaagaagtggttcgcacagacagtttaaaaggccggagaggtcgtttgccctcgaaaccgaagagcccacaggagccctctcccccttcgcccccggtgagtctgatcagtgccctcgtcagggcccatgtcgactccaacccggctatgaccagcctggactattccaggttccaggcgaaccctgactatcaaatgagtggagatgacacccagcatatccagcaattctatgatctcctgactggctccatggagatcatccggggctgggcagagaagatccctggcttcgcagacctgcccaaagccgaccaagacctgctttttgaatcagctttcttagaactgtttgtccttcgattagcatacagaatatgaacatcgacatttctgccttctcctgcattgctgccctggctatggtcacagagagacacgggctcaaggaacccaagagagtggaagaactgcaaaacaagattgtaaattgtctcaaagaccacgtgactttcaacaatggggggttgaaccgccccaattatttgtccaaactgttggggaagctcccagaacttcgtaccctttgcacacaggggctacagcgcattttctacctgaaattggaagacttggtgccaccgccagcaataattgacaaacttttcctggacactttacctttctaagacctcctcccaagcacttcaaaggaactggaatgataatggaaactgtcaagagggggcaagtcacatgggcagagatagccgtgtgagcagtctcagctcaagctgccccccatttctgtaaccctcctagcccccttgatccctaaagaaaacaaacaaacaaacaaaaactgttgctatttcctaacctgcaggcagaacctgaaagggcattttggctccggggcatcctggatttagaacatggactacacacaatacagtggtataaactttttattctcagtttaaaaatcagtttgttgttcagaagaaagattgctataatgtataatgggaaatgtttggccatgcttggttgttgcagttcagacaaatgtaacacacacacacatacacacacacacacacacacagagacacatcttaaggggacccacaagtattgccctttaacaagacttcaaagttttctgctgtaaagaaagctgtaatatatagtaaaactaaatgttgcgtgggtggcatgagttgaagaaggcaaaggcttgtaaatttacccaatgcagtttggctttttaaattattttgtgcctatttatgaataaatattacaaattctaaaagataagtgtgtttgc

SEQ ID NO: 20730 - DNA, 2450 bp, Homo sapiens
  source 1..2450: mol_type = unassigned DNA
aagttgcctgaaatttctggttttgacatatgctgtccttgggtttgcgaatgtatcagagcgagaatatgaatatgtaaagagtacagttatgaaactgtggagctaccagggggttaatatccaacacaggaatatctctaagggctgtggggttcgagtctcctttctgctttttctggggaggagattggacaggctggactccccattgcttttctaaaaatcttggaaactttgtccttcattgaattacgacactgtccacctttaatttcctcgaaaacgcctgtaactcggctgaagcttcagtacctttatggacaactacagcacaggctacgacgtcaagccaccttgcttgtaccaaatgcccctgtccggacagcagtcctccattaaggtagaagacattcagatgcacaactaccagcaacacagccacctgcccccccagtctgaggagatgatgccgcactccgggtcggtttactacaagccctcctcgcccccgacgcccaccaccccgggcttccaggtgcagcacagccccatgtgggacgacccgggatctctccacaacttccaccagaactacgtggccactacgcacatgatcgagcagaggaaaacgccagtctcccgcctctccctcttctcctttaagcaatcgccccctggcaccccggtgtctagttgccagatgcgcttcgacgggcccctgcacgtccccatgaacccggagcccgccggcagccaccacgtggtggacgggcagaccttcgctgtgcccaaccccattcgcaagcccgcgtccatgggcttcccgggcctgcagatcggccacgcgtctcagctgctcgacacgcaggtgccctcaccgccgtcgcggggctccccctccaacgaggggctgtgcgctgtgtgtggggacaacgcggcctgccaacactacggcgtgcgcacctgtgagggctgcaaaggcttctttaagcgcacagtgcaaaaaaatgcaaaatacgtgtgtttagcaaataaaaactgcccagtggacaagcgtcgccggaatcgctgtcagtactgccgatttcagaagtgcctggctgttgggatggtcaaagaagtggttcgcacagacagtttaaaaggccggagaggtcgtttgccctcgaaaccgaagagcccacaggagccctctcccccttcgcccccggtgagtctgatcagtgccctcgtcagggcccatgtcgactccaacccggctatgaccagcctggactattccaggttccaggcgaaccctgactatcaaatgagtggagatgacacccagcatatccagcaattctatgatctcctgactggctccatggagatcatccggggctgggcagagaagatccctggcttcgcagacctgcccaaagccgaccaagacctgctttttgaatcagctttcttagaactgtttgtccttcgattagcatacagaatatgaacatcgacatttctgccttctcctgcattgctgccctggctatggtcacagagagacacgggctcaaggaacccaagagagtggaagaactgcaaaacaagattgtaaattgtctcaaagaccacgtgactttcaacaatggggggttgaaccgccccaattatttgtccaaactgttggggaagctcccagaacttcgtaccctttgcacacaggggctacagcgcattttctacctgaaattggaagacttggtgccaccgccagcaataattgacaaacttttcctggacactttacctttctaagacctcctcccaagcacttcaaaggaactggaatgataatggaaactgtcaagagggggcaagtcacatgggcagagatagccgtgtgagcagtctcagctcaagctgccccccatttctgtaaccctcctagcccccttgatccctaaagaaaacaaacaaacaaacaaaaactgttgctatttcctaacctgcaggcagaacctgaaagggcattttggctccggggcatcctggatttagaacatggactacacacaatacagtggtataaactttttattctcagtttaaaaatcagtttgttgttcagaagaaagattgctataatgtataatgggaaatgtttggccatgcttggttgttgcagttcagacaaatgtaacacacacacacatacacacacacacacacacacagagacacatcttaaggggacccacaagtattgccctttaacaagacttcaaagttttctgctgtaaagaaagctgtaatatatagtaaaactaaatgttgcgtgggtggcatgagttgaagaaggcaaaggcttgtaaatttacccaatgcagtttggctttttaaattattttgtgcctatttatgaataaatattacaaattctaaaagataagtgtgtttgc

SEQ ID NO: 20731 - DNA, 1010 bp, Homo sapiens
  source 1..1010: mol_type = unassigned DNA
taaacaaaggcacattggcggccagggccagtccgcccggcggctcgcgcacggctccgcggtcccttttgcctgtccagccggccgcctgtccctgctccctccctccgtgaggtgtccgggttcccttcgcccagctctcccacccctacccgaccccggcgcccgggctcccagagggaactgcacttcggcagagttgaatgaatgaagacagacgcggagaactcctaaccatgccttgtgttcaggcgcagtatgggtcctcgcctcaaggagccagccccgcttctcagagctacagttaccactcttcgggagaatacagctccgatttcttaactccagagtttgtcaagtttagcatggacctcaccaacactgaaatcactgccaccacttctctccccagcttcagtacctttatggacaactacagcacaggctacgacgtcaagccaccttgcttgtaccaaatgcccctgtccggacagcagtcctccattaaggtagaagacattcagatgcacaactaccagcaacacagccacctgcccccccagtctgaggagatgatgccgcactccgggtcggtttactacaagccctcctcgcccccgacgcccaccaccccgggcttccaggtgcagcacagccccatgtgggacgacccgggatctctccacaacttccaccagaactacgtggccactacgcacatgatcgagcagaggaaaacgccagtctcccgcctctccctcttctcctttaagcaatcgccccctggcaccccggtgtctagttgccagatgcgcttcgacgggcccctgcacgtccccatgaacccggagcccgccggcagccaccacgtggtggacgggcagaccttcgctgtgcccaaccccattcgcaagcccgcgtccatgggcttcccgggcctgcagatcggccacgcgtctcagctgctcgacacgcaggtgccctcaccgccgtcgcggggctccccctcc

SEQ ID NO: 20732 - DNA, 2642 bp, Homo sapiens
  source 1..2642: mol_type = unassigned DNA
ataaacaaaggcacattggcggccagggccagtccgcccggcggctcgcgcacggctccgcggtcccttttgcctgtccagccggccgcctgtccctgctccctccctccgtgaggtgtccgggttcccttcgcccagctctcccacccctacccgaccccggcgcccgggctcccagagggaactgcacttcggcagagttgaatgaatgaagacagacgcggagaactcctaaggaggagattggacaggctggactccccattgcttttctaaaaatcttggaaactttgtccttcattgaattacgacactgtccacctttaatttcctcgaaaacgcctgtaactcggctgaagcttcagtacctttatggacaactacagcacaggctacgacgtcaagccaccttgcttgtaccaaatgcccctgtccggacagcagtcctccattaaggtagaagacattcagatgcacaactaccagcaacacagccacctgcccccccagtctgaggagatgatgccgcactccgggtcggtttactacaagccctcctcgcccccgacgcccaccaccccgggcttccaggtgcagcacagccccatgtgggacgacccgggatctctccacaacttccaccagaactacgtggccactacgcacatgatcgagcagaggaaaacgccagtctcccgcctctccctcttctcctttaagcaatcgccccctggcaccccggtgtctagttgccagatgcgcttcgacgggcccctgcacgtccccatgaacccggagcccgccggcagccaccacgtggtggacgggcagaccttcgctgtgcccaaccccattcgcaagcccgcgtccatgggcttcccgggcctgcagatcggccacgcgtctcagctgctcgacacgcaggtgccctcaccgccgtcgcggggctccccctccaacgaggggctgtgcgctgtgtgtggggacaacgcggcctgccaacactacggcgtgcgcacctgtgagggctgcaaaggcttctttaagcgcacagtgcaaaaaaatgcaaaatacgtgtgtttagcaaataaaaactgcccagtggacaagcgtcgccggaatcgctgtcagtactgccgatttcagaagtgcctggctgttgggatggtcaaagaagtggttcgcacagacagtttaaaaggccggagaggtcgtttgccctcgaaaccgaagagcccacaggagccctctcccccttcgcccccggtgagtctgatcagtgccctcgtcagggcccatgtcgactccaacccggctatgaccagcctggactattccaggttccaggcgaaccctgactatcaaatgagtggagatgacacccagcatatccagcaattctatgatctcctgactggctccatggagatcatccggggctgggcagagaagatccctggcttcgcagacctgcccaaagccgaccaagacctgctttttgaatcagctttcttagaactgtttgtccttcgattagcatacaggtccaacccagtggagggtaaactcatcttttgcaatggggtggtcttgcacaggttgcaatgcgttcgtggctttggggaatggattgattccattgttgaattctcctccaacttgcagaatatgaacatcgacatttctgccttctcctgcattgctgccctggctatggtcacagagagacacgggctcaaggaacccaagagagtggaagaactgcaaaacaagattgtaaattgtctcaaagaccacgtgactttcaacaatggggggttgaaccgccccaattatttgtccaaactgttggggaagctcccagaacttcgtaccctttgcacacaggggctacagcgcattttctacctgaaattggaagacttggtgccaccgccagcaataattgacaaacttttcctggacactttacctttctaagacctcctcccaagcacttcaaaggaactggaatgataatggaaactgtcaagagggggcaagtcacatgggcagagatagccgtgtgagcagtctcagctcaagctgccccccatttctgtaaccctcctagcccccttgatccctaaagaaaacaaacaaacaaacaaaaactgttgctatttcctaacctgcaggcagaacctgaaagggcattttggctccggggcatcctggatttagaacatggactacacacaatacagtggtataaactttttattctcagtttaaaaatcagtttgttgttcagaagaaagattgctataatgtataatgggaaatgtttggccatgcttggttgttgcagttcagacaaatgtaacacacacacacatacacacacacacacacacacagagacacatcttaaggggacccacaagtattgccctttaacaagacttcaaagttttctgctgtaaagaaagctgtaatatatagtaaaactaaatgttgcgtgggtggcatgagttgaagaaggcaaaggcttgtaaatttacccaatgcagtttggctttttaaattattttgtgcctatttatgaataaatattacaaattctaaaagataagtgtgtttgcaaaaaaaaagaaaataaa

SEQ ID NO: 20733 - DNA, 2465 bp, Homo sapiens
  source 1..2465: mol_type = unassigned DNA
aaacaaaggcacattggcggccagggccagtccgcccggcggctcgcgcacggctccgcggtcccttttgcctgtccagccggccgcctgtccctgctccctccctccgtgaggtgtccgggttcccttcgcccagctctcccacccctacccgaccccggcgcccgggctcccagagggaactgcacttcggcagagttgaatgaatgaagacagacgcggagaactcctaaccatgccttgtgttcaggcgcagtatgggtcctcgcctcaaggagccagccccgcttctcagagctacagttaccactcttcgggagaatacagctccgatttcttaactccagagtttgtcaagtttagcatggacctcaccaacactgaaatcactgccaccacttctctccccagcttcagtacctttatggacaactacagcacaggctacgacgtcaagccaccttgcttgtaccaaatgcccctgtccggacagcagtcctccattaaggtagaagacattcagatgcacaactaccagcaacacagccacctgcccccccagtctgaggagatgatgccgcactccgggtcggtttactacaagccctcctcgcccccgacgcccaccaccccgggcttccaggtgcagcacagccccatgtgggacgacccgggatctctccacaacttccaccagaactacgtggccactacgcacatgatcgagcagaggaaaacgccagtctcccgcctctccctcttctcctttaagcaatcgccccctggcaccccggtgtctagttgccagatgcgcttcgacgggcccctgcacgtccccatgaacccggagcccgccggcagccaccacgtggtggacgggcagaccttcgctgtgcccaaccccattcgcaagcccgcgtccatgggcttcccgggcctgcagatcggccacgcgtctcagctgctcgacacgcaggtgccctcaccgccgtcgcggggctccccctccaacgaggggctgtgcgctgtgtgtggggacaacgcggcctgccaacactacggcgtgcgcacctgtgagggctgcaaaggcttctttaagcgcacagtgcaaaaaaatgcaaaatacgtgtgtttagcaaataaaaactgcccagtggacaagcgtcgccggaatcgctgtcagtactgccgatttcagaagtgcctggctgttgggatggtcaaagaagtggttcgcacagacagtttaaaaggccggagaggtcgtttgccctcgaaaccgaagagcccacaggagccctctcccccttcgcccccggtgagtctgatcagtgccctcgtcagggcccatgtcgactccaacccggctatgaccagcctggactattccaggttccaggcgaaccctgactatcaaatgagtggagatgacacccagcatatccagcaattctatgatctcctgactggctccatggagatcatccggggctgggcagagaagatccctggcttcgcagacctgcccaaagccgaccaagacctgctttttgaatcagctttcttagaactgtttgtccttcgattagcatacaggtccaacccagtggagggtaaactcatcttttgcaatggggtggtcttgcacaggttgcaatgcgttcgtggctttggggaatggattgattccattgttgaattctcctccaacttgcagaatatgaacatcgacatttctgccttctcctgcattgctgccctggctatggtcacagagagacacgggctcaaggaacccaagagagtggaagaactgcaaaacaagattgtaaattgtctcaaagaccacgtgactttcaacaatggggggttgaaccgccccaattatttgtccaaactgttggggaagctcccagaacttcgtaccctttgcacacaggggctacagcgcattttctacctgaaattggaagacttggtgccaccgccagcaataattgacaaacttttcctggacactttacctttctaagacctcctcccaagcacttcaaaggaactggaatgataatggaaactgtcaagagggggcaagtcacatgggcagagatagccgtgtgagcagtctcagctcaagctgccccccatttctgtaaccctcctagcccccttgatccctaaagaaaacaaacaaacaaacaaaaactgttgctatttcctaacctgcaggcagaacctgaaagggcattttggctccggggcatcctggatttagaacatggactacacacaatacagtggtataaactttttattctcagtttaaaaatcagtttgttgttcagaagaaagattgctataatgtataatgggaaatgtttggccatgcttggttgttgcagttcagacaaatgtaacacacacacacatacacacacacacacacacacagagacacatcttaa

SEQ ID NO: 20734 - DNA, 768 bp, Homo sapiens
  source 1..768: mol_type = unassigned DNA
gtggaggaggaaggagatgtgtcaaacagaggagtggagctgctgcagctggagccggatgaggaccaggtgcgggcccgcatcttgggctgcctgcaggagcccaccaaaagccgccccgaccagccggcggccttcggcctcctgtgcagaatggccgaccagaccttcatctccatcgtggactgggcacgcaggtgcatggtcttcaaggagctggaggtggccgaccagatgacgctgctgcagaactgctggagcgagctgctggtgttcgaccacatctaccgccaggtccagcacggcaaggagggcagcatcctgctggtcaccgggcaggaggtggagctgaccacagtggccacccaggcgggctcgctgctgcacagcctggtgttgcgggcgcaggagctggtgctgcagctgcttgcgctgcagctggaccggcaggagtttgtctgcctcaagttcatcatcctcttcagcctggatttgaagttcctgaataaccacatcctggtgaaagacgctcaggagaaggccaacgccgccctgcttgactacaccctgtgccactacccgcactgcggggacaaattccagcagctgctgctgtgcctggtggaggtgcgggccctgagcatgcaggccaaggagtacctgtaccacaagcacctgggcaacgagatgccccgcaacaacctgctcatcgaaatgctgcaagccaagcagacttgagcctgggccgggggcggggccgggactggg

SEQ ID NO: 20735 - DNA, 3104 bp, Homo sapiens
  source 1..3104: mol_type = unassigned DNA
gggaggaggaggaggacggacggacagggccagcctgctgtccggctgccgcccgccgtggtgtgagggggtttctgcgcacccacagtcgccaccgtcccacctgggctgccggagcctccccctggacccctggtgcccactgccaccctcatccggtgtgagagcgctgcttccgcttcgcggacgccgcgggcatggactattcgtacgacgaggacctggacgagctgtgccccgtgtgcggggacaaggtgtccggctaccactacggactgctcacgtgtgagagctgcaagggcttcttcaagcgcacggtgcagaacaacaagcactacacgtgcaccgagagccagagctgcaagatcgacaagacgcagcgcaagcgctgtcccttctgccgcttccagaaatgcctgacggtggggatgcgcctggaagccgtgcgcgctgaccgtatgaggggtggccggaacaagtttgggccgatgtacaagcgggaccgggccctgaaacagcagaagaaggcacagattcgggccaatggcttcaagctggagacagggcccccgatgggggtgcccccgccgccccctcccgcaccggactacgtgctgcctcccagcctgcatgggcctgagcccaagggcctggccgccggtccacctgctgggccactgggcgactttggggccccagcactgcccatggccgtgcccggtgcccacgggccactggctggctacctctaccctgcctttcctggccgtgccatcaagtctgagtacccggagccttatgccagccccccacagcctgggctgccgtacggctacccagagcccttctctggagggcccaacgtgcctgagctcatcctgcagctgctgcagctggagccggatgaggaccaggtgcgggcccgcatcttgggctgcctgcaggagcccaccaaaagccgccccgaccagccggcggccttcggcctcctgtgcagaatggccgaccagaccttcatctccatcgtggactgggcacgcaggtgcatggtcttcaaggagctggaggtggccgaccagatgacgctgctgcagaactgctggagcgagctgctggtgttcgaccacatctaccgccaggtccagcacggcaaggagggcagcatcctgctggtcaccgggcaggaggtggagctgaccacagtggccacccaggcgggctcgctgctgcacagcctggtgttgcgggcgcaggagctggtgctgcagctgcttgcgctgcagctggaccggcaggagtttgtctgcctcaagttcatcatcctcttcagcctggatttgaagttcctgaataaccacatcctggtgaaagacgctcaggagaaggccaacgccgccctgcttgactacaccctgtgccactacccgcactgcggggacaaattccagcagctgctgctgtgcctggtggaggtgcgggccctgagcatgcaggccaaggagtacctgtaccacaagcacctgggcaacgagatgccccgcaacaacctgctcatcgaaatgctgcaagccaagcagacttgagcctgggccgggggcggggccgggactgggggcgggactgggggcggggcctgggcggggccgcagccacaccgctggctccgcatggttcattttctgatgcccaccgaggagccccagccccgtcccagaggccgctgcccctgagttctgacactgtgtgtttgggaaggtgggtgaggctgggcagggcctggcggaggtggagtggccactggcacttgcctgctgcttggagtgccccaaggaggtggctgttaaccacccgccccgccccctccctgctcccagctctctctcctggagtctgaagcctgcaggtccggggaggaggttcgggattccctggtgggcctcgacgtcccttggatcagaggtcatcccttcctcctctcctggaaacagacagggagaagttgagcaggtatcaactaggggaggagagagggtctccagtgttccccccatagagaccaggagggagagcctctgttttgtaaactaaggataaccgagtttgctaaattgagaggggctattgggccctagaggacactaggagactggttaggacaaaaagaccttctccctagcccttctaccccacctgacctctgcaagagggggcattgatacatcatcgggaaaaaactttgctccaggcatcactgattccctctcccacccaaggagaacgtttggtacaatcgacatcctagccccacccagaggtggccctcccaggctggtatttatctgcaaggttgtagtcaagaggtttttctccccgctttttgtttttaagcttctagacactccttgaaatgtgtgtgtgatggagggaaggggacagatttgaggactgaagctggggcttggggattgccactaagtacagctgacggtttctccccggacactcgcctactaagtacccttggggtggtgctgggtcattacttctgagccccagccccaatccagagaagcgctgttgcccgccctccacccactaggtgaacagcaggatgccctgttgggggcttcaggtctctgtgggtgggaatgcaagtgaacttgggagggggcacgggcctgtagatcagggatagcgctgttgatcccctctctgtggctccaacccgttgggtcccttgctgcaaacccatgaagctggccctcagctccctgaccccctgtcctaggtcatgaaggacactctgcagggtgaagcaccagggagaggcctcggctgtctcctgtccccggcggggtgcctgctgtccgtcccgctttcatgttactgttgcagcttgtgctgagcctgcccagttggaggagactgggcacccctgcctcctgcctcccgcctcccgccaccctgtctcagtacctcccctccccgccccctgaaacatgtgcccctgccaaggccggagacccacagccctgaaacgagaagtgcccttaaggatcaccccagcccccacagccctggaataaatttcgcaattagtttcc

SEQ ID NO: 20736 - DNA, 826 bp, Homo sapiens
  source 1..826: mol_type = unassigned DNA
ttggcccaggcctctaatggccagcctccttctgcagtgcctccctgcagcctgggccggccactgcctgctccacttagtgaccggtgccccctgctctgggcagggaaggtgccaggggtctcccagactcaccctcccaccatgctaccccctcttcttccctgggctgccgatgggaggagccaggcctgtgaccacaagccccatggaggtccgctggtgtcccgctgtctctggccaggcatccaccaggctgtgtgggtctgagcctagaggcggacgccgcgggcatggactattcgtacgacgaggacctggacgagctgtgccccgtgtgcggggacaaggtgtccggctaccactacggactgctcacgtgtgagagctgcaagggcttcttcaagcgcacggtgcagaacaacaagcactacacgtgcaccgagagccagagctgcaagatcgacaagacgcagcgcaagcgctgtcccttctgccgcttccagaaatgcctgacggtggggatgcgcctggaagccgtgcgcgctgaccgtatgaggggtggccggaacaagtttgggccgatgtacaagcgggaccgggccctgaaacagcagaagaaggcacagattcgggccaatggcttcaagctggagacagggcccccgatgggggtgcccccgccgccccctcccgcaccggactacgtgctgcctcccagcctgcatgggcctgagcccaagggcctggccgccggtccacctgctgggccactgggcgactttggggccccagcactgcccatggccgtgcccggtgcccacgg

SEQ ID NO: 20737 - DNA, 972 bp, Homo sapiens
  source 1..972: mol_type = unassigned DNA
gatctggaagagctttgtcccgtgtgtggagataaagtgtctgggtaccattatgggctcctcacctgtgaaagctgcaagggattttttaagcgaacagtccaaaataataaaaggtacacatgtatagaaaaccagaactgccaaattgacaaaacacagagaaagcgttgtccttactgtcgttttcaaaaatgtctaagtgttggaatgaagctagaagctgtaagggccgaccgaatgcgtggaggaaggaataagtttgggccaatgtacaagagagacagggccctgaagcaacagaaaaaagccctcatccgagccaatggacttaagctagaagccatgtctcaggtgatccaagctatgccctctgacctgaccatttcctctgcaattcaaaacatccactctgcctccaaaggcctacctctgaaccatgctgccttgcctcctacagactatgacagaagtccctttgtaacatcccccattagcatgacaatgccccctcacggcagcctgcaaggttaccaaacatatggccactttcctagccgggccatcaagtctgagtacccagacccctataccagctcacccgagtccataatgggctattcatatatggatagttaccagacgagctctccagcaagcatcccacatctgatactggaacttttgaagtgtgagccagatgagcctcaagtccaggctaaaatcatggcctatttgcagcaagagcaggctaaccgaagcaagcacgaaaagctgagcacctttgggcttatgtgcaaaatggcagatcaaactctcttctccattgtcgagtgggccaggagtagtatcttcttcagagaacttaagggtctcactctgtcgcccagtctggagtgcagtggctcttggctcatggcaacctccacctcctgcattcaagtgattcgcctgcctcagcctcccgagtag

SEQ ID NO: 20738 - DNA, 3115 bp, Homo sapiens
  source 1..3115: mol_type = unassigned DNA
atggtttacagcaggtcactaatgttggaaaaagtacagagtccagggaaagacttgcttgtaactttatgaattctggatttttttttttcctttgctttttcttaactttcactaagggttactgtagtctgatgtgtccttcccaaggccacgaaatttgacaagctgcacttttcttttgctcaatgatttctgctttaagccaaagaactgcctataatttcactaagaatgtcttctaattcagatactggggatttacaagagtctttaaagcacggacttacacctattgtgtctcaatttaaaatggtgaattactcctatgatgaagatctggaagagctttgtcccgtgtgtggagataaagtgtctgggtaccattatgggctcctcacctgtgaaagctgcaagggattttttaagcgaacagtccaaaataataaaaggtacacatgtatagaaaaccagaactgccaaattgacaaaacacagagaaagcgttgtccttactgtcgttttcaaaaatgtctaagtgttggaatgaagctagaagctgtaagggccgaccgaatgcgtggaggaaggaataagtttgggccaatgtacaagagagacagggccctgaagcaacagaaaaaagccctcatccgagccaatggacttaagctagaagccatgtctcaggtgatccaagctatgccctctgacctgaccatttcctctgcaattcaaaacatccactctgcctccaaaggcctacctctgaaccatgctgccttgcctcctacagactatgacagaagtccctttgtaacatcccccattagcatgacaatgccccctcacggcagcctgcaaggttaccaaacatatggccactttcctagccgggccatcaagtctgagtacccagacccctataccagctcacccgagtccataatgggctattcatatatggatagttaccagacgagctctccagcaagcatcccacatctgatactggaacttttgaagtgtgagccagatgagcctcaagtccaggctaaaatcatggcctatttgcagcaagagcaggctaaccgaagcaagcacgaaaagctgagcacctttgggcttatgtgcaaaatggcagatcaaactctcttctccattgtcgagtgggccaggagtagtatcttcttcagagaacttaaggttgatgaccaaatgaagctgcttcagaactgctggagtgagctcttaatcctcgaccacatttaccgacaagtggtacatggaaaggaaggatccatcttcctggttactgggcaacaagtggactattccataatagcatcacaagccggagccaccctcaacaacctcatgagtcatgcacaggagttagtggcaaaacttcgttctctccagtttgatcaacgagagttcgtatgtctgaaattcttggtgctctttagtttagatgtcaaaaaccttgaaaacttccagctggtagaaggtgtccaggaacaagtcaatgccgccctgctggactacacaatgtgtaactacccgcagcagacagagaaatttggacagctacttcttcgactacccgaaatccgggccatcagtatgcaggctgaagaatacctctactacaagcacctgaacggggatgtgccctataataaccttctcattgaaatgttgcatgccaaaagagcataagttacaacccctaggagctctgctttcaaaacaaaaagagattgggggagtggggagggggaagaagaacaggaagaaaaaaagtactctgaactgctccaagtaacgctaattaaaaacttgctttaaagatattgaatttaaaaaggcataataatcaaatacttaatagcaaataaatgatgtatcagggtatttgtattgcaaactgtgaatcaaaggcttcacagccccagaggattccatataaaagacattgtaatggagtggattgaactcacagatggataccaacacggtcagaagaaaaacggacagaacggttcttgtatatttaaactgatctccactatgaagaaatttaggaactaatcttattaattaggcttatacagcgggggatttgagcttacaggattcctccatggtaaagctgaactgaaacaattctcaagaatgcatcagctgtacctacaatagcccctccctcttcctttgaaggccccagcacctctgccctgtggtcaccgaatctgtactaaggacctgtgttcagccacacccagtggtagctccaccaaatcatgaacagcctaattttgagtgtctgtgtcttagacctgcaaacagctaataggaaattctattaatatgttagcttgccattttaaatatgttctgagggttgttttgtctcgtgttcatgatgttaagaaaatgcaggcagtatccctcatcttatgtaagtgttaattaatattaagggaaatgactacaaactttcaaagcaaatgctccatagctaaagcaacttagaccttatttctgctactgttgctgaaatgtggctttggcattgttggatttcataaaaaatttctggcaggaagtcttgttagtatacatcagtctttttcatcatccaagtttgtagttcatttaaaaatacaacattaaacacattttgctaggatgtcaaatagtcacagttctaagtagttggaaacaaaattgacgcatgttaatctatgcaaagagaaaggaaaggatgaggtgatgtattgactcaaggttcattcttgctgcaattgaacatcctcaagagttgggatggaaatggtgatttttacatgtgtcctggaaagatattaaagtaattcaaatcttccccaaaggggaaaggaagagagtgatactgacctttttaagtcatagaccaaagtctgctgtagaacaaatatgggaggacaaagaatcgcaaattcttcaaatgactattatcagtattattaacatgcgatgccacaggtatgaaagtcttgccttatttcacaattttaaaaggtagctgtgcagatgtggatcaacatttgtttaaaataaagtattaata

SEQ ID NO: 20739 - DNA, 1793 bp, Homo sapiens
  source 1..1793: mol_type = unassigned DNA
aagatctggaagagctttgtcccgtgtgtggagataaagtgtctgggtaccattatgggctcctcacctgtgaaagctgcaagggattttttaagcgaacagtccaaaataataaaaggtacacatgtatagaaaaccagaactgccaaattgacaaaacacagagaaagcgttgtccttactgtcgttttcaaaaatgtctaagtgttggaatgaagctagaagctgtaagggccgaccgaatgcgtggaggaaggaataagtttgggccaatgtacaagagagacagggccctgaagcaacagaaaaaagccctcatccgagccaatggacttaagctagaagccatgtctcaggtgatccaagctatgccctctgacctgaccatttcctctgcaattcaaaacatccactctgcctccaaaggcctacctctgaaccatgctgccttgcctcctacagactatgacagaagtccctttgtaacatcccccattagcatgacaatgccccctcacggcagcctgcaaggttaccaaacatatggccactttcctagccgggccatcaagtctgagtacccagacccctataccagctcacccgagtccataatgggctattcatatatggatagttaccagacgagctctccagcaagcatcccacatctgatactggaacttttgaagtgtgagccagatgagcctcaagtccaggctaaaatcatggcctatttgcagcaagagcaggctaaccgaagcaagcacgaaaagctgagcacctttgggcttatgtgcaaaatggcagatcaaactctcttctccattgtcgagtgggccaggagtagtatcttcttcagagaacttaagggtctcactctgtcgcccagtctggagtgcagtggcacgatcttggctcatggcaacctccacctcctgcattcaagtgattcgcctgcctcagcctcccgagtagctgggattacaggcgtgcaccacaacacccatctaatttttgtatttttagtagagatgggattttgccatgttggccaggctggtctcaaaactcctgacctcagggtgatctgcctgcctcggcctcccaaagtgctgggattatgggcatgagccactgcgcctggccgtaattgtgcttttttttccttttttctttttttgagatggagttacactcttgttgcctgggctggggtgcaatggcacagtctcggctcactgcaacctccacctcctgggttccagcaattctcctgcctcagcctcccgagtagctgggattacaggcatgcgccaccatgcctagctaattttcgtattattagtagaaacaaggtttcaccatgtcagccaggctggtctcaaactcctgacctcagatgatccacccgccttggcctcccaaagtgctgggattacagatgtgagccaccacgctcagccaaattgtactttcagtaaagtactttactgtttacaaagaacttccatatacatttttttggtcctggtctctgtctttcattttgggagcatggatgtaactggcctttcatcaatggttcagtagtgttgttttttaaagcctacaacagaaccatctcctatgaattgactatcacctgtctaaatgccctgtttacagcatgttgtacctgcaagagcaggatatttaaagtactttataattgataattgccattatcaatatgctcacctctttaccatattccaacaggtcttaaaggacttgtattattttttaccgaa

SEQ ID NO: 20740 - DNA, 5086 bp, Homo sapiens
  source 1..5086: mol_type = unassigned DNA
gaaactggatacatggtttacagcaggtcactaatgttggaaaaagtacagagtccagggaaagacttgcttgtaactttatgaattctggatttttttttttcctttgctttttcttaactttcactaagggttactgtagtctgatgtgtccttcccaaggccacgaaatttgacaagctgcacttttcttttgctcaatgatttctgctttaagccaaagaactgcctataatttcactaagaatgtcttctaattcagatactggggatttacaagagtctttaaagcacggacttacacctattggtgctgggcttccggaccgacacggatcccccatccccgcccgcggtcgccttgtcatgctgcccaaagtggagacggaagccctgggactggctcgatcgcatggggaacagggccagatgccggaaaacatgcaagtgtctcaatttaaaatggtgaattactcctatgatgaagatctggaagagctttgtcccgtgtgtggagataaagtgtctgggtaccattatgggctcctcacctgtgaaagctgcaagggattttttaagcgaacagtccaaaataataaaaggtacacatgtatagaaaaccagaactgccaaattgacaaaacacagagaaagcgttgtccttactgtcgttttcaaaaatgtctaagtgttggaatgaagctagaagctgtaagggccgaccgaatgcgtggaggaaggaataagtttgggccaatgtacaagagagacagggccctgaagcaacagaaaaaagccctcatccgagccaatggacttaagctagaagccatgtctcaggtgatccaagctatgccctctgacctgaccatttcctctgcaattcaaaacatccactctgcctccaaaggcctacctctgaaccatgctgccttgcctcctacagactatgacagaagtccctttgtaacatcccccattagcatgacaatgccccctcacggcagcctgcaaggttaccaaacatatggccactttcctagccgggccatcaagtctgagtacccagacccctataccagctcacccgagtccataatgggctattcatatatggatagttaccagacgagctctccagcaagcatcccacatctgatactggaacttttgaagtgtgagccagatgagcctcaagtccaggctaaaatcatggcctatttgcagcaagagcaggctaaccgaagcaagcacgaaaagctgagcacctttgggcttatgtgcaaaatggcagatcaaactctcttctccattgtcgagtgggccaggagtagtatcttcttcagagaacttaaggttgatgaccaaatgaagctgcttcagaactgctggagtgagctcttaatcctcgaccacatttaccgacaagtggtacatggaaaggaaggatccatcttcctggttactgggcaacaagtggactattccataatagcatcacaagccggagccaccctcaacaacctcatgagtcatgcacaggagttagtggcaaaacttcgttctctccagtttgatcaacgagagttcgtatgtctgaaattcttggtgctctttagtttagatgtcaaaaaccttgaaaacttccagctggtagaaggtgtccaggaacaagtcaatgccgccctgctggactacacaatgtgtaactacccgcagcagacagagaaatttggacagctacttcttcgactacccgaaatccgggccatcagtatgcaggctgaagaatacctctactacaagcacctgaacggggatgtgccctataataaccttctcattgaaatgttgcatgccaaaagagcataagttacaacccctaggagctctgctttcaaaacaaaaagagattgggggagtggggagggggaagaagaacaggaagaaaaaaagtactctgaactgctccaagtaacgctaattaaaaacttgctttaaagatattgaatttaaaaaggcataataatcaaatacttaatagcaaataaatgatgtatcagggtatttgtattgcaaactgtgaatcaaaggcttcacagccccagaggattccatataaaagacattgtaatggagtggattgaactcacagatggataccaacacggtcagaagaaaaacggacagaacggttcttgtatatttaaactgatctccactatgaagaaatttaggaactaatcttattaattaggcttatacagcgggggatttgagcttacaggattcctccatggtaaagctgaactgaaacaattctcaagaatgcatcagctgtacctacaatagcccctccctcttcctttgaaggccccagcacctctgccctgtggtcaccgaatctgtactaaggacctgtgttcagccacacccagtggtagctccaccaaatcatgaacagcctaattttgagtgtctgtgtcttagacctgcaaacagctaataggaaattctattaatatgttagcttgccattttaaatatgttctgagggttgttttgtctcgtgttcatgatgttaagaaaatgcaggcagtatccctcatcttatgtaagtgttaattaatattaagggaaatgactacaaactttcaaagcaaatgctccatagctaaagcaacttagaccttatttctgctactgttgctgaaatgtggctttggcattgttggatttcataaaaaatttctggcaggaagtcttgttagtatacatcagtctttttcatcatccaagtttgtagttcatttaaaaatacaacattaaacacattttgctaggatgtcaaatagtcacagttctaagtagttggaaacaaaattgacgcatgttaatctatgcaaagagaaaggaaaggatgaggtgatgtattgactcaaggttcattcttgctgcaattgaacatcctcaagagttgggatggaaatggtgatttttacatgtgtcctggaaagatattaaagtaattcaaatcttccccaaaggggaaaggaagagagtgatactgacctttttaagtcatagaccaaagtctgctgtagaacaaatatgggaggacaaagaatcgcaaattcttcaaatgactattatcagtattattaacatgcgatgccacaggtatgaaagtcttgccttatttcacaattttaaaaggtagctgtgcagatgtggatcaacatttgtttaaaataaagtattaatactttaaagtcaaataagatatagtgtttacattctttaggtcctgaggggcagggggatctgtgatataacaaaatagcaaaagcggtaatttccttaatgttatttttctgattggtaattatttttaacagtacttaattattctatgtcgtgagacactaaaatcaaaaacgggaatctcatttagactttaatttttttgagattatcggcggcacaatcactttgtagaaactgtaaaaaataaaagtatctcctagtcccttaattttttcataaatatttctggcttttgagtagtgtatttatattgtatatcatactttcaactgtagacaattatgatgctaatttattgtttcttggtttcacctttgtataagatatagccaagactgaagaaaccaaatatatgtgtttactgtagcatgtcttcaaattagtggaacttagttcagggacatagaagagtcttaatgaattaaaatcattcacttgattaaatgtctgtaaatcttcatcattcctactgtagtttatttaatatctattgtaaattatgtgacttgtagcttcctctggttttcaagtaaactcaacaaggtggagtcttacctggttttcctttccaagcattgtaaattgtataccaaagatattagttattacttctgtgtgtacaaagaggattattttattatgtttattaatcacctctaatactcatccacatgaagggtacacattaggtaagctgggcgttgactcatgcgcagtctcagtcacccgtgttatcttcgtggctcaaaggacaatgcaaaatcgccgatcagagctcatacccaaagcattacagagaacagcagcatcattgccctccccagctgaaaaacaagttggctagaagatacatggagaggaatggtgtggtcaacagttaatgaaacggttctatcatgcatgtgtaatgtggatggagacaattataagatttgactataactatttggagggtctttaacattgccaaaaaaacaaatatgttgatttttattttattttattttttattttaagaggcgggatcttgatctcacatgttgcccaggctggccttgaactcctgggctcaagcattcctcctgcctcagcctcccccatagctgggactaggggtgcatgccagcatacctggctacgttgactcttaaaatctatgttctcttattttaaagatacagtgctccccactgaaaattaaacctaaaaaatgtcacatattggtatgttgttaacctggtagattaaatcatgagaatgattagaaagacgggcaacacagcgggttacatccacactgctgatcacaccaacgacaggagctgataagcaagaaagcgtcacagccagcgtctgttcacccaaggttgacaagtgaagtttctctaatgttgattgttagccgatttgtaacctggcatttacttagcaactgccttatcaattacaggatttgccggtaaaagcagactcaaatataaaggtttttggcttaacttggtttattatagttgctctatgtttgtaaacagacaatctctaatgtctgattatttgtatcacagatctgcagctgccttggacttgaatccatgcaatgtttagagtgtgaagtcagttacttgttgatgttttcttactgtatcaatgaaatacatattgtcatgtcagttcttgccaggaacttctcaacaaaatggaattttttttttcagtatttcaataaatattgatatgcccagcctgataatttttaaaa

SEQ ID NO: 20741 - DNA, 213 bp, Homo sapiens
  source 1..213: mol_type = unassigned DNA
gtctttaaagcacggacttacacctattgatcgaggaaattgccgctctggctgcttctccttcgccgccacgctcagacagaggtcgcttctgactagctgtgctgggcttccggaccgacacggatcccccatccccgcccgcggtcgccttgtcatgctgcccaaagtggagacggaagccctgggactggctcgatcgcatggggaaca

SEQ ID NO: 20742 - DNA, 574 bp, Homo sapiens
  source 1..574: mol_type = unassigned DNA
actaatgttggaaaaagtacagagtccagggaaagacttgcttgtaactttatgaattctggatttttttttttcctttgctttttcttaactttcactaagggttactgtagtctgatgtgtccttcccaaggccacgaaatttgacaagctgcacttttcttttgctcaatgatttctgctttaagccaaagaactgcctataatttcactaagaatgtcttctaattcagatactggggatttacaagagtctttaaagcacggacttacacctattgataacacagaaaatacaggcacaagaaagatgagagagcagcacacaaccatttcgcatctttttcgtcgggcagaaccgccgcggtgcgcaggcaaggagtccttcccggcagctccgcgcagctccggttccgcgtccggggccgcagctagagcgcgctcgggccggagacgcggactgcgcgcgcacgggggacgcgcgctcgggggctcgcgcccgcgcgggcggtcttgggctcctgctgcgcgcagccccagctggccgctgccaaaatagagttgagctgggtcg

SEQ ID NO: 20743 - DNA, 1698 bp, Homo sapiens
  source 1..1698: mol_type = unassigned DNA
atgtcttctaattcagatactggggatttacaagagtctttaaagcacggacttacacctattgatcgaggaaattgccgctctggctgcttctccttcgccgccacgctcagacagaggtcgcttctgactagctgtgctgggcttccggaccgacacggatcccccatccccgcccgcggtcgccttgtcatgctgcccaaagtggagacggaagccctgggactggctcgatcgcatggggaacagggccagatgccggaaaacatgcaagtgtctcaatttaaaatggtgaattactcctatgatgaagatctggaagagctttgtcccgtgtgtggagataaagtgtctgggtaccattatgggctcctcacctgtgaaagctgcaagggattttttaagcgaacagtccaaaataataaaaggtacacatgtatagaaaaccagaactgccaaattgacaaaacacagagaaagcgttgtccttactgtcgttttcaaaaatgtctaagtgttggaatgaagctagaagctgtaagggccgaccgaatgcgtggaggaaggaataagtttgggccaatgtacaagagagacagggccctgaagcaacagaaaaaagccctcatccgagccaatggacttaagctagaagccatgtctcaggtgatccaagctatgccctctgacctgaccatttcctctgcaattcaaaacatccactctgcctccaaaggcctacctctgaaccatgctgccttgcctcctacagactatgacagaagtccctttgtaacatcccccattagcatgacaatgccccctcacggcagcctgcaaggttaccaaacatatggccactttcctagccgggccatcaagtctgagtacccagacccctataccagctcacccgagtccataatgggctattcatatatggatagttaccagacgagctctccagcaagcatcccacatctgatactggaacttttgaagtgtgagccagatgagcctcaagtccaggctaaaatcatggcctatttgcagcaagagcaggctaaccgaagcaagcacgaaaagctgagcacctttgggcttatgtgcaaaatggcagatcaaactctcttctccattgtcgagtgggccaggagtagtatcttcttcagagaacttaaggttgatgaccaaatgaagctgcttcagaactgctggagtgagctcttaatcctcgaccacatttaccgacaagtggtacatggaaaggaaggatccatcttcctggttactgggcaacaagtggactattccataatagcatcacaagccggagccaccctcaacaacctcatgagtcatgcacaggagttagtggcaaaacttcgttctctccagtttgatcaacgagagttcgtatgtctgaaattcttggtgctctttagtttagatgtcaaaaaccttgaaaacttccagctggtagaaggtgtccaggaacaagtcaatgccgccctgctggactacacaatgtgtaactacccgcagcagacagagaaatttggacagctacttcttcgactacccgaaatccgggccatcagtatgcaggctgaagaatacctctactacaagcacctgaacggggatgtgccctataataaccttctcattgaaatgttgcatgccaaaagagcataa

SEQ ID NO: 20744 - DNA, 1852 bp, Homo sapiens
  source 1..1852: mol_type = unassigned DNA
gtgtttgtgcgccgttgggtagcaggaggtagagcctaggcgagagcctggtgcgcccacgggtttcgccgaagagtgcccgggggagtgcgggcagggtcccggctgcgcagacctgcgggtgcccgcccacccgcgccccgcgctcccatacttgacctgtgtggatgtggagtctccgggaaataccggatcaggcacttcctggggtctcctggtcactgcccttcctgtgcatagtttgtcatctttttagctgcgaagacgccttcgtgggtctgcgtccggagcaaggcggttacccgatcccggcagtgagccgcgccgcgcgtcgtggcggcctgatttctgtttaactttaatagggcgatctcgagtgtctcaatttaaaatggtgaattactcctatgatgaagatctggaagagctttgtcccgtgtgtggagataaagtgtctgggtaccattatgggctcctcacctgtgaaagctgcaagggattttttaagcgaacagtccaaaataataaaaggtacacatgtatagaaaaccagaactgccaaattgacaaaacacagagaaagcgttgtccttactgtcgttttcaaaaatgtctaagtgttggaatgaagctagaagctgtaagggccgaccgaatgcgtggaggaaggaataagtttgggccaatgtacaagagagacagggccctgaagcaacagaaaaaagccctcatccgagccaatggacttaagctagaagccatgtctcaggtgatccaagctatgccctctgacctgaccatttcctctgcaattcaaaacatccactctgcctccaaaggcctacctctgaaccatgctgccttgcctcctacagactatgacagaagtccctttgtaacatcccccattagcatgacaatgccccctcacggcagcctgcaaggttaccaaacatatggccactttcctagccgggccatcaagtctgagtacccagacccctataccagctcacccgagtccataatgggctattcatatatggatagttaccagacgagctctccagcaagcatcccacatctgatactggaacttttgaagtgtgagccagatgagcctcaagtccaggctaaaatcatggcctatttgcagcaagagcaggctaaccgaagcaagcacgaaaagctgagcacctttgggcttatgtgcaaaatggcagatcaaactctcttctccattgtcgagtgggccaggagtagtatcttcttcagagaacttaaggttgatgaccaaatgaagctgcttcagaactgctggagtgagctcttaatcctcgaccacatttaccgacaagtggtacatggaaaggaaggatccatcttcctggttactgggcaacaagtggactattccataatagcatcacaagccggagccaccctcaacaacctcatgagtcatgcacaggagttagtggcaaaacttcgttctctccagtttgatcaacgagagttcgtatgtctgaaattcttggtgctctttagtttagatgtcaaaaaccttgaaaacttccagctggtagaaggtgtccaggaacaagtcaatgccgccctgctggactacacaatgtgtaactacccgcagcagacagagaaatttggacagctacttcttcgactacccgaaatccgggccatcagtatgcaggctgaagaatacctctactacaagcacctgaacggggatgtgccctataataaccttctcattgaaatgttgcatgccaaaagagcataagttacaacccctaggagctctgctttcaaaacaaaaagagattgggggagt

SEQ ID NO: 20745 - DNA, 2424 bp, Homo sapiens
  source 1..2424: mol_type = unassigned DNA
gaggctgcgaggagccggcgcggtcgcagtctccacggcgcaggcccacggtagcgcagccgctctgagtagaacttcatggaggaacacggagtgacccaaaccgaacatatggctaccatagaagcacatgcagtggcccagcaagtgcagcaggtccatgtggctacttacaccgagcatagtatgctgagtgctgatgaagactcgccttcttctcccgaggacacctcttacgatgactcagatatactcaactccacagcagctgatgaggtgacagctcatctggcagctgcaggtcctgtgggaatggccgctgctgctgctgtggcaacaggaaagaaacggaaacggcctcatgtatttgagtctaatccatctatccggaagaggcaacaaacacgtttgcttcggaaacttcgagccacgttagatgaatatactactcgtgtgggacagcaagctattgtcctctgtatctcaccctccaaacctaaccctgtctttaaagtgtttggtgcagcacctttggagaatgtggtgcgtaagtacaagagcatgatcctggaagacctggagtctgctctggcagaacacgcccctgcgccacaggaggttaactcagaactgccgcctctcaccatcgacggaattccagtctctgtggacaaaatgacccaggcccagcttcgggcatttatcccagagatgctcaagtactctacaggtcggggaaaaccaggctgggggaaagaaagctgcaagcccatctggtggcctgaagatatcccctgggcaaatgtccggagtgatgtccgcacagaagagcaaaagcagagggtttcatggacccaggcactacggaccatagttaaaaactgttataaacagcatgggcgggaagaccttttgtatgcctttgaagatcagcaaacgcaaacacaggccacagccacacatagtatagctcatcttgtaccatcacagactgtagtccagacttttagtaaccctgatggcactgtctcacttatccaggttggtacgggggcaacagtagccacattggctgatgcttcagaattgccaaccacggtcaccgttgcccaagtgaattattctgccgtggctgatggagaggtggaacaaaattgggccacgttacagggaggtgagatgaccatccagacgacgcaagcatcagaggccacccaggcggtggcatcgttggcagaggccgcagtggcagcttctcaggagatgcagcagggagctacagtcactatggcgcttaacagcgaagctgccgcccatgctgtcgccaccctggctgaggccaccttacaaggtgggggacagatcgtcttgtctggggaaaccgcagcagccgtcggagcacttactggagtccaagatgctaatggcctggtccagatccctgtgagcatgtaccagactgtggtgaccagcctcgcccagggcaacggaccagtgcaggtggccatggcccctgtgaccaccaggatatcagacagcgcagtcaccatggacggccaagctgtggaggtggtgacattggaacagtgacatacagccatattatggcatcgttttctagtctacttcaaaattttttacacgtttgcagaggtgcaatcaaatggaattaagtctctcgactttggaaggaaagttttgttaacctttttttttttaaaaggaagaaagcggattttggaattgcattttttaaagcaccactcttgattttctgggattggtgaagaaactgcattgtcaatttcactgtcccaaaaaagccaaattgtggcaggacttctttctgcggaaatgtgtgtgtatacttatgtgtgtgtatgtgtgagtgtgaatatatgtatatgtgtacatatggacatacacatttacatatatataaagtatatatatacatatatatatatatatatgtatgaaacccgcatggaattatctgtatgaaatcaaggtgcgctgtggaaacaataattcacccagtttagtgggtggtagggtacgtggccagacacagtcacccagtttttgttcataccagggtcatgcgttgagctactgacaaactcaggcggaggtgaccatgcccttcaccaaagctgcctcccagtggccacacagaactctccctgctggactcacctgaggaaagaggctccagcatggggtgggtcagagatgtgcttgcaaggtccagggactgcgtggtctgccagctgagatgctcctcgggctggcccaggtgctgaccttgccacaggcagatgaatgtcttgaaagctcccgggcctcagcctcccatctcctctccttcccaggaatccttgatctcatgactattaaaatgttgctctggttttaaggtca

SEQ ID NO: 20746 - DNA, 2481 bp, Homo sapiens
  source 1..2481: mol_type = unassigned DNA
gaggctgcgaggagccggcgcggtcgcagtctccacggcgcaggcccacggtagcgcagccgctctgagtagaacttcatggaggaacacggagtgacccaaaccgaacatatggctaccatagaagcacatgcagtggcccagcaagtgcagcaggtccatgtggctacttacaccgagcatagtatgctgagtgctgatgaagactcgccttcttctcccgaggacacctcttacgatgactcagatatactcaactccacagcagctgatgaggtgacagctcatctggcagctgcaggtcctgtgggaatggccgctgctgctgctgtggcaacaggaaagaaacggaaacggcctcatgtatttgagtctaatccatctatccggaagaggcaacaaacacgtttgcttcggaaacttcgagccacgttagatgaatatactactcgtgtgggacagcaagctattgtcctctgtatctcaccctccaaacctaaccctgtctttaaagtgtttggtgcagcacctttggagaatgtggtgcgtaagtacaagagcatgatcctggaagacctggagtctgctctggcagaacacgcccctgcgccacaggaggttaactcagaactgccgcctctcaccatcgacggaattccagtctctgtggacaaaatgacccaggcccagcttcgggcatttatcccagagatgctcaagtactctacaggtcggggaaaaccaggctgggggaaagaaagctgcaagcccatctggtggcctgaagatatcccctgggcaaatgtccggagtgatgtccgcacagaagagcaaaagcagagggtttcatggacccaggcactacggaccatagttaaaaactgttataaacagcatgggcgggaagaccttttgtatgcctttgaagatcagcaaacgcaaacacaggccacagccacacatagtatagctcatcttgtaccatcacagactgtagtccagacttttagtaaccctgatggcactgtctcacttatccaggttggtacgggggcaacagtagccacattggctgatgcttcagaattgccaaccacggtcaccgttgcccaagtgaattattctgccgtggctgatggagaggtggaacaaaattgggccacgttacagggaggtgagatgaccatccagacgacgcaagcatcagaggccacccaggcggtggcatcgttggcagaggccgcagtggcagcttctcaggagatgcagcagggagctacagtcactatggcgcttaacagcgaagctgccgcccatgctgtcgccaccctggctgaggccaccttacaaggtgggggacagatcgtcttgtctggggaaaccgcagcagccgtcggagcacttactggagtccaagatgctaatggcctctttatggcagatcgtgcaggtcgcaagtggatcctgactgacaaagccacaggcctggtccagatccctgtgagcatgtaccagactgtggtgaccagcctcgcccagggcaacggaccagtgcaggtggccatggcccctgtgaccaccaggatatcagacagcgcagtcaccatggacggccaagctgtggaggtggtgacattggaacagtgacatacagccatattatggcatcgttttctagtctacttcaaaattttttacacgtttgcagaggtgcaatcaaatggaattaagtctctcgactttggaaggaaagttttgttaacctttttttttttaaaaggaagaaagcggattttggaattgcattttttaaagcaccactcttgattttctgggattggtgaagaaactgcattgtcaatttcactgtcccaaaaaagccaaattgtggcaggacttctttctgcggaaatgtgtgtgtatacttatgtgtgtgtatgtgtgagtgtgaatatatgtatatgtgtacatatggacatacacatttacatatatataaagtatatatatacatatatatatatatatatgtatgaaacccgcatggaattatctgtatgaaatcaaggtgcgctgtggaaacaataattcacccagtttagtgggtggtagggtacgtggccagacacagtcacccagtttttgttcataccagggtcatgcgttgagctactgacaaactcaggcggaggtgaccatgcccttcaccaaagctgcctcccagtggccacacagaactctccctgctggactcacctgaggaaagaggctccagcatggggtgggtcagagatgtgcttgcaaggtccagggactgcgtggtctgccagctgagatgctcctcgggctggcccaggtgctgaccttgccacaggcagatgaatgtcttgaaagctcccgggcctcagcctcccatctcctctccttcccaggaatccttgatctcatgactattaaaatgttgctctggttttaaggtca

SEQ ID NO: 20747 - DNA, 3330 bp, Homo sapiens
  source 1..3330: mol_type = unassigned DNA
ggcggcagaagcggcagcgctcgccattgccgctggtggcaggaggctgcgaggagccggcgcggtcgcagtctccacggcgcaggcccacggtagcgcagccgctctgagaacttcatggaggaacacggagtgacccaaaccgaacatatggctaccatagaagcacatgcagtggcccagcaagtgcagcaggtccatgtggctacttacaccgagcatagtatgctgagtgctgatgaagactcgccttcttctcccgaggacacctcttacgatgactcagatatactcaactccacagcagctgatgaggtgacagctcatctggcagctgcaggtcctgtgggaatggccgctgctgctgctgtggcaacaggaaagaaacggaaacggcctcatgtatttgagtctaatccatctatccggaagaggcaacaaacacgtttgcttcggaaacttcgagccacgttagatgaatatactactcgtgtgggacagcaagctattgtcctctgtatctcaccctccaaacctaaccctgtctttaaagtgtttggtgcagcacctttggagaatgtggtgcgtaagtacaagagcatgatcctggaagacctggagtctgctctggcagaacacgcccctgcgccacaggaggttaactcagaactgccgcctctcaccatcgacggaattccagtctctgtggacaaaatgacccaggcccagcttcgggcatttatcccagagatgctcaagtactctacaggtcggggaaaaccaggctgggggaaagaaagctgcaagcccatctggtggcctgaagatatcccctgggcaaatgtccggagtgatgtccgcacagaagagcaaaagcagagggttggtacgggggcaacagtagccacattggctgatgcttcagaattgccaaccacggtcaccgttgcccaagtgaattattctgccgtggctgatggagaggtggaacaaaattgggccacgttacagggaggtgagatgaccatccagacgacgcaagcatcagaggccacccaggcggtggcatcgttggcagaggccgcagtggcagcttctcaggagatgcagcagggagctacagtcactatggcgcttaacagcgaagctgccgcccatgctgtcgccaccctggctgaggccaccttacaaggtgggggacagatcgtcttgtctggggaaaccgcagcagccgtcggagcacttactggagtccaagatgctaatggcctggtccagatccctgtgagcatgtaccagactgtggtgaccagcctcgcccagggcaacggaccagtgcaggtggccatggcccctgtgaccaccaggatatcagacagcgcagtcaccatggacggccaagctgtggaggtggtgacattggaacagtgacatacagccatattatggcatcgttttctagtctacttcaaaattttttacacgtttgcagaggtgcaatcaaatggaattaagtctctcgactttggaaggaaagttttgttaacctttttttttttaaaaggaagaaagcggattttggaattgcattttttaaagcaccactcttgattttctgggattggtgaagaaactgcattgtcaatttcactgtcccaaaaaagccaaattgtggcaggacttctttctgcggaaatgtgtgtgtatacttatgtgtgtgtatgtgtgagtgtgaatatatgtatatgtgtacatatggacatacacatttacatatatataaagtatatatatacatatatatatatatatatgtatgaaacccgcatggaattatctgtatgaaatcaaggtgcgctgtggaaacaataattcacccagtttagtgggtggtagggtacgtggccagacacagtcacccagtttttgttcataccagggtcatgcgttgagctactgacaaactcaggcggaggtgaccatgcccttcaccaaagctgcctcccagtggccacacagaactctccctgctggactcacctgaggaaagaggctccagcatggggtgggtcagagatgtgcttgcaaggtccagggactgcgtggtctgccagctgagatgctcctcgggctggcccaggtgctgaccttgccacaggcagatgaatgtcttgaaagctcccgggcctcagcctcccatctcctctccttcccaggaatccttgatctcatgactattaaaatgttgctctggttttaaggtcagtcctgaattgctcgtatatatgaactgaaggtaaccgaagtattaggggtttgaggagtgcgtgcgtgtaagtgtgcttgtgtgtgtgcgtgcatggtgggggagaggatgggaagggggcgggggcagtggaagggaaaggaaggaaagaaaaatcgtcctagaccaggatacacccgtgggagcaattttctctactgtctgtagcttcacagaggaggcgctggaatgaacaagaagagacatctggtctgtggccacagcaccctgaacgcccctgatcttgtgtgatcttggaagctaagcttggttgggcccggtcagtacgcggaagggaagaagggacacctggccatagaaaacagctgagggtgtttgctgtgttcctggatcaggccctgcttcagaagggactcctggaggcccatgttccttgatgcaacctcgtggcccaggccgggagcagcttgcctcctcagaggtgttgactatctgggtgttcttggtaaccgttaactctgtctttctcagctgcaagccctgagtctccagtagctgaattcacctgacttttcaacaggccaaatctctgaaccttgagtacagggacagctcctcctccctcctcccagctctccccatgtgtgtgatggtgtatttaatgtgtttttttaatgcgacattaaaagattctccacgtcttgctcaacctttgagagaagtttcagattcttgtatttgcttgttttatataaaactatctaatgttctttatatgttcttttctgtacgtaatggggggaggggagggaaatttacatataaatagtcctagttctacaatttgttatttttttaattattattttttatcgtcattgtgaagttgtccagggactttaaagtccatgttcctttgtggtgaaataacctccaaatagtttgagaagttgccaagacgaagaaaaaagcaaaaccccagtagcagagcatggattctgtgttgtttcccattctgtctttgactgcctcattcaataaatagttaaaaatgtggcaacagg

SEQ ID NO: 20748 - DNA, 3523 bp, Homo sapiens
  source 1..3523: mol_type = unassigned DNA
cccctttcagttcctggtccagaactttacacagaaaaggtgctcaaaggatatttgtttaatgaatgtggtatgctgacatttaaacaggacaaaacttgtagaacttcatggaggaacacggagtgacccaaaccgaacatatggctaccatagaagcacatgcagtggcccagcaagtgcagcaggtccatgtggctacttacaccgagcatagtatgctgagtgctgatgaagactcgccttcttctcccgaggacacctcttacgatgactcagatatactcaactccacagcagctgatgaggtgacagctcatctggcagctgcaggtcctgtgggaatggccgctgctgctgctgtggcaacaggaaagaaacggaaacggcctcatgtatttgagtctaatccatctatccggaagaggcaacaaacacgtttgcttcggaaacttcgagccacgttagatgaatatactactcgtgtgggacagcaagctattgtcctctgtatctcaccctccaaacctaaccctgtctttaaagtgtttggtgcagcacctttggagaatgtggtgcgtaagtacaagagcatgatcctggaagacctggagtctgctctggcagaacacgcccctgcgccacaggaggttaactcagaactgccgcctctcaccatcgacggaattccagtctctgtggacaaaatgacccaggcccagcttcgggcatttatcccagagatgctcaagtactctacaggtcggggaaaaccaggctgggggaaagaaagctgcaagcccatctggtggcctgaagatatcccctgggcaaatgtccggagtgatgtccgcacagaagagcaaaagcagagggtttcatggacccaggcactacggaccatagttaaaaactgttataaacagcatgggcgggaagaccttttgtatgcctttgaagatcagcaaacgcaaacacaggccacagccacacatagtatagctcatcttgtaccatcacagactgtagtccagacttttagtaaccctgatggcactgtctcacttatccaggttggtacgggggcaacagtagccacattggctgatgcttcagaattgccaaccacggtcaccgttgcccaagtgaattattctgccgtggctgatggagaggtggaacaaaattgggccacgttacagggaggtgagatgaccatccagacgacgcaagcatcagaggccacccaggcggtggcatcgttggcagaggccgcagtggcagcttctcaggagatgcagcagggagctacagtcactatggcgcttaacagcgaagctgccgcccatgctgtcgccaccctggctgaggccaccttacaaggtgggggacagatcgtcttgtctggggaaaccgcagcagccgtcggagcacttactggagtccaagatgctaatggcctggtccagatccctgtgagcatgtaccagactgtggtgaccagcctcgcccagggcaacggaccagtgcaggtggccatggcccctgtgaccaccaggatatcagacagcgcagtcaccatggacggccaagctgtggaggtggtgacattggaacagtgacatacagccatattatggcatcgttttctagtctacttcaaaattttttacacgtttgcagaggtgcaatcaaatggaattaagtctctcgactttggaaggaaagttttgttaacctttttttttttaaaaggaagaaagcggattttggaattgcattttttaaagcaccactcttgattttctgggattggtgaagaaactgcattgtcaatttcactgtcccaaaaaagccaaattgtggcaggacttctttctgcggaaatgtgtgtgtatacttatgtgtgtgtatgtgtgagtgtgaatatatgtatatgtgtacatatggacatacacatttacatatatataaagtatatatatacatatatatatatatatatgtatgaaacccgcatggaattatctgtatgaaatcaaggtgcgctgtggaaacaataattcacccagtttagtgggtggtagggtacgtggccagacacagtcacccagtttttgttcataccagggtcatgcgttgagctactgacaaactcaggcggaggtgaccatgcccttcaccaaagctgcctcccagtggccacacagaactctccctgctggactcacctgaggaaagaggctccagcatggggtgggtcagagatgtgcttgcaaggtccagggactgcgtggtctgccagctgagatgctcctcgggctggcccaggtgctgaccttgccacaggcagatgaatgtcttgaaagctcccgggcctcagcctcccatctcctctccttcccaggaatccttgatctcatgactattaaaatgttgctctggttttaaggtcagtcctgaattgctcgtatatatgaactgaaggtaaccgaagtattaggggtttgaggagtgcgtgcgtgtaagtgtgcttgtgtgtgtgcgtgcatggtgggggagaggatgggaagggggcgggggcagtggaagggaaaggaaggaaagaaaaatcgtcctagaccaggatacacccgtgggagcaattttctctactgtctgtagcttcacagaggaggcgctggaatgaacaagaagagacatctggtctgtggccacagcaccctgaacgcccctgatcttgtgtgatcttggaagctaagcttggttgggcccggtcagtacgcggaagggaagaagggacacctggccatagaaaacagctgagggtgtttgctgtgttcctggatcaggccctgcttcagaagggactcctggaggcccatgttccttgatgcaacctcgtggcccaggccgggagcagcttgcctcctcagaggtgttgactatctgggtgttcttggtaaccgttaactctgtctttctcagctgcaagccctgagtctccagtagctgaattcacctgacttttcaacaggccaaatctctgaaccttgagtacagggacagctcctcctccctcctcccagctctccccatgtgtgtgatggtgtatttaatgtgtttttttaatgcgacattaaaagattctccacgtcttgctcaacctttgagagaagtttcagattcttgtatttgcttgttttatataaaactatctaatgttctttatatgttcttttctgtacgtaatggggggaggggagggaaatttacatataaatagtcctagttctacaatttgttatttttttaattattattttttatcgtcattgtgaagttgtccagggactttaaagtccatgttcctttgtggtgaaataacctccaaatagtttgagaagttgccaagacgaagaaaaaagcaaaaccccagtagcagagcatggattctgtgttgtttcccattctgtctttgactgcctcattcaataaatagttaaaaatgtggcaacaggaa

SEQ ID NO: 20749 - DNA, 1776 bp, Homo sapiens
  source 1..1776: mol_type = unassigned DNA
catggaggaacacggagtgacccaaaccgaacatatggctaccatagaagcacatgcagtggcccagcaagtgcagcaggtccatgtggctacttacaccgagcatagtatgctgagtgctgatgaagactcgccttcttctcccgaggacacctcttacgatgactcagatatactcaactccacagcagctgatgaggtgacagctcatctggcagctgcaggtcctgtgggaatggccgctgctgctgctgtggcaacaggaaagaaacggaaacggcctcatgtatttgagtctaatccatctatccggaagaggcaacaaacacgtttgcttcggaaacttcgagccacgttagatgaatatactactcgtgtgggacagcaagctattgtcctctgtatctcaccctccaaacctaaccctgtctttaaagtgtttggtgcagcacctttggagaatgtggtgcgtaagtacaagagcatgatcctggaagacctggagtctgctctggcagaacacgcccctgcgccacaggaggttaactcagaactgccgcctctcaccatcgacggaattccagtctctgtggacaaaatgacccaggcccagcttcgggcatttatcccagagatgctcaagtactctacaggtcggggaaaaccaggctgggggaaagaaagctgcaagcccatctggtggcctgaagatatcccctgggcaaatgtccggagtgatgtccgcacagaagagcaaaagcagagggtttcatggacccaggcactacggaccatagttaaaaactgttataaacagcatgggcgggaagaccttttgtatgcctttgaagatcagcaaacgcaaacacaggccacagccacacatagtatagctcatcttgtaccatcacagactgtagtccagacttttagtaaccctgatggcactgtctcacttatccaggttggtacgggggcaacagtagccacattggctgatgcttcagaattgccaaccacggtcaccgttgcccaagtgaattattctgccgtggctgatggagaggtggaacaaaattgggccacgttacagggaggtgagatgaccatccagacgacgcaagcatcagaggccacccaggcggtggcatcgttggcagaggccgcagtggcagcttctcaggagatgcagcagggagctacagtcactatggcgcttaacagcgaagctgccgcccatgctgtcgccaccctggctgaggccaccttacaaggtgggggacagatcgtcttgtctggggaaaccgcagcagccgtcggagcacttactggagtccaagatgctaatggcctctttatggcagatcgtgcaggtcgcaagtggatcctgactgacaaagccacaggcctggtccagatccctgtgagcatgtaccagactgtggtgaccagcctcgcccagggcaacggaccagtgcaggtggccatggcccctgtgaccaccaggatatcagacagcgcagtcaccatggacggccaagctgtggaggtggtgacattggaacagtgacatacagccatattatggcatcgttttctagtctacttcaaaattttttacacgtttgcagaggtgcaatcaaatggaattaagtctctcgactttggaaggaaagttttgttaacctttttttttttaaaaggaagaaagcggattttggaattgcattttttaaagcaccactcttgattttctgggattggtgaagaaactgc

SEQ ID NO: 20750 - DNA, 3528 bp, Homo sapiens
  source 1..3528: mol_type = unassigned DNA
ggcggcagaagcggcagcgctcgccattgccgctggtggcaggaggctgcgaggagccggcgcggtcgcagtctccacggcgcaggcccacggtagcgcagccgctctgagaacttcatggaggaacacggagtgacccaaaccgaacatatggctaccatagaagcacatgcagtggcccagcaagtgcagcaggtccatgtggctacttacaccgagcatagtatgctgagtgctgatgaagactcgccttcttctcccgaggacacctcttacgatgactcagatatactcaactccacagcagctgatgaggtgacagctcatctggcagctgcaggtcctgtgggaatggccgctgctgctgctgtggcaacaggaaagaaacggaaacggcctcatgtatttgagtctaatccatctatccggaagaggcaacaaacacgtttgcttcggaaacttcgagccacgttagatgaatatactactcgtgtgggacagcaagctattgtcctctgtatctcaccctccaaacctaaccctgtctttaaagtgtttggtgcagcacctttggagaatgtggtgcgtaagtacaagagcatgatcctggaagacctggagtctgctctggcagaacacgcccctgcgccacaggaggttaactcagaactgccgcctctcaccatcgacggaattccagtctctgtggacaaaatgacccaggcccagcttcgggcatttatcccagagatgctcaagtactctacaggtcggggaaaaccaggctgggggaaagaaagctgcaagcccatctggtggcctgaagatatcccctgggcaaatgtccggagtgatgtccgcacagaagagcaaaagcagagggtttcatggacccaggcactacggaccatagttaaaaactgttataaacagcatgggcgggaagaccttttgtatgcctttgaagatcagcaaacgcaaacacaggccacagccacacatagtatagctcatcttgtaccatcacagactgtagtccagacttttagtaaccctgatggcactgtctcacttatccaggttggtacgggggcaacagtagccacattggctgatgcttcagaattgccaaccacggtcaccgttgcccaagtgaattattctgccgtggctgatggagaggtggaacaaaattgggccacgttacagggaggtgagatgaccatccagacgacgcaagcatcagaggccacccaggcggtggcatcgttggcagaggccgcagtggcagcttctcaggagatgcagcagggagctacagtcactatggcgcttaacagcgaagctgccgcccatgctgtcgccaccctggctgaggccaccttacaaggtgggggacagatcgtcttgtctggggaaaccgcagcagccgtcggagcacttactggagtccaagatgctaatggcctggtccagatccctgtgagcatgtaccagactgtggtgaccagcctcgcccagggcaacggaccagtgcaggtggccatggcccctgtgaccaccaggatatcagacagcgcagtcaccatggacggccaagctgtggaggtggtgacattggaacagtgacatacagccatattatggcatcgttttctagtctacttcaaaattttttacacgtttgcagaggtgcaatcaaatggaattaagtctctcgactttggaaggaaagttttgttaacctttttttttttaaaaggaagaaagcggattttggaattgcattttttaaagcaccactcttgattttctgggattggtgaagaaactgcattgtcaatttcactgtcccaaaaaagccaaattgtggcaggacttctttctgcggaaatgtgtgtgtatacttatgtgtgtgtatgtgtgagtgtgaatatatgtatatgtgtacatatggacatacacatttacatatatataaagtatatatatacatatatatatatatatatgtatgaaacccgcatggaattatctgtatgaaatcaaggtgcgctgtggaaacaataattcacccagtttagtgggtggtagggtacgtggccagacacagtcacccagtttttgttcataccagggtcatgcgttgagctactgacaaactcaggcggaggtgaccatgcccttcaccaaagctgcctcccagtggccacacagaactctccctgctggactcacctgaggaaagaggctccagcatggggtgggtcagagatgtgcttgcaaggtccagggactgcgtggtctgccagctgagatgctcctcgggctggcccaggtgctgaccttgccacaggcagatgaatgtcttgaaagctcccgggcctcagcctcccatctcctctccttcccaggaatccttgatctcatgactattaaaatgttgctctggttttaaggtcagtcctgaattgctcgtatatatgaactgaaggtaaccgaagtattaggggtttgaggagtgcgtgcgtgtaagtgtgcttgtgtgtgtgcgtgcatggtgggggagaggatgggaagggggcgggggcagtggaagggaaaggaaggaaagaaaaatcgtcctagaccaggatacacccgtgggagcaattttctctactgtctgtagcttcacagaggaggcgctggaatgaacaagaagagacatctggtctgtggccacagcaccctgaacgcccctgatcttgtgtgatcttggaagctaagcttggttgggcccggtcagtacgcggaagggaagaagggacacctggccatagaaaacagctgagggtgtttgctgtgttcctggatcaggccctgcttcagaagggactcctggaggcccatgttccttgatgcaacctcgtggcccaggccgggagcagcttgcctcctcagaggtgttgactatctgggtgttcttggtaaccgttaactctgtctttctcagctgcaagccctgagtctccagtagctgaattcacctgacttttcaacaggccaaatctctgaaccttgagtacagggacagctcctcctccctcctcccagctctccccatgtgtgtgatggtgtatttaatgtgtttttttaatgcgacattaaaagattctccacgtcttgctcaacctttgagagaagtttcagattcttgtatttgcttgttttatataaaactatctaatgttctttatatgttcttttctgtacgtaatggggggaggggagggaaatttacatataaatagtcctagttctacaatttgttatttttttaattattattttttatcgtcattgtgaagttgtccagggactttaaagtccatgttcctttgtggtgaaataacctccaaatagtttgagaagttgccaagacgaagaaaaaagcaaaaccccagtagcagagcatggattctgtgttgtttcccattctgtctttgactgcctcattcaataaatagttaaaaatgtggcaacagg

SEQ ID NO: 20751 - DNA, 814 bp, Homo sapiens
  source 1..814: mol_type = unassigned DNA
tggtggcaggaggctgcgaggagccggcgcggtcgcagtctccacggcgcaggcccacggtagcgcagccgctctgaggctggagtgcagtggtgtgatctcggctctctgcaacttccacatcccgggttcaagcgattctactgcctcagcctcccgagtagttgggactacagtagaacttcatggaggaacacggagtgacccaaaccgaacatatggctaccatagaagcacatgcagtggcccagcaagtgcagcaggtccatgtggctacttacaccgagcatagtatgctgagtgctgatgaagactcgccttcttctcccgaggacacctcttacgatgactcagatatactcaactccacagcagctgatgaggtgacagctcatctggcagctgcaggtcctgtgggaatggccgctgctgctgctgtggcaacaggaaagaaacggaaacggcctcatgtatttgagtctaatccatctatccggaagaggcaacaaacacgtttgcttcggaaacttcgagccacgttagatgaatatactactcgtgtgggacagcaagctattgtcctctgtatctcaccctccaaacctaaccctgtctttaaagtgtttggtgcagcacctttggagaatgtggtgcgtaagtacaagagcatgatcctggaagacctggagtctgctctggcagaacacgcccctgcgccacaggaggttaactcagaactgccgcctctcaccatcgacggaattccagtctctgtggacaaaatgacccaggcccagcttcgggcatttatccc

SEQ ID NO: 20752 - DNA, 1531 bp, Homo sapiens
  source 1..1531: mol_type = unassigned DNA
attgccgctggtggcaggaggctgcgaggagccggcgcggtcgcagtctccacggcgcaggcccacggtagcgcagccgctctgagtagaacttcatggaggaacacggagtgacccaaaccgaacatatggctaccatagaagcacatgcagtggcccagcaagtgcagcaggtccatgtggctacttacaccgagcatagtatgctgagtgctgatgaagactcgccttcttctcccgaggacacctcttacgatgactcagatatactcaactccacagcagctgatgaggtgacagctcatctggcagctgcaggaaacttcgagccacgttagatgaatatactactcgtgtgggacagcaagctattgtcctctgtatctcaccctccaaacctaaccctgtctttaaagtgtttggtgcagcacctttggagaatgtggtgcgtaagtacaagagcatgatcctggaagacctggagtctgctctggcagaacacgcccctgcgccacaggaggttaactcagaactgccgcctctcaccatcgacggaattccagtctctgtggacaaaatgacccaggcccagcttcgggcatttatcccagagatgctcaagtactctacaggtcggggaaaaccaggctgggggaaagaaagctgcaagcccatctggtggcctgaagatatcccctgggcaaatgtccggagtgatgtccgcacagaagagcaaaagcagagggtttcatggacccaggcactacggaccatagttaaaaactgttataaacagcatgggcgggaagaccttttgtatgcctttgaagatcagcaaacgcaaacacaggccacagccacacatagtatagctcatcttgtaccatcacagactgtagtccagacttttagtaaccctgatggcactgtctcacttatccaggttggtacgggggcaacagtagccacattggctgatgcttcagaattgccaaccacggtcaccgttgcccaagtgaattattctgccgtggctgatggagaggtggaacaaaattgggccacgttacagggaggtgagatgaccatccagacgacgcaagcatcagaggccacccaggcggtggcatcgttggcagaggccgcagtggcagcttctcaggagatgcagcagggagctacagtcactatggcgcttaacagcgaagctgccgcccatgctgtcgccaccctggctgaggccaccttacaaggtgggggacagatcgtcttgtctggggaaaccgcagcagccgtcggagcacttactggagtccaagatgctaatggcctggtccagatccctgtgagcatgtaccagactgtggtgaccagcctcgcccagggcaacggaccagtgcaggtggccatggcccctgtgaccaccaggatatcagacagcgcagtcaccatggacggccaagctgtggaggtggtgacattggaacagtgacatacagccatattatggcatcgttttctagtctacttc

SEQ ID NO: 20753 - DNA, 2346 bp, Homo sapiens
  source 1..2346: mol_type = unassigned DNA
cggcgcgcgacgtgctttgctgtataaatgcggtggcgcccggcgtagggacacttcggtcctgagcgcttgggagttaggttgtttgccggcgtagcggccagcgcctgagcccgcccttgatcttcgctgtggcatggcggacgaggggaagtcgtacagcgaacacgatgatgaacgcgttaatttccctcaaagaaagaagaaaggccggggtcccttccggtggaaatatggtgaaggaaaccgtaggtctggaagaggcggttctggtattcggtcttcccgccttgaggaagatgatggagatgtggcaatgagtgatgcccaggatggtccccgagtacgatacaacccctataccacccgacctaaccgtcggggtgatacttggcatgatcgagatcgcattcatgttactgtgcggagagacagagctcctccagagagaggaggggctggcaccagccaggatgggacctcaaagaactggttcaagattacaattccttatggcagaaagtatgacaaggcatggctcctgagcatgattcagagcaagtgcagtgtgcccttcacccctattgagtttcactatgagaatacacgggcccagttcttcgttgaagacgccagtactgcctctgcattgaaggctgtcaactataagattttggatcgggagaaccgaaggatatctatcatcatcaactcttctgctccaccccacactatactgaatgaactgaagccagaacaagtagaacagctaaagctgatcatgagcaaacgatacgatggctcccaacaagcccttgacctcaaaggcctccgttcagacccagatttggtggcccagaacattgacgttgtcctgaatcgcagaagctgtatggcagctaccctgaggatcattgaagagaacatccctgagctattgtccttgaacttgagcaacaacaggctgtacaggctggatgacatgtctagcattgttcagaaggcacccaacctgaagatcctaaacctttctggaaatgaattgaagtctgagcgggaattggacaagataaaggggctgaagctagaagagctctggctcgatggaaactccctgtgtgacaccttccgagaccagtccacctacatcagcgccattcgcgaacgatttcccaagttactacgcctggatggccatgagctacccccaccaattgcctttgatgttgaagcccccacgacgttaccgccctgcaagggaagctattttggaacagaaaacttgaagagtctggtcttgcacttcctgcaacagtactatgcaatttacgactctggagaccgacaagggctcctggatgcctaccatgatggggcctgctgttccctgagcattcctttcattcctcagaaccctgcccgaagcagcttagccgagtatttcaaggatagcagaaatgtgaagaagcttaaagaccctaccttgcggttccggctgctgaagcacacgcgtctcaacgttgttgccttcctcaatgagttgcccaaaacccagcacgacgtcaattccttcgtggtagacataagcgcccagacaagcacattgctgtgtttttctgtcaatggagtcttcaaggaagtggacggaaagtcccgggattctttgcgagccttcacccggacattcattgctgttcctgctagcaattcagggctatgtattgtaaatgatgagctatttgtgcggaatgccagttctgaagagatccaaagagccttcgctatgcctgcacccacgccttcctccagcccggtgcccaccctctctccagagcagcaggaaatgttgcaagcattctctacccagtctggcatgaacctcgagtggtcccagaagtgccttcaggacaacaactgggactacaccagatctgcccaggccttcactcatctcaaggccaagggcgagatcccagaagtggcattcatgaagtgatcgtagtcatgcctcagaagcagtcccccctgtaaatagtccttggatattaccgtctggttgtcgtctgtcatctcctcctgtctggcccgaggccgccccgtgactgtgaccgagggagggagggctgcctgatccctctcctcgcctgccttctggaagacttcagaagattgagcctcactggtgccaggaagccaaagcttactttgtagaactgacactaaactacccgaaggacttaggtgctttgtgtacttaaccccaggacctccttactttttaatataaagagtgatgttgtatttcgtgttctgcactttttaatataaagagtgatgttgtatttc

SEQ ID NO: 20754 - DNA, 1144 bp, Homo sapiens
  source 1..1144: mol_type = unassigned DNA
gagcgcttgggagttaggttgtttgccggcgtagcggccagcgcctgagcccgcccttgatcttcgctgtggcatggcggacgaggggaagtcgtacagcgaacacgatgatgaacgcgttaatttccctcaaagaaagaagaaaggccggggtcccttccggtggaaatatggtgaaggaaaccgtaggtctggaagaggcggttctggtattcggtcttcccgccttgaggaagatgatggagatgtggcaatgagtgatgcccaggatggtccccgagtacgatacaacccctataccacccgacctaaccgtcggggtgatacttggcatgatcgagatcgcattcatgttactgtgcggagagacagagctcctccagagagaggaggggctggcaccagccaggatgggacctcaaagaactggttcaagattacaattccttatggcagaaagtatgacaaggcatggctcctgagcatgattcagagcaagtgcagtgtgcccttcacccctattgagtttcactatgagaatacacgggcccagttcttcgttgaagacgccagtactgcctctgcattgaaggctgtcaactataagattttggatcgggagaaccgaaggatatctatcatcatcaactcttctgctccaccccacactatactgaatgaactgaagccagaacaagtagaacagctaaagctgatcatgagcaaacgatacgatggctcccaacaagcccttgacctcaaaggcctccgttcagacccagatttggtggcccagaacattgacgttgtcctgaatcgcagaagctgtatggcagctaccctgaggatcattgaagagaacatccctgagctattgtccttgaacttgagcaacaacaggctgtacaggctggatgacatgtctagcattgttcagaaggcacccaacctgaagatcctaaacctttctggaaatgaattgaagtctgagcgggaattggacaagataaaggggctgaagctagaagagctctggctcgatggaaactccctgtgtgacaccttccgagaccagtccacctacatcaggtcagttgtagcctgtgtctcccctcctggggaccttcaccccctgggaggctga

SEQ ID NO: 20755 - DNA, 4120 bp, Homo sapiens
  source 1..4120: mol_type = unassigned DNA
tataaatgcggtggcgcccggcgtagggacacttcggtcctgagcgcttgggagttaggttgtttgccggcgtagcggccagcgcctgagcccgcccttgatcttcgctgtggcatggcggacgaggggaagtcgtacagcgaacacgatgatgaacgcgttaatttccctcaaagaaagaagaaaggccggggtcccttccggtggaaatatggtgaaggaaaccgtaggtctggaagaggcggttctggtattcggtcttcccgccttgaggaagatgatggagatgtggcaatgagtgatgcccaggatggtccccgagtacgatacaacccctataccacccgacctaaccgtcggggtgatacttggcatgatcgagatcgcattcatgttactgtgcggagagacagagctcctccagagagaggaggggctggcaccagccaggatgggacctcaaagaactggttcaagattacaattccttatggcagaaagtatgacaaggcatggctcctgagcatgattcagagcaagtgcagtgtgcccttcacccctattgagtttcactatgagaatacacgggcccagttcttcgttgaagacgccagtactgcctctgcattgaaggctgtcaactataagattttggatcgggagaaccgaaggatatctatcatcatcaactcttctgctccaccccacactatactgaatgaactgaagccagaacaagtagaacagctaaagctgatcatgagcaaacgatacgatggctcccaacaagcccttgacctcaaaggcctccgttcagacccagatttggtggcccagaacattgacgttgtcctgaatcgcagaagctgtatggcagctaccctgaggatcattgaagagaacatccctgagctattgtccttgaacttgagcaacaacaggctgtacaggctggatgacatgtctagcattgttcagaaggcacccaacctgaagatcctaaacctttctggaaatgaattgaagtctgagcgggaattggacaagataaaggggctgaagctagaagagctctggctcgatggaaactccctgtgtgacaccttccgagaccagtccacctacatcaggtcagttgtagcctgtgtctcccctcctggggaccttcaccccctgggaggctgagctaatgcatcctgaccagggcccgtctgcggagatgtgcagccctgagctggaaccacctgtcctttgagaggatcgcgtgctccccactttggtctgtctgtgtcttccagctttgtcctgagatgttctctcttctcttctgacttgactatctgtttgctgggtctgtggcctttctctttcttcctgaacacaaccttttctagaatctccctaccctgttgttccaggaaaggcatctcccctttctactctaaccagagggtatcttgtacataccctatagatggggttgccttgtgccaagagcctggtgtccatgggttgaggaagccctccctacctgggacttcctactgagatgggccttccctcctttgtactgtgatggcccctcttgcccttgcgccaagagggacccttttctcaggatccacttgcccagggctgttgctgtccatgctgaggttgaggcctcctaggggctggtggcatgcaatctgtctctcttgcccagtgctatgagctgggctctccctgaagaagaaacctgggttccccaagatgtgaccagagctggggccccgccagcaggcgagggaatcccaaggcaggtgctgggcgtggaggccacgggggcataggctaccaaggagacagagaactgaccccctcgggggcgctgcctctccctcactcacacactgcacgtcaccctgtttggccccggtggatggctggttagccagagacgggtaagattcctcagggaaggaacaacctaagacaggcacagtcgcagaggggccatcaggagagaacttgggggcaacagaggtggggcatggaccctcacccccacaatcctacaggggcctgaaccctcacaccttctgagggaggtctcctgcccccatggctgctttgcttcccacgcccagttcagatcgggacccaggtagcagacagagacctggccaacagcaagtgcccactcaccacagcaaggatttgtttctcatttctaccttggaccacagggatggggcagctgaaagaaagggctgtgtcagggtgtctttctcccttttctccctcatttttctagatgcttttttgccttgtagttctttctctttttctttgctttctctttcctttttctgtctgtctcctatacctccccatctctcccttgcccctgccccatcttgcctttttctctttttcctccttttcctttcttattcctttgcctctcctcttcctgagccccacctgctcatctccctgccccaacatcctgtgccatccctgtggtgtgtttgggtcttggccaaagccagacctggcagaactgatggatacctggtgaggcagcggagcccctgggctcccaccccattccctcctcccggggctgcacaggtgagtaggtggaaggtaaggggggcagggaggggaaagaggtcctgggcttaaagcctgggcttggagtactgctccttgacactcagggtcaggcagagagaaaagagacagccttcaaggcagtccatgtctgggtgccccgggtcaggtggggagtgggggccatttttccctgagcacaggctgggagggagtggagggatgagcaggatgggatgggctgtccctcgggtttggtatatttgctcctagagcagcccaggaggcacggtggctctgaagcatcactcacttctgtcccgttcttgacagcgccattcgcgaacgatttcccaagttactacgcctggatggccatgagctacccccaccaattgcctttgatgttgaagcccccacgacgttaccgccctgcaagggaagctattttggaacagaaaacttgaagagtctggtcttgcacttcctgcaacagtactatgcaatttacgactctggagaccgacaagggctcctggatgcctaccatgatggggcctgctgttccctgagcattcctttcattcctcagaaccctgcccgaagcagcttagccgagtatttcaaggatagcagaaatgtgaagaagcttaaagaccctaccttgcggttccggctgctgaagcacacgcgtctcaacgttgttgccttcctcaatgagttgcccaaaacccagcacgacgtcaattccttcgtggtagacataagcgcccagacaagcacattgctgtgtttttctgtcaatggagtcttcaaggaagtggacggaaagtcccgggattctttgcgagccttcacccggacattcattgctgttcctgctagcaattcagggctatgtattgtaaatgatgagctatttgtgcggaatgccagttctgaagagatccaaagagccttcgctatgcctgcacccacgccttcctccagcccggtgcccaccctctctccagagcagcaggaaatgttgcaagcattctctacccagtctggcatgaacctcgagtggtcccagaagtgccttcaggacaacaactgggactacaccagatctgcccaggccttcactcatctcaaggccaagggcgagatcccagaagtggcattcatgaagtgatcgtagtcatgcctcagaagcagtcccccctgtaaatagtccttggatattaccgtctggttgtcgtctgtcatctcctcctgtctggcccgaggccgccccgtgactgtgaccgagggagggagggctgcctgatccctctcctcgcctgccttctggaagacttcagaagattgagcctcactggtgccaggaagccaaagcttactttgtagaactgacactaaactacccgaaggacttaggtgctttgtgtacttaaccccaggacctccttactttttaatataaagagtgatgttgtatttcgtgttctgcactttttaatataaagagtgatgttgt

SEQ ID NO: 20756 - DNA, 2795 bp, Homo sapiens
  source 1..2795: mol_type = unassigned DNA
atagagacaacagtcaggggctggtggtggtgcttttgggggtctaggagagcccaaggccctgatattttaaaatgtcctcctcggcatctccagcaagttgccactgctggcgaagaaagcgaggtatagacaaggagccgagctgaaacactggctagattccggtaggggtctgagccatcactcccacctggaggcgcggtctccattcctctgaagccctttgtgcggcccccttcctcactgagttctgggctgcggcggcagcactgtgctctagcactaactctgaagctgccagggcagcgtcagcggacagatgaaaaggtgcggggacatgctggctgccagccggggttccgcaagttcaggtcttgggcggggcgtggagggccaggccccgcccctcgaacgacggccttaagtgtgcgcacgcgcagggggccgcgctttctccgggcggcggcaccgcccacagcctgggacgtcagcggcgcgcgacgtgctttgctgtataaatgcggtggcgcccggcgtagggacacttcggtcctgagcgcttgggagttaggttgtttgccggcgtagcggccagcgcctgagcccgcccttgatcttcgctgtggcatggcggacgaggggaagtcgtacagcgaacacgatgatgaacgcgttaatttccctcaaagaaagaagaaaggccggggtcccttccggtggaaatatggtgaaggaaaccgtaggtctggaagaggcggttctggtattcggtcttcccgccttgaggaagatgatggagatgtggcaatgagtgatgcccaggatggtccccgagtacgatacaacccctataccacccgacctaaccgtcggggtgatacttggcatgatcgagatcgcattcatgttactgtgcggagagacagagctcctccagagagaggaggggctggcaccagccaggatgggacctcaaagaactggttcaagattacaattccttatggcagaaagtatgacaaggcatggctcctgagcatgattcagagcaagtgcagtgtgcccttcacccctattgagtttcactatgagaatacacgggcccagttcttcgttgaagacgccagtactgcctctgcattgaaggctgtcaactataagattttggatcgggagaaccgaaggatatctatcatcatcaactcttctgctccaccccacactatactgaatgaactgaagccagaacaagtagaacagctaaagctgatcatgagcaaacgatacgatggctcccaacaagcccttgacctcaaaggcctccgttcagacccagatttggtggcccagaacattgacgttgtcctgaatcgcagaagctgtatggcagctaccctgaggatcattgaagagaacatccctgagctattgtccttgaacttgagcaacaacaggctgtacaggctggatgacatgtctagcattgttcagaaggcacccaacctgaagatcctaaacctttctggaaatgaattgaagtctgagcgggaattggacaagataaaggggctgaagctagaagagctctggctcgatggaaactccctgtgtgacaccttccgagaccagtccacctacatcagcgccattcgcgaacgatttcccaagttactacgcctggatggccatgagctacccccaccaattgcctttgatgttgaagcccccacgacgttaccgccctgcaagggaagctattttggaacagaaaacttgaagagtctggtcttgcacttcctgcaacagtactatgcaatttacgactctggagaccgacaagggctcctggatgcctaccatgatggggcctgctgttccctgagcattcctttcattcctcagaaccctgcccgaagcagcttagccgagtatttcaaggatagcagaaatgtgaagaagcttaaagaccctaccttgcggttccggctgctgaagcacacgcgtctcaacgttgttgccttcctcaatgagttgcccaaaacccagcacgacgtcaattccttcgtggtagacataagcgcccagacaagcacattgctgtgtttttctgtcaatggagtcttcaaggaagtggacggaaagtcccgggattctttgcgagccttcacccggacattcattgctgttcctgctagcaattcagggctatgtattgtaaatgatgagctatttgtgcggaatgccagttctgaagagatccaaagagccttcgctatgcctgcacccacgccttcctccagcccggtgcccaccctctctccagagcagcaggaaatgttgcaagcattctctacccagtctggcatgaacctcgagtggtcccagaagtgccttcaggacaacaactgggactacaccagatctgcccaggccttcactcatctcaaggccaagggcgagatcccagaagtggcattcatgaagtgatcgtagtcatgcctcagaagcagtcccccctgtaaatagtccttggatattaccgtctggttgtcgtctgtcatctcctcctgtctggcccgaggccgccccgtgactgtgaccgagggagggagggctgcctgatccctctcctcgcctgccttctggaagacttcagaagattgagcctcactggtgccaggaagccaaagcttactttgtagaactgacactaaactacccgaaggacttaggtgctttgtgtacttaaccccaggacctccttactttttaatataaagagtgatgttgta

SEQ ID NO: 20757 - DNA, 3848 bp, Homo sapiens
  source 1..3848: mol_type = unassigned DNA
agacgcagaggcgaggccgccagtcgaggacgaggaggagataacatcaagatgccgaagactgaggaaactgtgctccagaatgatcccagtgtagcagagaatggggcccctgagcctaaaacaccagggcagagccagaaaagcaagagtttctgtttagatgaccagtctcctgacctgatgtcttttctgtcacagatctgatagagacagttaatgaagtttccaagctgagcatttcacatgaaattgtagtaaaccaagatttctatgtggaagagaccattttgcctccaaacagtgtagaaggcaggtttgcggaggcaatgtacaatgctttttggaaccatctgaaagaacagctattgagtactcctcctgacttcacttgtgcccttgaacttctaaaagatgttaaggagaccttgctatcactgctattaccatggcagaaccgcctaagaaatgagatagaagaagctctggacacagatctcctcaagcaggaagcagaacatggggccctggatgtccctcatctttctaactacattctcaatttgatggctctgctatgtgcaccggttcgagatgaagcgatacagaaactagagaccataagagatccagtgcagttactgaggggcatcctccgtgttctgggcctaatgaaaatggacatggtgaactataccatccagagctttcgaccctacctgcaggaacattccatccagtatgaacaagctaaattccaggaactccttgataaacagcccagtctcctcgattataccacaaaatggctaaccaaagcagccacagacatcactacactatgtccgagttctcctgactcacctagctcctcctgcagcatggcgtgttcacttccaagcggggcaggtaacaattcagagccccccagtccaacaatggtgctataccaaggctacctgaacctcctcctctgggatcttgaaaacgtagaattcccagagactctgctgatggacagaatccggctccaggaactggcattccagttgcaccagttaactgtcctggcctcagtcttgctagtggccagaagcttctctggtgaagttttattcagatcacctgaatttgtggatagactgaaatgcaccaccaaggccctaactgaggaatttatctccaggcctgaagagactatgctgagtgtgagtgaacaggtgtctcaggaagtccatcaaggccttaaggacatgggcctcactactctgagcagtgaaaacacagcatctcttctaggccaactccagaacatcaccaagaaagagaactgcattcgtagcattgttggagtctctgctacactttcctggaggcctcattctcattgaaaaggagttggcagaactgggctggaagtttctcaatctgatgcatcataatcagcagagtcatttttcacaaaacgaaatctttccagaagatcacgaataagagagatcaaagctaggcagcttgagttgaagtagagctggaagaaggagttttgaggactgtttcaaaaccactggactagatgatctctaaaggatcttatccaggacgcttcattgcatttggtcttcatttctccttagtctcctccaggctgacatttcctcaatctttattggtcttccacagccctgacacttttggagataccagtcagcatttccaagttcgttctgtgagactgtagtgtcaggacaaagcaacaacaaaatgtgctctactctaaagaagtgtgggacatacagaactgaagttgcagaatgccatgaccatggtagcacttttcaaggaagaaagaaaggtgggagttctttccgggataattttgacaagaggagctgtcattatgaacatggtgggtatgagcgcccgccttcacactgccaggagaatgatggaagcgtggagatgagggatgtccacaaggaccaacaactaagacacactccttatagcatccgatgcgaaagaagaatgaaatggcatagtgaagacgaaatccgtattaccacgtggagaaatagaaaacctccggagagaaaaatgagtcagaacacacaggatggatacacaaggaactggtttaaggtcacaattccttacgggataaagtatgacaaggcatggctaatgaattcaatccagagccattgcagtgaccgcttcactccggttgatttccactacgtccgaaatcgggcatgcttctttgtccaggatgctagcgctgcctccgcattgaaggatgtcagttataagatttatgatgatgagaaccaaaagatatgtatatttgtcaatcattctactgcgccctactctgtgaagaataagttgaagccaggccaaatggagatgctaaagctgaccatgaacaaacggtacaatgtctcccagcaagctcttgatctccagaatctccgctttgacccagacttgatgggccgtgacattgatataatcctgaatcgaagaaactgcatggctgccaccctgaagatcattgaaagaaatttccctgagctgttgtctttgaacttgtgcaacaacaagctgtaccagctggatggcctttctgacattacagagaaggctcccaaagtcaagaccctgaatctctccaaaaataagctggagtcggcgtgggagttgggcaaggtgaaagggctgaagctcgaagagctatggctagaagggaacccgttgtgcagcaccttctcggaccagtccgcctatgtaagtgccatccgggattgtttccccaagttgttacgcctggacggccgagagttatccgcaccagtgattgttgacattgacagctctgagacaatgaaaccctgcaaggaaaactttactggatctgagaccctaaagcatttagtcctgcaattcctgcagcagtattactcgatctatgactctggagatcgacagggtctcctcggtgcttaccacgatgaggcctgcttctccttggctattcccttcgaccccaaggactcagccccgagcagcttgtgcaagtactttgaggatagcaggaatatgaaaacactcaaggacccctacctgaagggggaactgctgaggcgcacaaaacgtgacattgtggactccctcagtgcgttgcccaaaactcagcatgacctcagctccatcctggtggacgtgtggtgccagacggaaaggatgctctgcttttctgtcaatggggttttcaaggaagtggaaggacagtctcagggttctgttctcgccttcacccggaccttcattgctacccctggcagcagttccagtctgtgcatcgtgaatgacgagctgtttgtgagggatgccagcccccaagagactcagagtgccttctccatcccagtgtccacactctcctccagctctgagccctccctctcccaggagcagcaggaaatggtgcaggctttctctgcccagtctgggatgaaactggagtggtctcagaagtgccttcaggacaatgagtggaactacactagagctggccaggccttcactatgctccagaccgagggcaagatccccgcagaggccttcaagcaaatctcctaaaaggagccctccgatgtcttctttgtcttcgttcacatcctctttgtttcctcttttcaccagcctaaggcctggctgaccaggaagccaacgttaacttgcaggccacgtgacataaccacccaaagagccagttgctctgtgtattcgccccactcatgatcaccattttattttcataataaagagtgacgttacacgtt

SEQ ID NO: 20758 - DNA, 2322 bp, Homo sapiens
  source 1..2322: mol_type = unassigned DNA
ttgtggcaagattctgaggggaagtgtagctcccaggttggttccaagtcttcttccaattaggatcttatccaggacgcttcattgcatttggtcttcatttctccttagtctcctccaggctgacatttcctcaatctttattggtcttccacagccctgacacttttggagataccagtcagcatttccaagttcgttctgtgagactgtagtgtcaggacaaagcaacaacaaaatgtgctctactctaaagaagtgtgggacatacagaactgaagttgcagaatgccatgaccatggtagcacttttcaaggaagaaagaaaggtgggagttctttccgggataattttgacaagaggagctgtcattatgaacatggtgggtatgagcgcccgccttcacactgccaggagaatgatggaagcgtggagatgagggatgtccacaaggaccaacaactaagacacactccttatagcatccgatgcgaaagaagaatgaaatggcatagtgaagacgaaatccgtattaccacgtggagaaatagaaaacctccggagagaaaaatgagtcagaacacacaggatggatacacaaggaactggtttaaggtcacaattccttacgggataaagtatgacaaggcatggctaatgaattcaatccagagccattgcagtgaccgcttcactccggttgatttccactacgtccgaaatcgggcatgcttctttgtccaggatgctagcgctgcctccgcattgaaggatgtcagttataagatttatgatgatgagaaccaaaagatatgtatatttgtcaatcattctactgcgccctactctgtgaagaataagttgaagccaggccaaatggagatgctaaagctgaccatgaacaaacggtacaatgtctcccagcaagctcttgatctccagaatctccgctttgacccagacttgatgggccgtgacattgatataatcctgaatcgaagaaactgcatggctgccaccctgaagatcattgaaagaaatttccctgagctgttgtctttgaacttgtgcaacaacaagctgtaccagctggatggcctttctgacattacagagaaggctcccaaagtcaagaccctgaatctctccaaaaataagctggagtcggcgtgggagttgggcaaggtgaaagggctgaagctcgaagagctatggctagaagggaacccgttgtgcagcaccttctcggaccagtccgcctatgtaagtgccatccgggattgtttccccaagttgttacgcctggacggccgagagttatccgcaccagtgattgttgacattgacagctctgagacaatgaaaccctgcaaggaaaactttactggatctgagaccctaaagcatttagtcctgcaattcctgcagcagtattactcgatctatgactctggagatcgacagggtctcctcggtgcttaccacgatgaggcctgcttctccttggctattcccttcgaccccaaggactcagccccgagcagcttgtgcaagtactttgaggatagcaggaatatgaaaacactcaaggacccctacctgaagggggaactgctgaggcgcacaaaacgtgacattgtggactccctcagtgcgttgcccaaaactcagcatgacctcagctccatcctggtggacgtgtggtgccagacggaaaggatgctctgcttttctgtcaatggggttttcaaggaagtggaaggacagtctcagggttctgttctcgccttcacccggaccttcattgctacccctggcagcagttccagtctgtgcatcgtgaatgacgagctgtttgtgagggatgccagcccccaagagactcagagtgccttctccatcccagtgtccacactctcctccagctctgagccctccctctcccaggagcagcaggaaatggtgcaggctttctctgcccagtctgggatgaaactggagtggtctcagaagtgccttcaggacaatgagtggaactacactagagctggccaggccttcactatgctccagaccgagggcaagatccccgcagaggccttcaagcaaatctcctaaaaggagccctccgatgtcttctttgtcttcgttcacatcctctttgtttcctcttttcaccagcctaaggcctggctgaccaggaagccaacgttaacttgcaggccacgtgacataaccacccaaagagccagttgctctgtgtattcgccccactcatgatcaccattttattttcataataaagagtgacgttacacgtt

SEQ ID NO: 20759 - DNA, 2934 bp, Homo sapiens
  source 1..2934: mol_type = unassigned DNA
cctcctcctctgggatcttgaaaacgtagaattcccagagactctgctgatggacagaatccggctccaggaactggcattccagttgcaccagttaactgtcctggcctcagtcttgctagtggccagaagcttctctggtgaagttttattcagatcacctgaatttgtggatagactgaaatgcaccaccaaggccctaactgaggaatttatctccaggcctgaagagactatgctgagtgtgagtgaacaggtgtctcaggaagtccatcaaggccttaaggacatgggcctcactactctgagcagtgaaaacacagcatctcttctaggccaactccagaacatcaccaagaaagagaactgcattcgtagcattgttgatcagtggatccgtttttttctcaaatgctgtttgcttcatggcatgcaggagtctctgctacactttcctggaggcctcattctcattgaaaaggagttggcagaactgggctggaagtttctcaatctgatgcatcataatcagcagagtcatttttcacaaaacgaaatctttccagaagatcacgaataagagagatcaaagctaggcagcttgagttgaagtagagctggaagaaggagttttgaggactgtttcaaaaccactggactagatgatctctaaaggatcttatccaggacgcttcattgcatttggtcttcatttctccttagtctcctccaggctgacatttcctcaatctttattggtcttccacagccctgacacttttggagataccagtcagcatttccaagttcgttctgtgagactgtagtgtcaggacaaagcaacaacaaaatgtgctctactctaaagaagtgtgggacatacagaactgaagttgcagaatgccatgaccatggtagcacttttcaaggaagaaagaaaggtgggagttctttccgggataattttgacaagaggagctgtcattatgaacatggtgggtatgagcgcccgccttcacactgccaggagaatgatggaagcgtggagatgagggatgtccacaaggaccaacaactaagacacactccttatagcatccgatgcgaaagaagaatgaaatggcatagtgaagacgaaatccgtattaccacgtggagaaatagaaaacctccggagagaaaaatgagtcagaacacacaggatggatacacaaggaactggtttaaggtcacaattccttacgggataaagtatgacaaggcatggctaatgaattcaatccagagccattgcagtgaccgcttcactccggttgatttccactacgtccgaaatcgggcatgcttctttgtccaggatgctagcgctgcctccgcattgaaggatgtcagttataagatttatgatgatgagaaccaaaagatatgtatatttgtcaatcattctactgcgccctactctgtgaagaataagttgaagccaggccaaatggagatgctaaagctgaccatgaacaaacggtacaatgtctcccagcaagctcttgatctccagaatctccgctttgacccagacttgatgggccgtgacattgatataatcctgaatcgaagaaactgcatggctgccaccctgaagatcattgaaagaaatttccctgagctgttgtctttgaacttgtgcaacaacaagctgtaccagctggatggcctttctgacattacagagaaggctcccaaagtcaagaccctgaatctctccaaaaataagctggagtcggcgtgggagttgggcaaggtgaaagggctgaagctcgaagagctatggctagaagggaacccgttgtgcagcaccttctcggaccagtccgcctatgtaagtgccatccgggattgtttccccaagttgttacgcctggacggccgagagttatccgcaccagtgattgttgacattgacagctctgagacaatgaaaccctgcaaggaaaactttactggatctgagaccctaaagcatttagtcctgcaattcctgcagcagtattactcgatctatgactctggagatcgacagggtctcctcggtgcttaccacgatgaggcctgcttctccttggctattcccttcgaccccaaggactcagccccgagcagcttgtgcaagtactttgaggatagcaggaatatgaaaacactcaaggacccctacctgaagggggaactgctgaggcgcacaaaacgtgacattgtggactccctcagtgcgttgcccaaaactcagcatgacctcagctccatcctggtggacgtgtggtgccagacggaaaggatgctctgcttttctgtcaatggggttttcaaggaagtggaaggacagtctcagggttctgttctcgccttcacccggaccttcattgctacccctggcagcagttccagtctgtgcatcgtgaatgacgagctgtttgtgagggatgccagcccccaagagactcagagtgccttctccatcccagtgtccacactctcctccagctctgagccctccctctcccaggagcagcaggaaatggtgcaggctttctctgcccagtctgggatgaaactggagtggtctcagaagtgccttcaggacaatgagtggaactacactagagctggccaggccttcactatgctccagaccgagggcaagatccccgcagaggccttcaagcaaatctcctaaaaggagccctccgatgtcttctttgtcttcgttcacatcctctttgtttcctcttttcaccagcctaaggcctggctgaccaggaagccaacgttaacttgcaggccacgtgacataaccacccaaagagccagttgctctgtgtattcgccccactcatgatcaccattttattttcataataaagagtgacgttacacgtt

SEQ ID NO: 20760 - DNA, 3192 bp, Homo sapiens
  source 1..3192: mol_type = unassigned DNA
cctgactcacctagctcctcctgcagcatggcgtgttcacttccaagcggggcagactctgctgatggacagaatccggctccaggaactggcattccagttgcaccagttaactgtcctggcctcagtcttgctagtggccagaagcttctctggtgaagttttattcagatcacctgaatttgtggatagactgaaatgcaccaccaaggccctaactgaggaatttatctccaggcctgaagagactatgctgagtgtgagtgaacaggtgtctcaggaagtccatcaaggccttaaggacatgggcctcactactctgagcagtgaaaacacagcatctcttctaggccaactccagaacatcaccaagaaagagaactgcattcgtagcattgttgatcagtggatccgtttttttctcaaatgctgtttgcttcatggcatgcaggagtctctgctacactttcctggaggcctcattctcattgaaaaggagttggcagaactgggctggaagtttctcaatctgatgcatcataatcagcagagtcatttttcacaaaacgaaatctttccagaagatcacgaataagagagatcaaagctaggcagcttgagttgaagtagagctggaagaaggagttttgaggactgtttcaaaaccactggactagatgatctctaaagtggtgacatggacataggataatggttatagacagtccccctcccaacgggaaaaaatgaaagcaagcaaaaagttaccagctccaagccaacttgaaatccaatcaggatcttatccaggacgcttcattgcatttggtcttcatttctccttagtctcctccaggctgacatttcctcaatctttattggtcttccacagccctgacacttttggagataccagtcagcatttccaagttcgttctgtgagactgtagtgtcaggacaaagcaacaacaaaatgtgctctactctaaagaagtgtgggacatacagaactgaagggatgatgcttcctgtctgtcacaaggctgagtgaacacaacatgcctgtaggtccagaacattcttcctacagagaccagatgtccagaaagccctatctgctggattcagggaacgcctctcctcatttctgtcacactatttgcaaaagcctccttctctgagatcttcaaagctgcagttctagccacagtctgcagggagttgcagaatgccatgaccatggtagcacttttcaaggaagaaagaaaggtgggagttctttccgggataattttgacaagaggagctgtcattatgaacatggtgggtatgagcgcccgccttcacactgccaggagaatgatggaagcgtggagatgagggatgtccacaaggaccaacaactaagacagtaagtgaccaggcagcctggtttgcacgtagcagcccccgggactgtgcaaccctttcattctctgtggtcttccttttcttctctcattagagaactgacgaatgctggaagtggaatagtggctgagcaatcctaattgtagccctggcgtcagtgagtggagcatgtataggagactttcttagatttaatggatacccgccttctctcctcttccccacagcactccttatagcatccgatgcgaaagaagaatgaaatggcatagtgaagacgaaatccgtattaccacgtggagaaatagaaaacctccggagagaaaaatgagtcagaacacacaggatggatacacaaggaactggtttaaggtcacaattccttacgggataaagtatgacaaggcatggctaatgaattcaatccagagccattgcagtgaccgcttcactccggttgatttccactacgtccgaaatcgggcatgcttctttgtccaggatgctagcgctgcctccgcattgaaggatgtcagttataagatttatgatgatgagaaccaaaagatatgtatatttgtcaatcattctactgcgccctactctgtgaagaataagttgaagccaggccaaatggagatgctaaagctgaccatgaacaaacggtacaatgtctcccagcaagctcttgatctccagaatctccgctttgacccagacttgatgggccgtgacattgatataatcctgaatcgaagaaactgcatggctgccaccctgaagatcattgaaagaaatttccctgagctgttgtctttgaacttgtgcaacaacaagctgtaccagctggatggcctttctgacattacagagaaggctcccaaagtcaagaccctgaatctctccaaaaataagctggagtcggcgtgggagttgggcaaggtgaaagggctgaagctcgaagagctatggctagaagggaacccgttgtgcagcaccttctcggaccagtccgcctatgtaagtgccatccgggattgtttccccaagttgttacgcctggacggccgagagttatccgcaccagtgattgttgacattgacagctctgagacaatgaaaccctgcaaggaaaactttactggatctgagaccctaaagcatttagtcctgcaattcctgcagcagtattactcgatctatgactctggagatcgacagggtctcctcggtgcttaccacgatgaggcctgcttctccttggctattcccttcgaccccaaggactcagccccgagcagcttgtgcaagtactttgaggatagcaggaatatgaaaacactcaaggacccctacctgaagggggaactgctgaggcgcacaaaacgtgacattgtggactccctcagtgcgttgcccaaaactcagcatgacctcagctccatcctggtggacgtgtggtgccagacggtgccttcaggacaatgagtggaactacactagagctggccaggccttcactatgctccagaccgagggcaagatccccgcagaggccttcaagcaaatctcctaaaaggagccctccgatgtcttctttgtcttcgttcacatcctctttgtttcctcttttcaccagcctaaggcctggctgaccaggaagccaacgttaacttgcaggccacgtgacataaccacccaaagagccagttgctctgtgtattcgccccactcatgatcaccattttattttcataataaagagtgacgttacacgttgta

SEQ ID NO: 20761 - DNA, 3959 bp, Homo sapiens
  source 1..3959: mol_type = unassigned DNA
agacgcagaggcgaggccgccagtcgaggacgaggaggagataacatcaagatgccgaagactgaggaaactgtgctccagaatgatcccagtgtagcagagaatggggcccctgagcctaaaacaccagggcagagccagaaaagcaagagtttctgtttagatgaccagtctcctgacctgatgtcttttctgtcacagatctgatagagacagttaatgaagtttccaagctgagcatttcacatgaaattgtagtaaaccaagatttctatgtggaagagaccattttgcctccaaacagtgtagaaggcaggtttgcggaggcaatgtacaatgctttttggaaccatctgaaagaacagctattgagtactcctcctgacttcacttgtgcccttgaacttctaaaagatgttaaggagaccttgctatcactgctattaccatggcagaaccgcctaagaaatgagatagaagaagctctggacacagatctcctcaagcaggaagcagaacatggggccctggatgtccctcatctttctaactacattctcaatttgatggctctgctatgtgcaccggttcgagatgaagcgatacagaaactagagaccataagagatccagtgcagttactgaggggcatcctccgtgttctgggcctaatgaaaatggacatggtgaactataccatccagagctttcgaccctacctgcaggaacattccatccagtatgaacaagctaaattccaggaactccttgataaacagcccagtctcctcgattataccacaaaatggctaaccaaagcagccacagacatcactacactatgtccgagttctcctgactcacctagctcctcctgcagcatggcgtgttcacttccaagcggggcaggtaacaattcagagccccccagtccaacaatggtgctataccaaggctacctgaacctcctcctctgggatcttgaaaacgtagaattcccagagactctgctgatggacagaatccggctccaggaactggcattccagttgcaccagttaactgtcctggcctcagtcttgctagtggccagaagcttctctggtgaagttttattcagatcacctgaatttgtggatagactgaaatgcaccaccaaggccctaactgaggaatttatctccaggcctgaagagactatgctgagtgtgagtgaacaggtgtctcaggaagtccatcaaggccttaaggacatgggcctcactactctgagcagtgaaaacacagcatctcttctaggccaactccagaacatcaccaagaaagagaactgcattcgtagcattgttggagtctctgctacactttcctggaggcctcattctcattgaaaaggagttggcagaactgggctggaagtttctcaatctgatgcatcataatcagcagagtcatttttcacaaaacgaaatctttccagaagatcacgaataagagagatcaaagctaggcagcttgagttgaagtagagctggaagaaggagttttgaggactgtttcaaaaccactggactagatgatctctaaagtggtgacatggacataggataatggttatagacagtccccctcccaacgggaaaaaatgaaagcaagcaaaaagttaccagctccaagccaacttgaaatccaatcaggatcttatccaggacgcttcattgcatttggtcttcatttctccttagtctcctccaggctgacatttcctcaatctttattggtcttccacagccctgacacttttggagataccagtcagcatttccaagttcgttctgtgagactgtagtgtcaggacaaagcaacaacaaaatgtgctctactctaaagaagtgtgggacatacagaactgaagttgcagaatgccatgaccatggtagcacttttcaaggaagaaagaaaggtgggagttctttccgggataattttgacaagaggagctgtcattatgaacatggtgggtatgagcgcccgccttcacactgccaggagaatgatggaagcgtggagatgagggatgtccacaaggaccaacaactaagacacactccttatagcatccgatgcgaaagaagaatgaaatggcatagtgaagacgaaatccgtattaccacgtggagaaatagaaaacctccggagagaaaaatgagtcagaacacacaggatggatacacaaggaactggtttaaggtcacaattccttacgggataaagtatgacaaggcatggctaatgaattcaatccagagccattgcagtgaccgcttcactccggttgatttccactacgtccgaaatcgggcatgcttctttgtccaggatgctagcgctgcctccgcattgaaggatgtcagttataagatttatgatgatgagaaccaaaagatatgtatatttgtcaatcattctactgcgccctactctgtgaagaataagttgaagccaggccaaatggagatgctaaagctgaccatgaacaaacggtacaatgtctcccagcaagctcttgatctccagaatctccgctttgacccagacttgatgggccgtgacattgatataatcctgaatcgaagaaactgcatggctgccaccctgaagatcattgaaagaaatttccctgagctgttgtctttgaacttgtgcaacaacaagctgtaccagctggatggcctttctgacattacagagaaggctcccaaagtcaagaccctgaatctctccaaaaataagctggagtcggcgtgggagttgggcaaggtgaaagggctgaagctcgaagagctatggctagaagggaacccgttgtgcagcaccttctcggaccagtccgcctatgtaagtgccatccgggattgtttccccaagttgttacgcctggacggccgagagttatccgcaccagtgattgttgacattgacagctctgagacaatgaaaccctgcaaggaaaactttactggatctgagaccctaaagcatttagtcctgcaattcctgcagcagtattactcgatctatgactctggagatcgacagggtctcctcggtgcttaccacgatgaggcctgcttctccttggctattcccttcgaccccaaggactcagccccgagcagcttgtgcaagtactttgaggatagcaggaatatgaaaacactcaaggacccctacctgaagggggaactgctgaggcgcacaaaacgtgacattgtggactccctcagtgcgttgcccaaaactcagcatgacctcagctccatcctggtggacgtgtggtgccagacggaaaggatgctctgcttttctgtcaatggggttttcaaggaagtggaaggacagtctcagggttctgttctcgccttcacccggaccttcattgctacccctggcagcagttccagtctgtgcatcgtgaatgacgagctgtttgtgagggatgccagcccccaagagactcagagtgccttctccatcccagtgtccacactctcctccagctctgagccctccctctcccaggagcagcaggaaatggtgcaggctttctctgcccagtctgggatgaaactggagtggtctcagaagtgccttcaggacaatgagtggaactacactagagctggccaggccttcactatgctccagaccgagggcaagatccccgcagaggccttcaagcaaatctcctaaaaggagccctccgatgtcttctttgtcttcgttcacatcctctttgtttcctcttttcaccagcctaaggcctggctgaccaggaagccaacgttaacttgcaggccacgtgacataaccacccaaagagccagttgctctgtgtattcgccccactcatgatcaccattttattttcataataaagagtgacgttacacgttgta

SEQ ID NO: 20762 - DNA, 1938 bp, Homo sapiens
  source 1..1938: mol_type = unassigned DNA
ttgctctcgccttcgtcagcagccctcctcaatcttctccaaactcccgtccccaggccacacagattctcctcaagagagccctataaggacattggtaaaatgtcactgccttcaggacacactacgggtcacactgatcaagttgttcaaagaagagcaagatgttgggatatttaccaaaggagatttagcagtaggtctgaacctgtcaatcctggcatgcattcttcatcccatcagcagcaagatggagatgcagcaatgcatggtgcccacatggactctccagtaagatacactccctatactatttcaccctataatcggaaaggcagttttcgtaaacaagaccaaacccacgttaacatggagagagagcaaaaacctccagagagaagaatggaggggaacatgccggatgggaccttagggagctggttcaagatcacagttccctttggcataaaatacaatgagaagtggctgctgaatttgattcagaatgaatgcagtgtacccttcgtcccagttgagtttcactatgaaaacatgcatgccagcttctttgtggagaatgccagcatcgcctatgcactgaagaatgtcagtggcaagatttgggatgaggataatgaaaagatatcaatctttgtcaaccctgctggcataccccactttgtgcacagggagctgaagtcagaaaaggtggagcagataaagctggccatgaaccaacagtgtgatgtctcccaggaagctcttgatatccagagactcccattttacccagacatggtgaaccgtgatactaagatggcatcgaatcctagaaagtgcatggctgcctccctggacgtccatgaagagaacatacctacagtgatgtctgcaggggagatggacaagtggaaagggatagagccaggagagaagtgtgcggacagaagcccagtgtgcacgaccttctcggatacctccagcaacataaactccatcctggaattgttccccaaattattatgcctggatggccagcagtcacccagagcaactttatgtggtactgaagcccacaagaggttaccaacctgtaagggaagcttctttggatctgagatgttgaagaatctggtcctgcaattcctgcagcagtattacttgatctatgactctggagatcgacagggtctccttagtgcttaccacgatgaggcctgcttctccctgagcattcccttcaatcctgaggactcagccccgagcagcttctgcaagttcttcaaggatagcaggaatataaaaattctcaaggacccctaccttcggggggagctgctgaagcacacaaaacttgatattgtggactccctcagtgcgttgcctaaaactcagcatgacctcagctccttcctggtggacatgtggtaccagacggaatggatgctctgcttttctgtcaacggggtgttcaaggaagtggaaggacagtctcagggttctgttctcgccttcacccggaccttcattgctacccctggcagcagttccagtctgtgcatcgtgaatgacaagctctttgtgcgggataccagccaccaagggacccagagtgccttgttcaccctagtgcccacagccttctccagctccgtgcctgccttctcccaggagcagcagaaaatgctgccttcgtaacaaccagtgtgactacgtcagagctcctcatgttcttgcatggcccaagatgtatttccctgtgactgaaccaggagatctggctggggctaagaagccgaagcccaactcacagggctgactctcatccttccaaaggggccagttgttctgtgcacttgtccacccctgttacccccaggatctctgttccttttcacaataaagtatggtgtcttgttatgtcaaatccctgcaaaa

SEQ ID NO: 20763 - DNA, 1196 bp, Homo sapiens
  source 1..1196: mol_type = unassigned DNA
agcaaactttggggagtggtaagaacaggaagttaattctgtgactcctaggacactcctctctatgcttggggaaggaacttcctgtaagcaaggcttgaggcttgctctcgccttcgtcagcagccctcctcaatcttctccaaactcccgtccccaggccacacagattctcctcaagagagccctataaggacattggtaaaatgtcactgccttcaggacacactacggcactccctatactatttcaccctataatcggaaaggcagttttcgtaaacaagaccaaacccacgttaacatggagagagagcaaaaacctccagagagaagaatggaggggaacatgccggatgggaccttagggagctggttcaagatcacagttccctttggcataaaatacaatgagaagtggctgctgaatttgattcagaatgaatgcagtgtacccttcgtcccagttgagtttcactatgaaaacatgcatgccagcttctttgtggagaatgccagcatcgcctatgcactgaagaatgtcagtggcaagatttgggatgaggataatgaaaagatatcaatctttgtcaaccctgctggcataccccactttgtgcacagggagctgaagtcagaaaaggtggagcagataaagctggccatgaaccaacagtgtgatgtctcccaggaagctcttgatatccagagactcccattttacccagacatggtgaaccgtgatactaagatggcatcgaatcctagaaagtgcatggctgcctccctggacgtccatgaagagaacatacctacagtgatgtctgcaggggagatggacaagtggaaagggatagagccaggagagaagtgtgcggacagaagcccagtgtgcacgaccttctcggatacctccagcaacataaagtcagttgtaccctctgtcaccacctgggaccctgacctgtgtttgatagcgcccttctgcaggaggaggcagcactagtcttctgggaggaccacagaccctctccttccccctcgccccactcctctctctgtgtcactcattcatctgtgcttagacatctcctttccttcctctgacatggtccccttttcacccgctctgggatgtgtttcccacctgtctccacccagcctcctctagcgtgccctctgtgagtgtgctccag

SEQ ID NO: 20764 - DNA, 1837 bp, Homo sapiens
  source 1..1837: mol_type = unassigned DNA
atcttctccaaactcccgtccccaggccacacagattctcctcaagagagccctataaggacattggtaaaatgtcactgccttcaggacacactacgggtcacactgatcaagttgttcaaagaagagcaagatgttgggatatttaccaaaggagatttagcagtaggtctgaacctgtcaatcctggcatgcattcttcatcccatcagcagcaagatggagatgcagcaatgcatggtgcccacatggactctccagtaagatacactccctatactatttcaccctataatcggaaaggcagttttcgtaaacaagaccaaacccacgttaacatggagagagagcaaaaacctccagagagaagaatggaggggaacatgccggatgggaccttagggagctggttcaagatcacagttccctttggcataaaatacaatgagaagtggctgctgaatttgattcagaatgaatgcagtgtacccttcgtcccagttgagtttcactatgaaaacatgcatgccagcttctttgtggagaatgccagcatcgcctatgcactgaagaatgtcagtggcaagatttgggatgaggataatgaaaagatatcaatctttgtcaaccctgctggcataccccactttgtgcacagggagctgaagtcagaaaaggtggagcagataaagctggccatgaaccaacagtgtgatgtctcccaggaagctcttgatatccagagactcccattttacccagacatggtgaaccgtgatactaagatggcatcgaatcctagaaagtgcatggctgcctccctggacgtccatgaagagaacatacctacagtgatgtctgcaggggagatggacaagtggaaagggatagagccaggagagaagtgtgcggacagaagcccagtgtgcacgaccttctcggatacctccagcaacataaactccatcctggaattgttccccaaattattatgcctggatggccagcagtcacccagagcaactttatgtggtactgaagcccacaagaggttaccaacctgtaaggtattacttgatctatgactctggagatcgacagggtctccttagtgcttaccacgatgaggcctgcttctccctgagcattcccttcaatcctgaggactcagccccgagcagcttctgcaagttcttcaaggatagcaggaatataaaaattctcaaggacccctaccttcggggggagctgctgaagcacacaaaacttgatattgtggactccctcagtgcgttgcctaaaactcagcatgacctcagctccttcctggtggacatgtggtaccagacggaatggatgctctgcttttctgtcaacggggtgttcaaggaagtggaaggacagtctcagggttctgttctcgccttcacccggaccttcattgctacccctggcagcagttccagtctgtgcatcgtgaatgacaagctctttgtgcgggataccagccaccaagggacccagagtgccttgttcaccctagtgcccacagccttctccagctccgtgcctgccttctcccaggagcagcagaaaatgctgccttcgtaacaaccagtgtgactacgtcagagctcctcatgttcttgcatggcccaagatgtatttccctgtgactgaaccaggagatctggctggggctaagaagccgaagcccaactcacagggctgactctcatccttccaaaggggccagttgttctgtgcacttgtccacccctgttacccccaggatctctgttccttttcacaataaagtatggtgtcttgttatgtc

SEQ ID NO: 20765 - DNA, 1081 bp, Homo sapiens
  source 1..1081: mol_type = unassigned DNA
caatgagaagtggctgctgaatttgattcagaatgaatgcagtgtacccttcgtcccagttgagtttcactatgaaaacatgcatgccagcttctttgtggagaatgccagcatcgcctatgcactgaagaatgtcagtggcaagatttgggatgaggataatgaaaagatatcaatctttgtcaaccctgctggcataccccactttgtgcacagggagctgaagtcagaaaaggtggagcagataaagctggccatgaaccaacagtgtgatgtctcccaggaagctcttgatatccagagactcccattttacccagacatggtgaaccgtgatactaagatggcatcgaatcctagaaagtgcatggctgcctccctggacgtccatgaagagaacatacctacagtgatgtctgcaggggagatggacaagtggaaagggatagagccaggagagaagtgtgcggacagaagcccagtgtgcacgaccttctcggatacctccagcaacataaactccatcctggaattgttccccaaattattatgcctggatggccagcagtcacccagagcaactttatgtggtactgaagcccacaagaggttaccaacctgtaagggaagcttctttggatctgagatgttgaagaatctggtcctgcaattcctgcagcagtattacttgatctatgactctggagatcgacagggtctccttagtgcttaccacgatgaggcctgcttctccctgagcattcccttcaatcctgaggactcagccccgagcagcttctgcaagttcttcaaggatagcaggaatataaaaattctcaaggacccctaccttcggggggagctgctgaagcacacaaaacttgatattgtggactccctcagtgcgttgcctaaaactcagcatgacctcagctccttcctggtggacatgtggtaccagacggaatggatgctctgcttttctgtcaacggggtgttcaaggaagtctcagggttctgttctcgccttcacccggaccttcattgctacccctggcagcagttccagtctgtgcatcgt

SEQ ID NO: 20766 - DNA, 2062 bp, Homo sapiens
  source 1..2062: mol_type = unassigned DNA
tccaggtttgttctggaaaacactaggtctgagagacagcaacaacaaaagtatactctaccattaaagaaataatgccgtatatgtagtagcacttttcaaagaaggaagaaaggtgggagtcatttccagggtaattttgacaagaggaactgtcattatgaacatggtgggtatgaacttctgccttcacgctgccaggagaatgatggaagcatggagatgagggatgtccacaaggaccgccaactaagacacactccttatagaatccaatgcaacaggaagctagtgaaatgacatagtgaagatcaaatccatattaccatttggagaaatagaaaacctccagagagaaaaatgaggcggaacacacaagatgaaaacatgaggaaatggttcaaggtcacaattccttatgggataaagtatgacaaggcatggctaatgaattcaatccagagcaattgcagtgtccccttcactccggttgatttccactacatccgaaatcgggcatgcttctttgtccaggttgctagtgctgcctctgcattgaaggatgtcagttataagatttatgatgatgagaaccaaaagatatgtatatttgtcagtcattttactgcgccctactctgtgaagaataagttgaagccaggccaaatggagatgctaaagctgaccatgaacaaacggtacaatgtctcccagcaagctcttgatctccagaatctccgctttgacccagacttgatgggccgtgacattgatataatcctgaatcgaagaaactgcatggctgccaccctgaagatcactgaaagaaatttccctgagctgttgtctttgaacttgtgcaacaacaaactgtaccagctggatggcctttctgacattacagagaaggctcccaaagtcaagaccctgaatctctccaaaaataagctggagtcggcgtgggagttgggcaaggtgaaagggctgaagctcgaagagctatggctagaagggaacccgttgtgcagcaccttctcggaccagtctgcctatgtaagtgccatccgggattgtttccccaagttgttacgcctggacggccgagagttatccgcaccagtgattgttgacattgacagctctgagacaatgaaaccctgcaaggaaaactttactggatctgagaccctaaagcatttagtcctgcaattcctgcagcagagcaacttgtgcaagtacttcaaggatagcaggaatataaaaattctcaaagacccctacctgcagaggaagctgctaaagcacacaaaatgtccacgaaacgtggactccctcagtgcattgcctgaaactcagcatgacttcacctccatcctggtggacatgtggtaccagaccgtgaacacctgcttcctccctcgggcaggcccagagagccagaggtggtggtgtttgttgtctctgaagtggaaggatggtctcagggttctgatcttgccttcatgtggaccttcatcactacctctggccgcaattccagtctgtgcatcatgaatgataagctgtttctgagggatgccagcccccaagagactcagagtgccttctccatcccagtgtccacactctcctccagctctgagccctccctctcctaggagcacaggaaatggtgcaggctttctctgcccagtctgggatgaaactagagtggtctcagaagtgccttcaggacaataagtggaactacattagagctggtcaggtcttcactatgctccagactgagggcaagatcccagtggaggccttcaagcaaatcccctaaaaggagccctttgatgtcatctttgtcttccttctcatcctctttgtttcctcttttcaccagcctaagaccactctaaggactggggttggaggcctggctgaccaagaagccaaagttaacttgcaggccacaggacatagccacctgaagagccagttgttctgtgtatttgccccactcatgatcaccgtttattttcataataaacagtgacgttacatgttgtatgtt

SEQ ID NO: 20767 - DNA, 1554 bp, Homo sapiens
  source 1..1554: mol_type = unassigned DNA
tccaggtttgttctggaaaacactaggtctgagagacagcaacaacaaaagtatactctaccattaaagaaataatgccgtatatgtagtagcacttttcaaagaaggaagaaaggtgggagtcatttccagggtaattttgacaagaggaactgtcattatgaacatggtgggtatgaacttctgccttcacgctgccaggagaatgatggaagcatggagatgagggatgtccacaaggaccgccaactaagacacactccttatagaatccaatgcaacaggaagctagtgaaatgacatagtgaagatcaaatccatattaccatttggagaaatagaaaacctccagagagaaaaatgaggcggaacacacaagatgaaaacatgaggaaatggttcaaggtcacaattccttatgggataaagtatgacaaggcatggctaatgaattcaatccagagcaattgcagtgtccccttcactccggttgatttccactacatccgaaatcgggcatgcttctttgtccaggttgctagtgctgcctctgcattgaaggatgtcagttataagatttatgatgatgagaaccaaaagatatgtatatttgtcagtcattttactgcgccctactctgtgaagaataagttgaagccaggccaaatggagatgctaaagctgaccatgaacaaacggtacaatgtctcccagcaagctcttgatctccagaatctccgctttgacccagacttgatgggccgtgacattgatataatcctgaatcgaagaaactgcatggctgccaccctgaagatcactgaaagaaatttccctgagctgttgtctttgaacttgtgcaacaacaaactgtaccagctggatggcctttctgacattacagagaaggctcccaaagtcaagaccctgaatctctccaaaaataagctggagtcggcgtgggagttgggcaaggtgaaagggctgaagctcgaagagctatggctagaagggaacccgttgtgcagcaccttctcggaccagtctgcctatgtaagtgccatccgggattgtttccccaagttgttacgcctggacggccgagagttatccgcaccagtgattgttgacattgacagctctgagacaatgaaaccctgcaaggaaaactttactggatctgagaccctaaagcatttagtcctgcaattcctgcagcagagcaacttgtgcaagtacttcaaggatagcaggaatataaaaattctcaaagacccctacctgcagaggaagctgctaaagcacacaaaatgtccacgaaacgtggactccctcagtgcattgcctgaaactcagcatgacttcacctccatcctggtggacatgtggtaccagaccgtgaacacctgcttcctccctcgggcaggcccagagagccagaggtggtggtgtttgttgtctctgaagtggaaggatggtctcagggttctgatcttgccttcatgtggaccttcatcactacctctggccgcaattccagtctgtgcatcatga

SEQ ID NO: 20768 - DNA, 1348 bp, Homo sapiens
  source 1..1348: mol_type = unassigned DNA
acttctgccttcacgctgccaggagaatgatggaagcatggagatgagggatgtccacaaggaccgccaactaagacacactccttatagaatccaatgcaacaggaagctagtgaaatgacatagtgaagatcaaatccatattaccatttggagaaatagaaaacctccagagagaaaaatgaggcggaacacacaagatgaaaacatgaggaaatggttcaaggtcacaattccttatgggataaagtatgacaaggcatggctaatgaattcaatccagagcaattgcagtgtccccttcactccggttgatttccactacatccgaaatcgggcatgcttctttgtccaggttgctagtgctgcctctgcattgaaggatgtcagttataagatttatgatgatgagaaccaaaagatatgtatatttgtcagtcattttactgcgccctactctgtgaagaataagttgaagccaggccaaatggagatgctaaagctgaccatgaacaaacggtacaatgtctcccagcaagctcttgatctccagaatctccgctttgacccagacttgatgggccgtgacattgatataatcctgaatcgaagaaactgcatggctgccaccctgaagatcactgaaagaaatttccctgagctgttgtctttgaacttgtgcaacaacaaactgtaccagctggatggcctttctgacattacagagaaggctcccaaagtcaagaccctgaatctctccaaaaataagctggagtcggcgtgggagttgggcaaggtgaaagggctgaagctcgaagagctatggctagaagggaacccgttgtgcagcaccttctcggaccagtctgcctatgtaagtgccatccgggattgtttccccaagttgttacgcctggacggccgagagttatccgcaccagtgattgttgacattgacagctctgagacaatgaaaccctgcaaggaaaactttactggatctgagaccctaaagcatttagtcctgcaattcctgcagcagagcaacttgtgcaagtacttcaaggatagcaggaatataaaaattctcaaagacccctacctgcagaggaagctgctaaagcacacaaaatgtccacgaaacgtggactccctcagtgcattgcctgaaactcagcatgacttcacctccatcctggtggacatgtggtaccagaccgtgaacacctgcttcctccctcgggcaggcccagagagccagagcctaagaccactctaaggactggggttggaggcctggctgaccaagaagccaaagttaacttgcaggccacaggacatagccacc

SEQ ID NO: 20769 - DNA, 1613 bp, Homo sapiens
  source 1..1613: mol_type = unassigned DNA
tccaggtttgttctggaaaacactaggtctgagagacagcaacaacaaaagtatactctaccattaaagaaataatgccgtatatgtagtagcacttttcaaagaaggaagaaaggtgggagtcatttccagggtaattttgacaagaggaactgtcattatgaacatggtgggtatgaacttctgccttcacgctgccaggagaatgatggaagcatggagatgagggatgtccacaaggaccgccaactaagacacactccttatagaatccaatgcaacaggaagctagtgaaatgacatagtgaagatcaaatccatattaccatttggagaaatagaaaacctccagagagaaaaatgaggcggaacacacaagatgaaaacatgaggaaatggttcaaggtcacaattccttatgggataaagtatgacaaggcatggctaatgaattcaatccagagcaattgcagtgtccccttcactccggttgatttccactacatccgaaatcgggcatgcttctttgtccaggttgctagtgctgcctctgcattgaaggatgtcagttataagatttatgatgatgagaaccaaaagatatgtatatttgtcagtcattttactgcgccctactctgtgaagaataagttgaagccaggccaaatggagatgctaaagctgaccatgaacaaacggtacaatgtctcccagcaagctcttgatctccagaatctccgctttgacccagacttgatgggccgtgacattgatataatcctgaatcgaagaaactgcatggctgccaccctgaagatcactgaaagaaatttccctgagctgttgtctttgaacttgtgcaacaacaaactgtaccagctggatggcctttctgacattacagagaaggctcccaaagtcaagaccctgaatctctccaaaaataagctggagtcggcgtgggagttgggcaaggtgaaagggctgaagctcgaagagctatggctagaagggaacccgttgtgcagcaccttctcggaccagtctgcctatgtaagtgccatccgggattgtttccccaagttgttacgcctggacggccgagagttatccgcaccagtgattgttgacattgacagctctgagacaatgaaaccctgcaaggaaaactttactggatctgagaccctaaagcatttagtcctgcaattcctgcagcagagcaacttgtgcaagtacttcaaggatagcaggaatataaaaattctcaaagacccctacctgcagaggaagctgctaaagcacacaaaatgtccacgaaacgtggactccctcagtgcattgcctgaaactcagcatgacttcacctccatcctggtggacatgtggtaccagaccgtgaacacctgcttcctccctcgggcaggcccagagagccagagcctaagaccactctaaggactggggttggaggcctggctgaccaagaagccaaagttaacttgcaggccacaggacatagccacctgaagagccagttgttctgtgtatttgccccactcatgatcaccgtttattttcataataaacagtgacgttacatgttgtatgtt

SEQ ID NO: 20770 - DNA, 3811 bp, Homo sapiens
  source 1..3811: mol_type = unassigned DNA
gattcccctttgttcgggttcgccattttgctaggcagcggcagtggcggcggcagcggcggctggagcctctgattgggtttcggagtccggtactggagccaatcagcgcgggcagcgaaccgggggagcgaggcacggagtgtacctcacagccttctaggatctccagagtggacaggaatctcacttggagggaccatggagcagtatacagcaaacagcaatagttcgacagagcagattgttgtccaggcaggacagattcagcagcagcagcagggtggtgtcactgctgtgcagttgcagactgaggcccaggtggcatccgcctcaggccagcaagtccagaccctccaggtagtccaagggcagccattaatggtgcaggtcagtggaggccagctaatcacatcaactggccaacccatcatggtccaggctgtccctggtggacaaggtcaaaccatcatgcaagtacctgtttctggaacacagggtttgcagcaaatacagttggtcccacctggacagatccagatccagggtggacaggctgtgcaggtgcagggccagcagggccagacccagcagatcatcatccagcagccccagacggctgtcactgctggccagactcagacacagcagcagattgctgtccagggacagcaagtggcacagactgctgaagggcagaccatcgtctatcaaccagttaatgcagatggcaccattctccagcaagttacagtccctgtttcaggcatgatcactatcccagcagccagtttggcaggagcacagattgttcaaacaggagccaataccaacacaaccagcagtgggcaagggactgtcactgtgacactaccagtggcaggcaatgtggtcaattcaggagggatggtcatgatggttcctggggctggctctgtgcctgctatccaaagaatccctctacctggagcagagatgcttgaagaagagcctctctacgtgaatgccaaacaataccaccgtattcttaagaggaggcaagcccgagctaaactagaggcagaagggaaaattccaaaggagagaaggaaatacctgcatgagtctcggcaccgtcatgccatggcacggaagcgtggtgaaggtggacgatttttctctccaaaggaaaaggatagtccccatatgcaggatccaaaccaagccgatgaagaagcaatgacacagatcatccgagtgtcctaaccccacgccatgtgatggagctgatcaaggtcatgtttctcactgttccaggaaattgatcaactcttccaatgggacattgatgatcacattctgccctttactacaggacagaaaccacttagtttttaataagtggctcagtattacaattgcagcgatgcctggcaaattgaagttgcaagcctttgtcttactctttcagtcaggacctatttcagactgttgatgacattgacatttcatggattcggatgatgcaaggagacacatgccaccccagcagtacacaaagcacttaccttgactggtgaagtcagccagccatctcagcagggaagaacaaccttctcaaccaaaactgcaatcaggaaagcagcagcccactccttcccatggaatctagacagcatttatccctctggtgggggaatctcacactgactaactgaatggacgctttgtattcagagatggcttccaggcaaggaagttctatcttgtgatacggaaacaataaattcctgagatacattcttccaatctgtggtaataataagaattcctctctgcccagatggtaggttgatatttctggactctagccaagaaaaagctaattctggggatagaatgataaaagactcaagcactaaaaatatacattgccgaatctctttttctagctttgaaaagttgtggcctgcttgtccctctgttgactggtcatctggaccatcgtacttgctgtggctacttctaagacaatgtagagggttattaaaccttgaaactgcctttcctaagtagagaacaagactattcaacaacttctttgctgaagcactgaggagatttgtaatactcctaaaggaagggccaaactagagattttcaatcatagactttgtgacagcatttggggaactaaaagattcatgtgtttcagcctagtgggagagagtgggggagaggaagagagagagagagcatgtatacccgtatgttatcatagagcacgattctccagtggatggatacctggaatggatcattaagatgaagagagtaattcacatttactctagaacctttaacaagcactgaaaggaagaagcctgagatttgatccttgacaatttctggaaagcactggtcagtcacactgtcctggacagagtccaagttacccactaaagcttgaggtggatgttggcttcactcctgcagcacaatgctggccctagaaagcgagcattttcattcttcccatggcagctgattctttggtgccagttttcatgttttctccataggccttgtgcagaaaggttttctcattgcatccatactgtgagaataaactgcagactgaaagaaacatgcctgcagggtcaggaactgggccactgttcccagaacgggttgtgcctcagaaatctatttctcttttagatgttgaaccctgagagaactaagatgatatttcagaagagttggctgccttctctggaaacaaggaaaacccaataattccgaggaacattgggggttaaataccaagaataaaaattggttcttctttgacttcagcttaactgtattaagacagaaattaagccctctaaaaacaccacaaagagagatgattgtaatgatagaaatagaggtacagagctatgcaaaggaaacaggaagtgaaatattcctagtcccagggatctggtaatcgctcctggcttccagatgtcaaaggactgatcctttggtaagctcactagaaacttctagctctacaagagtttgggatattaatgttattcagtaagtcccaagtttttcagagaatagattactaacaatgaggaatttatattccttggttaatttaggagtctaagatgcagagttcagaaagaaattactcagacctaactttgagtgcttaagctgccaacagttagaagatgctatttatttgtgtctgtaagtttgtacatagtaatgccagccttgttgctgaattttttatttggggggagatgactttgaattttgtttgaaatgcttcagttgtcattttgtcattgcatttcaaatagctcatgacccttttcttgtggtcactttggcacaccatagtagcccacaaagtgggggcagggtattgacatttggattttttctttgatactagttcttttattcatttttatttgtgactgtagtgataactttacagatggagaaagagtgaatggatgaatgaataattggtttaatgcctagttatgcaacttgagtgcttttttttttttttgcaggataattttaagtgtatatattttaactgcactggtacattgaacatgtcagtgtcgatgccactggaccaacagagcattttgtggctatagggtgcctgataataatgtcttgatttttctttgggattcaactatatcgaaggtttttcccccagcagtatgggggcgtacaggtgatcgatcattaatgtcattgcaattgttattttttaaaataaatttataaaaataaccgaaaa

SEQ ID NO: 20771 - DNA, 1660 bp, Homo sapiens
  source 1..1660: mol_type = unassigned DNA
cggcagtggcggcggcagcggcggctggagcctctgattgggtttcggagtccggtactggagccaatcagcgcgggcagcgaaccgggggagcgaggcacggagtgtacctcacagccttctaggatctccagagtggacaggaatctcacttggagggaccatggagcagtatacagcaaacagcaatagttcgacagagcagattgttgtccaggcaggacagattcagcagcaggtccaagggcagccattaatggtgcaggtcagtggaggccagctaatcacatcaactggccaacccatcatggtccaggctgtccctggtggacaaggtcaaaccatcatgcaagtacctgtttctggaacacagggtttgcagcaaatacagttggtcccacctggacagatccagatccagggtggacaggctgtgcaggtgcagggccagcagggccagacccagcagatcatcatccagcagccccagacggctgtcactgctggccagactcagacacagcagcagattgctgtccagggacagcaagtggcacagactgctgaagggcagaccatcgtctatcaaccagttaatgcagatggcaccattctccagcaagttacagtccctgtttcaggcatgatcactatcccagcagccagtttggcaggagcacagattgttcaaacaggagccaataccaacacaaccagcagtgggcaagggactgtcactgtgacactaccagtggcaggcaatgtggtcaattcaggagggatggtcatgatggttcctggggctggctctgtgcctgctatccaaagaatccctctacctggagcagagatgcttgaagaagagcctctctacgtgaatgccaaacaataccaccgtattcttaagaggaggcaagcccgagctaaactagaggcagaagggaaaattccaaaggagagaaggaaatacctgcatgagtctcggcaccgtcatgccatggcacggaagcgtggtgaaggtggacgatttttctctccaaaggaaaaggatagtccccatatgcaggatccaaaccaagccgatgaagaagcaatgacacagatcatccgagtgtcctaaccccacgccatgtgatggagctgatcaaggtcatgtttctcactgttccaggaaattgatcaactcttccaatgggacattgatgatcacattctgccctttactacaggacagaaaccacttagtttttaataagtggctcagtattacaattgcagcgatgcctggcaaattgaagttgcaagcctttgtcttactctttcagtcaggacctatttcagactgttgatgacattgacatttcatggattcggatgatgcaaggagacacatgccaccccagcagtacacaaagcacttaccttgactggtgaagtcagccagccatctcagcagggaagaacaaccttctcaaccaaaactgcaatcaggaaagcagcagcccactccttcccatggaatctagacagcatttatccctctggtgggggaatctcacactgactaactgaatggacgctttgtattcagagatggcttccaggcaaggaagttctatcttgtgatacggaaacaataaattcctgagatacattcttc

SEQ ID NO: 20772 - DNA, 3512 bp, Homo sapiens
  source 1..3512: mol_type = unassigned DNA
gtcgcgccgagggaagcggcccgcggcggagggaggggaggccgagtcctggaagcggagctccgcgctgggactggttccttcgcagccattttctgtccaaccaaacagccgattggagacgggagccaaccagggctgcattggaggttgaaatcacaaagattagacacctttttagataggtgttcttcagcaccactgacaacacggttctgacagtatttcatgacaatggatggtgacagttctacaacagatgcttctcaactaggaatctctgcagactatattggaggaagtcattatgttatacagcctcatgatgatactgaggacagcatgaatgatcatgaagacacaaatggttcaaaagaaagtttcagagaacaagatatatatcttccaatagcaaacgtggctaggataatgaaaaatgccatacctcaaacgggaaagattgcaaaagatgccaaagaatgtgttcaagaatgtgtaagtgagttcatcagttttataacatctgaagcaagtgaaaggtgccatcaagagaaacggaaaacaatcaatggagaagatattctctttgctatgtctactttaggctttgacagttatgtggaacctctgaaattataccttcagaaattcagagaggctatgaaaggagaaaagggaattggtggagcagtcacagctacagatggactaagtgaagagcttacagaggaggcatttactaaccagttaccagctggcttaataaccacagacggtcaacaacaaaatgttatggtttacacaacatcatatcaacagatttctggtgttcagcaaattcagttttcatgatctgaagaaatgatggaatggggagtgtagagaaatgagagtctgtatgattctggaacagagacatcagaaggaaagactggtgaaaagatgtatctttgtatattaatagctgtaatgtagcttcctgatgcttgactaattgaggtgttaattctgacttgagaatctttttcatgaatgattttaaagaaaaatttggattttaaaggtattaaaatatttttgttttgtacgagagtttgttgctctgtatgactcctgtatgcattgtatattgcaatttattactgtcagagatttgtagacagtttcttattttcatattgaatcatgttacttttgtaattcaagtaagcggctgggttaattcatgatgtttgcccttttaataaaatataagggtagagttcattttgaatgcaagttgcctttattataaatttgagtttgtcttggttataccttgcatgataacctagctagatttctagcatttgctgtatttattaaaattattatttttttggtaaaacattaatagtttaagcagcatcatttttttaaaaaatgtaattgaataagtgtgaatgcagaagcaaatattgtctgccctgttaaacttggtgcccattaacagtgtttacactgttcatcgtgcctgttaatgtagttttagttactggagcttttttaagactagatttggttttgagttacatttttaagaatgtgggaatatatttaagtttaatgtagtcctagtgctcttgaaatggtgcccctttcatttggtacatgattttttttcaaatcatatcttcaagtactatagtattctcttacagaagaggagttttatagtctgatggtaaatgtcttcattttacctttttaattgaaatgtcaagtttcctgttacactatggaaaccaagaaacatcagacatcattgcgtgtacagaccttttgcatgggtgagtggatgaaatggagaacagagtgagtgctgtgaacggtgtgaaatagaagccaacttctagtatgctgtcttcatctctgcaataaactaaacgtaaataatgtaactttgtataatttagtagtatgtacttggattgtttctttttgaaaagtgaggatttgtattttctcatctattctttttggtgttaattaacttgagggatttcttttttaagtttttaatatcaaaaattgctattgtatagtttgcctaaaaggaagttggagtgaatatcatctttgaaggacactcaaatttataaggtagaagcaatttcccagatataggctgaacagaaacatttactttgccagaaggagcctttaggagtatatgtgggctaatcagaggttaataatgtcctcatctcctactctccatttaaaaaacaaacttcattgtagtaaattcaaataggaaaaaatgggggagtagttaagcaaaatcaacagtcatcctactatgttgaaagaaccaatgttaatattttgataaatatcatttgtccttttactttgctaaatatgtatatttttataaaaatgggctcatattgtgcataccattttgtaacctgcttttttcacttaacaatatattgggaacatcttttccaggtcatgcatagtcttctgcatcatttttattggtttattattctgctgtatgactcaatcataattcatttaatcttctattggatattttgactatttacatcttttcacagttataaacagcacttcactgaatcccatgtacatccatgactgttttcttaaattctttgaattgctgggttaccaaatatgcaaaattttaaggcttttgatacttcgttatgagtgtatttttgagatattttccacttgatccaagcagtgtgtcactatataactgataaaagcacttggtctttgattatcagatactgtctctaaaattattttaaagattaatatttgttcaagtagagaatgaagataaaaaaggaatttgaggccaggtatggggtgtctcatgcctataattccagcactttgggaggccaaggcaggcagatcactttgaggtcaggagtttgagaccagcctggccaacatggagaaccccccgtctctacaaaaaatacaaaattagcagggtgtggtggtgcacacctgtagtcccttactccctggtggctgaggcattatcccttgaacctgggaggcagagcctaaagtgagccgagatcgcgccactgcactccagcctgggtgacacagcaagactcttgtctcaaacaaacaggaatttgagtaaattttaaattagtatatactacaacaaatttccaaacttcataatttgctagtagtgctaactaaaattttacaccaggtaaaatcaggtcaccttttttatgtattgacttcattgttggacttcatactctgatgggaaagaaaatggacattctgaatgtgtcaggtgcataatatcctaatttatgcttgtcagagctggggtctctgtcttccttggcccatgttgcatttaactgaatgtcatgttttctcctctggaacttcttatgtatgcaagctcccatgttaacctatcataaaaatgttttttataattttgtaaa

SEQ ID NO: 20773 - DNA, 1727 bp, Homo sapiens
  source 1..1727: mol_type = unassigned DNA
tcccgccctcccgcgcgggccgaggccgggccccgcgcctgcgaggccgctcccgcagcgggccgggccggggagcgggcgcggggccgcggcgcggctctttgtgcgccgggctgaggagcggcgggacgcgggccaggccacctcaccctcgccgccgttgagctccgggcccggggccgaggaggggccgcggggctgcgtcggggccccgctctcgacggcgtcccgggccggctccattttgtgcggggagccggccgaggggcgggagacgcggcccgggccctggccccgtagccccggcggcggcgcgagtccccgggggcgccctcctcccgcccgcggggctgtggcggggcccggcgctttgtctgcccgcacatcccgggggccgcgcggcgggtgggaggcaggcgttgggcgcggggccggggcggccgggcgagtcaggggatgcgctctgggggcggcctcctggcactcgcagggctgacaggtcgccgggaccaggccgtggggccggggccacccaggcacctgcgtggggaggaaggcatggctttagcttccccgcagcctggtttgcgcgtaaagaatgcagccatctggcggtttgcggtccctgtacttgccccgaaggttgaaatcacaaagattagacacctttttagataggtgttcttcagcaccactgacaacacggttctgacagtatttcatgacaatggatggtgacagttctacaacagatgcttctcaactaggaatctctgcagactatattggaggaagtcattatgttatacagcctcatgatgatactgaggacagcatgaatgatcatgaagacacaaatggttcaaaagaaagtttcagagaacaagatatatatcttccaatagcaaacgtggctaggataatgaaaaatgccatacctcaaacgggaaagattgcaaaagatgccaaagaatgtgttcaagaatgtgtaagtgagttcatcagttttataacatctgaagcaagtgaaaggtgccatcaagagaaacggaaaacaatcaatggagaagatattctctttgctatgtctactttaggctttgacagttatgtggaacctctgaaattataccttcagaaattcagagaggctatgaaaggagaaaagggaattggtggagcagtcacagctacagatggactaagtgaagagcttacagaggaggcatttactaaccagttaccagctggcttaataaccacagacggtcaacaacaaaatgttatggtttacacaacatcatatcaacagatttctggtgttcagcaaattcagttttcatgatctgaagaaatgatggaatggggagtgtagagaaatgagagtctgtatgattctggaacagagacatcagaaggaaagactggtgaaaagatgtatctttgtatattaatagctgtaatgtagcttcctgatgcttgactaattgaggtgttaattctgacttgagaatctttttcatgaatgattttaaagaaaaatttggattttaaaggtattaaaatatttttgttttgtacgagagtttgttgctctgtatgactcctgtatgcattgtatattgcaatttattactgtcagagatttgtagacagtttcttattttcatattgaatcatgttacttttgtaattcaagtaagcggctgggttaattcatgatgttt

SEQ ID NO: 20774 - DNA, 2158 bp, Homo sapiens
  source 1..2158: mol_type = unassigned DNA
gtcgagatgtccacagaaggaggatttggtggtactagcagcagtgatgcccagcaaagcctacagtcgttctggcctcgggtcatggaagaaatccggaatttaacagtgaaagacttccgagtgcaggaactcccactggctcgtattaagaagattatgaaactggatgaagatgtgaagatgatcagtgcagaagcgcctgtactctttgccaaggcagcccagatttttatcacagagttgactcttcgagcctggattcacacagaagataacaagcgccggactctacagagaaatgatatcgccatggcaattacaaaatttgatcagtttgattttctcatcgatattgttccaagagatgaactgaaacctccaaagcgtcaggaggaggtgcgccagtctgtaactcctgccgagccagtccagtactatttcacgctggctcagcaacccaccgctgtccaagtccagggccagcagcaaggccagcagaccaccagctccacgaccaccatccagcctgggcagatcatcatcgcacagcctcagcagggccagaccacacctgtgacaatgcaggttggagaaggtcagcaggtgcagattgtccaggctcagccacagggtcaagcccaacaggcccagagtggcactggacagaccatgcaggtgatgcagcagatcatcactaacacaggagagatccagcagatcccggtgcagctgaatgccggccagctgcagtatatccgcttagcccagcctgtatcaggcactcaagttgtgcagggacagatccagacacttgccaccaatgctcaacaggggcaaagaaatgcaagtcaggggaagcctcgaaggtgcctgaaagaaaccttacagattacacagacagaggtccagcaaggacagcagcagttcagccagttcacagatggacagaggaacagcgtgcagcaagctcgagtctctgagctaacgggagaggcagagcccagagaagtgaaagccacaggaaattcaactccctgcacctcttccctgcccaccacacaccccccctcacaccgggctggtgcctcctgtgtctgctgctcccaaccccagcagagctccacttcccctcctccttctgacgccttgcagtgggtggtggttgaggtatctgggacccccaaccagctcgagacccatagggagctgcatgcccctctcccagggatgacctcactctctcctctccacccctcgcagcagctctaccagatccagcaagtcaccatgcctgcgggccaggacctcgcccagcccatgttcatccagtcagccaaccagccctccgacgggcaggccccccaggtgaccggcgactgagggcctgagctggcaaggccaaggacacccaacacaatttttgccatacagccccaggcaatgggcacagccttcctccccagaggacccggccgacctcagcgcctcctgcaggctaggacactggtgcactacaccccatgcctgggggccgagattctccagcagaaagatgcaatattttttgtttcctttttttccatttttttctctaaggaatcaatatttcaatatgttgagtgtgtgtccaatgctatgaaattaaaatattaaataacatatttatggcattttcttgaagagtgtggttgaagaaatatttctccttttgtttttcttttttttttgtttgttactgccacttctttttaggagcaaatctccccaggggtgtacggtatttcttgactctgggaacagctgctacccccaagacttgccacgttgttctgccctcagatggaattaggtgaatgtgtgtagctgctttttcactcgtggtcctctccccatcccttgctctgaccccagagctctgtgtatttgcatccagaggccatggaaacattctttgcatttaagagacagatttattccctgtggagagtgggtggattcattgccacactcttttctcccagggacccaggaaactaggactttgtgtgtttgctgcccacctcccttttattttttaaatgcattaaaaactgtgctagtctcctttgcatggacttcaagctgcatgaaatgcaataaatctcattttagataa

SEQ ID NO: 20775 - DNA, 1202 bp, Homo sapiens
  source 1..1202: mol_type = unassigned DNA
gggataggagtgacttaaattctcccagtcggtggaggtataaataactacatgtaaaattaatgcagttcccgttgtcgagatgtccacagaaggaggatttggtggtactagcagcagtgatgcccagcaaagcctacagtcgttctggcctcgggtcatggaagaaatccggaatttaacagtgaaagacttccgagtgcaggaactcccactggctcgtattaagaagattatgaaactggatgaagatgtgaagatgatcagtgcagaagcgcctgtactctttgccaaggcagcccagatttttatcacagagttgactcttcgagcctggattcacacagaagataacaagcgccggactctacagagaaatgatatcgccatggcaattacaaaatttgatcagtttgattttctcatcgatattgttccaagagatgaactgaaacctccaaagcgtcaggaggaggtgcgccagtctgtaactcctgccgagccagtccagtactatttcacgctggctcagcaacccaccgctgtccaagtccagggccagcagcaaggccagcagaccaccagctccacgaccaccatccagcctgggcagatcatcatcgcacagcctcagcagggccagaccacacctgtgacaatgcaggttggagaaggtcagcaggtgcagattgtccaggctcagccacagggtcaagcccaacaggcccagagtggcactggacagaccatgcaggtgatgcagcagatcatcactaacacaggagagatccagcagatcccggtgcagctgaatgccggccagctgcagtatatccgcttagcccagcctgtatcaggcactcaagttgtgcagggacagatccagacacttgccaccaatgctcaacagattacacagacagaggtccagcaaggacagcagcagttcagccagttcacagatggacagcagctctaccagatccagcaagtcaccatgcctgcgggccaggacctcgcccagcccatgttcatccagtcagccaaccagccctccgacgggcaggccccccaggtgaccggcgactgagggcctgagctggcaaggccaaggacacccaacacaatttttgccatacagccccaggcaatgggcacagccttcctccccagaggacccggccgacctcagcgcctcctgc

SEQ ID NO: 20776 - DNA, 2363 bp, Homo sapiens
  source 1..2363: mol_type = unassigned DNA
cagggcttcattggagcctcggagtttttcactgaggcaggggtcagctgaaagacaaagaaaaatggcgaatagtttgttggggggtgggaggacagctgttcgggttttcagtggagtggacattccagactcatgtttctgcatctcctgctgccttttgtttcctccgtcctttggggggtagggataggagtgacttaaattctcccagtcggtggaggtataaataactacatgtaaaattaatgcagttcccgttgtcgagatgtccacagaaggaggatttggtggtactagcagcagtgatgcccagcaaagcctacagtcgttctggcctcgggtcatggaagaaatccggaatttaacagtgaaagacttccgagtgcaggaactcccactggctcgtattaagaagattatgaaactggatgaagatgtgaagatgatcagtgcagaagcgcctgtactctttgccaaggcagcccagatttttatcacagagttgactcttcgagcctggattcacacagaagataacaagcgccggactctacagagaaatgatatcgccatggcaattacaaaatttgatcagtttgattttctcatcgatattgttccaagagatgaactgaaacctccaaagcgtcaggaggaggtgcgccagtctgtaactcctgccgagccagtccagtactatttcacgctggctcagcaacccaccgctgtccaagtccagggccagcagcaaggccagcagaccaccagctccacgaccaccatccagcctgggcagatcatcatcgcacagcctcagcagggccagaccacacctgtgacaatgcaggttggagaaggtcagcaggtgcagattgtccaggctcagccacagggtcaagcccaacaggcccagagtggcactggacagaccatgcaggtgatgcagcagatcatcactaacacaggagagatccagcagatcccggtgcagctgaatgccggccagctgcagtatatccgcttagcccagcctgtatcaggcactcaagttgtgcagggacagatccagacacttgccaccaatgctcaacagattacacagacagaggtccagcaaggacagcagcagttcagccagttcacagatggacagaggaacagcgtgcagcaagctcgagtctctgagctaacgggagaggcagagcccagagaagtgaaagccacaggaaattcaactccctgcacctcttccctgcccaccacacaccccccctcacaccgggctggtgcctcctgtgtctgctgctcccaaccccagcagagctccacttcccctcctccttctgacgccttgcagtgggtggtggttgaggtatctgggacccccaaccagctcgagacccatagggagctgcatgcccctctcccagggatgacctcactctctcctctccacccctcgcagcagctctaccagatccagcaagtcaccatgcctgcgggccaggacctcgcccagcccatgttcatccagtcagccaaccagccctccgacgggcaggccccccaggtgaccggcgactgagggcctgagctggcaaggccaaggacacccaacacaatttttgccatacagccccaggcaatgggcacagccttcctccccagaggacccggccgacctcagcgcctcctgcaggctaggacactggtgcactacaccccatgcctgggggccgagattctccagcagaaagatgcaatattttttgtttcctttttttccatttttttctctaaggaatcaatatttcaatatgttgagtgtgtgtccaatgctatgaaattaaaatattaaataacatatttatggcattttcttgaagagtgtggttgaagaaatatttctccttttgtttttcttttttttttgtttgttactgccacttctttttaggagcaaatctccccaggggtgtacggtatttcttgactctgggaacagctgctacccccaagacttgccacgttgttctgccctcagatggaattaggtgaatgtgtgtagctgctttttcactcgtggtcctctccccatcccttgctctgaccccagagctctgtgtatttgcatccagaggccatggaaacattctttgcatttaagagacagatttattccctgtggagagtgggtggattcattgccacactcttttctcccagggacccaggaaactaggactttgtgtgtttgctgcccacctcccttttattttttaaatgcattaaaaactgtgctagtctcctttgcatggacttcaagctgcatgaaatgcaataaatctcattttagataa

SEQ ID NO: 20777 - DNA, 1862 bp, Homo sapiens
  source 1..1862: mol_type = unassigned DNA
gtgctcttgcctggcccgctgctgtcgccgccgccgcgctcgtggggtccgtgtgcctcgtcggcccggcccgcgggctttctcccattggcggaaggcgacggcgggggggctcgctcgtgattggtcggtggcggggaggccgcggacctggcaccttattggacgcgccagctccggtctaggggacacgggcttccaccatgttagccaggctggtcttcaactcctgacctcaggtgatccacccacctcggcctcccaaagtgctgggattataggcgtgagccaccgtgcccagccaggctatgctgggtgtctttttgagatttaggaacctctcagaataaaatctggaagcctgttccatttgcattatgagatttgcattacaatgcaggctgaagtgcagtagtgcaatcatggctcattgcagtctcccagctcctcggctcaagtgatcctcctgccccagcctcctgagtagcgggagctacagacacacaaacacaggatactgccagaaactgggcaagaggctgtttgtgaatctcagaaggcacccggatcttgctctgctgttcctgctcaggctggagtgcagtggcgcaatcatggctcactgcaggcttgaccacccaggctcaagcagtcctcccgcctcagcctcttgtcgagatgtccacagaaggaggatttggtggtactagcagcagtgatgcccagcaaagcctacagtcgttctggcctcgggtcatggaagaaatccggaatttaacagtgaaagacttccgagtgcaggaactcccactggctcgtattaagaagattatgaaactggatgaagatgtgaagatgatcagtgcagaagcgcctgtactctttgccaaggcagcccagatttttatcacagagttgactcttcgagcctggattcacacagaagataacaagcgccggactctacagagaaatgatatcgccatggcaattacaaaatttgatcagtttgattttctcatcgatattgttccaagagatgaactgaaacctccaaagcgtcaggaggaggtgcgccagtctgtaactcctgccgagccagtccagtactatttcacgctggctcagcaacccaccgctgtccaagtccagggccagcagcaaggccagcagaccaccagctccacgaccaccatccagcctgggcagatcatcatcgcacagcctcagcagggccagaccatgcaggtgatgcagcagatcatcactaacacaggagagatccagcagatcccggtgcagctgaatgccggccagctgcagtatatccgcttagcccagcctgtatcaggcactcaagttgtgcagggacagatccagacacttgccaccaatgctcaacagattacacagacagaggtccagcaaggacagcagcagttcagccagttcacagatggacagcagctctaccagatccagcaagtcaccatgcctgcgggccaggacctcgcccagcccatgttcatccagtcagccaaccagccctccgacgggcaggccccccaggtgaccggcgactgagggcctgagctggcaaggccaaggacacccaacacaatttttgccatacagccccaggcaatgggcacagccttcctccccagaggacccggccgacctcagcgcctcctgcaggctaggacactggtgcactacaccccatgcctgggggccgagattctccagcagaaagatgcaatattttttgtttcctttttttccatttttttctctaaggaatcaatatttcaatatgttgagtgtgtgtccaatgctatgaaattaaaatattaaataac

SEQ ID NO: 20778 - DNA, 1455 bp, Homo sapiens
  source 1..1455: mol_type = unassigned DNA
ctcctgctcttcctggactcctgagcagagacgaggtctcgctctgttgccaaggctggtgtgccaggctggagtgccgtggcatgatcatgactcactgcagcctccacctcctgggctcaagcaatcctcctacttcagcctcctgagtagctgggactacagttgtcgagatgtccacagaaggaggatttggtggtactagcagcagtgatgcccagcaaagcctacagtcgttctggcctcgggtcatggaagaaatccggaatttaacagtgaaagacttccgagtgcaggaactcccactggctcgtattaagaagattatgaaactggatgaagatgtgaagatgatcagtgcagaagcgcctgtactctttgccaaggcagcccagatttttatcacagagttgactcttcgagcctggattcacacagaagataacaagcgccggactctacagagaaatgatatcgccatggcaattacaaaatttgatcagtttgattttctcatcgatattgttccaagagatgaactgaaacctccaaagcgtcaggaggaggtgcgccagtctgtaactcctgccgagccagtccagtactatttcacgctggctcagcaacccaccgctgtccaagtccagggccagcagcaaggccagcagaccaccagctccacgaccaccatccagcctgggcagatcatcatcgcacagcctcagcagggccagaccacacctgtgacaatgcaggttggagaaggtcagcaggtgcagattgtccaggctcagccacagggtcaagcccaacaggcccagagtggcactggacagaccatgcaggtgatgcagcagatcatcactaacacaggagagatccagcagatcccggtgcagctgaatgccggccagctgcagtatatccgcttagcccagcctgtatcaggcactcaagttgtgcagggacagatccagacacttgccaccaatgctcaacagattacacagacagaggtccagcaaggacagcagcagttcagccagttcacagatggacagcagctctaccagatccagcaagtcaccatgcctgcgggccaggacctcgcccagcccatgttcatccagtcagccaaccagccctccgacgggcaggccccccaggtgaccggcgactgagggcctgagctggcaaggccaaggacacccaacacaatttttgccatacagccccaggcaatgggcacagccttcctccccagaggacccggccgacctcagcgcctcctgcaggctaggacactggtgcactacaccccatgcctgggggccgagattctccagcagaaagatgcaatattttttgtttcctttttttccatttttttctctaaggaatcaatatttcaatatgttgagtgtgtgtccaatgctatgaaattaaaatattaaa

SEQ ID NO: 20779 - DNA, 1348 bp, Homo sapiens
  source 1..1348: mol_type = unassigned DNA
gcctctgcattgcccgactccgtaggagcgcgggggcggctcctgctcttcctggactcctgagcagagttgtcgagatgtccacagaaggaggatttggtggtactagcagcagtgatgcccagcaaagcctacagtcgttctggcctcgggtcatggaagaaatccggaatttaacagtgaaagacttccgagtgcaggaactcccactggctcgtattaagaagattatgaaactggatgaagatgtgaagatgatcagtgcagaagcgcctgtactctttgccaaggcagcccagatttttatcacagagttgactcttcgagcctggattcacacagaagataacaagcgccggactctacagagaaatgatatcgccatggcaattacaaaatttgatcagtttgattttctcatcgatattgttccaagagatgaactgaaacctccaaagcgtcaggaggaggtgcgccagtctgtaactcctgccgagccagtccagtactatttcacgctggctcagcaacccaccgctgtccaagtccagggccagcagcaaggccagcagaccaccagctccacgaccaccatccagcctgggcagatcatcatcgcacagcctcagcagggccagaccacacctgtgacaatgcaggttggagaaggtcagcaggtgcagattgtccaggctcagccacagggtcaagcccaacaggcccagagtggcactggacagaccatgcaggtgatgcagcagatcatcactaacacaggagagatccagcagatcccggtgcagctgaatgccggccagctgcagtatatccgcttagcccagcctgtatcaggcactcaagttgtgcagggacagatccagacacttgccaccaatgctcaacagattacacagacagaggtccagcaaggacagcagcagttcagccagttcacagatggacagcagctctaccagatccagcaagtcaccatgcgggccaggacctcgcccagcccatgttcatccagtcagccaaccagccctccgacgggccccccaggtgaccggcgactgagggcctgagctggcaaggccaaggacacccaacacaatttttgccatacagccccaggcaatgggcacagccttcctccccagaggacccggccgacctcagcgcctcctgcaggctaggacactggtgcactacaccccatgcctgggggccgagattctccagcagaaagatgcaatattttttgtttcctttttttccatttttttctctaaggaatcaatatttcaatatgttgagtgtgtgtccaatgctatgaaattaaaatatt

SEQ ID NO: 20780 - DNA, 989 bp, Homo sapiens
  source 1..989: mol_type = unassigned DNA
gcctctgcattgcccgactccgtaggagcgcgggggcggctcctgctcttcctggactcctgagcagagttgtcgagatgtccacagaaggaggatttggtggtactagcagcagtgatgcccagcaaagcctacagtcgttctggcctcgggtcatggaagaaatccggaatttaacagtgaaagacttccgagtgcaggaactcccactggctcgtattaagaagattatgaaactggatgaagatgtgaagatgatcagtgcagaagcgcctgtactctttgccaaggcagcccagatttttatcacagagttgactcttcgagcctggattcacacagaagataacaagcgccggactctacagagaaatgatatcgccatggcaattacaaaatttgatcagtttgattttctcatcgatattgttccaagagatgaactgaaacctccaaagcgtcaggaggaggtgcgccagtctgtaactcctgccgagccagtccagtactatttcacgctggctcagcaacccaccgctgtccaagtccagggccagcagcaaggccagcagaccaccagctccacgaccaccatccagcctgggcagatcatcatcgcacagcctcagcagggccagaccacacctgtgacaatgcaggttggagaaggtcagcaggtgcagattgtccaggctcagccacagggtcaagcccaacaggcccagagtggcactggacagaccatgcaggtgatgcagcagatcatcactaacacaggagagatccagcagatcccggtgcagctgaatgccggccagctgcagtatatccgcttagcccagcctgtatcaggcactcaagttgtgcagggacagatccagacacaggccatggaaacattctttgcatttaagagacagatttattccctgtggagagtgggtggattcattgccacactcttttctcccagggacccaggaaactag

SEQ ID NO: 20781 - DNA, 1005 bp, Homo sapiens
  source 1..1005: mol_type = unassigned DNA
gcggcgagagggcgagcctagaggctttaagggggaagagagggtgatggcctggcagttgtcgagatgtccacagaaggaggatttggtggtactagcagcagtgatgcccagcaaagcctacagtcgttctggcctcgggtcatggaagaaatccggaatttaacagtgaaagacttccgagtgcaggaactcccactggctcgtattaagaagattatgaaactggatgaagatgtgaagatgatcagtgcagaagcgcctgtactctttgccaaggcagcccagatttttatcacagagttgactcttcgagcctggattcacacagaagataacaagcgccggactctacagagaaatgatatcgccatggcaattacaaaatttgatcagtttgattttctcatcgatattgttccaagagatgaactgaaacctccaaagcgtcaggaggaggtgcgccagtctgtaactcctgccgagccagtccagtactatttcacgctggctcagcaacccaccgctgtccaagtccagggccagcagcaaggccagcagaccaccagctccacgaccaccatccagcctgggcagatcatcatcgcacagcctcagcagggccagaccacacctgtgacaatgcaggttggagaaggtcagcaggtgcagattgtccaggctcagccacagggtcaagcccaacaggcccagagtggcactggacagaccatgcaggtgatgcagcagatcatcactaacacaggagagatccagcagatcccggagacaggtcttgctgtgtcactcagactgatgaagtgcagtggcttgatctcagctcactgcagcttccgcctcccaggttcaagcgattctcctgcctcagcctcccgagtagctgggattataggtgcagctgaatgccggccagctgcagtatatccgcttagcccagcctgtatcaggcactcaagttgtgcagggacagatccagacacttgc

SEQ ID NO: 20782 - DNA, 547 bp, Homo sapiens
  source 1..547: mol_type = unassigned DNA
ttgtcgagatgtccacagaaggaggatttggtggtactagcagcagtgatgcccagcaaagcctacagtcgttctggcctcgggtcatggaagaaatccggaatttaacagtgaaagacttccgagtgcaggaactcccactggctcgtattaagaagattatgaaactggatgaagatgtgaagatgatcagtgcagaagcgcctgtactctttgccaaggcagcccagatttttatcacagagttgactcttcgagcctggattcacacagaagataacaagcgccggactctacaggaggaggtgcgccagtctgtaactcctgccgagccagtccagtactatttcacgctggctcagcaacccaccgctgtccaagtccagggccagcagcaaggccagcagaccaccagctccacgaccaccatccagcctgggcagatcatcatcgcacagcctcagcagggccagaccacacctgtgacaatgcaggttggagaaggtcagcaggtgcagattgtccaggctcagccacagggtcaagc

SEQ ID NO: 20783 - DNA, 1536 bp, Homo sapiens
  source 1..1536: mol_type = unassigned DNA
gccgccatcttgcttgtgcccccgcttcgcgcgcgctccgttctccgtgacgcacacttccccctcccctccgccgcgcctgggcctctgcattgcccgactccgtaggagcgcgggggcggctcctgctcttcctggactcctgagcagagttgtcgagatgtccacagaaggaggatttggtggtactagcagcagtgatgcccagcaaagcctacagtcgttctggcctcgggtcatggaagaaatccggaatttaacagtgaaagacttccgagtgcaggaactcccactggctcgtattaagaagattatgaaactggatgaagatgtgaagatgatcagtgcagaagcgcctgtactctttgccaaggcagcccagatttttatcacagagttgactcttcgagcctggattcacacagaagataacaagcgccggactctacagagaaatgatatcgccatggcaattacaaaatttgatcagtttgattttctcatcgatattgttccaagagatgaactgaaacctccaaagcgtcaggaggaggtgcgccagtctgtaactcctgccgagccagtccagtactatttcacgctggctcagcaacccaccgctgtccaagtccagggccagcagcaaggccagcagaccaccagctccacgaccaccatccagcctgggcagatcatcatcgcacagcctcagcagggccagaccacacctgtgacaatgcaggttggagaaggtcagcaggtgcagattgtccaggctcagccacagggtcaagcccaacaggcccagagtggcactggacagaccatgcaggtgatgcagcagatcatcactaacacaggagagatccagcagatcccggtgcagctgaatgccggccagctgcagtatatccgcttagcccagcctgtatcaggcactcaagttgtgcagggacagatccagacacttgccaccaatgctcaacaggggcaaagaaatgcaagtcaggggaagcctcgaaggtgcctgaaagaaaccttacagattacacagacagaggtccagcaaggacagcagcagttcagccagttcacagatggacagcagctctaccagatccagcaagtcaccatgcctgcgggccaggacctcgcccagcccatgttcatccagtcagccaaccagccctccgacgggcaggccccccaggtgaccggcgactgagggcctgagctggcaaggccaaggacacccaacacaatttttgccatacagccccaggcaatgggcacagccttcctccccagaggacccggccgacctcagcgcctcctgcaggctaggacactggtgcactacaccccatgcctgggggccgagattctccagcagaaagatgcaatattttttgtttcctttttttccatttttttctctaaggaatcaatatttcaatatgttgagtgtgtgtccaatgctatgaaattaaaatattaaataacatatttatggcattttcttgaagagtgtggttg

SEQ ID NO: 20784 - DNA, 1379 bp, Homo sapiens
  source 1..1379: mol_type = unassigned DNA
aaaaggggaaacggtgcaaacggcgtggccgccatcttgcttgtgcccccgcttcgcgcgcgctccgttctccgtgacgcacacttccccctcccctccgccgcgcctgggcctctgcattgcccgactccgtaggagcgcgggggcggctcctgctcttcctggactcctgagcagagttgtcgagatgtccacagaaggaggatttggtggtactagcagcagtgatgcccagcaaagcctacagtcgttctggcctcgggtcatggaagaaatccggaatttaacagtgaaagacttccgagtgcaggaactcccactggctcgtattaagaagattatgaaactggatgaagatgtgaagagaaatgatatcgccatggcaattacaaaatttgatcagtttgattttctcatcgatattgttccaagagatgaactgaaacctccaaagcgtcaggaggaggtgcgccagtctgtaactcctgccgagccagtccagtactatttcacgctggctcagcaacccaccgctgtccaagtccagggccagcagcaaggccagcagaccaccagctccacgaccaccatccagcctgggcagatcatcatcgcacagcctcagcagggccagaccacacctgtgacaatgcaggttggagaaggtcagcaggtgcagattgtccaggctcagccacagggtcaagcccaacaggcccagagtggcactggacagaccatgcaggtgatgcagcagatcatcactaacacaggagagatccagcagatcccggtgcagctgaatgccggccagctgcagtatatccgcttagcccagcctgtatcaggcactcaagttgtgcagggacagatccagacacttgccaccaatgctcaacagattacacagacagaggtccagcaaggacagcagcagttcagccagttcacagatggacagcagctctaccagatccagcaagtcaccatgcctgcgggccaggacctcgcccagcccatgttcatccagtcagccaaccagccctccgacgggcaggccccccaggtgaccggcgactgagggcctgagctggcaaggccaaggacacccaacacaatttttgccatacagccccaggcaatgggcacagccttcctccccagaggacccggccgacctcagcgcctcctgcaggctaggacactggtgcactacaccccatgcctgggggccgagattctccagcagaaagatgcaatattttttgtttcctttttttccatttttttctctaaggaatcaatatttcaatatgttgagtgtgtgtccaatgctatgaaattaaaatattaaataacatatttatggcattttcttg

SEQ ID NO: 20785 - DNA, 1714 bp, Homo sapiens
  source 1..1714: mol_type = unassigned DNA
atacattttcagttccaaaaaaatttgataacttctgttttgtacctaacttccactactacagtatgtggctctgagccagccaaagattcatgatctgttgactacacagatgtttgcgggctgatcatgcctgcacatctgtagttgggacagttcaaaatttaaaagcagactgcacagatggttctagacgtgctttttgaattgtgtacctttgtaatgttttggggggatatcagaggacagccagaatttgttaccagacttttaaatcgtacaggtctttgtactccaactaaacctacccatccattagcaagtgtacagagatatcgtcctggcaattgtgcatctttctcctttgaccttagcagtttgcatggcagattgtgccaagatgaggcctgtccagggacccatgcaataaaagttgtcgagatgtccacagaaggaggatttggtggtactagcagcagtgatgcccagcaaagcctacagtcgttctggcctcgggtcatggaagaaatccggaatttaacagtgaaagacttccgagtgcaggaactcccactggctcgtattaagaagattatgaaactggatgaagatgtgaagatgatcagtgcagaagcgcctgtactctttgccaaggcagcccagatttttatcacagagttgactcttcgagcctggattcacacagaagataacaagcgccggactctacagagaaatgatatcgccatggcaattacaaaatttgatcagtttgattttctcatcgatattgttccaagagatgaactgaaacctccaaagcgtcaggaggaggtgcgccagtctgtaactcctgccgagccagtccagtactatttcacgctggctcagcaacccaccgctgtccaagtccagggccagcagcaaggccagcagaccaccagctccacgaccaccatccagcctgggcagatcatcatcgcacagcctcagcagggccagaccacacctgtgacaatgcaggttggagaaggtcagcaggtgcagattgtccaggctcagccacagggtcaagcccaacaggcccagagtggcactggacagaccatgcaggtgatgcagcagatcatcactaacacaggagagatccagcagatcccggtgcagctgaatgccggccagctgcagtatatccgcttagcccagcctgtatcaggcactcaagttgtgcagggacagatccagacacttgccaccaatgctcaacagattacacagacagaggtccagcaaggacagcagcagttcagccagttcacagatggacagcagctctaccagatccagcaagtcaccatgcctgcgggccaggacctcgcccagcccatgttcatccagtcagccaaccagccctccgacgggcaggccccccaggtgaccggcgactgagggcctgagctggcaaggccaaggacacccaacacaatttttgccatacagccccaggcaatgggcacagccttcctccccagaggacccggccgacctcagcgcctcctgcaggctaggacactggtgcactacaccccatgcctgggggccgagattctccagcagaaagatgcaatattttttgtttcctttttttccatttttttctctaaggaatcaatatttcaatatgttgagtgtgtgtccaatgctatgaaattaa

SEQ ID NO: 20786 - DNA, 1950 bp, Homo sapiens
  source 1..1950: mol_type = unassigned DNA
cggcgtggccgccatcttgcttgtgcccccgcttcgcgcgcgctccgttctccgtgacgcacacttccccctcccctccgccgcgcctgggcctctgcattgcccgactccgtaggagcgcgggggcggctcctgctcttcctggactcctgagcagagttgtcgagatgtccacagaaggaggatttggtggtactagcagcagtgatgcccagcaaagcctacagtcgttctggcctcgggtcatggaagaaatccggaatttaacagtgaaagacttccgagtgcaggaactcccactggctcgtattaagaagattatgaaactggatgaagatgtgaagatgatcagtgcagaagcgcctgtactctttgccaaggcagcccagatttttatcacagagttgactcttcgagcctggattcacacagaagataacaagcgccggactctacagagaaatgatatcgccatggcaattacaaaatttgatcagtttgattttctcatcgatattgttccaagagatgaactgaaacctccaaagcgtcaggaggaggtgcgccagtctgtaactcctgccgagccagtccagtactatttcacgctggctcagcaacccaccgctgtccaagtccagggccagcagcaaggccagcagaccaccagctccacgaccaccatccagcctgggcagatcatcatcgcacagcctcagcagggccagaccacacctgtgacaatgcaggttggagaaggtcagcaggtgcagattgtccaggctcagccacagggtcaagcccaacaggcccagagtggcactggacagaccatgcaggtgatgcagcagatcatcactaacacaggagagatccagcagatcccggtgcagctgaatgccggccagctgcagtatatccgcttagcccagcctgtatcaggcactcaagttgtgcagggacagatccagacacttgccaccaatgctcaacagattacacagacagaggtccagcaaggacagcagcagttcagccagttcacagatggacagcagctctaccagatccagcaagtcaccatgcctgcgggccaggacctcgcccagcccatgttcatccagtcagccaaccagccctccgacgggcaggccccccaggtgaccggcgactgagggcctgagctggcaaggccaaggacacccaacacaatttttgccatacagccccaggcaatgggcacagccttcctccccagaggacccggccgacctcagcgcctcctgcaggctaggacactggtgcactacaccccatgcctgggggccgagattctccagcagaaagatgcaatattttttgtttcctttttttccatttttttctctaaggaatcaatatttcaatatgttgagtgtgtgtccaatgctatgaaattaaaatattaaataacatatttatggcattttcttgaagagtgtggttgaagaaatatttctccttttgtttttcttttttttttgtttgttactgccacttctttttaggagcaaatctccccaggggtgtacggtatttcttgactctgggaacagctgctacccccaagacttgccacgttgttctgccctcagatggaattaggtgaatgtgtgtagctgctttttcactcgtggtcctctccccatcccttgctctgaccccagagctctgtgtatttgcatccagaggccatggaaacattctttgcatttaagagacagatttattccctgtggagagtgggtggattcattgccacactcttttctcccagggacccaggaaactaggactttgtgtgtttgctgcccacctcccttttattttttaaatgcattaaaaactgtgctagtctcctttgcatggacttcaagctgcatgaaatgcaataaatctcattttagataa

SEQ ID NO: 20787 - DNA, 650 bp, Homo sapiens
  source 1..650: mol_type = unassigned DNA
ccgccatcttgcttgtgcccccgcttcgcgcgcgctccgttctccgtgacgcacacttccccctcccctccgccgcgcctgggcctctgcattgcccgactccgtaggagcgcgggggcggctcctgctcttcctggactcctgagcagaggatcttgctctgctgttcctgctcaggctggagtgcagtggcgcaatcatggctcactgcaggcttgaccacccaggctcaagcagtcctcccgcctcagcctcttgtcgagatgtccacagaaggaggatttggtggtactagcagcagtgatgcccagcaaagcctacagtcgttctggcctcgggtcatggaagaaatccggaatttaacagtgaaagacttccgagtgcaggaactcccactggctcgtattaagaagattatgaaactggatgaagatgtgaagatgatcagtgcagaagcgcctgtactctttgccaaggcagcccagatttttatcacagagttgactcttcgagcctggattcacacagaagataacaagcgccggactctacagagaaatgatatcgccatggcaattacaaaatttgatcagtttgattttctcatcgatattgttccaagagatgaactgaaacctccaaagcgtcag

SEQ ID NO: 20788 - DNA, 1911 bp, Homo sapiens
  source 1..1911: mol_type = unassigned DNA
cgcgcgcgctccgttctccgtgacgcacacttccccctcccctccgccgcgcctgggcctctgcattgcccgactccgtaggagcgcgggggcggctcctgctcttcctggactcctgagcagagttgtcgagatgtccacagaaggaggatttggtggtactagcagcagtgatgcccagcaaagcctacagtcgttctggcctcgggtcatggaagaaatccggaatttaacagtgaaagacttccgagtgcaggaactcccactggctcgtattaagaagattatgaaactggatgaagatgtgaagatgatcagtgcagaagcgcctgtactctttgccaaggcagcccagatttttatcacagagttgactcttcgagcctggattcacacagaagataacaagcgccggactctacagagaaatgatatcgccatggcaattacaaaatttgatcagtttgattttctcatcgatattgttccaagagatgaactgaaacctccaaagcgtcaggaggaggtgcgccagtctgtaactcctgccgagccagtccagtactatttcacgctggctcagcaacccaccgctgtccaagtccagggccagcagcaaggccagcagaccaccagctccacgaccaccatccagcctgggcagatcatcatcgcacagcctcagcagggccagaccacacctgtgacaatgcaggttggagaaggtcagcaggtgcagattgtccaggctcagccacagggtcaagcccaacaggcccagagtggcactggacagaccatgcaggtgatgcagcagatcatcactaacacaggagagatccagcagatcccggtgcagctgaatgccggccagctgcagtatatccgcttagcccagcctgtatcaggcactcaagttgtgcagggacagatccagacacttgccaccaatgctcaacagattacacagacagaggtccagcaaggacagcagcagttcagccagttcacagatggacagctctaccagatccagcaagtcaccatgcctgcgggccaggacctcgcccagcccatgttcatccagtcagccaaccagccctccgacgggcaggccccccaggtgaccggcgactgagggcctgagctggcaaggccaaggacacccaacacaatttttgccatacagccccaggcaatgggcacagccttcctccccagaggacccggccgacctcagcgcctcctgcaggctaggacactggtgcactacaccccatgcctgggggccgagattctccagcagaaagatgcaatattttttgtttcctttttttccatttttttctctaaggaatcaatatttcaatatgttgagtgtgtgtccaatgctatgaaattaaaatattaaataacatatttatggcattttcttgaagagtgtggttgaagaaatatttctccttttgtttttcttttttttttgtttgttactgccacttctttttaggagcaaatctccccaggggtgtacggtatttcttgactctgggaacagctgctacccccaagacttgccacgttgttctgccctcagatggaattaggtgaatgtgtgtagctgctttttcactcgtggtcctctccccatcccttgctctgaccccagagctctgtgtatttgcatccagaggccatggaaacattctttgcatttaagagacagatttattccctgtggagagtgggtggattcattgccacactcttttctcccagggacccaggaaactaggactttgtgtgtttgctgcccacctcccttttattttttaaatgcattaaaaactgtgctagtctcctttgcatggacttcaagctgcatgaaatgcaataaatctcattttagat

SEQ ID NO: 20789 - DNA, 433 bp, Homo sapiens
  source 1..433: mol_type = unassigned DNA
agttgtcgagatgtccacagaaggaggatttggtggtactagcagcagtgatgcccagcaaagcctacagtcgttctggcctcgggtcatggaagaaatccggaatttaacagtgaaagacttccgagtgcaggaactcccactggctcgtattaagaagattatgaaactggatgaagatgtgaagatgatcagtgcagaagcgcctgtactctttgccaaggcagcccagatttttatcacagagttgactcttcgagcctggattcacacagaagataacaagcgccggactctacagagaaatgatatcgccatggcaattacaaaatttgatcagtttgattttctcatcgatattgttccaagagatgaactgaaacctccaaagcgtcaggaggtgcgccagtctgtaactcctgccgagccagtc

SEQ ID NO: 20790 - DNA, 293 bp, Homo sapiens
  source 1..293: mol_type = unassigned DNA
ttgtcgagatgtccacagaaggaggatttggtggtactagcagcagtgatgcccagcaaagcctacagtcgttctggcctcgggtcatggaagaaatccggaatttaacagtgatgatcagtgcagaagcgcctgtactctttgccaaggcagcccagatttttatcacagagttgactcttcgagcctggattcacacagaagataacaagcgccggactctacagagaaatgatatcgccatggcaattacaaaatttgatcagtttgattttctcatcgatattgttcca

SEQ ID NO: 20791 - DNA, 525 bp, Homo sapiens
  source 1..525: mol_type = unassigned DNA
ctttttctcttttttcctggtgagaagaacttgtgtccttcaaaagaagattacctttgtctttcgaagtcaggaatttataaaaagagtttgctggatggaaaaatcataaaggccataactctaaaacctaatgtaaagaagaacagttagagctgtccaaagatgggaaagaatgtcttaccagtctttgtactccaactaaacctacccatccattagcaagtgtacagagatatcgtcctggcaattgtgcatctttctcctttgaccttagcagtttgcatggcagattgtgccaagatgaggcctgtccagggacccatgcaataaaagttgtcgagatgtccacagaaggaggatttggtggtactagcagcagtgatgcccagcaaagcctacagtcgttctggcctcgggtcatggaagaaatccggaatttaacagtgaaagacttccgagtgcaggaactcccactggctcgtattaagaagattatgaaactggatgaagatgtgaagatga

SEQ ID NO: 20792 - DNA, 574 bp, Homo sapiens
  source 1..574: mol_type = unassigned DNA
atgttgtgctcttgcctggcccgctgctgtcgccgccgccgcgctcgtggggtccgtgtgcctcgtcggcccggcccgcgggctttctcccattggcggaaggcgacggcgggggggctcgctcgtgattggtcggtggcggggaggccgcggacctggcaccttattggacgcgccagctccggtctaggggacacacaaacacaggatactgccagaaactgggcaagaggctgtttgtgaatctcagaaggcacccggtctttgtactccaactaaacctacccatccattagcaagtgtacagagatatcgtcctggcaattgtgcatctttctcctttgaccttagcagtttgcatggcagattgtgccaagatgaggcctgtccagggacccatgcaataaaagttgtcgagatgtccacagaaggaggatttggtggtactagcagcagtgatgcccagcaaagcctacagtcgttctggcctcgggtcatggaagaaatccggaatttaacagtgaaagacttccgagtgcaggaactcccactggctcgtattaagaagattatg

SEQ ID NO: 20793 - DNA, 2692 bp, Homo sapiens
  source 1..2692: mol_type = unassigned DNA
agtcagaggttaacggaaaacggaagctggctggctgagaagaagcttccgttagtcctaccttgaagagaaaagagccagataaagagaaagattaaaagtatgagaaaatacagaagccactggtctcagggagacagagaaggataccaaagaagaagtaactattatgaggggccacacaccagccactcaagccctgcggaccggacacgtgaggaggtagtgacgccgacactgccagaacacactgctacaaggtcccagatggccacgtctctggattttaaaacttatgtagatcaggcatgtagagctgctgaggagtttgtcaatatttactatgagacaatggataaaagaagacgggcactaaccaggctgtatctggacaaggccaccttaatatggaatggaaatgctgtttcagggctggatgccctaaataatttttttgacacattgccttctagtgagttccaggtcaatatgttagattgccaaccagttcatgagcaagcaactcagtcccaaactacagttcttgttgtgaccagtggaactgtgaagtttgatggaaacaaacaacatttcttcaaccagaacttcctgctgactgctcagtccactcccaacaatactgtgtggaagattgcaagtgattgcttccgttttcaagattggtctagtagttaaaggggcaaaagtccattctcatttggtccattagttccagcaattgaaatttatgtgaattattttgattgtagaagcactataatatgtgctgaaactaaatttctttaatattttctattcctgtcagcaccttttctagcagctgccagtttggagcattgccctctaagagctttaaaactatttttttacatgccttatatacattccactaatgacattcttataataatattaaacacatgatcttggtactaacatactcactgtgaacccagcctattgcaaaaataaaatctttttataatattatctatgggatgtcagcacaatataacactctgggaagaagtggagttttttggttattaggttaattttctagtaaaacacgttgcctgttttcagttaacactggtaatgccattttaatatatggctttttcaaatcagttcagtgaaaatagtacagatttaggtttacataactactctgacatactggaattgcatatagagatgttcagtggtcgtttttcattttaagtaatttttgttttggcatttttttgtgtgaagtaaattaatcaactagagaggtgcaaaacgttctcagttgatatctgagtattgggtgcatttggtggcttaaaagcaaagcttcctaaaaagatttttcttggcagctccaggtctatacatttaggtaatgaatggtagtagaactaatagctttaacaggagaatagggaatgagaaatagaaatccaaggctgaagccaaaagtaaggagggtggccaaatggtaaactattggtacttgttttctacctcctaaaaatgtagcttatttttaggatttaaatcactaagtaaataagtatccttgccaagtgatcatgagtgtcatttttgttctaagactaatatttttagatctttttacttcacctcatacttatcaccaatgtatatctccatttattcaataacttactggggtaaaataacagcaataaacctaaccttttaacagggtctaacatgagagttggagtcaaagccattgttatcttttggtgacacccttaaattttaagtcttccagtcttccatgtgaactttaggcccaaagtttcttatgtatcacacatcccccaaataagtgattttttcccagtgctttgtactgtcaactgcattatctttaattatttaaaggtagaattatttaattttgtgatttgttcttccatatgacattgagcaaatagatctgtttcaaaatatgttcccgctatgtggataactcttctttttaaaaagaaaatagagaatagcaaatcttcatgataatcctcaaaagaacaaaatgcttaactttatctcttaatttctaaaggtaaataacctaggttcagcttttgcttaaacattaaatatcttttccattttttaatgtttgtaagctagatatgccagctttgtttctacattgcaaccaaaaactgtttcttttcacttaattataaaaccagtaattcatttactcttgcccaaaactatacactgtatttctgttatagtaacaaaatagagttatgtagaattgtatggaactcaaatttaaaccatgctttcttgtagtactgattgaaacttacacgttttattctactcatagtgagcttattcttattttggattgattttccaaaaccacagcttcagcagcaacaatcagaatgtccaaatgctgtcctttcccttacagagaagaacaatggtaactaaaagctgcatataactagcaataactacattgaacggtgtgcattgttcatgattgttgtgttttaagacttgtatataaactgctttttccaaactctgtataacttttaaatggctggaactactcgtataaggactagactgtatttttgacatgctcctatttttgtaacttgaaaaaataaaattttgccttgtg

SEQ ID NO: 20794 - DNA, 1085 bp, Homo sapiens
  source 1..1085: mol_type = unassigned DNA
gtgacgaatcacgtcccggctctctgcactgcggggcggggcccacgctttgctgcccgccctgccggccccacccccagcctggttagcagtcgctttctgatcccggaaaggaccctgagctgggaaatagcgagaggcggggatgttggggattttaaaacttatgtagatcaggcatgtagagctgctgaggagtttgtcaatatttactatgagacaatggataaaagaagacgggcactaaccaggctgtatctggacaaggccaccttaatatggaatggaaatgctgtttcagggctggatgccctaaataatttttttgacacattgccttctagtgagttccaggtcaatatgttagattgccaaccagttcatgagcaagcaactcagtcccaaactacagttcttgttgtgaccagtggaactgtgaagtttgatggaaacaaacaacatttcttcaaccagaacttcctgctgactgctcagtccactcccaacaatactgtgtggaagattgcaagtgattgcttccgttttcaagattggtctagtagttaaaggggcaaaagtccattctcatttggtccattagttccagcaattgaaatttatgtgaattattttgattgtagaagcactataatatgtgctgaaactaaatttctttaatattttctattcctgtcagcaccttttctagcagctgccagtttggagcattgccctctaagagctttaaaactatttttttacatgccttatatacattccactaatgacattcttataataatattaaacacatgatcttggtactaacatactcactgtgaacccagcctattgcaaaaataaaatctttttataatattatctatgggatgtcagcacaatataacactctgggaagaagtggagttttttggttattaggttaattttctagtaaaacacgttgcctgttttcagttaacactggtaatgccattttaatatatggctttttcaaatcagttcagtgaaaatagtacagatttaggtttacataactactctgacatactggaattgcatat

SEQ ID NO: 20795 - DNA, 2562 bp, Homo sapiens
  source 1..2562: mol_type = unassigned DNA
gtggaaaattttgtgcgtttggcgggtttcgctctcttcataagtattgatcattccgcagccctgcggaccggacacgtgaggaggtagtgacgccgacactgccagaacacactgctacaaggtcccagatggccacgtctctggattttaaaacttatgtagatcaggcatgtagagctgctgaggagtttgtcaatatttactatgagacaatggataaaagaagacgggcactaaccaggctgtatctggacaaggccaccttaatatggaatggaaatgctgtttcagggctggatgccctaaataatttttttgacacattgccttctagtgagttccaggtcaatatgttagattgccaaccagttcatgagcaagcaactcagtcccaaactacagttcttgttgtgaccagtggaactgtgaagtttgatggaaacaaacaacatttcttcaaccagaacttcctgctgactgctcagtccactcccaacaatactgtgtggaagattgcaagtgattgcttccgttttcaagattggtctagtagttaaaggggcaaaagtccattctcatttggtccattagttccagcaattgaaatttatgtgaattattttgattgtagaagcactataatatgtgctgaaactaaatttctttaatattttctattcctgtcagcaccttttctagcagctgccagtttggagcattgccctctaagagctttaaaactatttttttacatgccttatatacattccactaatgacattcttataataatattaaacacatgatcttggtactaacatactcactgtgaacccagcctattgcaaaaataaaatctttttataatattatctatgggatgtcagcacaatataacactctgggaagaagtggagttttttggttattaggttaattttctagtaaaacacgttgcctgttttcagttaacactggtaatgccattttaatatatggctttttcaaatcagttcagtgaaaatagtacagatttaggtttacataactactctgacatactggaattgcatatagagatgttcagtggtcgtttttcattttaagtaatttttgttttggcatttttttgtgtgaagtaaattaatcaactagagaggtgcaaaacgttctcagttgatatctgagtattgggtgcatttggtggcttaaaagcaaagcttcctaaaaagatttttcttggcagctccaggtctatacatttaggtaatgaatggtagtagaactaatagctttaacaggagaatagggaatgagaaatagaaatccaaggctgaagccaaaagtaaggagggtggccaaatggtaaactattggtacttgttttctacctcctaaaaatgtagcttatttttaggatttaaatcactaagtaaataagtatccttgccaagtgatcatgagtgtcatttttgttctaagactaatatttttagatctttttacttcacctcatacttatcaccaatgtatatctccatttattcaataacttactggggtaaaataacagcaataaacctaaccttttaacagggtctaacatgagagttggagtcaaagccattgttatcttttggtgacacccttaaattttaagtcttccagtcttccatgtgaactttaggcccaaagtttcttatgtatcacacatcccccaaataagtgattttttcccagtgctttgtactgtcaactgcattatctttaattatttaaaggtagaattatttaattttgtgatttgttcttccatatgacattgagcaaatagatctgtttcaaaatatgttcccgctatgtggataactcttctttttaaaaagaaaatagagaatagcaaatcttcatgataatcctcaaaagaacaaaatgcttaactttatctcttaatttctaaaggtaaataacctaggttcagcttttgcttaaacattaaatatcttttccattttttaatgtttgtaagctagatatgccagctttgtttctacattgcaaccaaaaactgtttcttttcacttaattataaaaccagtaattcatttactcttgcccaaaactatacactgtatttctgttatagtaacaaaatagagttatgtagaattgtatggaactcaaatttaaaccatgctttcttgtagtactgattgaaacttacacgttttattctactcatagtgagcttattcttattttggattgattttccaaaaccacagcttcagcagcaacaatcagaatgtccaaatgctgtcctttcccttacagagaagaacaatggtaactaaaagctgcatataactagcaataactacattgaacggtgtgcattgttcatgattgttgtgttttaagacttgtatataaactgctttttccaaactctgtataacttttaaatggctggaactactcgtataaggactagactgtatttttgacatgctcctatttttgtaacttgaaaaaataaaattttgccttgtgacagat

SEQ ID NO: 20796 - DNA, 937 bp, Homo sapiens
  source 1..937: mol_type = unassigned DNA
cccaggcttgtcgttagaaaagtaggggactttcctgttgagtatcatgtttacaaaagcaaagtggcttttaaattttaaactaagtatcaaacaagtagataaggtggatgggagggatcttcaggaactgaagggaagtggaacttaagccctgcggaccggacacgtgaggaggtagtgacgccgacactgccagaacacactgctacaaggtcccagatggccacgtctctggattttaaaacttatgtagatcaggcatgtagagctgctgaggagtttgtcaatatttactatgagacaatggataaaagaagacgggcactaaccaggctgtatctggacaaggccaccttaatatggaatggaaatgctgtttcagggctggatgccctaaataatttttttgacacattgccttctagtgagttccaggtcaatatgttagattgccaaccagttcatgagcaagcaactcagtcccaaactacagttcttgttgtgaccagtggaactgtgaagtttgatggaaacaaacaacatttcttcaaccagaacttcctgctgactgctcagtccactcccaacaatactgtgtggaagattgcaagtgattgcttccgttttcaagattggtctagtagttaaaggggcaaaagtccattctcatttggtccattagttccagcaattgaaatttatgtgaattattttgattgtagaagcactataatatgtgctgaaactaaatttctttaatattttctattcctgtcagcaccttttctagcagctgccagtttggagcattgccctctaagagctttaaaactatttttttacatgccttatatacattccactaatgacattcttataataatattaaacacatgatcttggtactaacatactcactgtgaacccagcctat

SEQ ID NO: 20797 - DNA, 4676 bp, Homo sapiens
  source 1..4676: mol_type = unassigned DNA
gaagatggcggcgggggcgaggtgaggtgttggcagtggaaaggggttcgggctcggggggcggggggacgcggagcgatggcccgcgccggccgcaggggcggataaaaagccgtcgcgctgcgggagtgggcgggagggagagggggtgtctgagggccacaagagtatgacggggctgtacgagctggtgtggcgggtgctgcacgcgctgctctgtctgcaccgcacgctcacctcctggctccgcgttcggttcggcacctggaactggatctggcggcgctgctgccgcgccgcctctgccgcggtcctagcgccgctcggcttcacgctccgcaagcccccggcagtcggcaggaaccgccgtcaccaccggcacccgcgcggggggtcgtgcctggcagccgcacaccaccggatgcgctggcgcgcggacggtcgttccttggagaagctgcctgtgcatatgggcctggtgatcaccgaggtggagcaggaacccagcttctcggacatcgcgagcctcgtggtgtggtgtatggccgtgggcatctcctacattagcgtctacgaccaccaaggtattttcaaaagaaataattccagattgatggatgaaattttaaaacaacagcaagaacttctgggcctagattgttcaaaatactcaccagaatttgcaaatagtaatgacaaagatgatcaagttttaaattgccatttggcagtgaaggtgctgtctccggaagatggaaaagcagatattgtaagagctgctcaggacttttgccagttagtagcccagaagcaaaagagacccacagatttggatgtagatacgttagccagtttacttagttcaaatggttgtcctgatcctgatttagtattgaagttcggtcctgtggacagcacattaggctttcttccctggcacatcagattgactgagattgtctctttgccttcccacctaaacatcagttatgaggactttttctctgcccttcgtcaatatgcagcctgtgaacagcgtctgggaaagtagtggtcattggttgcataatttgatttgaggcttgtggaggaaaggaaccaagtgactctgatgtttacaaagcacctatgaaaccctgtacacacctagttcataatcctcataatttatcaacaaacacaaaaaagtgtcttacttgagagtgagtgtgtgtgtgtgcgtgtgcacgtgcacacatgtgcacgtttgtatgtatggaaataaacttataaatggggacgtattggagaaggaaatacatagacctacaactttgagcaaatagcagtgatgttttaggaactgaaatgtcacacttaaagtcttcagcccagctacttccctatttttgtggggagaagagggcctgattagaactgttctggttgtgtttggcgggaggggaataatttttgttcagtccttcttagtgaccaaactttaatttttaagaataatatattgacttactgaactgaagcattctgagttgaaaggagctccagaggagtggagttctgtgttgctcacatgttaaaatcttgctcaccttcagagcagagggaatacctatcttcagatatccgtccattttcatctcttaattgtagtcaaaagtatgacttgagagtgttgctctggtattctgggttctgaagtctggtattctggtattctgggttcaaaagtatgacttgagagtgttgctctggtattctgagagttgctctgtattctgggttctgaagattatttgaaaaataactcctactacattgaaatgcagacttaaaaatttaaacattggattaggcagtcaaaaaaaccaagcaagcataaaaggtcaataagttgtaatcttgatagtaaaggtggaaaacttattataaatggaaagaaagttttatttccttttttgtttgatgggcagtatgccatattatacccaaagttcttttaaaaaatatttccatcaaccatttttatttaaaataaacatttgagggaagttaccaaggcagcttttttcctcaaaagtaacctgttcctctttggaatagcacattttaggggcatggttaatacctgagatttttactcagtaaatcctgatggttactgtgtgtaaaatatctttaagtaggattgaaggcctctgtgggggaataaaatattaccaaagtctataaaaataaattttacatgttctcttttatgacagagagcagcactggttctgttatttttaaaatgaataattgatttcttgataggtgtttaatatttcttccctcactgctgattcttagatagaaaccattctttatatttgatagactgctttcagaaaacccttatcaacaagtgtacaatacttatctaaaactatacatttagaatggagcagtttaatactagatctcagaagttttgaaaaatagcaaagaagactggatttggaaagcatggtctacaattggttgttaaattctgaagctatgaagaataaatgtttcaactttggattatgaaaccccatttatgattttttaaatacacttgaaataaaaatgattaaactaaattttggtccagtgacattactttgcactgcataatccattatacgttgtacgactttttttttttgttttaatttattactgagagttttgtgtgaagctacagcatatctaaccagagaatttctgattccttatactgtgattatattatattgaggcatttgtagtgcagctgaagactgaatttatgccttttgtaaacatgataggtataaatgtcttataaacattctggagtatgtatagctttaatgaatgaaatttaatggacctgattaaaatgaagggatttaatcgttgttaaagttaagttagtcaaataaattacctactggaatatagcccaagccagtaaaggtttaatatttgcattttcgtgcttttattttctccttccattcataagtatatacttgaaagtacatctgtagcctatgatttgagtctcttgaagttctaggaagaggcaaactacaaactactaggattctgatttcagatgtagtcattccagaaccttctctttatgagttcacctgctagtacaatctccacaacttgaatggcattggttgttctgtaattcctgccaaaagcatcacaagttgtacatcatcaaggctccctttgcactcccaagaagaactggtaattttaaacaaaagtatgtgtctttatttgtattggaaaatactgtctttaaattgtttcttgttgacactccccacaatggaaaaattaccgaattaaacctgttttatggatggcagcttggagcatagcaagaagttggaggatttgaattccattcccagttctcattgtgttttgtttcttaaaactataataatcggttactgttataaagtttaaaaggtggttttaatgtgaatagcaaattctggtatatcgtgactaacgcttaagaatgcctgtctttgagaggaaggtgttataatattaatgaacagtgccaaatacactgtgcatatctgcaatttaatctttgaatgtatgttactggattagctccctcctcctgtgtgatggtaccatgcatagagtcaatcaaatccttgtgatgttttgtatggactttgacaatatgtaaataatgtgtaaagccagtttttatgattaaggaatcaaatttattgaattttattattgaaagttgaaacttaacatgtatgaacaaaaaccaataaaagaatatactcttttcattgactatagtattatgtgaatgctacatttgttctgaacacttaggggctgcaaaaatgtaataagaaatgcatatgactagatagcaatagtgttttttttagatggtatgctcttgattgaaatatattctcacttttaccaggttaaacatttggaatcttataatgttacttgctttttgatagataatagtgaaataaattcagctttgccattgctggagttgtcaaaattccacagtaattaaaatttgaatttttaccgaatatgaaatttccaaattaaaaacgtatatgtgtactcttttaaaaaggaatttgatagttcttgtcaaatgagaaaatttaaaggtaagagttatggtttgtcttatgctgcatagactattcacctcctaacttgaaggtctaatcataagacaattgtttttttgtgcatagttttcatctaaaattaagtttaccaaaggcaaataactgcttactaggaacttcctttagcaaaaattactataaagttcaggacagtttgaaataaaacccaggaaacaagattaatgtgagcagttctccaagatcctaactggtgggacataaactatgatgcaatggataggaaaaggtagtgcaaaaagaatttcttaaggtttaaaaaatacacttttcattataggaaaaagaagattcagagaaacaaaggaatgtaaccttattgattacatttttggtgatcaccgagaattttttgtactatattttaaaaaatgtattctactgtaacaagttaataaagagattttttaaaaaactataaactagaaa

SEQ ID NO: 20798 - DNA, 3123 bp, Homo sapiens
  source 1..3123: mol_type = unassigned DNA
aatcttccagggtccactgggcaggcctgcaaaataaggcccctagaaactccctgaggttttcaagtcttctccctctcctcggaattttttccccttcattcgcattacttttattctgacggaaacggcgcgggctaggccccaggaggggcgcatttcaggtgcaactggcccggcgatcgcggcgggcaacccctacgaggcccccggttgactaggagctggcggtccgagctgtggcttggaagaccgacgcgatgaagcccagacctgcagggttcgtggataataaactcaagcagcgagtcatccagtaccttaccagtaacaaatgtggcaaatatgtggacattggagtcttagcgtctgatttacaaagagtgtacagtatagactatggtcgaagaaaaagaaatgcttttaggattcaggtagaaaaagtatttagcataattagtagtgagaaggaacttaagaatttaacagaattagaagatgaacatttggcaaaaagggcaagacaaggtgaagaggataatgagtatactgaaagctattctgatgatgattcaagtatggaagactacccagatccacagtcagcaaatcacatgaacagttccctgctgtctttatatcggaaaggaaatcctgattctgtttcaaatactcctgagatggagcaaagagaaaccacctcttcaacaccacggataagttccaaaacaggctccattcccttgaagacccctgccaaagattctgaaggaggatggtttattgacaaaaccccaagtgtaaagaaagacagttttttcttggacctgtcatgtgagaaaagtaatcctaagaagccaataactgagatacaggattcaaaagattcttctcttttggagagtgatatgaaacggaaaggcaagctaaagaataaaggaagcaaaaggaagaaagaagatcttcaggaagtagatggagaaattgaagctgtcctgcaaaagaaagctaaagccagggggttagaattccagatctccaacgtgaagtttgaagatgtgggaggcaatgatatgacattaaaagaggtctgcaagatgctcatacacatgcgtcacccggaggtgtaccaccacctgggcgtcgtgccccctcgtggagttctccttcatggaccaccaggctgtgggaagacattacttgcacatgcaattgctggggaacttgacctgccaattttgaaagtggctgctccagagattgtgtctggagtatccggagagtctgagcagaagctgagagaactatttgagcaagctgtgtcaaatgcaccatgtatcattttcattgatgaaattgatgctattacccccaaaagagaagtggcttcaaaagatatggaacgaagaattgtagcccaactcctaacctgcatggatgatctgaataatgtggctgctacagcccgggtcctagttattggagctactaatcgaccagactcgttagaccctgctttgagacgtgcgggaaggttcgaccgagaaatatgcctaggtatcccagatgaagcatccagggaaagaatacttcaaacattgtgcagaaaactgaggcttcctcaagcttttgatttctgtcacttagcacacctaactccaggctttgttggtgctgatctcatggcactgtgccgagaggcagcaatgtgtgcagtcaatagagtcttaatgaagctacaggaacagcagaagaaaaatcctgaaatggaagatttgccatctaaaggagtccaggaggaaaggctgggaactgagcccacttctgaaacacaggatgaattacaaaggctgctggggttgctaagagaccaagatcccctctcagaggagcagatgcaaggactgtgcattgaactgaatgatttcattgttgctctatcctcagtccaaccctctgccaaaagggaaggctttgtcactgtccctaatgtgacatgggcagatattggtgccctggaagacattagagaggagctcaccatggcaatattggcaccagtacgcaacccagaccagttcaaagctcttggattggtgactccagctggggtcctccttgctggtcctcctggctgtgggaagactctgctggcgaaggctgttgcaaatgagtccggactaaattttatatctgtcaagggccccgaattactaaacatgtatgttggtgagagtgaacgtgctgtgcgacaagtttttcaacgagccaagaactcagcaccctgtgtgatattctttgatgaagtggatgctttatgtcctcgaagatcagaccgagagacaggggcaagtgtccgagtggtgaatcagctacttacagagatggatggtctggaagcacgccagcaggtttttattatggcagccactaacaggccagatataattgaccctgcaatcctgcgcccgggccgcctggacaaaacactgtttgtgggtttaccgccccctgcagatcgccttgccatcttaaaaactatcacaaaaaatggtaccaaaccaccactggatgcagatgtaaatttggaagcaattgctggtgaccttcgctgtgattgctatacgggcgcagatctctctgctttggtacgagaagcttctatctgtgccctgagacaggaaatggcaagacagaagagtggaaatgaaaaaggtgaactcaaggttagtcataagcattttgaagaagctttcaagaaagtaagatcatctatatcaaaaaaggatcaaatcatgtatgaacgtttgcaggagtccctcagccggtgatgtctccagcagccggcttagaggagctagcccatcaagccggcagagaatcccccacacgctctgaaggacccactttcagctggacacaggcgcggcctcatgtaaacattttattttcaaatgaatgaggccaagctgaagctgaagctgaagattcttcccatctggccagccttgtgtgaaaatgccttcttcctctttaagaaaaaggacaatttttaaactgctgaaataaaatgactgttacatttttcaaataaaacttttactttgaactattttgactata

SEQ ID NO: 20799 - DNA, 2431 bp, Homo sapiens
  source 1..2431: mol_type = unassigned DNA
aagaccgacgcgatgaagcccagacctgcagggttcgtggataataaactcaagcagcgagtcatccagtatagactatggtcgaagaaaaagaaatgcttttaggattcaggtagaaaaagtatttagcataattagtagtgagaaggaacttaagaatttaacagaattagaagatgaacatttggcaaaaagggcaagacaaggtgaagaggataatgagattcaaaagattcttctcttttggagagtgatatgaaacggaaaggcaagctaaagaataaaggaagcaaaaggaagaaagaagatcttcaggaagtagatggagaaattgaagctgtcctgcaaaagaaagctaaagccagggggttagaattccagatctccaacgtgaagtttgaagatgtgggaggcaatgatatgacattaaaagaggtctgcaagatgctcatacacatgcgtcacccggaggtgtaccaccacctgggcgtcgtgccccctcgtggagttctccttcatggaccaccaggctgtgggaagacattacttgcacatgcaattgctggggctgagtgcagtggcatgatcacagctcactgcagctttgacttctcaggctcaaatgatcctcctgcctcagcctcacaggaacttgacctgccaattttgaaagtggctgctccagagattgtgtctggagtatccggagagtctgagcagaagctgagagaactatttgagcaagctgtgtcaaatgcaccatgtatcattttcattgatgaaattgatgctattacccccaaaagagaagtggcttcaaaagatatggaacgaagaattgtagcccaactcctaacctgcatggatgatctgaataatgtggctgctacagcccgggtcctagttattggagctactaatcgaccagactcgttagaccctgctttgagacgtgcgggaaggttcgaccgagaaatatgcctaggtatcccagatgaagcatccagggaaagaatacttcaaacattgtgcagaaaactgaggcttcctcaagcttttgatttctgtcacttagcacacctaactccaggctttgttggtgctgatctcatggcactgtgccgagaggcagcaatgtgtgcagtcaatagagtcttaatgaagctacaggaacagcagaagaaaaatcctgaaatggaagatttgccatctaaaggagtccaggaggaaaggctgggaactgagcccacttctgaaacacaggatgaattacaaaggctgctggggttgctaagagaccaagatcccctctcagaggagcagatgcaaggactgtgcattgaactgaatgatttcattgttgctctatcctcagtccaaccctctgccaaaagggaaggctttgtcactgtccctaatgtgacatgggcagatattggtgccctggaagacattagagaggagctcaccatggcaatattggcaccagtacgcaacccagaccagttcaaagctcttggattggtgactccagctggggtcctccttgctggtcctcctggctgtgggaagactctgctggcgaaggctgttgcaaatgagtccggactaaattttatatctgtcaagggccccgaattactaaacatgtatgttggtgagagtgaacgtgctgtgcgacaagtttttcaacgagccaagaactcagcaccctgtgtgatattctttgatgaagtggatgctttatgtcctcgaagatcagaccgagagacaggggcaagtgtccgagtggtgaatcagctacttacagagatggatggtctggaagcacgccagcaggtttttattatggcagccactaacaggccagatataattgaccctgcaatcctgcgcccgggccgcctggacaaaacactgtttgtgggtttaccgccccctgcagatcgccttgccatcttaaaaactatcacaaaaaatggtaccaaaccaccactggatgcagatgtaaatttggaagcaattgctggtgaccttcgctgtgattgctatacgggcgcagatctctctgctttggtacgagaagcttctatctgtgccctgagacaggaaatggcaagacagaagagtggaaatgaaaaaggtgaactcaaggttagtcataagcattttgaagaagctttcaagaaagtaagatcatctatatcaaaaaaggatcaaatcatgtatgaacgtttgcaggagtccctcagccggtgatgtctccagcagccggcttagaggagctagcccatcaagccggcagagaatcccccacacgctctgaaggacccactttcagctggacacaggcgcggcctcatgtaaacattttattttcaaatgaatgaggccaagctgaagctgaagctgaagattcttcccatctggc

SEQ ID NO: 20800 - DNA, 2289 bp, Homo sapiens
  source 1..2289: mol_type = unassigned DNA
ggaagaccgacgcgatgaagcccagacctgcagggttcgtggataataaactcaagcagcgagtcatccagtatagactatggtcgaagaaaaagaaatgcttttaggattcaggtagaaaaagtatttagcataattagtagtgagaaggaacttaagaatttaacagaattagaagatgaacatttggcaaaaagggcaagacaaggtgaagaggataatgagtatactgaaagctattctgatgatgattcaagtatggaagactacccagatccacagtcagcaaatcacatgaacagttccctgctgtctttatatcggaaaggaaatcctgattctgtttcaaatactcctgagatggagcaaagagaaaccacctcttcaacaccacggataagttccaaaacaggctccattcccttgaagacccctgccaaagattctgaaggaggatggtttattgacaaaaccccaagtgtaaagaaagacagttttttcttggacctgtcatgtgagaaaagtaatcctaagaagccaataactgagatacaggattcaaaagattcttctcttttggagagtgatatgaaacggaaaggcaagctaaagaataaaggaagcaaaaggaagaaagaagatcttcaggaagtagatggagaaattgaagctgtcctgcaaaagaaagctaaagccagggggttagaattccagatctccaacgtgaagtttgaagatgtgggaggcaatgatatgacattaaaagaggtctgcaagatgctcatacacatgcgtcacccggaggtgtaccaccacctgggcgtcgtgccccctcgtggagttctccttcatggaccaccaggctgtgggaagacattacttgcacatgcaattgctggggaacttgacctgccaattttgaaagtggctgctccagagattgtgtctggagtatccggagagtctgagcagaagctgagagaactatttgagcaagctgtgtcaaatgcaccatgtatcattttcattgatgaaattgatgctattacccccaaaagagaagtggcttcaaaagatatggaacgaagaattgtagcccaactcctaacctgcatggatgatctgaataatgtggctgctacagcccgggtcctagttattggagctactaatcgaccagactcgttagaccctgctttgagacgtgcgggaaggttcgaccgagaaatatgcctaggtatcccagatgaagcatccagggaaagaatacttcaaacattgtgcagaaaactgaggcttcctcaagcttttgatttctgtcacttagcacacctaactccaggctttgttggtgctgatctcatggcactgtgccgagaggcagcaatgtgtgcagtcaatagagtcttaatgaagctacaggaacagcagaagaaaaatcctgaaatggaagatttgccatctaaaggagtccaggaggaaaggctgggaactgagcccacttctgaaacacaggatgaattacaaaggctgctggggttgctaagagaccaagatcccctctcagaggagcagatgcaaggactgtgcattgaactgaatgatttcattgttgctctatcctcagtccaaccctctgccaaaagggaaggctttgtcactgtccctaatgtgacatgggcagatattggtgccctggaagacattagagaggagctcaccatggcaatattggcaccagtacgcaacccagaccagttcaaagctcttggattggtgactccagctggggtcctccttgctggtcctcctggctgtgggaagactctgctggcgaaggctgttgcaaatgagtccggactaaattttatatctgtcaagggccccgaattactaaacatgtatgttggtgagagtgaacgtgctgtgcgacaagtttttcaacgagccaagaactcagcaccctgtgtgatattctttgatgaagtggatgctttatgtcctcgaagatcagaccgagagatataattgaccctgcaatcctgcgcccgggccgcctggacaaaacactgtttgtgggtttaccgccccctgcagatcgccttgccatcttaaaaactatcacaaaaaatggtaccaaaccaccactggatgcagatgtaaatttggaagcaattgctggtgaccttcgctgtgattgctatacgggcgcagatctctctgctttggtacgagaagcttctatctgtgccctgagacaggaaatggcaagacagaagagtggaaatg

SEQ ID NO: 20801 - DNA, 2832 bp, Homo sapiens
  source 1..2832: mol_type = unassigned DNA
ctaggagctggcggtccgagctgtggcttggaagaccgacgcgatgaagcccagacctgcagggttcgtggataataaactcaagcagcgagtcatccagtatagactatggtcgaagaaaaagaaatgcttttaggattcaggtagaaaaagtatttagcataattagtagtgagaaggaacttaagaatttaacagaattagaagatgaacatttggcaaaaagggcaagacaaggtgaagaggataatgagtatactgaaagctattctgatgatgattcaagtatggaagactacccagatccacagtcagcaaatcacatgaacagttccctgctgtctttatatcggaaaggaaatcctgattctgtttcaaatactcctgagatggagcaaagagaaaccacctcttcaacaccacggataagttccaaaacaggctccattcccttgaagacccctgccaaagattctgaaggaggatggtttattgacaaaaccccaagtgtaaagaaagacagttttttcttggacctgtcatgtgagaaaagtaatcctaagaagccaataactgagatacaggattcaaaagattcttctcttttggagagtgatatgaaacggaaaggcaagctaaagaataaaggaagcaaaaggaagaaagaagatcttcaggaagtagatggagaaattgaagctgtcctgcaaaagaaagctaaagccagggggttagaattccagatctccaacgtgaagtttgaagatgtgggaggcaatgatatgacattaaaagaggtctgcaagatgctcatacacatgcgtcacccggaggtgtaccaccacctgggcgtcgtgccccctcgtggagttctccttcatggaccaccaggctgtgggaagacattacttgcacatgcaattgctggggaacttgacctgccaattttgaaagtggctgctccagagattgtgtctggagtatccggagagtctgagcagaagctgagagaactatttgagcaagctgtgtcaaatgcaccatgtatcattttcattgatgaaattgatgctattacccccaaaagagaagtggcttcaaaagatatggaacgaagaattgtagcccaactcctaacctgcatggatgatctgaataatgtggctgctacagcccgggtcctagttattggagctactaatcgaccagactcgttagaccctgctttgagacgtgcgggaaggttcgaccgagaaatatgcctaggtatcccagatgaagcatccagggaaagaatacttcaaacattgtgcagaaaactgaggcttcctcaagcttttgatttctgtcacttagcacacctaactccaggctttgttggtgctgatctcatggcactgtgccgagaggcagcaatgtgtgcagtcaatagagtcttaatgaagctacaggaacagcagaagaaaaatcctgaaatggaagatttgccatctaaaggagtccaggaggaaaggctgggaactgagcccacttctgaaacacaggatgaattacaaaggctgctggggttgctaagagaccaagatcccctctcagaggagcagatgcaaggactgtgcattgaactgaatgatttcattgttgctctatcctcagtccaaccctctgccaaaagggaaggctttgtcactgtccctaatgtgacatgggcagatattggtgccctggaagacattagagaggagctcaccatggcaatattggcaccagtacgcaacccagaccagttcaaagctcttggattggtgactccagctggggtcctccttgctggtcctcctggctgtgggaagactctgctggcgaaggctgttgcaaatgagtccggactaaattttatatctgtcaagggccccgaattactaaacatgtatgttggtgagagtgaacgtgctgtgcgacaagtttttcaacgagccaagaactcagcaccctgtgtgatattctttgatgaagtggatgctttatgtcctcgaagatcagaccgagagacaggggcaagtgtccgagtggtgaatcagctacttacagagatggatggtctggaagcacgccagcaggtttttattatggcagccactaacaggccagatataattgaccctgcaatcctgcgcccgggccgcctggacaaaacactgtttgtgggtttaccgccccctgcagatcgccttgccatcttaaaaactatcacaaaaaatggtaccaaaccaccactggatgcagatgtaaatttggaagcaattgctggtgaccttcgctgtgattgctatacgggcgcagatctctctgctttggtacgagaagcttctatctgtgccctgagacaggaaatggcaagacagaagagtggaaatgaaaaaggtgaactcaaggttagtcataagcattttgaagaagctttcaagaaagtaagatcatctatatcaaaaaaggatcaaatcatgtatgaacgtttgcaggagtccctcagccggtgatgtctccagcagccggcttagaggagctagcccatcaagccggcagagaatcccccacacgctctgaaggacccactttcagctggacacaggcgcggcctcatgtaaacattttattttcaaatgaatgaggccaagctgaagctgaagctgaagattcttcccatctggccagccttgtgtgaaaatgccttcttcctctttaagaaaaaggacaatttttaaactgctgaaataaaatgactgttacatttttcaaataaaacttttactttgaactattttgactata

SEQ ID NO: 20802 - DNA, 2566 bp, Homo sapiens
  source 1..2566: mol_type = unassigned DNA
agaccgacgcgatgaagcccagacctgcagggttcgtggataataaactcaagcagcgagtcatccagtaccttaccagtaacaaatgtggcaaatatgtggacattggagtcttagcgtctgatttacaaagagtgtacagtatagactatggtcgaagaaaaagaaatgcttttaggattcaggtagaaaaagtatttagcataattagtagtgagaaggaacttaagaatttaacagaattagaagatgaacatttggcaaaaagggcaagacaaggtgaagaggataatgagtatactgaaagctattctgatgatgattcaagtatggaagactacccagatccacaggattcaaaagattcttctcttttggagagtgatatgaaacggaaaggcaagctaaagaataaaggaagcaaaaggaagaaagaagatcttcaggaagtagatggagaaattgaagctgtcctgcaaaagaaagctaaagccagggggttagaattccagatctccaacgtgaagtttgaagatgtgggaggcaatgatatgacattaaaagaggtctgcaagatgctcatacacatgcgtcacccggaggtgtaccaccacctgggcgtcgtgccccctcgtggagttctccttcatggaccaccaggctgtgggaagacattacttgcacatgcaattgctggggaacttgacctgccaattttgaaagtggctgctccagagattgtgtctggagtatccggagagtctgagcagaagctgagagaactatttgagcaagctgtgtcaaatgcaccatgtatcattttcattgatgaaattgatgctattacccccaaaagagaagtggcttcaaaagatatggaacgaagaattgtagcccaactcctaacctgcatggatgatctgaataatgtggctgctacagcccgggtcctagttattggagctactaatcgaccagactcgttagaccctgctttgagacgtgcgggaaggttcgaccgagaaatatgcctaggtatcccagatgaagcatccagggaaagaatacttcaaacattgtgcagaaaactgaggcttcctcaagcttttgatttctgtcacttagcacacctaactccaggctttgttggtgctgatctcatggcactgtgccgagaggcagcaatgtgtgcagtcaatagagtcttaatgaagctacaggaacagcagaagaaaaatcctgaaatggaagatttgccatctaaaggagtccaggaggaaaggctgggaactgagcccacttctgaaacacaggatgaattacaaaggctgctggggttgctaagagaccaagatcccctctcagaggagcagatgcaaggactgtgcattgaactgaatgatttcattgttgctctatcctcagtccaaccctctgccaaaagggaaggctttgtcactgtccctaatgtgacatgggcagatattggtgccctggaagacattagagaggagctcaccatggcaatattggcaccagtacgcaacccagaccagttcaaagctcttggattggtgactccagctggggtcctccttgctggtcctcctggctgtgggaagactctgctggcgaaggctgttgcaaatgagtccggactaaattttatatctgtcaagggccccgaattactaaacatgtatgttggtgagagtgaacgtgctgtgcgacaagtttttcaacgagccaagaactcagcaccctgtgtgatattctttgatgaagtggatgctttatgtcctcgaagatcagaccgagagacaggggcaagtgtccgagtggtgaatcagctacttacagagatggatggtctggaagcacgccagcaggtttttattatggcagccactaacaggccagatataattgaccctgcaatcctgcgcccgggccgcctggacaaaacactgtttgtgggtttaccgccccctgcagatcgccttgccatcttaaaaactatcacaaaaaatggtaccaaaccaccactggatgcagatgtaaatttggaagcaattgctggtgaccttcgctgtgattgctatacgggcgcagatctctctgctttggtacgagaagcttctatctgtgccctgagacaggaaatggcaagacagaagagtggaaatgaaaaaggtgaactcaaggttagtcataagcattttgaagaagctttcaagaaagtaagatcatctatatcaaaaaaggatcaaatcatgtatgaacgtttgcaggagtccctcagccggtgatgtctccagcagccggcttagaggagctagcccatcaagccggcagagaatcccccacacgctctgaaggacccactttcagctggacacaggcgcggcctcatgtaaacattttattttcaaatgaatgaggccaagctgaagctgaagctgaagattcttcccatctggccagccttgtgtgaaaatgccttcttcctctttaagaaaaaggacaatttttaaactgctgaaataaaatgactgttacatttttc

SEQ ID NO: 20803 - DNA, 2240 bp, Homo sapiens
  source 1..2240: mol_type = unassigned DNA
agaccacactgccatgcctccctctgggccccgaggaaccctccttctgttgccgctgctgctgctgctcctgcttcgcgccgtgctggctgtccccctggagcgaggggcgcccaacaaggaggagacccctgcgactgagagtcccgacacaggcctgtactaccaccggtacctccaggaggtcatcgatgtactggagacggatgggcatttccgagagaagctgcaggctgccaatgcggaggacatcaagagcgggaagctgagccgagagctggactttgtcagccaccacgtccgcaccaagctggatgagctcaagcgacaggaggtgtcacggctgcggatgctgctcaaggccaagatggacgccgagcaggatcccaatgtacaggtggatcatctgaatctcctgaaacagtttgaacacctggaccctcagaaccagcatacattcgaggcccgcgacctggagctgctgatccagacggccacccgggaccttgcccagtacgacgcagcccatcatgaagagttcaagcgctacgagatgcttaaggaacacgagagacggcgttatctggagtcactgggagaggagcagagaaaggaggcggagaggaagctggaagagcaacagcgccggcaccgcgagcaccctaaagtcaacgtgcctggcagccaagcccagttgaaggaggtgtgggaggagctggatggactggaccccaacaggtttaaccccaagaccttcttcatactgcatgatatcaacagtgatggtgtcctggatgagcaggagctggaggcactcttcaccaaggagctggagaaagtgtacgacccaaagaatgaggaggacgacatgcgggagatggaggaggagcgactgcgcatgcgggagcatgtgatgaagaatgtggacaccaaccaggaccgcctcgtgaccctggaggagttcctcgcatccactcagaggaaggagtttggggacaccggggagggctgggagacagtggagatgcaccctgcctacaccgaggaagagctgaggcgctttgaagaggagctggctgcccgggaggcagagctgaatgccaaggcccagcgcctcagccaggagacagaggctctagggcggtcccagggccgcctggaggcccagaagagagagctgcagcaggctgtgctgcacatggagcagcggaagcagcagcagcagcagcagcaaggccacaaggccccggctgcccaccctgaggggcagctcaagttccacccagacacagacgatgtacctgtcccagctccagccggtgaccagaaggaggtggacacttcagaaaagaaacttctcgagcggctccctgaggttgaggtgccccagcatctgtgatcctccgggaccccagccctcaggattcctgatgctccaaggcgactgatgggcgctggatgaagtggcacagtcagcttccctgggggctggtgtcatgttgggctcctggggcgggggcacggcctggcatttcacgcattgctgccaccccaggtccacctgtctccactttcacagcctccaagtctgtggctcttcccttctgtcctccgaggggcttgccttctctcgtgtccagtgaggtgctcagtgatcggcttaacttagagaagcccgccccctccccttctccgtctgtcccaagagggtctgctctgagcctgcgttcctaggtggctcggcctcagctgcctgggttgtggccgccctagcatcctgtatgcccacagctactggaatccccgctgctgctccgggccaagcttctggttgattaatgagggcatggggtggtccctcaagaccttcccctaccttttgtggaaccagtgatgcctcaaagacagtgtcccctccacagctgggtgccaggggcaggggatcctcagtatagccggtgaaccctgataccaggagcctgggcctccctgaacccctggcttccagccatctcatcgccagcctcctcctggacctcttggcccccagccccttccccacacagccccagaagggtcccagagctgaccccactccaggacctaggcccagcccctcagcctcatctggagcccctgaagaccagtcccacccacctttctggcctcatctgacactgctccgcatcctgctgtgtgtcctgttccatgttccggttccatccaaatacactttctgg

SEQ ID NO: 20804 - DNA, 2567 bp, Homo sapiens
  source 1..2567: mol_type = unassigned DNA
gcggaagttatttttcccccggccggcagggagttgtagttatctttgaaagccttctctctcttttggcataggcgggaaatgtggcgtcaagaggctgggattccgagaaagaagcgaggctttcacgaaaatgcgagcggcttcggcaaggggcggggccgctggacgtggatgaaagctacagagccagcgtggaccaatcagacctctttggggcggggcctctgtggataagtgggcgtggtctaggggggaagtcaccaagaacgcaccggaggtccttgcccgccctggaaaacgccctctgcggtgaaggagagaccacactgccatgcctccctctgggccccgaggaaccctccttctgttgccgctgctgctgctgctcctgcttcgcgccgtgctggctgtccccctggagcgaggggcgcccaacaaggaggagacccctgcgactgagagtcccgacacaggcctgtactaccaccggtacctccaggaggtcatcgatgtactggagacggatgggcatttccgagagaagctgcaggctgccaatgcggaggacatcaagagcgggaagctgagccgagagctggactttgtcagccaccacgtccgcaccaagctggatgagctcaagcgacaggaggtgtcacggctgcggatgctgctcaaggccaagatggacgccgagcaggatcccaatgtacaggtggatcatctgaatctcctgaaacagtttgaacacctggaccctcagaaccagcatacattcgaggcccgcgacctggagctgctgatccagacggccacccgggaccttgcccagtacgacgcagcccatcatgaagagttcaagcgctacgagatgcttaaggaacacgagagacggcgttatctggagtcactgggagaggagcagagaaaggaggcggagaggaagctggaagagcaacagcgccggcaccgcgagcaccctaaagtcaacgtgcctggcagccaagcccagttgaaggaggtgtgggaggagctggatggactggaccccaacaggtttaaccccaagaccttcttcatactgcatgatatcaacagtgatggtgtcctggatgagcaggagctggaggcactcttcaccaaggagctggagaaagtgtacgacccaaagaatgaggaggacgacatgcgggagatggaggaggagcgactgcgcatgcgggagcatgtgatgaagaatgtggacaccaaccaggaccgcctcgtgaccctggaggagttcctcgcatccactcagaggaaggagtttggggacaccggggagggctgggagacagtggagatgcaccctgcctacaccgaggaagagctgaggcgctttgaagaggagctggctgcccgggaggcagagctgaatgccaaggcccagcgcctcagccaggagacagaggctctagggcggtcccagggccgcctggaggcccagaagagagagctgcagcaggctgtgctgcacatggagcagcggaagcagcagcagcagcagcagcaaggccacaaggccccggctgcccaccctgaggggcagctcaagttccacccagacacagacgatgtacctgtcccagctccagccggtgaccagaaggaggtggacacttcagaaaagaaacttctcgagcggctccctgaggttgaggtgccccagcatctgtgatcctccgggaccccagccctcaggattcctgatgctccaaggcgactgatgggcgctggatgaagtggcacagtcagcttccctgggggctggtgtcatgttgggctcctggggcgggggcacggcctggcatttcacgcattgctgccaccccaggtccacctgtctccactttcacagcctccaagtctgtggctcttcccttctgtcctccgaggggcttgccttctctcgtgtccagtgaggtgctcagtgatcggcttaacttagagaagcccgccccctccccttctccgtctgtcccaagagggtctgctctgagcctgcgttcctaggtggctcggcctcagctgcctgggttgtggccgccctagcatcctgtatgcccacagctactggaatccccgctgctgctccgggccaagcttctggttgattaatgagggcatggggtggtccctcaagaccttcccctaccttttgtggaaccagtgatgcctcaaagacagtgtcccctccacagctgggtgccaggggcaggggatcctcagtatagccggtgaaccctgataccaggagcctgggcctccctgaacccctggcttccagccatctcatcgccagcctcctcctggacctcttggcccccagccccttccccacacagccccagaagggtcccagagctgaccccactccaggacctaggcccagcccctcagcctcatctggagcccctgaagaccagtcccacccacctttctggcctcatctgacactgctccgcatcctgctgtgtgtcctgttccatgttccggttccatccaaatacactttctggaacaaa

SEQ ID NO: 20805 - DNA, 2158 bp, Homo sapiens
  source 1..2158: mol_type = unassigned DNA
cgcaccggaggtccttgcccgccctggaaaacgccctctgcggtgaaggagagaccacactgccatgcctccctctgggccccgaggaaccctccttctgttgccgctgctgctgctgctcctgcttcgcgccgtgctggctgtccccctggagcgaggggcgcccaacaaggaggagacccctgcgactgagagtcccgacacaggcctgtactaccaccggtacctccaggaggtcatcgatgtactggagacggatgggcatttccgagagaagctgcaggctgccaatgcggaggacatcaagagcgggaagctgagccgagagctggactttgtcagccaccacgtccgcaccaagctggatgagctcaagcgacaggaggtgtcacggctgcggatgctgctcaaggccaagatggacgccgagcaggatcccaatgtacaggtggatcatctgaatctcctgaaacagtttgaacacctggaccctcagaaccagcatacattcgaggcccgcgacctggagctgctgatccagacggccacccgggaccttgcccagtacgacgcagcccatcatgaagagttcaagcgctacgagatgcttaaggaacacgagagacggcgttatctggagtcactgggagaggagcagagaaaggaggcggagaggaagctggaagagcaacagcgccggcaccgcgagcaccctaaagtcaacgtgcctggcagccaagcccagttgaaggaggtgtgggaggagctggatggactggaccccaacaggtttaaccccaagaccttcttcatactgcatgatatcaacagtgatggtgtcctggatgagcaggagctggaggcactcttcaccaaggagctggagaaagtgtacgacccaaagaatgaggaggacgacatgcgggagatggaggaggagcgactgcgcatgcgggagcatgtgatgaagaatgtggacaccaaccaggaccgcctcgtgaccctggaggagttcctcgcatccactcagaggaaggagtttggggacaccggggagggctgggagacagtggagatgcaccctgcctacaccgaggaagagctgaggcgctttgaagaggagctggctgcccgggaggcagagctgaatgccaaggcccagcgcctcagccaggagacagaggctctagggcggtcccagggccgcctggaggcccagaagagagagctgcagcaggctgtgctgcacatggagcagcggaagcagcagcagcagcagcagcaaggccacaaggccccggctgcccaccctgaggggcagctcaagttccacccagacacagacgatgtacctgtcccagctccagccggtgaccagaaggaggtggacacttcagaaaagaaacttctcgagcggctccctgaggttgaggtgccccagcatctgtgatcctccgggaccccagccctcaggattcctgatgctccaagcctccaagtctgtggctcttcccttctgtcctccgaggggcttgccttctctcgtgtccagtgaggtgctcagtgatcggcttaacttagagaagcccgccccctccccttctccgtctgtcccaagagggtctgctctgagcctgcgttcctaggtggctcggcctcagctgcctgggttgtggccgccctagcatcctgtatgcccacagctactggaatccccgctgctgctccgggccaagcttctggttgattaatgagggcatggggtggtccctcaagaccttcccctaccttttgtggaaccagtgatgcctcaaagacagtgtcccctccacagctgggtgccaggggcaggggatcctcagtatagccggtgaaccctgataccaggagcctgggcctccctgaacccctggcttccagccatctcatcgccagcctcctcctggacctcttggcccccagccccttccccacacagccccagaagggtcccagagctgaccccactccaggacctaggcccagcccctcagcctcatctggagcccctgaagaccagtcccacccacctttctggcctcatctgacactgctccgcatcctgctgtgtgtcctgttccatgttccggttccatccaaatacactttctggaacaaa

SEQ ID NO: 20806 - DNA, 673 bp, Homo sapiens
  source 1..673: mol_type = unassigned DNA
gaggtgagaggccagggttcccatactcttgggtcctagggaggatgggggccagagggctggaaaactgggtcccggaggaggatgcactgggtgccagtactttaggtcctgggaaaagaggaggctgggaccctggactcttgggtctgggggaggaggcggccgagatcccggattcctgagtgtgagagaggagcgtgttgggagccaggacccctgggtctgagggcccagactcctgtgtcggaggaagggaaggccggaggcctggaatcctggggcctggaccacactgccatgcctccctctgggccccgaggaaccctccttctgttgccgctgctgctgctgctcctgcttcgcgccgtgctggctgtccccctggagcgaggggcgcccaacaaggaggagacccctgcgactgagagtcccgacacaggcctgtactaccaccggtacctccaggaggtcatcgatgtactggagacggatgggcatttccgagagaagctgcaggctgccaatgcggaggacatcaagagcgggaagctgagccgagagctggactttgtcagccaccacgtccgcaccaagctggatgagctcaagcgacaggaggtgtcacggctgcggatgctgctcaaggccaagatggacgccgagcaggatc

SEQ ID NO: 20807 - DNA, 563 bp, Homo sapiens
  source 1..563: mol_type = unassigned DNA
gagcgtgttgggagccaggacccctgggtctgagggcccagactcctgtgtcggaggaagggaaggccggaggcctggaatcctggggcctgggtaacaaaatgcttgtgtcttgattcttggaagtgggggcggcgctgggggcccgaactcctggttccaggggaggaagaggcttgggacagacattatgcattatccagccctccatcccccacagaccacactgccatgcctccctctgggccccgaggaaccctccttctgttgccgctgctgctgctgctcctgcttcgcgccgtgctggctgtccccctggagcgaggggcgcccaacaaggaggagacccctgcgactgagagtcccgacacaggcctgtactaccaccggtacctccaggaggtcatcgatgtactggagacggatgggcatttccgagagaagctgcaggctgccaatgcggaggacatcaagagcgggaagctgagccgagagctggactttgtcagccaccacgtccgcaccaagctggatgagctcaagcgacaggaggtgtcacggct

SEQ ID NO: 20808 - DNA, 1905 bp, Homo sapiens
  source 1..1905: mol_type = unassigned DNA
agcggagcggtgggccgggggctggaggacaggtttgtgcgctggacgcaagcaccaggcgcagcctcgctcgccgagacccggccagaacgtgttacgagtcagtttttagtgaaaaaacattgagctaggagccaagacccatctcttcactattttggtattgtgcaagtcatcttacctctctggatctcagttgtctcatctgtaaaaaggagataaaaattatttacctgcctgaacatgaggtggaggaccatcctgctacagtattgctttctcttgattacatgtttacttactgctcttgaagctgtgcctattgacatagacaagacaaaagtacaaaatattcaccctgtggaaagtgcgaagatagaaccaccagatactggactttattatgatgaatatctcaagcaagtgattgatgtgctggaaacagataaacacttcagagaaaagctccagaaagcagacatagaggaaataaagagtgggaggctaagcaaagaactggatttagtaagtcaccatgtgaggacaaaacttgatgaactgaaaaggcaagaagtaggaaggttaagaatgttaattaaagctaagttggattcccttcaagatataggcatggaccaccaagctcttctaaaacaatttgatcacctaaaccacctgaatcctgacaagtttgaatccacagatttagatatgctaatcaaagcggcaacaagtgatctggaacactatgacaagactcgtcatgaagaatttaaaaaatatgaaatgatgaaggaacatgaaaggagagaatatttaaaaacattgaatgaagaaaagagaaaagaagaagagtctaaatttgaagaaatgaagaaaaagcatgaaaatcaccctaaagttaatcacccaggaagcaaagatcaactaaaagaggtatgggaagagactgatggattggatcctaatgactttgaccccaagacatttttcaaattacatgatgtcaatagtgatggattcctggatgaacaagaattagaagccctatttactaaagagttggagaaagtatatgaccctaaaaatgaagaggatgatatggtagaaatggaagaagaaaggcttagaatgagggaacatgtaatgagtgaggttgatactaacaaagacagattggtgactctggaggagtttttgaaagccacagaaaaaaaagaattcttggagccagatagctgggagacattagatcagcaacagttcttcacagaggaagaactaaaagaatatgaaaatattattgctttacaagaaaatgaacttaagaagaaggcagatgagcttcagaaacaaaaagaagagctacaacgtcagcatgatcaactggaggctcagaagctggaatatcatcaggtcatacagcagatggaacaaaaaaaattacaacaaggaattcctccatcagggccagctggagaattgaagtttgagccacgtgtgtaattttgtttgattatttatttaggaaaataaattattttatcaattgaaatccacatttattacaaatataatttcaaatcattaagatgttatgttattttttgtgtattttttgtggtattagagcaatttagattatagaaaaatgaaaatgcctccaaaagttttatgtagcagcaaattttaagtgctgtatcatttgtataatttgataaccatatttatggtaaaatgatttatttcaactttatttgtaattctttctaattatattaatcttaccagagaatatgttttttaaaattgtgatctatgattagctaagcatattttttaaaacaagtatatttgtatatgaaggaacatttagaataaaggaagatacttttaaaataagaa

SEQ ID NO: 20809 - DNA, 1204 bp, Homo sapiens
  source 1..1204: mol_type = unassigned DNA
atgaggtggaggaccatcctgctacagtattgctttctcttgattacatgtttacttactgctcttgaagctgtgcctattgacatagacaagacaaaagtacaaaatattcaccctgtggaaagtgcgaagatagaaccaccagatactggactttattatgatgaatatctcaagcaagtgattgatgtgctggaaacagataaacacttcagagaaaagctccagaaagcagacatagaggaaataaagagtgggaggctaagcaaagaactggatttagtaagtcaccatgtgaggacaaaacttgatgaactgaaaaggcaagaagtaggaaggttaagaatgttaattaaagctaagttggattcccttcaagatataggcatggaccaccaagctcttctaaaacaatttgatcacctaaaccacctgaatcctgacaagtttgaatccacagatttagatatgctaatcaaagcggcaacaagtgatctggaacactatgacaagactcgtcatgaagaatttaaaaaatatgaaatgatgaaggaacatgaaaggagagaatatttaaaaacattgaatgaagaaaagagaaaagaagaagagtctaaatttgaagaaatgaagaaaaagcatgaaaatcaccctaaagttaatcacccaggaagcaaagatcaactaaaagaggtatgggaagagactgatggattggatcctaatgactttgaccccaagacatttttcaaattacatgatgtcaatagtgatggattcctggatgaacaagaattagaagccctatttactaaagagttggagaaagtatatgaccctaaaaatgaagaggatgatatggtagaaatggaagaagaaaggcttagaatgagggaacatgtaatgagtgagacattagatcagcaacagttcttcacagaggaagaactaaaagaatatgaaaatattattgctttacaagaaaatgaacttaagaagaaggcagatgagcttcagaaacaaaaagaagagctacaacgtcagcatgatcaactggaggctcagaagctggaatatcatcaggtcatacagcagatggaacaaaaaaaattacaacaaggaattcctccatcagggccagctggagaattgaagtttgagccacacatttaaagtctgaagtccaccagaacttggaagaaag

SEQ ID NO: 20810 - DNA, 496 bp, Homo sapiens
  source 1..496: mol_type = unassigned DNA
agtttctcagctgagccaaaggaaatcaagaaatctcctggaatcaaggaaatcaaggaatcaattacttacaccaagctgagcaagagacaacatgaaggcagaggtagcagtaatcagacaggatttccaagaacgtgttacgagtcagtttttagtgaaaaaacattgagctaggagccaagacccatctcttcactattttggtattgtgcaagtcatcttacctctctggatctcagttgtctcatctgtaaaaaggagataaaaattatttacctgcctgaacatgaggtggaggaccatcctgctacagtattgctttctcttgattacatgtttacttactgctcttgaagctgtgcctattgacatagacaagacaaaagtacaaaatattcaccctgtggaaagtgcgaagatagaaccaccagatactggactttattatgatgaatatctcaagcaagtgattgatgtgctggaaacagataaa

SEQ ID NO: 20811 - DNA, 530 bp, Homo sapiens
  source 1..530: mol_type = unassigned DNA
ctctcccgaggaatgctgagcaggctctggacgcctctccgtgcacaccccagacctggggaggggagctctccggacaccccagctggccgcccctcgggccctgagtccgaagacccgctaaacagggcccgggcactgaagtaccctattgttctcatcccctctcccgggaccccgcaccctcctccatctaggctgaggttcccagatttgtgtcttggcccctggcggcgccgagattactttgtgattggaagactgaaaggaacagaacgtgttacgagtcagtttttagtgaaaaaacattgagctaggagccaagacccatctcttcactattttggtattgtgcaagtcatcttacctctctggatctcagttgtctcatctgtaaaaaggagataaaaattatttacctgcctgaacatgaggtggaggaccatcctgctacagtattgctttctcttgattacatgtttacttactgctcttgaagctgtgcctattgacatagacaagacaaaagt

SEQ ID NO: 20812 - DNA, 2274 bp, Homo sapiens
  source 1..2274: mol_type = unassigned DNA
gaggacaggtttgtgcgctggacgcaagcaccaggcgcagcctcgctcgccgagacccggccagaacgtgttacgagtcagtttttagtgaaaaaacattgagctaggagccaagacccatctcttcactattttggtattgtgcaagtcatcttacctctctggatctcagttgtctcatctgtaaaaaggagataaaaattatttacctgcctgaacatgaggtggaggaccatcctgctacagtattgctttctcttgattacatgtttacttactgctcttgaagctgtgcctattgacatagacaagacaaaagtacaaaatattcaccctgtggaaagtgcgaagatagaaccaccagatactggactttattatgatgaatatctcaagcaagtgattgatgtgctggaaacagataaacacttcagagaaaagctccagaaagcagacatagaggaaataaagagtgggaggctaagcaaagaactggatttagtaagtcaccatgtgaggacaaaacttgatgaactgaaaaggcaagaagtaggaaggttaagaatgttaattaaagctaagttggattcccttcaagatataggcatggaccaccaagctcttctaaaacaatttgatcacctaaaccacctgaatcctgacaagtttgaatccacagatttagatatgctaatcaaagcggcaacaagtgatctggaacactatgacaagactcgtcatgaagaatttaaaaaatatgaaatgatgaaggaacatgaaaggagagaatatttaaaaacattgaatgaagaaaagagaaaagaagaagagtctaaatttgaagaaatgaagaaaaagcatgaaaatcaccctaaagttaatcacccaggaagcaaagatcaactaaaagaggtatgggaagagactgatggattggatcctaatgactttgaccccaagacatttttcaaattacatgatgtcaatagtgatggattcctggatgaacaagaattagaagccctatttactaaagagttggagaaagtatatgaccctaaaaatgaagaggatgatatggtagaaatggaagaagaaaggcttagaatgagggaacatgtaatgagtgaggttgatactaacaaagacagattggtgactctggaggagtttttgaaagccacagaaaaaaaagaattcttggagccagatagctgggagacattagatcagcaacagttcttcacagaggaagaactaaaagaatatgaaaatattattgctttacaagaaaatgaacttaagaagaaggcagatgagcttcagaaacaaaaagaagagctacaacgtcagcatgatcaactggaggctcagaagctggaatatcatcaggtcatacagcagatggaacaaaaaaaattacaacaaggaattcctccatcagggccagctggagaattgaagtttgagccacacatttaaagtctgaagtccaccagaacttggaagaaagctgttaactcaacatctatttcatctttttagctcccttcctttttctctgctcaataaatattttaaaagcatatttgaaataaagggagatactttttaaatgaaaacactttttttgggacacagatattaaaggattgaagtttatcagaaccaggaagaaaacaaactcactgtctgctctctgctctcacattcacacggctcttttatttatttttttgttctcctttaatgatttaattaagtggctttatgccataatttagtgaaactattaggaactatttaagtgagaaaactctgcctcttgcttttaaattagattgctctcacttactcgtaaacataggtattcttttatgggtgcttatcattccttctttcaataaatgtctgtttgatattaacaattctggaaaggccacagtatttccctgtgtttcctggtaacgtttttctagttttggcaacctcaactgctagaaattcttcacctgaatcacttttgctaccacttcaggtcatttttcattcttttttattttgctctatactttatcatttaagattaggttatgttacatataacagaaaaaacaaagataacagtggtttaaactaaataggagtttttcttcttacataagtctagaagtaggtggtgtccaggttcctatctttctgctctgctatcctcagtgcatgatttttatcctcagattacctcactctcactgttcaagtttgctcctggag

SEQ ID NO: 20813 - DNA, 937 bp, Homo sapiens
  source 1..937: mol_type = unassigned DNA
tcccagcgcgagccggaggcgctgggttccctctgctccactcgcagctgggcacccgagctttcttcggggtcgaggagggtggctggctcttggcggggagcaggagaggaacgtgttacgagtcagtttttagtgaaaaaacattgagctaggagccaagacccatctcttcactattttggtattgtgcaagtcatcttacctctctggatctcagttgtctcatctgtaaaaaggagataaaaattatttacctgcctgaacgtccgtatctctcttatgaaagaagagggtgataaaggaaaggagaaggccattcttactgacctgatagtggaagaaaagtagatgaggtggaggaccatcctgctacagtattgctttctcttgattacatgtttacttactgctcttgaagctgtgcctattgacatagacaagacaaaagtacaaaatattcaccctgtggaaagtgcgaagatagaaccaccagatactggactttattatgatgaatatctcaagcaagtgattgatgtgctggaaacagataaacacttcagagaaaagctccagaaagcagacatagaggaaataaagagtgggaggctaagcaaagaactggatttagtaagtcaccatgtgaggacaaaacttgatgaactgaaaaggcaagaagtaggaaggttaagaatgttaattaaagctaagttggattcccttcaagatataggcatggaccaccaagctcttctaaaacaatttgatcacctaaaccacctgaatcctgacaagtttgaatccacagatttagatatgctaatcaaagcggcaacaagtgatctggaacactatgacaagactcgtcatgaagaatttaaaaaatatgaaatgatgaaggaacatgaaaggagagaatatttaaaaacattga

SEQ ID NO: 20814 - DNA, 1837 bp, Homo sapiens
  source 1..1837: mol_type = unassigned DNA
atattattgcaagcctttgcacatctctttgtatcatccccctatgacatcatgtgttaatctcatctcaggactgcaacccaagattgcagtgagtgggaagatacaatttttacagcatcaccaaaaaggataaggttatttggagatggggacttgctatgttgctcaggctggtttcgaactcttggcctcaagtgattttcctgccttggcctctcaaaacacaggaatgcaggtcaaacacattttgagtttctcagctgagccaaaggaaatcaagaaatctcctggaatcaaggaaatcaaggaatcaattacttacaccaagctgagcaagagacaacatgaaggcagaggtagcagtaatcagacaggatttccaagacagggtctcactctgtggcacaatgatcatggttcactgcagcctcggccttctgagctcaagtgatcctcccgcctctgcctccgcctcctgagtagctgggactacagatgtgcgacacagcacctggcaaatttttaagtattttcttcagactgaaacatcattgtgttaaagataaaaaagtaaaaaatattcttgtagagataggatctcactgttgtccagattggtctcaaatttttgagctcaagccatcctcctgccttggcctcccaaagtgctggcattacagggtgaaaaaaactaatcggcaggatgaaacttcgtaaacagcctgtggctccaaaagcttctggaaggctcaagctacccatgtgcatctttgagcctcagtttccccatctttaaaatgaggggtttggaatagatgtctgttctctggggcaggatgcagaggaaagagctgtctgcgaatgggcaagagagaagaacgtgttacgagtcagtttttagtgaaaaaacattgagctaggagccaagacccatctcttcactattttggtattgtgcaagtcatcttacctctctggatctcagttgtctcatctgtaaaaaggagataaaaattatttacctgcctgaacgtccgtatctctcttatgaaagaagagggtgataaaggaaaggagaaggccattcttactgacctgatagtggaagaaaaatttctccttaaaaatatcagtcttggccgggcacggtggctcaggcctgtaatcccagcactttgggaggctgaggcgggcagatcacctgaggtcaggagttcaagaccagcctggccaacatgatgaggtggaggaccatcctgctacagtattgctttctcttgattacatgtttacttactgctcttgaagctgtgcctattgacatagacaagacaaaagtacaaaatattcaccctgtggaaagtgcgaagatagaaccaccagatactggactttattatgatgaatatctcaagcaagtgattgatgtgctggaaacagataaacacttcagagaaaagctccagaaagcagacatagaggaaataaagagtgggaggctaagcaaagaactggatttagtaagtcaccatgtgaggacaaaacttgatgaactgaaaaggcaagaagtaggaaggttaagaatgttaattaaagctaagttggattcccttcaagatataggcatggaccaccaagctcttctaaaacaatttgatcacctaaaccacctgaatcctgacaagtttgaatccacagatttagatatgctaatcaaagcggcaacaagtgatctggaacactatgacaagactcgtcatgaagaatttaaaaaatatgaaatgatgaaggaacatgaaaggagagaatatttaaaaacattgaatgaagaaaa

SEQ ID NO: 20815 - DNA, 463 bp, Homo sapiens
  source 1..463: mol_type = unassigned DNA
aaggccggtggccgcgcgaacgtgttacgagtcagtttttagtgaaaaaacattgagctaggagccaagacccatctcttcactattttggtattgtgcaagtcatcttacctctctggatctcagttgtctcatctgtaaaaaggagataaaaattatttacctgcctgaacctctgaaatctgtaagctgtgataaccactcatagaagcttctataatttgccatggcagagatataagtctgactattaactacagaaggaaataatcttcatgtccgtatctctcttatgaaagaagagggtgataaaggaaaggagaaggccattcttactgacctgatagtggaagaaaagtagatgaggtggaggaccatcctgctacagtattgctttctcttgattacatgtttacttactgctcttgaagctgtgcctattgacatagacaagacaaaagta

SEQ ID NO: 20816 - DNA, 514 bp, Homo sapiens
  source 1..514: mol_type = unassigned DNA
ggggcagagcggagcggtgggccgggggctggaggacaggtttgtgcgctggacgcaagcaccaggcgcagcctcgctcgccgagacccggccaggtaaggccggtggccgcgcgaacgtgttacgagtcagtttttagtgaaaaaacattgagctaggagccaagacccatctcttcactattttggtattgtgcaagtcatcttacctctctggatctcagttgtctcatctgtaaaaaggagataaaaattatttacctgcctgaacatttctccttaaaaatatcagtcttggccgggcacggtggctcaggcctgtaatcccagcactttgggaggctgaggcgggcagatcacctgaggtcaggagttcaagaccagcctggccaacatgatgaggtggaggaccatcctgctacagtattgctttctcttgattacatgtttacttactgctcttgaagctgtgcctattgacatagacaagacaaaagtacaaaatattcaccctg

SEQ ID NO: 20817 - DNA, 536 bp, Homo sapiens
  source 1..536: mol_type = unassigned DNA
agagcggagcggtgggccgggggctggaggacaggtttgtgcgctggacgcaagcaccaggcgcagcctcgctcgccgagacccggccagaacgtgttacgagtcagtttttagtgaaaaaacattgagctaggagccaagacccatctcttcactattttggtattgtgcaagtcatcttacctctctggatctcagttgtctcatctgtaaaaaggagataaaaattatttacctgcctgaacgtccgtatctctcttatgaaagaagagggtgataaaggaaaggagaaggccattcttactgacctgatagtggaagaaaagtagatgaggtggaggaccatcctgctacagtattgctttctcttgattacatgtttacttactgctcttgaagctgtgcctattgacatagacaagacaaaagtacaaaatattcaccctgtggaaagtgcgaagatagaaccaccagatactggactttattatgatgaatatctcaagcaagtgattgatgtgctggaaacagataaa

SEQ ID NO: 20818 - DNA, 498 bp, Homo sapiens
  source 1..498: mol_type = unassigned DNA
actcgcagctgggcacccgagctttcttcggggtcgaggagggtggctggctcttggcggggagcaggagaggaacgtgttacgagtcagtttttagtgaaaaaacattgagctaggagccaagacccatctcttcactattttggtattgtgcaagtcatcttacctctctggatctcagttgtctcatctgtaaaaaggagataaaaattatttacctgcctgaacatgaggtggaggaccatcctgctacagtattgctttctcttgattacatgtttacttactgctcttgaagctgtgcctattgacatagacaagacaaaagtacaaaatattcaccctgtggaaagtgcgaagatagaaccaccagatactggactttattatgatgaatatctcaagcaagtgattgatgtgctggaaacagataaacacttcagagaaaagctccagaaagcagacatagaggaaataaagagtgggaggctaagcaaa

SEQ ID NO: 20819 - DNA, 2274 bp, Homo sapiens
  source 1..2274: mol_type = unassigned DNA
aaagttaagagtggcgccagggatttgaaccgcgctgacgaagtttggtgatccatcttccgagtatcgccgggatttcgaatcgcgatgatcatcccctctctagaggagctggactccctcaagtacagtgacctgcagaacttagccaagagtctgggtctccgggccaacctgagggcaaccaagttgttaaaagccttgaaaggctacattaaacatgaggcaagaaaaggaaatgagaatcaggatgaaagtcaaacttctgcatcctcttgtgatgagactgagatacagatcagcaaccaggaagaagctgagagacagccacttggccatgtcaccaaaacaaggagaaggtgcaagactgtccgtgtggaccctgactcacagcagaatcattcagagataaaaataagtaatcccactgaattccagaatcatgaaaagcaggaaagccaggatctcagagctactgcaaaagttccttctccaccagacgagcaccaagaagctgagaatgctgtttcctcaggtaacagagattcaaaggtaccttcagaaggaaagaaatctctctacacagatgagtcatccaaacctggaaaaaataaaagaactgcaatcactactccaaactttaagaagcttcatgaagctcattttaaggaaatggagtccattgatcaatatattgagagaaaaaagaaacattttgaagaacacaattccatgaatgaactgaagcagcccatcaataagggaggggtcaggactccagtacctccaagaggaagactctctgtggcttctactcccatcagccaacgacgctcgcaaggccggtcttgtggccctgcaagtcagagtaccttgggtctgaaggggtcactcaagcgctctgctatctctgcagctaaaacgggtgtcaggttttcagctgctactaaagataatgagcataagcgttcactgaccaagactccagccagaaagtctgcacatgtgaccgtgtctgggggcaccccaaaaggcgaggctgtgcttgggacacacaaattaaagaccatcacggggaattctgctgctgttattaccccattcaagttgacaactgaggcaacgcagactccagtctccaataagaaaccagtgtttgatcttaaagcaagtttgtctcgtcccctcaactatgaaccacacaaaggaaagctaaaaccatgggggcaatctaaagaaaataattatctaaatcaacatgtcaacagaattaacttctacaagaaaacttacaaacaaccccatctccagacaaaggaagagcaacggaagaaacgcgagcaagaacgaaaggagaagaaagcaaaggttttgggaatgcgaaggggcctcattttggctgaagattaataattttttaacatcttgtaaatattcctgtattctcaacttttttccttttgtaaattttttttttttgctgtcatccccactttagtcacgagatctttttctgctaactgttcatagtctgtgtagtgtccatgggttcttcatgtgctatgatctctgaaaagacgttatcaccttaaagctcaaattctttgggatggtttttacttaagtccattaacaattcaggtttctaacgagacccatcctaaaattctgtttctagatttttaatgtcaagttcccaagttccccctgctggttctaatattaacagaactgcagtcttctgctagccaatagcatttacctgatggcagctagttatgcaagcttcaggagaatttgaacaataacaagaatagggtaagctgggatagaaaggccacctcttcactctctatagaatatagtaacctttatgaaacggggccatatagtttggttatgacatcaatattttacctaggtgaaattgtttaggcttatgtaccttcgttcaaatatcctcatgtaattgccatctgtcactcactatattcacaaaaataaaactctacaactcattctaacattgcttacttaaaagctacatagccctatcgaaatgcgaggattaatgctttaatgcttttagagacagggtctcactgtgttgcccaggctggtctcaaactccaccaaatgtacttcttattcattttatggaaaagactaggctttgcttagtatcatgtccatgtttccttcacctcagtggagcttctgagttttatactgctcaagatcgtcataaataaaattttttctcattgtcataga

SEQ ID NO: 20820 - DNA, 2300 bp, Homo sapiens
  source 1..2300: mol_type = unassigned DNA
aagtgtgaaaaaagcgcgcctctgttgggacgggaaatcagcctttctattggtcagggttagaaaccccgcctttgaggcattttcaaccaatggaagcgcggcattcttcatttaaactgtctataaatttctgcctagtcaaagttaagagtggcgccagggatttgaaccgcgctgacgaagtttggtgatccatcttccgagtatcgccgggatttcgaatcgcgatgatcatcccctctctagaggagctggactccctcaagtacagtgacctgcagaacttagccaagagtctgggtctccgggccaacctgagggcaaccaagttgttaaaagccttgaaaggctacattaaacatgaggcaagaaaaggaaatgagaatcaggatgaaagtcaaacttctgcatcctcttgtgatgagactgagatacagatcagcaaccaggaagaagctgagagacagccacttggccatgtcaccaaaacaaggagaaggtgcaagactgtccgtgtggaccctgactcacagcagaatcattcagagataaaaataagtaatcccactgaattccagaatcatgaaaagcaggaaagccaggatctcagagctactgcaaaagttccttctccaccagacgagcaccaagaagctgagaatgctgtttcctcaggtaacagagattcaaaggtaccttcagaaggaaagaaatctctctacacagatgagtcatccaaacctggaaaaaataaaagaactgcaatcactactccaaactttaagaagcttcatgaagctcattttaaggaaatggagtccattgatcaatatattgagagaaaaaagaaacattttgaagaacacaattccatgaatgaactgaagcagcagcccatcaataagggaggggtcaggactccagtacctccaagaggaagactctctgtggcttctactcccatcagccaacgacgctcgcaaggccggtcttgtggccctgcaagtcagagtaccttgggtctgaaggggtcactcaagcgctctgctatctctgcagctaaaacgggtgtcaggttttcagctgctactaaagataatgagcataagcgttcactgaccaagactccagccagaaagtctgcacatgtgaccgtgtctgggggcaccccaaaaggcgaggctgtgcttgggacacacaaattaaagaccatcacggggaattctgctgctggaaagctaaaaccatgggggcaatctaaagaaaataattatctaaatcaacatgtcaacagaattaacttctacaagaaaacttacaaacaaccccatctccagacaaaggaagagcaacggaagaaacgcgagcaagaacgaaaggagaagaaagcaaaggttttgggaatgcgaaggggcctcattttggctgaagattaataattttttaacatcttgtaaatattcctgtattctcaacttttttccttttgtaaattttttttttttgctgtcatccccactttagtcacgagatctttttctgctaactgttcatagtctgtgtagtgtccatgggttcttcatgtgctatgatctctgaaaagacgttatcaccttaaagctcaaattctttgggatggtttttacttaagtccattaacaattcaggtttctaacgagacccatcctaaaattctgtttctagatttttaatgtcaagttcccaagttccccctgctggttctaatattaacagaactgcagtcttctgctagccaatagcatttacctgatggcagctagttatgcaagcttcaggagaatttgaacaataacaagaatagggtaagctgggatagaaaggccacctcttcactctctatagaatatagtaacctttatgaaacggggccatatagtttggttatgacatcaatattttacctaggtgaaattgtttaggcttatgtaccttcgttcaaatatcctcatgtaattgccatctgtcactcactatattcacaaaaataaaactctacaactcattctaacattgcttacttaaaagctacatagccctatcgaaatgcgaggattaatgctttaatgcttttagagacagggtctcactgtgttgcccaggctggtctcaaactccaccaaatgtacttcttattcattttatggaaaagactaggctttgcttagtatcatgtccatgtttccttcacctcagtggagcttctgagttttatactgctcaagatcgtcataaataaaattttttctcattgtcat

SEQ ID NO: 20821 - DNA, 1629 bp, Homo sapiens
  source 1..1629: mol_type = unassigned DNA
aaagttaagagtggcgccagggatttgaaccgcgctgacgaagtttggtgatccatcttccgagtatcgccgggatttcgaatcgcgatgatcatcccctctctagaggagctggactccctcaagtacagtgacctgcagaacttagccaagagtctgggtctccgggccaacctgagggcaaccaagttgttaaaagccttgaaaggctacattaaacatgaggcaagaaaaggaaatgagaatcaggatgaaagtcaaacttctgcatcctcttgtgatgagactgagatacagatcagcaaccaggaagaagctgagagacagccacttggccatgtcaccaaaacaaggagaaggtgcaagactgtccgtgtggaccctgactcacagcagaatcattcagagataaaaataagtaatcccactgaattccagaatcatgaaaagcaggaaagccaggatctcagagctactgcaaaagttccttctccaccagacgagcaccaagaagctgagaatgctgtttcctcaggtaacagagattcaaaggtaccttcagaaggaaagaaatctctctacacagatgagtcatccaaacctggaaaaaataaaagaactgcaatcactactccaaactttaagaagcttcatgaagctcattttaaggaaatggagtccattgatcaatatattgagagaaaaaagaaacattttgaagaacacaattccatgaatgaactgaagcagcagcccatcaataagggaggggtcaggactccagtacctccaagaggaagactctctgtggcttctactcccatcagccaacgacgctcgcaaggccggtcttgtggccctgcaagtcagagtaccttgggtctgaaggggtcactcaagcgctctgctatctctgcagctaaaacgggtgtcaggttttcagctgctactaaagataatgagcataagcgttcactgaccaagactccagccagaaagtctgcacatgtgaccgtgtctgggggcaccccaaaaggcgaggctgtgcttgggacacacaaattaaagaccatcacggggaattctgctgctgttattaccccattcaagttgacaactgaggcaacgcagactccagtctccaataagaaaccagtgtttgatcttaaagcaagtttgtctcgtcccctcaactatgaaccacacaaaggaaagctaaaaccatgggggcaatctaaagaaaataattatctaaatcaacatgtcaacagaattaacttctacaagaaaacttacaaacaaccccatctccagacaaaggaagagcaacggaagaaacgcgagcaagaacgaaaggagaagaaagcaaaggttttgggaatgcgaaggggcctcattttggctgaagattaataattttttaacatcttgtaaatattcctgtattctcaacttttttccttttgtaaattttttttttttgctgtcatccccactttagtcacgagatctttttctgctaactgttcatagtctgtgtagtgtccatgggttcttcatgtgctatgatctctgaaaagacgttatcaccttaaagctcaaattctttgggatggtttttacttaagt

SEQ ID NO: 20822 - DNA, 2232 bp, Homo sapiens
  source 1..2232: mol_type = unassigned DNA
gtttggtgatccatcttccgagtatcgccgggatttcgaatcgcgatgatcatcccctctctagaggagctggactccctcaagtacagtgacctgcagaacttagccaagagtctgggtctccgggccaacctgagggcaaccaagttgttaaaagccttgaaaggctacattaaacatgaggcaagaaaaggaaatgagaatcaggatgaaagtcaaacttctgcatcctcttgtgatgagactgagatacagatcagcaaccaggaagaagctgagagacagccacttggccatgtcaccaaaacaaggagaaggtgcaagactgtccgtgtggaccctgactcacagaatcattcagagataaaaataagtaatcccactgaattccagaatcatgaaaagcaggaaagccaggatctcagagctactgcaaaagttccttctccaccagacgagcaccaagaagctgagaatgctgtttcctcaggtaacagagattcaaaggtaccttcagaaggaaagaaatctctctacacagatgagtcatccaaacctggaaaaaataaaagaactgcaatcactactccaaactttaagaagcttcatgaagctcattttaaggaaatggagtccattgatcaatatattgagagaaaaaagaaacattttgaagaacacaattccatgaatgaactgaagcagcagcccatcaataagggaggggtcaggactccagtacctccaagaggaagactctctgtggcttctactcccatcagccaacgacgctcgcaaggccggtcttgtggccctgcaagtcagagtaccttgggtctgaaggggtcactcaagcgctctgctatctctgcagctaaaacgggtgtcaggttttcagctgctactaaagataatgagcataagcgttcactgaccaagactccagccagaaagtctgcacatgtgaccgtgtctgggggcaccccaaaaggcgaggctgtgcttgggacacacaaattaaagaccatcacggggaattctgctgctgttattaccccattcaagttgacaactgaggcaacgcagactccagtctccaataagaaaccagtgtttgatcttaaagcaagtttgtctcgtcccctcaactatgaaccacacaaaggaaagctaaaaccatgggggcaatctaaagaaaataattatctaaatcaacatgtcaacagaattaacttctacaagaaaacttacaaacaaccccatctccagacaaaggaagagcaacggaagaaacgcgagcaagaacgaaaggagaagaaagcaaaggttttgggaatgcgaaggggcctcattttggctgaagattaataattttttaacatcttgtaaatattcctgtattctcaacttttttccttttgtaaattttttttttttgctgtcatccccactttagtcacgagatctttttctgctaactgttcatagtctgtgtagtgtccatgggttcttcatgtgctatgatctctgaaaagacgttatcaccttaaagctcaaattctttgggatggtttttacttaagtccattaacaattcaggtttctaacgagacccatcctaaaattctgtttctagatttttaatgtcaagttcccaagttccccctgctggttctaatattaacagaactgcagtcttctgctagccaatagcatttacctgatggcagctagttatgcaagcttcaggagaatttgaacaataacaagaatagggtaagctgggatagaaaggccacctcttcactctctatagaatatagtaacctttatgaaacggggccatatagtttggttatgacatcaatattttacctaggtgaaattgtttaggcttatgtaccttcgttcaaatatcctcatgtaattgccatctgtcactcactatattcacaaaaataaaactctacaactcattctaacattgcttacttaaaagctacatagccctatcgaaatgcgaggattaatgctttaatgcttttagagacagggtctcactgtgttgcccaggctggtctcaaactccaccaaatgtacttcttattcattttatggaaaagactaggctttgcttagtatcatgtccatgtttccttcacctcagtggagcttctgagttttatactgctcaagatcgtcataaataaaattttttctcattgtcataga

SEQ ID NO: 20823 - DNA, 2256 bp, Homo sapiens
  source 1..2256: mol_type = unassigned DNA
gccagggatttgaaccgcgctgacgaagtttggtgatccatcttccgagtatcgccgggatttcgaatcgcgatgatcatcccctctctagaggagctggactccctcaagtacagtgacctgcagaacttagccaagagtctgggtctccgggccaacctgagggcaaccaagttgttaaaagccttgaaaggctacattaaacatgaggcaagaaaaggaaatgagaatcaggatgaaagtcaaacttctgcatcctcttgtgatgagactgagatacagatcagcaaccaggaagaagctgagagacagccacttggccatgtcaccaaaacaaggagaaggtgcaagactgtccgtgtggaccctgactcacagaatcattcagagataaaaataagtaatcccactgaattccagaatcatgaaaagcaggaaagccaggatctcagagctactgcaaaagttccttctccaccagacgagcaccaagaagctgagaatgctgtttcctcaggtaacagagattcaaaggtaccttcagaaggaaagaaatctctctacacagatgagtcatccaaacctggaaaaaataaaagaactgcaatcactactccaaactttaagaagcttcatgaagctcattttaaggaaatggagtccattgatcaatatattgagagaaaaaagaaacattttgaagaacacaattccatgaatgaactgaagcagcccatcaataagggaggggtcaggactccagtacctccaagaggaagactctctgtggcttctactcccatcagccaacgacgctcgcaaggccggtcttgtggccctgcaagtcagagtaccttgggtctgaaggggtcactcaagcgctctgctatctctgcagctaaaacgggtgtcaggttttcagctgctactaaagataatgagcataagcgttcactgaccaagactccagccagaaagtctgcacatgtgaccgtgtctgggggcaccccaaaaggcgaggctgtgcttgggacacacaaattaaagaccatcacggggaattctgctgctgttattaccccattcaagttgacaactgaggcaacgcagactccagtctccaataagaaaccagtgtttgatcttaaagcaagtttgtctcgtcccctcaactatgaaccacacaaaggaaagctaaaaccatgggggcaatctaaagaaaataattatctaaatcaacatgtcaacagaattaacttctacaagaaaacttacaaacaaccccatctccagacaaaggaagagcaacggaagaaacgcgagcaagaacgaaaggagaagaaagcaaaggttttgggaatgcgaaggggcctcattttggctgaagattaataattttttaacatcttgtaaatattcctgtattctcaacttttttccttttgtaaattttttttttttgctgtcatccccactttagtcacgagatctttttctgctaactgttcatagtctgtgtagtgtccatgggttcttcatgtgctatgatctctgaaaagacgttatcaccttaaagctcaaattctttgggatggtttttacttaagtccattaacaattcaggtttctaacgagacccatcctaaaattctgtttctagatttttaatgtcaagttcccaagttccccctgctggttctaatattaacagaactgcagtcttctgctagccaatagcatttacctgatggcagctagttatgcaagcttcaggagaatttgaacaataacaagaatagggtaagctgggatagaaaggccacctcttcactctctatagaatatagtaacctttatgaaacggggccatatagtttggttatgacatcaatattttacctaggtgaaattgtttaggcttatgtaccttcgttcaaatatcctcatgtaattgccatctgtcactcactatattcacaaaaataaaactctacaactcattctaacattgcttacttaaaagctacatagccctatcgaaatgcgaggattaatgctttaatgcttttagagacagggtctcactgtgttgcccaggctggtctcaaactccaccaaatgtacttcttattcattttatggaaaagactaggctttgcttagtatcatgtccatgtttccttcacctcagtggagcttctgagttttatactgctcaagatcgtcataaataaaattttttctcattgtcataga

SEQ ID NO: 20824 - DNA, 2409 bp, Homo sapiens
  source 1..2409: mol_type = unassigned DNA
gcgttacaggccctttggcgcctgcgtattcgtgaagtgtgaaaaaagcgcgcctctgttgggacgggaaatcagcctttctattggtcagggttagaaaccccgcctttgaggcattttcaaccaatggaagcgcggcattcttcatttaaactgtctataaatttctgcctagtcaaagttaagagtggcgccagggatttgaaccgcgctgacgaagtttggtgatccatcttccgagtatcgccgggatttcgaatcgcgatgatcatcccctctctagaggagctggactccctcaagtacagtgacctgcagaacttagccaagagtctgggtctccgggccaacctgagggcaaccaagttgttaaaagccttgaaaggctacattaaacatgaggcaagaaaaggaaatgagaatcaggatgaaagtcaaacttctgcatcctcttgtgatgagactgagatacagatcagcaaccaggaagaagctgagagacagccacttggccatgtcaccaaaacaaggagaaggtgcaagactgtccgtgtggaccctgactcacagaatcatgaaaagcaggaaagccaggatctcagagctactgcaaaagttccttctccaccagacgagcaccaagaagctgagaatgctgtttcctcaggtaacagagattcaaaggtaccttcagaaggaaagaaatctctctacacagatgagtcatccaaacctggaaaaaataaaagaactgcaatcactactccaaactttaagaagcttcatgaagctcattttaaggaaatggagtccattgatcaatatattgagagaaaaaagaaacattttgaagaacacaattccatgaatgaactgaagcagcagcccatcaataagggaggggtcaggactccagtacctccaagaggaagactctctgtggcttctactcccatcagccaacgacgctcgcaaggccggtcttgtggccctgcaagtcagagtaccttgggtctgaaggggtcactcaagcgctctgctatctctgcagctaaaacgggtgtcaggttttcagctgctactaaagataatgagcataagcgttcactgaccaagactccagccagaaagtctgcacatgtgaccgtgtctgggggcaccccaaaaggcgaggctgtgcttgggacacacaaattaaagaccatcacggggaattctgctgctgttattaccccattcaagttgacaactgaggcaacgcagactccagtctccaataagaaaccagtgtttgatcttaaagcaagtttgtctcgtcccctcaactatgaaccacacaaaggaaagctaaaaccatgggggcaatctaaagaaaataattatctaaatcaacatgtcaacagaattaacttctacaagaaaacttacaaacaaccccatctccagacaaaggaagagcaacggaagaaacgcgagcaagaacgaaaggagaagaaagcaaaggttttgggaatgcgaaggggcctcattttggctgaagattaataattttttaacatcttgtaaatattcctgtattctcaacttttttccttttgtaaattttttttttttgctgtcatccccactttagtcacgagatctttttctgctaactgttcatagtctgtgtagtgtccatgggttcttcatgtgctatgatctctgaaaagacgttatcaccttaaagctcaaattctttgggatggtttttacttaagtccattaacaattcaggtttctaacgagacccatcctaaaattctgtttctagatttttaatgtcaagttcccaagttccccctgctggttctaatattaacagaactgcagtcttctgctagccaatagcatttacctgatggcagctagttatgcaagcttcaggagaatttgaacaataacaagaatagggtaagctgggatagaaaggccacctcttcactctctatagaatatagtaacctttatgaaacggggccatatagtttggttatgacatcaatattttacctaggtgaaattgtttaggcttatgtaccttcgttcaaatatcctcatgtaattgccatctgtcactcactatattcacaaaaataaaactctacaactcattctaacattgcttacttaaaagctacatagccctatcgaaatgcgaggattaatgctttaatgcttttagagacagggtctcactgtgttgcccaggctggtctcaaactccaccaaatgtacttcttattcattttatggaaaagactaggctttgcttagtatcatgtccatgtttccttcacctcagtggagcttctgagttttatactgctcaagatcgtcataaataaaattttttctcattgtcataga

SEQ ID NO: 20825 - DNA, 2790 bp, Homo sapiens
  source 1..2790: mol_type = unassigned DNA
cgcgcggcattctggggccggaagtggggtgcacgcttcgggttggtgtcatggcagctgcggggagccgcaagaggcgcctggcggagctgacggtggacgagttcctagcttcgggctttgactccgagtccgaatccgagtccgaaaattctccacaagcggagacacgggaagcacgcgaggctgcccggagtccggataagccgggcgggagcccctcggccagccggcgtaaaggccgtgcctctgagcacaaagaccagctctctcggctgaaggacagagaccccgagttctacaagttcctgcaggagaatgaccagagcctgctaaacttcagcgactcggacagctctgaggaggaagaggggccgttccactccctgccagatgtgctggaggaagccagtgaggaggaggatggagcggaggaaggagaagatggggacagagtccccagagggctgaaggggaagaagaattctgttcctgtgaccgtcgccatggttgagagatggaagcaggcagcaaagcaacgcctcactccaaagctgttccatgaagtggtacaggcgttccgagcagctgtggccaccacccgaggggaccaggaaagtgctgaggccaacaaattccaggtcacggacagtgctgcattcaatgctctggttaccttctgcatcagagacctcattggctgtctccagaagctgctgtttggaaaggtggcaaaggatagcagcaggatgctgcagccgtccagcagcccgctctgggggaagcttcgtgtggacatcaaggcttacctgggctcggccatacagctggtgtcctgtctgtcggagacgacggtgttggcggccgtgctgcggcacatcagcgtgctggtgccctgcttcctgaccttccccaagcagtgccgcatgctgctcaagagaatggtgatcgtatggagcactggggaagagtctctgcgggtgctggctttcctggtcctcagcagagtctgccggcacaagaaggacactttccttggccccgtcctcaagcaaatgtacatcacgtatgtgaggaactgcaagttcacctcgcctggtgccctccccttcatcagtttcatgcagtggaccttgacggagctgctggccctggagccgggtgtggcctaccagcacgccttcctctacatccgccagctcgccatacacctgcgcaacgccatgaccactcgcaagaaggaaacataccagtctgtgtacaactggcagtatgtgcactgcctcttcctgtggtgccgggtcctgagcactgcgggccccagcgaagccctccagcccttggtctacccccttgcccaagtcatcattggctgtatcaagctcatccccactgcccgcttctacccgctgcgaatgcactgcatccgtgccctgacgctgctctcggggagctcgggggccttcatcccggtgctgcctttcatcctggagatgttccagcaggtcgacttcaacaggaagccagggcgcatgagctccaagcccatcaacttctccgtgatcctgaagctgtccaatgtcaacctgcaggagaaggcgtaccgggacggcctggtggagcagctgtacgacctcaccctggagtacctgcacagccaggcacactgcatcggcttcccggagctggtgctgcctgtggtcctgcagctgaagtcgttcctccgggagtgcaaggtggccaactactgccggcaggtgcagcagctgcttgggaaggttcaggagaactcggcatacatctgcagccgccgccagagggtttccttcggcgtctctgagcagcaggcagtggaagcctgggagaagctgacccgggaagaggggacacccctgaccttgtactacagccactggcgcaagctgcgtgaccgggagatccagctggagatcagtggcaaagagcggctggaagacctgaacttccctgagatcaaacgaaggaagatggctgacaggaaggatgaggacaggaagcaatttaaagacctctttgacctgaacagctctgaagaggacgacaccgagggattctcggagagagggatactgaggcccctgagcactcggcatggggtggaagacgatgaagaggacgaggaggagggcgaggaggacagcagcaactcggaggatggagacccagacgcagaggcggggctggcccctggggagctgcagcagctggcccaggggccggaggacgagctggaggatctgcagctctcagaggacgactgaggcagcccatctggggggcctgtaggggctgccgggctggtggccagtgtttccacctccctggcagtcaggcctagaggctggcgtctgtgcagttgggggaggcagtagacacgggacaggctttattatttatttttcagcatgaaagaccaaacgtatcgagagctgggctgggctgggctggtgtggctgctgaagccccacagctgtgggctgctgaagtcagctccgcgggggagctgaccctgacgtcagcagaccgagaccagtcccagttccagggggaggcctgcaggcccctggccccttccaccacctctgccctccgtctgcagacctcgtccatctgcaccaggctctgccttcactcccccaagtctttgaaaatttgttcctttcctttgaagtcacattttcttttaaaattttttgttttgcatccgaaaccgaaagaaataaagcggtgggaggcagggccattgtgttg

SEQ ID NO: 20826 - DNA, 3348 bp, Homo sapiens
  source 1..3348: mol_type = unassigned DNA
atgaaatttagaagaaataaaaaacagatcccaagctttcgcaagttaataaaaactagtaaagtcaaacttgaaaacaagctaaaaaataagcagtttaaacaacaaagcactctcaagaagtaccgaaaagaacagaggaaactaaggcaagctgtgaaagatgctgtgtctaagaaacccattccattggagaacccaaaggaaaagcgaccaggtaaaaggattgagagggaagaagaggaagaagaagaagcccttcctttagatatgatggatgaagatgacttacagttaatgaaggatttaggacaaagagtatcttttctaacaagagatctttcttctagtgagcctgttcatgcgaagaaacggaagcatgaacgcattatagataaatatgaaaaaataccaagaactctgcaaactgcaccagagaaggaactgattcatttacttcctatcaaagataaaagtggtataatcccacagactagggagaagccagttactgatagtaacaaagatgaagaggatcaagaagaagagagggaacttgaggaagagatcattgaagatcctattcaagagctgaccatagaagaacatttgattgagagaaagaagaaattacaggagaagaagatgcatattgcagccttggcatctgccatattatcagatccagaaaataatattaaaaaattgaaagaattacgttctatgttgatggaacaagatcctgatgtggctgttactgttcgaaagctggtaattgtttctctgatggagttatttaaagatattactccttcatataaaatccggcccctcacagaagcagaaaaatctactaagacccgaaaagaaacccagaagttaagagaatttgaagaaggcctggttagccaatacaagttttatttggaaaatctggaacaaatggttaaagattggaagcagaggaagctgaagaaaagtaatgtagtttccttaaaggcatacaaaggactggcagaagtcgctgtgaagagcttgtgtgagctgttggtggcactacctcattttaactttcacaacaacatcatcgtattgattgtccctctcatgaatgacatgtcaaaattgatatctgaaatgtgttgtgaagctgtgaagaaactctttaagcaagataaattaggccaagcttctcttggtgtaattaaagtgatttctggttttgtgaagggcagaaattacgaagttaggccagagatgttaaaaacatttttatgcctaagaatcaaggaagtagaagtgaaaaaagatacagaagacattaataaaccaaaaaaatttatgactttcaaagaaaagagaaaatctctatcaagaatgcagagaaagtggaagaaagcagaagagaaactagagcgagagcttcgagaggcagaagcttcagagagtactgagaaaaaacttaaactgcacacagagactctgaatattgtgtttgtaacctacttcagaatattgaagaaggcccagaggtcacctctcctgccagcagttctagaaggtcttgccaagtttgctcaccttataaatgtggaattttttgatgatctgttagtagttcttcatactctcattgagtctggtgacctaagctatcaagaaagtcttcactgtgtccagactgcttttcatattctttctggacaaggtgatgttctgaatattgatccattgaaattctacacacatctctacaaaacactgttcaaattacatgcaggtgctaccaatgaaggtgttgagattgtactccagtgccttgatgtcatgctaactaagcgcagaaagcaagtttctcagcagcgagctcttgccttcatcaaacgcctttgtacccttgctcttcatgttcttccaaattcaagtattggcattttagcaactaccagaatattaatgcatactttccccaaaacagatctactgcttgacagtgaatctcagggaagtggagttttccttcctgaactggatgagcctgagtactgcaatgctcagaacactgctctgtgggaactgcatgctctgcggaggcattatcatcccatagtgcagagatttgcagcccacctgatcgctggagcaccttctgaaggctctggagcactcaaaccagagttgagtcgaagatctgctactgaactttttgaggcatatagcatggcagaaatgacattcaatcctcctgttgaatcttcaaaccccaaaataaagggtaaatttttacaaggggattcatttttgaatgaagatttaaatcagctaatcaaaagatactccagtgaagttgctactgaatcgcctctggatttcacgaaatatttgaaaacatcactacactagtagaggaatgaagtcagtggactttcttgtatatttgtgtgtgcagatgtacataaagatgagttgttaacttaggatcttttctttttatacaaggaaagcttcctaagaatgtctaggaagaagaggaagaatgaccctttgcatggcacagggttctgcccctattctgaatatgtcattccatcaaggagatcaaaagcctttttttctccccagtatttggaaattactttcttgatgatgctgccttttaaaagcttcacgtacattatagttttttaaaaaaatctttggactggatcttactgaagtgcagttgctatattaaaattagggcatagagcacagaaaaatcaagaccatgagaagacattttaccatttagctactttttataactaaatactctttaaatatttttatttcaatactgtggatggaaatgagaagcattctaaatttgagttaatatatttttatgaagatatttgagaaaagaaaaaaatagcttgtattcaggttcattggcttttgctggatgatccacctaaagaagttacctaatttggccttttaaaaaaggtgttagtgtttattatagctactttcaaggaaagtttgaatatgattctagtctctaaagttcttcacgttttctgacattccctggagggtgactggggaagaattgctccagggtagaagaaccaggcccaagactttaccattctgatctagagacaaaggatactcaatgaggagcttttttcccctcttggaacaggtaaaatgctttttcttattaatataattataaaacagtattttatgtaacagctattcccatattctaggagtggcctaagaaatgcgtgtttcagtgactagattataaatattctctattgtgaatagttgaataaaacagctgtttttttctgc

SEQ ID NO: 20827 - DNA, 3455 bp, Homo sapiens
  source 1..3455: mol_type = unassigned DNA
ggtagtgtagggacttcggcacgtgtgtcattccccgggatttctgtagtaaccctgcttctggtgaacttgtctggccggcattcatttaaggcctaaggatgaaggcgagaagaaataaaaaacagatcccaagctttcgcaagttaataaaaactagtaaagtcaaacttgaaaacaagctaaaaaataagcagtttaaacaacaaagcactctcaagaagtaccgaaaagaacagaggaaactaaggcaagctgtgaaagatgctgtgtctaagaaacccattccattggagaacccaaaggaaaagcgaccaggtaaaaggattgagagggaagaagaggaagaagaagaagcccttcctttagatatgatggatgaagatgacttacagttaatgaaggatttaggacaaagagtatcttttctaacaagagatctttcttctagtgagcctgttcatgcgaagaaacggaagcatgaacgcattatagataaatatgaaaaaataccaagaactctgcaaactgcaccagagaaggaactgattcatttacttcctatcaaagataaaagtggtataatcccacagactagggagaagccagttactgatagtaacaaagatgaagaggatcaagaagaagagagggaacttgaggaagagatcattgaagatcctattcaagagctgaccatagaagaacatttgattgagagaaagaagaaattacaggagaagaagatgcatattgcagccttggcatctgccatattatcagatccagaaaataatattaaaaaattgaaagaattacgttctatgttgatggaacaagatcctgatgtggctgttactgttcgaaagctggtaattgtttctctgatggagttatttaaagatattactccttcatataaaatccggcccctcacagaagcagaaaaatctactaagacccgaaaagaaacccagaagttaagagaatttgaagaaggcctggttagccaatacaagttttatttggaaaatctggaacaaatggttaaagattggaagcagaggaagctgaagaaaagtaatgtagtttccttaaaggcatacaaaggactggcagaagtcgctgtgaagagcttgtgtgagctgttggtggcactacctcattttaactttcacaacaacatcatcgtattgattgtccctctcatgaatgacatgtcaaaattgatatctgaaatgtgttgtgaagctgtgaagaaactctttaagcaagataaattaggccaagcttctcttggtgtaattaaagtgatttctggttttgtgaagggcagaaattacgaagttaggccagagatgttaaaaacatttttatgcctaagaatcaaggaagtagaagtgaaaaaagatacagaagacattaataaaccaaaaaaatttatgactttcaaagaaaagagaaaatctctatcaagaatgcagagaaagtggaagaaagcagaagagaaactagagcgagagcttcgagaggcagaagcttcagagagtactgagaaaaaacttaaactgcacacagagactctgaatattgtgtttgtaacctacttcagaatattgaagaaggcccagaggtcacctctcctgccagcagttctagaaggtcttgccaagtttgctcaccttataaatgtggaattttttgatgatctgttagtagttcttcatactctcattgagtctggtgacctaagctatcaagaaagtcttcactgtgtccagactgcttttcatattctttctggacaaggtgatgttctgaatattgatccattgaaattctacacacatctctacaaaacactgttcaaattacatgcaggtgctaccaatgaaggtgttgagattgtactccagtgccttgatgtcatgctaactaagcgcagaaagcaagtttctcagcagcgagctcttgccttcatcaaacgcctttgtacccttgctcttcatgttcttccaaattcaagtattggcattttagcaactaccagaatattaatgcatactttccccaaaacagatctactgcttgacagtgaatctcagggaagtggagttttccttcctgaactggatgagcctgagtactgcaatgctcagaacactgctctgtgggaactgcatgctctgcggaggcattatcatcccatagtgcagagatttgcagcccacctgatcgctggagcaccttctgaaggctctggagcactcaaaccagagttgagtcgaagatctgctactgaactttttgaggcatatagcatggcagaaatgacattcaatcctcctgttgaatcttcaaaccccaaaataaagggtaaatttttacaaggggattcatttttgaatgaagatttaaatcagctaatcaaaagatactccagtgaagttgctactgaatcgcctctggatttcacgaaatatttgaaaacatcactacactagtagaggaatgaagtcagtggactttcttgtatatttgtgtgtgcagatgtacataaagatgagttgttaacttaggatcttttctttttatacaaggaaagcttcctaagaatgtctaggaagaagaggaagaatgaccctttgcatggcacagggttctgcccctattctgaatatgtcattccatcaaggagatcaaaagcctttttttctccccagtatttggaaattactttcttgatgatgctgccttttaaaagcttcacgtacattatagttttttaaaaaaatctttggactggatcttactgaagtgcagttgctatattaaaattagggcatagagcacagaaaaatcaagaccatgagaagacattttaccatttagctactttttataactaaatactctttaaatatttttatttcaatactgtggatggaaatgagaagcattctaaatttgagttaatatatttttatgaagatatttgagaaaagaaaaaaatagcttgtattcaggttcattggcttttgctggatgatccacctaaagaagttacctaatttggccttttaaaaaaggtgttagtgtttattatagctactttcaaggaaagtttgaatatgattctagtctctaaagttcttcacgttttctgacattccctggagggtgactggggaagaattgctccagggtagaagaaccaggcccaagactttaccattctgatctagagacaaaggatactcaatgaggagcttttttcccctcttggaacaggtaaaatgctttttcttattaatataattataaaacagtattttatgtaacagctattcccatattctaggagtggcctaagaaatgcgtgtttcagtgactagattataaatattctctattgtgaatagttgaataaaacagctgtttttttctgcttccta

SEQ ID NO: 20828 - DNA, 1715 bp, Homo sapiens
  source 1..1715: mol_type = unassigned DNA
gtttctctgatggagttatttaaagatattactccttcatataaaatccggcccctcacagaagcagaaaaatctactaagacccgaaaagaaacccagaagttaagagaatttgaagaaggcctggttagccaatacaagttttatttggaaaatctggaacaaatggttaaagattggaagcagaggaagctgaagaaaagtaatgtagtttccttaaaggcatacaaaggactggcagaagtcgctgtgaagagcttgtgtgagctgttggtggcactacctcattttaactttcacaacaacatcatcgtattgattgtccctctcatgaatgacatgtcaaaattgatatctgaaatgtgttgtgaagctgtgaagaaactctttaagcaagataaattaggccaagcttctcttggtgtaattaaagtgatttctggttttgtgaagggcagaaattacgaagttaggccagagatgttaaaaacatttttatgcctaagaatcaaggaagtagaagtgaaaaaagatacagaagacattaataaaccaaaaaaatttatgactttcaaagaaaagagaaaatctctatcaagaatgcagagaaagtggaagaaagcagaagagaaactagagcgagagcttcgagaggcagaagcttcagagagtactgagaaaaaacttaaactgcacacagagactctgaatattgtgtttgtaacctacttcagaatattgaagaaggcccagaggtcacctctcctgccagcagttctagaaggtcttgccaagtttgctcaccttataaatgtggaattttttgatgatctgttagtagttcttcatactctcattgagtctggtgacctaagctatcaagaaagtcttcactgtgtccagactgcttttcatattctttctggacaaggtgatgttctgaatattgatccattgaaattctacacacatctctacaaaacactgttcaaattacatgcaggtgctaccaatgaaggtgttgagattgtactccagtgccttgatgtcatgctaactaagcgcagaaagcaagtttctcagcagcgagctcttgccttcatcaaacgcctttgtacccttgctcttcatgttcttccaaattcaagtattggcattttagcaactaccagaatattaatgcatactttccccaaaacagatctactgcttgacagtgaatctcagggaagtggagttttccttcctgaactggatgagcctgagtactgcaatgctcagaacactgctctgtgggaactgcatgctctgcggaggcattatcatcccatagtgcagagatttgcagcccacctgatcgctggagcaccttctgaaggctctggagcactcaaaccagagttgagtcgaagatctgctactgaactttttgaggcatatagcatggcagaaatgacattcaatcctcctgttgaatcttcaaaccccaaaataaaggttactacaaaaggctgaatttgaagggagtaaaggtcagttgcagtgaagaaactccctttgttgccttcccgtgagaagtagcttggtgatgagagaaagctgccaccatctggtctggattaagcaaacacccttctcctcaggcccctgccaataaggcaaagcccagagcgaacacatctcaccaggaggaaaagcagaatgtgatggactga

SEQ ID NO: 20829 - DNA, 1632 bp, Homo sapiens
  source 1..1632: mol_type = unassigned DNA
ccggcggctgagaatccgcgttgttccgtgttgggggcggcatggagcgggagccgggcgccgcgggagttcgccgggctctgggccgccggctggaggcggtgctggcgagccgcagtgaggccaacgccgtgttcgacatcctggccgtgctgcagtctgaggaccaggaggagatccaggaagcagtccgcacgtgcagccgtcttttcggggccttgctggagcggggagagctgtttgtgggccagctgccctctgaggagatggtcatgacagggtcccagggagccacacggaagtacaaggtgtggatgagacaccgctatcacagctgctgcaatcgcttgggagagctcctgggccacccctcctttcaggtcaaggagctggccctcagcgcactcctgaagttcgtgcagctggaaggagcgcaccccctggagaagtccaagtgggaaggcaactacctgttcccccgagagctcttcaagttggtggtgggaggcctgctgtctcctgaggaggaccagagcctgctcctgtcccagttccgggagtacctggactacgacgacacccgctaccacaccatgcaggcagccgtggatgccgtggcccgggtcactggccagcaccccgaggtgccccccgccttttggaacaatgccttcacgctgctgtctgccgtgagcctgccccgccgggagcccaccgtctccagcttctatgtgaagcgggcggagctgtgggacacctggaaggttgctcacctgaaggagcacaggagggttttccaggccatgtggctcagcttcctcaagcacaagctgcccctcagcctctacaagaaggtgctgctgattgtgcatgacgccatcctgccgcagctggcgcagcccacgctcatgatcgacttcctcacccgcgcctgcgacctcgggggggccctcagcctcttggccttgaacgggctgttcatcttgattcacaaacacaacctggagtaccctgacttctaccggaagctctacggcctcttggacccctctgtctttcacgtcaagtaccgcgcccgcttcttccacctggctgacctcttcctgtcctcctcccacctccccgcctacctggtggccgccttcgccaagcggctggcccgcctggccctgacggctccccctgaggccctgctcatggtcctgcctttcatctgtaacctgctgcgccggcaccctgcctgccgggtcctcgtgcaccgtccacacggccctgagttggacgccgacccctacgaccctggagaggaggacccagcccagagccgggccttggagagctccctgtgggagcttcaggccctccagcgccactaccaccctgaggtgtccaaagccgccagcgtcatcaaccaggccctgtccatgcctgaggtcagcatcgcgccactgctggagctcacggcctacgagatctttgagcgggacctgaagaagaaggggcccgagccggtgccactggagtttatcccagcccagggcctgctgggacggccgggtgaactctgtgcccagcacttcacgctcagctgaccctggcccacctgtgaataaatctcagctgaccccagcc

SEQ ID NO: 20830 - DNA, 646 bp, Homo sapiens
  source 1..646: mol_type = unassigned DNA
cccggaggagctgactttcgccagcgcccaggcggaagcgagagaagaggagcggcgagtgcgggagaccgtgcgcagggataaaacgctcctgaaggagaagaggaagcgacgcgaggagctgttcatcgaacagaagaaaagaaaactccttccagacactattttggagaagttaaccacagcttcacagactaacatcaagaaatcgccaggaaaggtgaaagaaggtatgactattctaatttaactaacttctcatgtaagtgtcaagtgcacttgcagatgtttccagtcaaatatgaatggcccttagaaagccagcatgggcctggccaaggttagctggggcctattccctgtatttcatacaaataaaaactgcatccacattggtgtgtagtggatgcttaaagtgaactccagtaaatttcctgatttatttttacgtgaatgctaattagaaaatgtaactctattttttagttaatttgcaaaagaaaaatgaagactgtgaaaaaggaaatgactccaagaaagttaaagtacaaaaagtacagtctgtcaggtaatgagtcttttgtttcatttgggatgtaaaggagacctttaagagagttaaagtattggctaacatgggaaaata

SEQ ID NO: 20831 - DNA, 1184 bp, Homo sapiens
  source 1..1184: mol_type = unassigned DNA
cagaggtcagacggtctagcgctgcgtgggccatggtgcagctccgaccgcgagcgtctcgcgccccggcgtcggcggaggcgatggtggacgagggccagctggcctcggaggaggaggaggcggagcacgggctgttgctcgggcagcccagcagcggcgcggccgccgagcccctggaggaagacgaggaaggggacgatgagtttgacgatgaggccccggaggagctgactttcgccagcgcccaggcggaagcgagagaagaggagcggcgagtgcgggagaccgtgcgcagggataaaacgctcctgaaggagaagaggaagcgacgcgaggagctgttcatcgaacagaagaaaagaaaactccttccagacactattttggagaagttaaccacagcttcacagactaacatcaagaaatcgccaggaaaggtgaaagaagttaatttgcaaaagaaaaatgaagactgtgaaaaaggaaatgactccaagaaagttaaagtacaaaaagtacagtctgtcagccagaataaaagctacttggccgtaaggctaaaagaccaagatctgagagattcaaggcaacaagcagcacaagccttcatacataattcattatatgggccaggaaccaacaggactactgtaaataagttcctgtctcttgccaacaagaggttaccagtgaaaagagctgctgtccagtttttgaataatgcttggggaatccaaaaaaaacaaaatgccaagaggtttaaaagacggtggatggtcagaaagatgaaaactaagaagtaaatcaatgctaaatgaagaatctgtactttgtatgtatagaatttatctaataaatcattcatagatcattttaaaggatcattataaaaatcataaacctatttgaggaagtgctcaaccacatttcattcttctggagtagaactgtgccttgcaatcctagaggaaaaagtggtttaagaaggaattgttttctttttaatatatttaactgaattcaagccatacccacatcagcaacagcacctcttctactctccccgggttagaggggtggcaaaaatggcacggactaaaaggagaaatggatattccagcaaagtctctaactgcagcctgtagacaatttgctattaaagattcagtgcacaaaatata

SEQ ID NO: 20832 - DNA, 4051 bp, Homo sapiens
  source 1..4051: mol_type = unassigned DNA
agaagttaggggctgcagcggcgctggctttagaaaattacttttcccactgaaacacacccaagtatatgcccagccttcatgaaagtgaacagagaaacgaagcgcctttatgtgggtggccttagccaggacatttctgaggcagacctacaaaatcagttcagcagatttggagaagtttcggatgtggagatcatcacacggaaagatgaccaaggaaacccacagaaagtttttgcatatatcaacatcagtgtagcagaagcggacctgaaaaaatccatttttcacgttatccagagggacagcagtgatgaagagaattccagtatcgtataactcagcaggtttaggtccattccatttggcatcagcagacatggtagcactttactggtatgtctgttttaaataaaacaaaatggaaaggtggaacattacaaattcaactagcaaaagaaagctttctgcacagattggcccaagagagagaagcagcaaaagctaagaaagaagaatcaacaacaggtaacgccaacttgttagaaaagacaggaggagtggatttccatatgaaagctgtgccagggacagaagtgccagggcataagaattgggttgtgagcaaatttggaagagtcttacctgttcttcaccttaaaaatcaacataaacgtaaaatcatcaaatatgatccctcaaaatactgccacaacctgaagaagataggggaggatttctcaaacaccattcctatatccagcctgacttgggaattagaaggagggaatgaccctatgagtaagaaacggcgaggagagttctctgactttcatggccctcccaagaagataataaaagtgcagaaggatgagagttccactgggtctctggccatgagtacaaggcccaggagggtaatagagagaccacccttaacacagcaacaggctgcacaaaaaagaacttgtgattccattactccttctaaatcatctcctgtacctgtttctgatactcagaaacttaaaaatctaccttttaagacttctggcttggaaactgccaagaagagaaacagcatttctgatgatgatactgattctgaagatgaattgagaatgatgattgcgaaagaggaaaacttacagagaactacacaaccctcaataaatgaatctgaaagtgatccttttgaagttgtaagggatgatttcaaatcaggcgttcacaaactgcattctttaataggtttaggtatcaaaaatcgtgtctcttgccatgatagtgatgatgatattatgagaaatgatcgtgagtatgactcaggagatacagatgaaattattgcgatgaaaaaaaatgttgctaaggtcaaaaacagtacagaattttcacaaatggaaaaatctacgaagaaaacttctttcaaaaatagagaaaactgtgagctttctgatcactgtattaaactacaaaaaagaaaaagcaatgtagagtcagccctcagtcatggattaaagtctcttaatcgtaaatctccctctcactccagtagcagtgaagatgctgattctgcatcagaattagctgactctgaaggaggtgaggagtataatgccatgatgaaaaactgccttcgtgtgaatctcactttagctgatttggaacaattggctggcagtgatctgaaggttccaaatgaagatactaagagtgatggaccagaaaccaccacccaatgcaagtttgacagaggctccaagagccccaagactcccactggcctccgcagaggccgacagtgtattcgtcctgcggagattgtggcttccctgttagaaggagaggagaacacctgtggcaaacagaaaccaaaggaaaacaatttaaagccaaaatttcaggctttcaagggagtaggctgtctatatgaaaaggagtcaatgaaaaaatccttgaaagacagtgttgcctctaacaataaagatcagaattccatgaaacatgaggatcccagtatcatatccatggaagatgggtccccatatgttaatggctcattaggtgaagtgactccatgccaacatgcaaagaaggcgaatggcccaaactatattcagcctcaaaaaagacagaccacttttgaaagccaggatcgcaaggcagtgtcccctagcagttctgaaaagagaagtaagaatcctatttctaggccattagaaggtaagaagtccttaagtcttagtgcaaagactcacaacataggctttgacaaagacagctgccatagtaccacaaagacagaagcttcacaggaagagcggtctgattcaagcggcctcacatctctcaagaaatcaccaaaggtctcatccaaggacactcgggaaatcaaaactgatttctcactttctattagtaattcgtcagatgtgagtgctaaagataagcatgctgaagacaatgagaagcgtttggcagccttggaagcgaggcaaaaagcaaaagaagtgcagaagaagctggtgcataatgctctggcaaatttggatggtcatccagaggataagccaacgcacatcatcttcggttctgacagtgaatgtgaaacagaggagacatcgactcaggagcagagccatccaggagaggaatgggtgaaagagtctatgggtaaaacatcagggaagctgtttgatagcagtgatgatgacgaatctgattctgaagatgacagtaataggttcaaaattaaacctcagtttgagggcagagctggacagaagctcatggatttacagtcgcactttggcaccgatgacagattccgcatggactctcgatttctagaaactgacagtgaagaggaacaggaagaggtaaatgaaaagaaaactgctgaggaagaagagcttgctgaagaaaaaaagaaagccctgaatgttgtacaaagtgttttgcaaatcaacttaagcaattctacaaacagaggatcagtagctgctaagaaatttaaggacatcatacattatgatccaacgaagcaagaccatgccacttacgaaagaaaaagagatgataagccaaaagaaagtaaagcaaaacgaaaaaagaaaagggaggaagctgagaaactacctgaggtgtctaaagaaatgtattataatattgctatggatctgaaagaaatattccaaactacaaaatataccagtgaaaaggaagagggcacaccctggaatgaggactgtggtaaagagaaacctgaggaaatccaggaccctgcagctctgaccagtgacgctgagcagcccagcgggttcacgttctctttttttgattcagacactaaagacataaaggaagagacctacagagttgaaacagtgaaacctggaaagattgtctggcaggaagaccctcgtttacaagacagcagttcagaagaggaagatgttactgaagaaacagatcacagaaactccagtcctggagaagcatcattacttgagaaagagaccactagatttttctttttctctaagaatgatgaacgacttcaaggttctgacttattctggagaggagtaggaagtaatatgagcaggaactcttgggaggccagaacaaccaacctgcgtatggattgtcgaaagaaacataaagacgcaaaaaggaaaatgaaaccaaaataataaatgtcagctggttttgatactgaatgtgaacaaggctcacctaaggaaactgacccagaaaacagttttagctgacaaagaagaaatttcagagtgaaggaattttaaaaatctggctgacggaatatcattctggttgccatctttttctgtggaactcctctgcatttcttcctaagtaattacttcaaaaattaaattcaacttcttataaaggaagaacaagatagtccttgaaaatactttttgtatataatctctttgccctctatcctgagtaactaatggacatcttctcatgcaaggtttatatgaagcctttttaaataaatgagtcaaagcacttg

SEQ ID NO: 20833 - DNA, 4210 bp, Homo sapiens
  source 1..4210: mol_type = unassigned DNA
cttacgccgacctagtccaggaattggtacacacagcgatagtgttcaatagaaactaggggattttggtttaggctcttttgcagtcgttgagggggaggtgacggaggcgtcagggaaggtgggaggacggaaaaggaaattaaaagctcttgggaactgaattgtggtaacggaaccttaggaggctgggttggaaatcgagtaggaaggaagagaggatgctccgttgggacacgtgaccagaagttaggggctgcagcggcgctggctttaggtgaacgacgtgaaaattacttttcccactgaaacacacccaagtatatgcccagccttcatgaaagtgaacagagaaacgaagcgcctttatgtgggtggccttagccaggacatttctgaggcagacctacaaaatcagttcagcagatttggagaagtttcggatgtggagatcatcacacggaaagatgaccaaggaaacccacagaaagtttttgcatatatcaacatcagtgtagcagaagcggacctgaaaaaatgtatgtctgttttaaataaaacaaaatggaaaggtggaacattacaaattcaactagcaaaagaaagctttctgcacagattggcccaagagagagaagcagcaaaagctaagaaagaagaatcaacaacaggtaacgccaacttgttagaaaagacaggaggagtggatttccatatgaaagctgtgccagggacagaagtgccagggcataagaattgggttgtgagcaaatttggaagagtcttacctgttcttcaccttaaaaatcaacataaacacttgcgtaacatcatcaaatatgatccctcaaaatactgccacaacctgaagaagataggggaggatttctcaaacaccattcctatatccagcctgacttgggaattagaaggagggaatgaccctatgagtaagaaacggcgaggagagttctctgactttcatggccctcccaagaagataataaaagtgcagaaggatgagagttccactgggtctctggccatgagtacaaggcccaggagggtaatagagagaccacccttaacacagcaacaggctgcacaaaaaagaacttgtgattccattactccttctaaatcatctcctgtacctgtttctgatactcagaaacttaaaaatctaccttttaagacttctggcttggaaactgccaagaagagaaacagcatttctgatgatgatactgattctgaagatgaattgagaatgatgattgcgaaagaggaaaacttacagagaactacacaaccctcaataaatgaatctgaaagtgatccttttgaagttgtaagggatgatttcaaatcaggcgttcacaaactgcattctttaataggtttaggtatcaaaaatcgtgtctcttgccatgatagtgatgatgatattatgagaaatgatcgtgagtatgactcaggagatacagatgaaattattgcgatgaaaaaaaatgttgctaaggtcaaaaacagtacagaattttcacaaatggaaaaatctacgaagaaaacttctttcaaaaatagagaaaactgtgagctttctgatcactgtattaaactacaaaaaagaaaaagcaatgtagagtcagccctcagtcatggattaaagtctcttaatcgtaaatctccctctcactccagtagcagtgaagatgctgattctgcatcagaattagctgactctgaaggaggtgaggagtataatgccatgatgaaaaactgccttcgtgtgaatctcactttagctgatttggaacaattggctggcagtgatctgaaggttccaaatgaagatactaagagtgatggaccagaaaccaccacccaatgcaagtttgacagaggctccaagagccccaagactcccactggcctccgcagaggccgacagtgtattcgtcctgcggagattgtggcttccctgttagaaggagaggagaacacctgtggcaaacagaaaccaaaggaaaacaatttaaagccaaaatttcaggctttcaagggagtaggctgtctatatgaaaaggagtcaatgaaaaaatccttgaaagacagtgttgcctctaacaataaagatcagaattccatgaaacatgaggatcccagtatcatatccatggaagatgggtccccatatgttaatggctcattaggtgaagtgactccatgccaacatgcaaagaaggcgaatggcccaaactatattcagcctcaaaaaagacagaccacttttgaaagccaggatcgcaaggcagtgtcccctagcagttctgaaaagagaagtaagaatcctatttctaggccattagaaggtaagaagtccttaagtcttagtgcaaagactcacaacataggctttgacaaagacagctgccatagtaccacaaagacagaagcttcacaggaagagcggtctgattcaagcggcctcacatctctcaagaaatcaccaaaggtctcatccaaggacactcgggaaatcaaaactgatttctcactttctattagtaattcgtcagatgtgagtgctaaagataagcatgctgaagacaatgagaagcgtttggcagccttggaagcgaggcaaaaagcaaaagaagtgcagaagaagctggtgcataatgctctggcaaatttggagtctatgggtaaaacatcagggaagctgtttgatagcagtgatgatgacgaatctgattctgaagatgacagtaataggttcaaaattaaacctcagtttgagggcagagctggacagaagctcatggatttacagtcgcactttggcaccgatgacagattccgcatggactctcgatttctagaaactgacagtgaagaggaacaggaagaggtaaatgaaaagaaaactgctgaggaagaagagcttgctgaagaaaaaaagaaagccctgaatgttgtacaaagtgttttgcaaatcaacttaagcaattctacaaacagaggatcagtagctgctaagaaatttaaggacatcatacattatgatccaacgaagcaagaccatgccacttacgaaagaaaaagagatgataagccaaaagaaagtaaagcaaaacgaaaaaagaaaagggaggaagctgagaaactacctgaggtgtctaaagaaatgtattataatattgctatggatctgaaagaaatattccaaactacaaaatataccagtgaaaaggaagagggcacaccctggaatgaggactgtggtaaagagaaacctgaggaaatccaggaccctgcagctctgaccagtgacgctgagcagcccagcgggttcacgttctctttttttgattcagacactaaagacataaaggaagagacctacagagttgaaacagtgaaacctggaaagattgtctggcaggaagaccctcgtttacaagacagcagttcagaagaggaagatgttactgaagaaacagatcacagaaactccagtcctggagaagcatcattacttgagaaagagaccactagatttttctttttctctaagaatgatgaacgacttcaaggttctgacttattctggagaggagtaggaagtaatatgagcaggaactcttgggaggccagaacaaccaacctgcgtatggattgtcgaaagaaacataaagacgcaaaaaggaaaatgaaaccaaaataataaatgtcagctggttttgatactgaatgtgaacaaggctcacctaaggaaactgacccagaaaacagttttagctgacaaagaagaaatttcagagtgaaggaattttaaaaatctggctgacggaatatcattctggttgccatctttttctgtggaactcctctgcatttcttcctaagtaattacttcaaaaattaaattcaacttcttataaaggaagaacaagatagtccttgaaaatactttttgtatataatctctttgccctctatcctgagtaactaatggacatcttctcatgcaaggtttatatgaagcctttttaaataaatgagtcaaagcacttgtattttccagcctaggctttgtgtgaattataggctatttgaaattttatttctgattatgtcaaatacaccttccattttgtcatttttgtttaaactgataaattacaagtcaacattgagtttt

SEQ ID NO: 20834 - DNA, 1098 bp, Homo sapiens
  source 1..1098: mol_type = unassigned DNA
cttacgccgacctagtccaggaattggtacacacagcgatagtgttcaatagaaactaggggattttggtttaggctcttttgcagtcgttgagggggaggtgacggaggcgtcagggaaggtgggaggacggaaaaggaaattaaaagctcttgggaactgaattgtggtaacggaaccttaggaggctgggttggaaatcgagtaggaaggaagagaggatgctccgttgggacacgtgaccagaagttaggggctgcagcggcgctggctttagaaaattacttttcccactgaaacacacccaagtatatgcccagccttcatgaaagtgaacagagaaacgaagcgcctttatgtgggtggccttagccaggacatttctgaggcagacctacaaaatcagttcagcagatttggagaagtttcggatgtggagatcatcacacggaaagatgaccaaggaaacccacagaaagtttttgcatatatcaacatcagtgtagcagaagcggacctgaaaaaatgtatgtctgttttaaataaaacaaaatggaaaggtggaacattacaaattcaactagcaaaagaaagctttctgcacagattggcccaagagagagaagcagcaaaagctaagaaagaagaatcaacaacaggtaacgccaacttgttagaaaagacaggaggagtggatttccatatgaaagctgtgccagggacagaagtgccagggcataagaattgggttgtgagcaaatttggaagagtcttacctgttcttcaccttaaaaatcaacataaacgtaaaatcatcaaatatgatccctcaaaatactgccacaacctgaagaagataggggaggatttctcaaacaccattcctatatccagcctgacttgggaattagaaggagggaatgaccctatgagtaagaaacggcgaggagagttctctgactttcatggccctcccaagaagataataaaagtgcagaaggatgagagttccactgggtctctggccatgagtacaaggcccaggagggtaatagagagaccacccttaacacagcaacaggctgcacaaaaaagaac

SEQ ID NO: 20835 - DNA, 3136 bp, Homo sapiens
  source 1..3136: mol_type = unassigned DNA
acgtgaccagaagttaggggctgcagcggcgctggctttaggtgaacgacgtggtgaggagtgggtttcgggcatgagaagtcacagggccgtttcctagtctctcttcacttctttgggtcttctcagagaaagaaggctgccgtgggtaggctgggggcggagactatcgggaagagaaaattacttttcccactgaaacacacccaagtatatgcccagccttcatgaaagtgaacagagaaacgaagcgcctttatgtgggtggccttagccaggacatttctgaggcagacctacaaaatcagttcagcagatttggagaagtttcggatgtggagatcatcacacggaaagatgaccaaggaaacccacagaaagtttttgcatatatcaacatcagtgtagcagaagcggacctgaaaaaatgtatgtctgttttaaataaaacaaaatggaaaggtggaacattacaaattcaactagcaaaagaaagctttctgcacagattggcccaagagagagaagcagcaaaagctaagaaagaagaatcaacaacaggtaacgccaacttgttagaaaagacaggaggagtggatttccatatgaaagctgtgccagggacagaagtgccagggcataagaattgggttgtgagcaaatttggaagagtcttacctgttcttcaccttaaaaatcaacataaacgtaaaatcatcaaatatgatccctcaaaatactgccacaacctgaagaagataggggaggatttctcaaacaccattcctatatccagcctgacttgggaattagaaggagggaatgaccctatgagtaagaaacggcgaggagagttctctgactttcatggccctcccaagaagataataaaagtgcagaaggatgagagttccactgggtctctggccatgagtacaaggcccaggagggtaatagagagaccacccttaacacagcaacaggctgcacaaaaaagaacttgtgattccattactccttctaaatcatctcctgtacctgtttctgatactcagaaacttaaaaatctaccttttaagacttctggcttggaaactgccaagaagagaaacagcatttctgatgatgatactgattctgaagatgaattgagaatgatgattgcgaaagaggaaaacttacagagaactacacaaccctcaataaatgaatctgaaagtgatccttttgaagttgtaagggatgatttcaaatcaggcgttcacaaactgcattctttaataggtttaggtatcaaaaatcgtgtctcttgccatgatagtgatgatgatattatgagaaatgatcgtgagtatgactcaggagatacagatgaaattattgcgatgaaaaaaaatgttgctaaggtcaaaaacagtacagaattttcacaaatggaaaaatctacgaagaaaacttctttcaaaaatagagaaaactgtgagctttctgatcactgtattaaactacaaaaaagaaaaagcaatgtagagtcagccctcagtcatggattaaagtctcttaatcgtaaatctccctctcactccagtagcagtgaagatgctgattctgcatcagaattagctgactctgaaggaggtgaggagtataatgccatgatgaaaaactgccttcgtgtgaatctcactttagctgatttggaacaattggctggcagtgatctgaaggttccaaatgaagatactaagagtgatggaccagaaaccaccacccaatgcaagtttgacagaggctccaagagccccaagactcccactggcctccgcagaggccgacagtgtattcgtcctgcggagattgtggcttccctgttagaaggagaggagaacacctgtggcaaacagaaaccaaaggaaaacaatttaaagccaaaatttcaggctttcaagggagtaggctgtctatatgaaaaggagtcaatgaaaaaatccttgaaagacagtgttgcctctaacaataaagatcagaattccatgaaacatgaggatcccagtatcatatccatggaagatgggtccccatatgttaatggctcattaggtgaagtgactccatgccaacatgcaaagaaggcgaatggcccaaactatattcagcctcaaaaaagacagaccacttttgaaagccaggatcgcaaggcagtgtcccctagcagttctgaaaagagaagtaagaatcctatttctaggccattagaaggtaagaagtccttaagtcttagtgcaaagactcacaacataggctttgacaaagacagctgccatagtaccacaaagacagaagcttcacaggaagagcggtctgattcaagcggcctcacatctctcaagaaatcaccaaaggtctcatccaaggacactcgggaaatcaaaactgatttctcactttctattagtaattcgtcagatgtgagtgctaaagataagcatgctgaagacaatgagaagcgtttggcagccttggaagcgaggcaaaaagcaaaagaagtgcagaagaagctggtgcataatgctctggcaaatttggatggtcatccagaggataagccaacgcacatcatcttcggttctgacagtgaatgtgaaacagaggagacatcgactcaggagcagagccatccaggagaggaatgggtgaaagagtctatgggtaaaacatcagggaagctgtttgatagcagtgatgatgacgaatctgattctgaagatgacagtaataggttcaaaattaaacctcagtttgagggcagagctggacagaagctcatggatttacagtcgcactttggcaccgatgacagattccgcatggactctcgatttctagaaactgacagtgaagaggaacaggaagaggtaaatgaaaagaaaactgctgaggaagaagagcttgctgaagaaaaaaagaaagccctgaatgttgtacaaagtgttttgcaaatcaacttaagcaattctacaaacagaggatcagtagctgctaagaaatttaaggacatcatacattatgatccaacgaagcaagaccatgccacttacgaaagaaaaagagatgataagccaaaagaaagtaaagc

SEQ ID NO: 20836 - DNA, 1396 bp, Homo sapiens
  source 1..1396: mol_type = unassigned DNA
ctccgttgggacacgtgaccagaagttaggggctgcagcggcgctggctttaggtgaacgacgtgattttagaagaactaagggaaagaactcttctctgtatacagaaaattacttttcccactgaaacacacccaagtatatgcccagccttcatgaaagtgaacagagaaacgaagcgcctttatgtgggtggccttagccaggacatttctgaggcagacctacaaaatcagttcagcagatttggagaagtttcggatgtggagatcatcacacggaaagatgaccaaggaaacccacagaaagtttttgcatatatcaacatcagtgtagcagaagcggacctgaaaaaatgtatgtctgttttaaataaaacaaaatggaaaggtggaacattacaaattcaactagcaaaagaaagctttctgcacagattggcccaagagagagaagcagcaaaagctaagaaagaagaatcaacaacaggtaacgccaacttgttagaaaagacaggaggagtggatttccatatgaaagctgtgccagggacagaagtgccagggcataagaattgggttgtgagcaaatttggaagagtcttacctgttcttcaccttaaaaatcaacataaacgtaaaatcatcaaatatgatccctcaaaatactgccacaacctgaagaagataggggaggatttctcaaacaccattcctatatccagcctgacttgggaattagaaggagggaatgaccctatgagtaagaaacggcgaggagagttctctgactttcatggccctcccaagaagataataaaagtgcagaaggatgagagttccactgggtctctggccatgagtacaaggcccaggagggtaatagagagaccacccttaacacagcaacaggctgcacaaaaaagaacttgtgattccattactccttctaaatcatctcctgtacctgtttctgatactcagaaacttaaaaatctaccttttaagacttctggcttggaaactgccaagaagagaaacagcatttctgatgatgatactgattctgaagatgaattgagaatgatgattgcgaaagaggaaaacttacagagaactacacaaccctcaataaatgaatctgaaagtgatccttttgaagttgtaagggatgatttcaaatcaggcgttcacaaactgcattctttaataggtttaggtatcaaaaatcgtgtctcttgccatgatagtgatgatgatattatgagaaatgatcgtgagtatgactcaggagatacagatgaaattattgcgatgaaaaaaaatgttgctaaggtcaaaaacagtacagaattttcacaaatggaaaaatctacgaagaaaacttctttcaaaaa

SEQ ID NO: 20837 - DNA, 4281 bp, Homo sapiens
  source 1..4281: mol_type = unassigned DNA
atagtgttcaatagaaactaggggattttggtttaggctcttttgcagtcgttgagggggaggtgacggaggcgtcagggaaggtgggaggacggaaaaggaaattaaaagctcttgggaactgaattgtggtaacggaaccttaggaggctgggttggaaatcgagtaggaaggaagagaggatgctccgttgggacacgtgaccagaagttaggggctgcagcggcgctggctttaggtgaacgacgtgaaaattacttttcccactgaaacacacccaagtatatgcccagccttcatgaaagtgaacagagaaacgaagcgcctttatgtgggtggccttagccaggacatttctgaggcagacctacaaaatcagttcagcagatttggagaagtttcggatgtggagatcatcacacggaaagatgaccaaggaaacccacagaaagtttttgcatatatcaacatcagtgtagcagaagcggacctgaaaaaatgtatgtctgttttaaataaaacaaaatggaaaggtggaacattacaaattcaactagcaaaagaaagctttctgcacagattggcccaagagagagaagcagcaaaagctaagaaagaagaatcaacaacaggtaacgccaacttgttagaaaagacaggaggagtggatttccatatgaaagctgtgccagggacagaagtgccagggcataagaattgggttgtgagcaaatttggaagagtcttacctgttcttcaccttaaaaatcaacataaacgtaaaatcatcaaatatgatccctcaaaatactgccacaacctgaagaagataggggaggatttctcaaacaccattcctatatccagcctgacttgggaattagaaggagggaatgaccctatgagtaagaaacggcgaggagagttctctgactttcatggccctcccaagaagataataaaagtgcagaaggatgagagttccactgggtctctggccatgagtacaaggcccaggagggtaatagagagaccacccttaacacagcaacaggctgcacaaaaaagaacttgtgattccattactccttctaaatcatctcctgtacctgtttctgatactcagaaacttaaaaatctaccttttaagacttctggcttggaaactgccaagaagagaaacagcatttctgatgatgatactgattctgaagatgaattgagaatgatgattgcgaaagaggaaaacttacagagaactacacaaccctcaataaatgaatctgaaagtgatccttttgaagttgtaagggatgatttcaaatcaggcgttcacaaactgcattctttaataggtttaggtatcaaaaatcgtgtctcttgccatgatagtgatgatgatattatgagaaatgatcgtgagtatgactcaggagatacagatgaaattattgcgatgaaaaaaaatgttgctaaggtcaaaaacagtacagaattttcacaaatggaaaaatctacgaagaaaacttctttcaaaaatagagaaaactgtgagctttctgatcactgtattaaactacaaaaaagaaaaagcaatgtagagtcagccctcagtcatggattaaagtctcttaatcgtaaatctccctctcactccagtagcagtgaagatgctgattctgcatcagaattagctgactctgaaggaggtgaggagtataatgccatgatgaaaaactgccttcgtgtgaatctcactttagctgatttggaacaattggctggcagtgatctgaaggttccaaatgaagatactaagagtgatggaccagaaaccaccacccaatgcaagtttgacagaggctccaagagccccaagactcccactggcctccgcagaggccgacagtgtattcgtcctgcggagattgtggcttccctgttagaaggagaggagaacacctgtggcaaacagaaaccaaaggaaaacaatttaaagccaaaatttcaggctttcaagggagtaggctgtctatatgaaaaggagtcaatgaaaaaatccttgaaagacagtgttgcctctaacaataaagatcagaattccatgaaacatgaggatcccagtatcatatccatggaagatgggtccccatatgttaatggctcattaggtgaagtgactccatgccaacatgcaaagaaggcgaatggcccaaactatattcagcctcaaaaaagacagaccacttttgaaagccaggatcgcaaggcagtgtcccctagcagttctgaaaagagaagtaagaatcctatttctaggccattagaaggtaagaagtccttaagtcttagtgcaaagactcacaacataggctttgacaaagacagctgccatagtaccacaaagacagaagcttcacaggaagagcggtctgattcaagcggcctcacatctctcaagaaatcaccaaaggtctcatccaaggacactcgggaaatcaaaactgatttctcactttctattagtaattcgtcagatgtgagtgctaaagataagcatgctgaagacaatgagaagcgtttggcagccttggaagcgaggcaaaaagcaaaagaagtgcagaagaagctggtgcataatgctctggcaaatttggatggtcatccagaggataagccaacgcacatcatcttcggttctgacagtgaatgtgaaacagaggagacatcgactcaggagcagagccatccaggagaggaatgggtgaaagagtctatgggtaaaacatcagggaagctgtttgatagcagtgatgatgacgaatctgattctgaagatgacagtaataggttcaaaattaaacctcagtttgagggcagagctggacagaagctcatggatttacagtcgcactttggcaccgatgacagattccgcatggactctcgatttctagaaactgacagtgaagaggaacaggaagaggtaaatgaaaagaaaactgctgaggaagaagagcttgctgaagaaaaaaagaaagccctgaatgttgtacaaagtgttttgcaaatcaacttaagcaattctacaaacagaggatcagtagctgctaagaaatttaaggacatcatacattatgatccaacgaagcaagaccatgccacttacgaaagaaaaagagatgataagccaaaagaaagtaaagcaaaacgaaaaaagaaaagggaggaagctgagaaactacctgaggtgtctaaagaaatgtattataatattgctatggatctgaaagaaatattccaaactacaaaatataccagtgaaaaggaagagggcacaccctggaatgaggactgtggtaaagagaaacctgaggaaatccaggaccctgcagctctgaccagtgacgctgagcagcccagcgggttcacgttctctttttttgattcagacactaaagacataaaggaagagacctacagagttgaaacagtgaaacctggaaagattgtctggcaggaagaccctcgtttacaagacagcagttcagaagaggaagatgttactgaagaaacagatcacagaaactccagtcctggagaagcatcattacttgagaaagagaccactagatttttctttttctctaagaatgatgaacgacttcaaggttctgacttattctggagaggagtaggaagtaatatgagcaggaactcttgggaggccagaacaaccaacctgcgtatggattgtcgaaagaaacataaagacgcaaaaaggaaaatgaaaccaaaataataaatgtcagctggttttgatactgaatgtgaacaaggctcacctaaggaaactgacccagaaaacagttttagctgacaaagaagaaatttcagagtgaaggaattttaaaaatctggctgacggaatatcattctggttgccatctttttctgtggaactcctctgcatttcttcctaagtaattacttcaaaaattaaattcaacttcttataaaggaagaacaagatagtccttgaaaatactttttgtatataatctctttgccctctatcctgagtaactaatggacatcttctcatgcaaggtttatatgaagcctttttaaataaatgagtcaaagcacttgtattttccagcctaggctttgtgtgaattataggctatttgaaattttatttctgattatgtcaaatacaccttccattttgtcatttttgtttaaactgataaattacaagtcaacattgagtttta

SEQ ID NO: 20838 - DNA, 551 bp, Homo sapiens
  source 1..551: mol_type = unassigned DNA
gtggaggggagcgcctctttatttttttcacctacttcctctcttacgccgacctagtccaggaattgaaaattacttttcccactgaaacacacccaagtatatgcccagccttcatgaaagtgaacagagaaacgaagcgcctttatgtgggtggccttagccaggacatttctgaggcagacctacaaaatcagttcagcagatttggagaagtttcggatgtggagatcatcacacggaaagatgaccaaggaaacccacagaaagtttttgcatatatcaacatcagtgtagcagaagcggacctgaaaaaatgtatgtctgttttaaataaaacaaaatggaaaggtggaacattacaaattcaactagcaaaagaaagctttctgcacagattggcccaagagagagaagcagcaaaagctaagaaagaagaatcaacaacaggtaacgccaacttgttagaaaagacaggaggagtggatttccatatgaaagctgtgccagggacagaagtgccagggcataagaattgggttgtgagcaaa

SEQ ID NO: 20839 - DNA, 4343 bp, Homo sapiens
  source 1..4343: mol_type = unassigned DNA
agaagttaggggctgcagcggcgctggctttaggtgaacgacgtggtgaggagtgggtttcgggcatgagaagtcacagggccgtttcctagtctctcttcacttctttgggtcttctcagagaaagaaggctgccgtgggtaggctgggggcggagactatcgggaagaggtaggccgaagttctgcccagaatacacgccatgtggtggacgctggttgggagtctcttctggaaagagtctgtcagctcttggggaagggaagggcgagagctgagcgcctgccgggtgctaaacgaaatgagagatactatgatgggccctagtacctctggaaaagttttcctgagtcccctgtgatacagcaaccttcatagtatagtgttaagaattccaagttctgaaggtagacctgcattataatcctggattcactaattttcgaaaattacttttcccactgaaacacacccaagtatatgcccagccttcatgaaagtgaacagagaaacgaagcgcctttatgtgggtggccttagccaggacatttctgaggcagacctacaaaatcagttcagcagatttggagaagtttcggatgtggagatcatcacacggaaagatgaccaaggaaacccacagaaagtttttgcatatatcaacatcagtgtagcagaagcggacctgaaaaaatgtatgtctgttttaaataaaacaaaatggaaaggtggaacattacaaattcaactagcaaaagaaagctttctgcacagattggcccaagagagagaagcagcaaaagctaagaaagaagaatcaacaacaggtaacgccaacttgttagaaaagacaggaggagtggatttccatatgaaagctgtgccagggacagaagtgccagggcataagaattgggttgtgagcaaatttggaagagtcttacctgttcttcaccttaaaaatcaacataaacgtaaaatcatcaaatatgatccctcaaaatactgccacaacctgaagaagataggggaggatttctcaaacaccattcctatatccagcctgacttgggaattagaaggagggaatgaccctatgagtaagaaacggcgaggagagttctctgactttcatggccctcccaagaagataataaaagtgcagaaggatgagagttccactgggtctctggccatgagtacaaggcccaggagggtaatagagagaccacccttaacacagcaacaggctgcacaaaaaagaacttgtgattccattactccttctaaatcatctcctgtacctgtttctgatactcagaaacttaaaaatctaccttttaagacttctggcttggaaactgccaagaagagaaacagcatttctgatgatgatactgattctgaagatgaattgagaatgatgattgcgaaagaggaaaacttacagagaactacacaaccctcaataaatgaatctgaaagtgatccttttgaagttgtaagggatgatttcaaatcaggcgttcacaaactgcattctttaataggtttaggtatcaaaaatcgtgtctcttgccatgatagtgatgatgatattatgagaaatgatcgtgagtatgactcaggagatacagatgaaattattgcgatgaaaaaaaatgttgctaaggtcaaaaacagtacagaattttcacaaatggaaaaatctacgaagaaaacttctttcaaaaatagagaaaactgtgagctttctgatcactgtattaaactacaaaaaagaaaaagcaatgtagagtcagccctcagtcatggattaaagtctcttaatcgtaaatctccctctcactccagtagcagtgaagatgctgattctgcatcagaattagctgactctgaaggaggtgaggagtataatgccatgatgaaaaactgccttcgtgtgaatctcactttagctgatttggaacaattggctggcagtgatctgaaggttccaaatgaagatactaagagtgatggaccagaaaccaccacccaatgcaagtttgacagaggctccaagagccccaagactcccactggcctccgcagaggccgacagtgtattcgtcctgcggagattgtggcttccctgttagaaggagaggagaacacctgtggcaaacagaaaccaaaggaaaacaatttaaagccaaaatttcaggctttcaagggagtaggctgtctatatgaaaaggagtcaatgaaaaaatccttgaaagacagtgttgcctctaacaataaagatcagaattccatgaaacatgaggatcccagtatcatatccatggaagatgggtccccatatgttaatggctcattaggtgaagtgactccatgccaacatgcaaagaaggcgaatggcccaaactatattcagcctcaaaaaagacagaccacttttgaaagccaggatcgcaaggcagtgtcccctagcagttctgaaaagagaagtaagaatcctatttctaggccattagaaggtaagaagtccttaagtcttagtgcaaagactcacaacataggctttgacaaagacagctgccatagtaccacaaagacagaagcttcacaggaagagcggtctgattcaagcggcctcacatctctcaagaaatcaccaaaggtctcatccaaggacactcgggaaatcaaaactgatttctcactttctattagtaattcgtcagatgtgagtgctaaagataagcatgctgaagacaatgagaagcgtttggcagccttggaagcgaggcaaaaagcaaaagaagtgcagaagaagctggtgcataatgctctggcaaatttggatggtcatccagaggataagccaacgcacatcatcttcggttctgacagtgaatgtgaaacagaggagacatcgactcaggagcagagccatccaggagaggaatgggtgaaagagtctatgggtaaaacatcagggaagctgtttgatagcagtgatgatgacgaatctgattctgaagatgacagtaataggttcaaaattaaacctcagtttgagggcagagctggacagaagctcatggatttacagtcgcactttggcaccgatgacagattccgcatggactctcgatttctagaaactgacagtgaagaggaacaggaagaggtaaatgaaaagaaaactgctgaggaagaagagcttgctgaagaaaaaaagaaagccctgaatgttgtacaaagtgttttgcaaatcaacttaagcaattctacaaacagaggatcagtagctgctaagaaatttaaggacatcatacattatgatccaacgaagcaagaccatgccacttacgaaagaaaaagagatgataagccaaaagaaagtaaagcaaaacgaaaaaagaaaagggaggaagctgagaaactacctgaggtgtctaaagaaatgtattataatattgctatggatctgaaagaaatattccaaactacaaaatataccagtgaaaaggaagagggcacaccctggaatgaggactgtggtaaagagaaacctgaggaaatccaggaccctgcagctctgaccagtgacgctgagcagcccagcgggttcacgttctctttttttgattcagacactaaagacataaaggaagagacctacagagttgaaacagtgaaacctggaaagattgtctggcaggaagaccctcgtttacaagacagcagttcagaagaggaagatgttactgaagaaacagatcacagaaactccagtcctggagaagcatcattacttgagaaagagaccactagatttttctttttctctaagaatgatgaacgacttcaaggttctgacttattctggagaggagtaggaagtaatatgagcaggaactcttgggaggccagaacaaccaacctgcgtatggattgtcgaaagaaacataaagacgcaaaaaggaaaatgaaaccaaaataataaatgtcagctggttttgatactgaatgtgaacaaggctcacctaaggaaactgacccagaaaacagttttagctgacaaagaagaaatttcagagtgaaggaattttaaaaatctggctgacggaatatcattctggttgccatctttttctgtggaactcctctgcatttcttcctaagtaattacttcaaaaattaaattcaacttcttataaaggaagaacaagatagtccttgaaaatactttttgtatataatctctttgccctctatcctgagtaactaatggacatcttctcatgcaaggtttatatgaagcctttttaaataaatgagtcaaagca

SEQ ID NO: 20840 - DNA, 4053 bp, Homo sapiens
  source 1..4053: mol_type = unassigned DNA
agaagttaggggctgcagcggcgctggctttagaaaattacttttcccactgaaacacacccaagtatatgcccagccttcatgaaagtgaacagagaaacgaagcgcctttatgtgggtggccttagccaggacatttctgaggcagacctacaaaatcagttcagcagatttggagaagtttcggatgtggagatcatcacacggaaagatgaccaaggaaacccacagaaagtttttgcatatatcaacatcagtgtagcagaagcggacctgaaaaaatccatttttcacgttatccagagggacagcagtgatgaagagaattccagtatcgtataactcagcaggtttaggtccattccatttggcatcagcagacatggtagcactttactggtatgtctgttttaaataaaacaaaatggaaaggtggaacattacaaattcaactagcaaaagaaagctttctgcacagattggcccaagagagagaagcagcaaaagctaagaaagaagaatcaacaacaggtaacgccaacttgttagaaaagacaggaggagtggatttccatatgaaagctgtgccagggacagaagtgccagggcataagaattgggttgtgagcaaatttggaagagtcttacctgttcttcaccttaaaaatcaacataaacgtaaaatcatcaaatatgatccctcaaaatactgccacaacctgaagaagataggggaggatttctcaaacaccattcctatatccagcctgacttgggaattagaaggagggaatgaccctatgagtaagaaacggcgaggagagttctctgactttcatggccctcccaagaagataataaaagtgcagaaggatgagagttccactgggtctctggccatgagtacaaggcccaggagggtaatagagagaccacccttaacacagcaacaggctgcacaaaaaagaacttgtgattccattactccttctaaatcatctcctgtacctgtttctgatactcagaaacttaaaaatctaccttttaagacttctggcttggaaactgccaagaagagaaacagcatttctgatgatgatactgattctgaagatgaattgagaatgatgattgcgaaagaggaaaacttacagagaactacacaaccctcaataaatgaatctgaaagtgatccttttgaagttgtaagggatgatttcaaatcaggcgttcacaaactgcattctttaataggtttaggtatcaaaaatcgtgtctcttgccatgatagtgatgatgatattatgagaaatgatcgtgagtatgactcaggagatacagatgaaattattgcgatgaaaaaaaatgttgctaaggtcaaaaacagtacagaattttcacaaatggaaaaatctacgaagaaaacttctttcaaaaatagagaaaactgtgagctttctgatcactgtattaaactacaaaaaagaaaaagcaatgtagagtcagccctcagtcatggattaaagtctcttaatcgtaaatctccctctcactccagtagcagtgaagatgctgattctgcatcagaattagctgactctgaaggaggtgaggagtataatgccatgatgaaaaactgccttcgtgtgaatctcactttagctgatttggaacaattggctggcagtgatctgaaggttccaaatgaagatactaagagtgatggaccagaaaccaccacccaatgcaagtttgacagaggctccaagagccccaagactcccactggcctccgcagaggccgacagtgtattcgtcctgcggagattgtggcttccctgttagaaggagaggagaacacctgtggcaaacagaaaccaaaggaaaacaatttaaagccaaaatttcaggctttcaagggagtaggctgtctatatgaaaaggagtcaatgaaaaaatccttgaaagacagtgttgcctctaacaataaagatcagaattccatgaaacatgaggatcccagtatcatatccatggaagatgggtccccatatgttaatggctcattaggtgaagtgactccatgccaacatgcaaagaaggcgaatggcccaaactatattcagcctcaaaaaagacagaccacttttgaaagccaggatcgcaaggcagtgtcccctagcagttctgaaaagagaagtaagaatcctatttctaggccattagaaggtaagaagtccttaagtcttagtgcaaagactcacaacataggctttgacaaagacagctgccatagtaccacaaagacagaagcttcacaggaagagcggtctgattcaagcggcctcacatctctcaagaaatcaccaaaggtctcatccaaggacactcgggaaatcaaaactgatttctcactttctattagtaattcgtcagatgtgagtgctaaagataagcatgctgaagacaatgagaagcgtttggcagccttggaagcgaggcaaaaagcaaaagaagtgcagaagaagctggtgcataatgctctggcaaatttggatggtcatccagaggataagccaacgcacatcatcttcggttctgacagtgaatgtgaaacagaggagacatcgactcaggagcagagccatccaggagaggaatgggtgaaagagtctatgggtaaaacatcagggaagctgtttgatagcagtgatgatgacgaatctgattctgaagatgacagtaataggttcaaaattaaacctcagtttgagggcagagctggacagaagctcatggatttacagtcgcactttggcaccgatgacagattccgcatggactctcgatttctagaaactgacagtgaagaggaacaggaagaggtaaatgaaaagaaaactgctgaggaagaagagcttgctgaagaaaaaaagaaagccctgaatgttgtacaaagtgttttgcaaatcaacttaagcaattctacaaacagaggatcagtagctgctaagaaatttaaggacatcatacattatgatccaacgaagcaagaccatgccacttacgaaagaaaaagagatgataagccaaaagaaagtaaagcaaaacgaaaaaagaaaagggaggaagctgagaaactacctgaggtgtctaaagaaatgtattataatattgctatggatctgaaagaaatattccaaactacaaaatataccagtgaaaaggaagagggcacaccctggaatgaggactgtggtaaagagaaacctgaggaaatccaggaccctgcagctctgaccagtgacgctgagcagcccagcgggttcacgttctctttttttgattcagacactaaagacataaaggaagagacctacagagttgaaacagtgaaacctggaaagattgtctggcaggaagaccctcgtttacaagacagcagttcagaagaggaagatgttactgaagaaacagatcacagaaactccagtcctggagaagcatcattacttgagaaagagaccactagatttttctttttctctaagaatgatgaacgacttcaaggttctgacttattctggagaggagtaggaagtaatatgagcaggaactcttgggaggccagaacaaccaacctgcgtatggattgtcgaaagaaacataaagacgcaaaaaggaaaatgaaaccaaaataataaatgtcagctggttttgatactgaatgtgaacaaggctcacctaaggaaactgacccagaaaacagttttagctgacaaagaagaaatttcagagtgaaggaattttaaaaatctggctgacggaatatcattctggttgccatctttttctgtggaactcctctgcatttcttcctaagtaattacttcaaaaattaaattcaacttcttataaaggaagaacaagatagtccttgaaaatactttttgtatataatctctttgccctctatcctgagtaactaatggacatcttctcatgcaaggtttatatgaagcctttttaaataaatgagtcaaagcacttgta

SEQ ID NO: 20841 - DNA, 4741 bp, Homo sapiens
  source 1..4741: mol_type = unassigned DNA
ggagttaggcatttccgcccacgtgggaagctatgaggtatagacccggctagaatctgaagtgcgggagagtgctggaccctgagtgatggggccggcgccagctggagagcagcttcgcggagcgactggagagccagaggtgatggaaccagccctggaaggcacaggcaaagaggggaagaaagcatcctccaggaagcgtacattggctgaacctccagcgaagggcctcctgcagccagtgaagctcagcagggcagaactgtacaaggagcctaccaatgaggagcttaatcgccttcgggagactgagatcttgttccactccagcttgcttcgtttacaggtagaggagctactaaaggaagtaaggctgtcagagaagaagaaggatcggattgatgccttcctacgggaggtcaaccagcgggttgtgagggtgccctcagtccctgagacagagctcactgaccaggcatggctcccagctggggttcgagtgcccctccaccaagtgccctatgccgtgaagggctgtttccgcttcctgcccccagcccaggttactgttgtgggcagctaccttctgggcacctgcatccgaccagacatcaatgtggatgtggcactgaccatgcccagggaaatcctacaggacaaggacgggctgaaccagcgctacttccgcaagcgtgccctctacctggcccacttggctcaccacctggcccaggaccccctctttggcagtgtttgcttctcctacacaaatggctgccacctgaaaccctcactgttgctgcggccgcgtggaaaggatgagcgcctggtcactgtacgtctgcatccgtgccctccacctgacttcttccgcccgtgccgcttgctgccaaccaagaacaatgtgcgctctgcctggtaccgagggcagagtcctgcaggggatggtagcccagagcctcctaccccccgctataacacatgggtcctgcaagatacagttctcgagtcccatttgcagctgctgtcaaccattctgagttcagcccagggcctgaaggatggcgtggcacttctgaaggtctggctgcggcagcgggagctggacaagggccagggtgggtttactgggttccttgtctccatgctggttgtcttccttgtgtctacacgcaagatccataccaccatgagtggctaccaggtcctgagaagtgtcttgcagtttctggccactacagacctgacagtcaacgggatcagtttatgtctcagctcagatccctctttgccggccctggctgacttccaccaggccttctccgttgtcttcctggattcctcaggccatctcaacctctgtgctgatgtcactgcctctacttaccaccaggtacagcatgaggcacggctgtctatgatgttgctggacagcagagctgacgacgggttccacctgctgttgatgactcccaaacccatgatccgggcttttgaccatgtcctgcatctccgtccactgagtcgcctgcaggcagcgtgccaccggctgaagctctggccagagctgcaggacaatggtggggactatgtctcagctgctttgggccccctgaccaccctcctggagcagggcctgggggctcggctgaacctgctggctcactctcgacccccagtcccagagtgggacatcagccaagatccaccaaagcacaaagactctgggaccctgaccctgggactccttctccggcctgagggactgaccagcgtccttgagctgggtccagaggcagaccagcctgaggctgctaaattccgccagttctggggatcccgctcggagcttcggcgtttccaggacggagccattcgggaagctgtggtctgggaggcagcctctatgtcccagaagcgccttattccccaccaggtggtcacccacctcttggcactccatgctgacatcccagaaacctgtgtccactatgtggggggccccctggatgcacttatccaaggcctgaaagagacctccagcacaggtgaggaggccctggtagcggcggtacgttgctacgacgacctcagtcgcctactgtgggggctagagggtctcccactgaccgtgtctgctgttcagggagctcacccagtgctgcgctacacagaggtgttcccaccaactccagtccgtccagccttctccttctatgagactctgcgggagcggtcctcactgctgccccggctcgataagccctgtccggcctacgtggagcccatgaccgtggtttgtcacctggagggcagtggccagtggccacaggacgctgaggccgtgcagcgggtccgagctgccttccagctgcgcctggcagagctgttgacacaacagcatggtctgcagtgccgtgccactgccacgcacacggatgtccttaaggatggatttgtgtttcggattcgcgtggcctatcagcgggagccccagatcctgaaggaggtgcagagcccagaggggatgatctcgctgagggacacagctgcctccctccgccttgagagagacacaaggcagttgccactgctcaccagtgccctgcacggactgcagcagcagcacccagccttctctggtgtggcacggctggccaagcggtgggtgcgtgcccagcttcttggtgagggtttcgctgatgagagcctggatctggtggccgctgcccttttcctgcaccctgagcccttcacccctccgagttccccccaggttggcttccttcgattccttttcttggtatcaacgtttgattggaagaacaaccccctctttgtcaacctcaataatgagctcactgtggaggagcaggtggagatccgcagtggcttcctggcagctcgggcacagctccccgtcatggtcattgttaccccccaagaccgcaaaaactctgtgtggacacaggatggaccctcagcccagatcctgcagcagcttgtggtcctggcagctgaagccctgcccatgttagagaagcagctcatggatccccggggacctggggacatcaggacagtgttccggccgcccttggacatttacgacgtgctgattcgcctgtctcctcgccatatcccgcggcaccgccaggctgtggactcgccagctgcctccttctgccggggcctgctcagccagccggggccctcatccctgatgcccgtgctgggctatgatcctcctcagctctatctgacgcagctcagggaggcctttggggatctggcccttttcttctatgaccagcatggtggagaggtgattggtgtcctctggaagcccaccagcttccagccgcagcccttcaaggcctccagcacaaaggggcgcatggtgatgtctcgaggtggggagctagtaatggtgcccaatgttgaagcaatcctggaggactttgctgtgctgggtgaaggcctggtgcagactgtggaggcccgaagtgagaggtggactgtgtgatcccagctctggagcaagctgtagacggacagcaggacattggacctctagagcaagatgtcagtaggatgacctccaccctccttggacatgaatcctccatggagggcctgctggctgaacatgctgaatcatctccaacaaaacccagccccaactttctctctgatgctccagcattggggcaggggcatggtggcccatgtagtctcctgggcctcaccatcccagaagaggagtgggagccagctcagagaaggaactgaacccaggagatccatccacctattagccctgggcctggacctccctgcgatttcccactcctttcttagtcttcttccagaaacagagaaggggatgtgtgcctgggagaggctctgtctccttcctgctgccaggacctgtgcctagacttagcatgcccttcactgcagtgtcaggcctttagatgggacccagcgaaaatgtggcccttctgagtcacatcaccgacactgagcagtggaaaggggctatatgtgtatgaatagaccacattgaaggagcacaatgccctcctgtgttgatgccacttcccagggtggagacagtggaaaagaaccgaggacaggaaaggattgggtaggtgaaggggtcaggggactggtagtcacccaatcttggagaggtgcaaaaagcactgggggctacccgttagctgcatctgccctggctgtttgcccgttcatgtcacaaactgccactactatgtacctgcagtggggttgcagagatgggggagactcaagtcttactccccaggagctcccagggcccaaggaggagaatgctgcctcctttcagtctggtctacacccactttctggtagcctctctgcttcctgtaattctggctgtttttccagactcagctcaaatagtgcccctccttaagcccatccctcgcccccagcctgaggtgatctttccctcctctgaactattagagcagttactgtctgttcagttcgtttggcaggcacacacagtggcataaattctattgttttgaactctgatttaaaattaaattgcagctgggcgtggtggcttatgcttgtaatcccaacacttagggagtcaggagaatcacttgagctcaggagttctagaccaatctgggcaacagagagaccccatctcttttaaataaaaagttaaattgcttaa

SEQ ID NO: 20842 - DNA, 3125 bp, Homo sapiens
  source 1..3125: mol_type = unassigned DNA
tggacttgggcctggagttaggcatttccgcccacgtgggaagctatgaggtatagacccggctagaatctgaagtgcgggagagtgctggaccctgagtgatggggccggcgccagctggagagcagcttcgcggagcgactggagagccagaggtgatggaaccagccctggaaggcacaggcaaagaggggaagaaagcatcctccaggaagcgtacattggctgaacctccagcgaagggcctcctgcagccagtgaagctcagcagggcagaactgtacaaggagcctaccaatgaggagcttaatcgccttcgggagactgagatcttgttccactccagcttgcttcgtttacaggtagaggagctactaaaggaagtaaggctgtcagagaagaagaaggatcggattgatgccttcctacgggaggtcaaccagcgggttgtgagggtgccctcagtccctgagacagagctcactgaccaggcatggctcccagctggggttcgagtgcccctccaccaagtgccctatgccgtgaagggctgtttccgcttcctgcccccagcccaggttactgttgtgggcagctaccttctgggcacctgcatccgaccagacatcaatgtggatgtggcactgaccatgcccagggaaatcctacaggacaaggacgggctgaaccagcgctacttccgcaagcgtgccctctacctggcccacttggctcaccacctggcccaggaccccctctttggcagtgtttgcttctcctacacaaatggctgccacctgaaaccctcactgttgctgcggccgcgtggaaaggatgagcgcctggtcactgtacgtctgcatccgtgccctccacctgacttcttccgcccgtgccgcttgctgccaaccaagaacaatgtgcgctctgcctggtaccgagggcagagtcctgcaggggatggtagcccagagcctcctaccccccgctataacacatgggtcctgcaagatacagttctcgagtcccatttgcagctgctgtcaaccattctgagttcagcccagggcctgaaggatggcgtggcacttctgaaggtctggctgcggcagcgggagctggacaagggccagggtgggtttactgggttccttgtctccatgctggttgtcttccttgtgtctacacgcaagatccataccaccatgagtggctaccaggtcctgagaagtgtcttgcagtttctggccactacagacctgacagtcaacgggatcagtttatgtctcagctcagatccctctttgccggccctggctgacttccaccaggccttctccgttgtcttcctggattcctcaggccatctcaacctctgtgctgatgtcactgcctctacttaccaccaggtacagcatgaggcacggctgtctatgatgttgctggacagcagagctgacgacgggttccacctgctgttgatgactcccaaacccatgatccgggcttttgaccatgtcctgcatctccgtccactgagtcgcctgcaggcagcgtgccaccggctgaagctctggccagagctgcaggacaatggtggggactatgtctcagctgctttgggccccctgaccaccctcctggagcagggcctgggggctcggctgaacctgctggctcactctcgacccccagtcccagagtgggacatcagccaagatccaccaaagcacaaagactctgggaccctgaccctgggactccttctccggcctgagggactgaccagcgtccttgagctgggtccagaggcagaccagcctgaggctgctaaattccgccagttctggggatcccgctcggagcttcggcgtttccaggacggagccattcgggaagctgtggtctgggaggcagcctctatgtcccagaagcgccttattccccaccaggtggtcacccacctcttggcactccatgctgacatcccagaaacctgtgtccactatgtggggggccccctggatgcacttatccaaggcctgaaagagacctccagcacaggtgaggaggccctggtagcggcggtacgttgctacgacgacctcagtcgcctactgtgggggctagagggtctcccactgaccgtgtctgctgttcagggagctcacccagtgctgcgctacacagaggtgttcccaccaactccagtccgtccagccttctccttctatgagactctgcgggagcggtcctcactgctgccccggctcgataagccctgtccggcctacgtggagcccatgaccgtggtttgtcacctggagggcagtggccagtggccacaggacgctgaggccgtgcagcgggtccgagctgccttccagctgcgcctggcagagctgttgacacaacagcatggtctgcagtgccgtgccactgccacgcacacggatgtccttaaggatggatttgtgtttcggattcgcgtggcctatcagcgggagccccagatcctgaaggaggtgcagagcccagaggggatgatctcgctgagggacacagctgcctccctccgccttgagagagacacaaggcagttgccactgctcaccagtgccctgcacggactgcagcagcagcacccagccttctctggtgtggcacggctggccaagcggtgggtgcgtgcccagcttcttggtgagggtttcgctgatgagagcctggatctggtggccgctgcccttttcctgcaccctgagcccttcacccctccgagttccccccaggttggcttccttcgattccttttcttggtatcaacgtttgattggaagaacaaccccctctttgtcaacctcaataatgagctcactgtggaggagcaggtggagatccgcagtggcttcctggcagctcgggcacagctccccgtcatggtcattgttaccccccaagaccgcaaaaactctgtgtggacacaggatggaccctcagcccagatcctgcagcagcttgtggtcctggcagctgaagccctgcccatgttagagaagcagctcatggatccccggggacctggggacatcaggtgggacccagcgaaaatgtggcccttctga

SEQ ID NO: 20843 - DNA, 3411 bp, Homo sapiens
  source 1..3411: mol_type = unassigned DNA
ggagttaggcatttccgcccacgtgggaagctatgaggtatagacccggctagaatctgaagtgcgggagagtgctggaccctgagtgatggggccggcgccagctggagagcagcttcgcggagcgactggagagccagaggtgatggaaccagccctggaaggcacaggcaaagaggggaagaaagcatcctccaggaagcgtacattggctgaacctccagcgaagggcctcctgcagccagtgaagctcagcagggcagaactgtacaaggagcctaccaatgaggagcttaatcgccttcgggagactgagatcttgttccactccagcttgcttcgtttacaggtagaggagctactaaaggaagtaaggctgtcagagaagaagaaggatcggattgatgccttcctacgggaggtcaaccagcgggttgtgagggtgccctcagtccctgagacagagctcactgaccaggcatggctcccagctggggttcgagtgcccctccaccaagtgccctatgccgtgaagggctgtttccgcttcctgcccccagcccaggttactgttgtgggcagctaccttctgggcacctgcatccgaccagacatcaatgtggatgtggcactgaccatgcccagggaaatcctacaggacaaggacgggctgaaccagcgctacttccgcaagcgtgccctctacctggcccacttggctcaccacctggcccaggaccccctctttggcagtgtttgcttctcctacacaaatggctgccacctgaaaccctcactgttgctgcggccgcgtggaaaggatgagcgcctggtcactgtacgtctgcatccgtgccctccacctgacttcttccgcccgtgccgcttgctgccaaccaagaacaatgtgcgctctgcctggtaccgagggcagagtcctgcaggggatggtagcccagagcctcctaccccccgctataacacatgggtcctgcaagatacagttctcgagtcccatttgcagctgctgtcaaccattctgagttcagcccagggcctgaaggatggcgtggcacttctgaaggtctggctgcggcagcgggagctggacaagggccagggtgggtttactgggttccttgtctccatgctggttgtcttccttgtgtctacacgcaagatccataccaccatgagtggctaccaggtcctgagaagtgtcttgcagtttctggccactacagacctgacagtcaacgggatcagtttatgtctcagctcagatccctctttgccggccctggctgacttccaccaggccttctccgttgtcttcctggattcctcaggccatctcaacctctgtgctgatgtcactgcctctacttaccaccaggtacagcatgaggcacggctgtctatgatgttgctggacagcagagctgacgacgggttccacctgctgttgatgactcccaaacccatgatccgggcttttgaccatgtcctgcatctccgtccactgagtcgcctgcaggcagcgtgccaccggctgaagctctggccagagctgcaggacaatggtggggactatgtctcagctgctttgggccccctgaccaccctcctggagcagggcctgggggctcggctgaacctgctggctcactctcgacccccagtcccagagtgggacatcagccaagatccaccaaagcacaaagactctgggaccctgaccctgggactccttctccggcctgagggactgaccagcgtccttgagctgggtccagaggcagaccagcctgaggctgctaaattccgccagttctggggatcccgctcggagcttcggcgtttccaggacggagccattcgggaagctgtggtctgggaggcagcctctatgtcccagaagcgccttattccccaccaggtggtcacccacctcttggcactccatgctgacatcccagaaacctgtgtccactatgtggggggccccctggatgcacttatccaaggcctgaaagaggcctccagcacaaaggggcgcatggtgatgtctcgaggtggggagctagtaatggtgcccaatgttgaagcaatcctggaggactttgctgtgctgggtgaaggcctggtgcagactgtggaggcccgaagtgagaggtggactgtgtgatcccagctctggagcaagctgtagacggacagcaggacattggacctctagagcaagatgtcagtaggatgacctccaccctccttggacatgaatcctccatggagggcctgctggctgaacatgctgaatcatctccaacaaaacccagccccaactttctctctgatgctccagcattggggcaggggcatggtggcccatgtagtctcctgggcctcaccatcccagaagaggagtgggagccagctcagagaaggaactgaacccaggagatccatccacctattagccctgggcctggacctccctgcgatttcccactcctttcttagtcttcttccagaaacagagaaggggatgtgtgcctgggagaggctctgtctccttcctgctgccaggacctgtgcctagacttagcatgcccttcactgcagtgtcaggcctttagatgggacccagcgaaaatgtggcccttctgagtcacatcaccgacactgagcagtggaaaggggctatatgtgtatgaatagaccacattgaaggagcacaatgccctcctgtgttgatgccacttcccagggtggagacagtggaaaagaaccgaggacaggaaaggattgggtaggtgaaggggtcaggggactggtagtcacccaatcttggagaggtgcaaaaagcactgggggctacccgttagctgcatctgccctggctgtttgcccgttcatgtcacaaactgccactactatgtacctgcagtggggttgcagagatgggggagactcaagtcttactccccaggagctcccagggcccaaggaggagaatgctgcctcctttcagtctggtctacacccactttctggtagcctctctgcttcctgtaattctggctgtttttccagactcagctcaaatagtgcccctccttaagcccatccctcgcccccagcctgaggtgatctttccctcctctgaactattagagcagttactgtctgttcagttcgtttggcaggcacacacagtggcataaattctattgttttgaactctgatttaaaattaaattgcagctgggcgtggtggcttatgcttgtaatcccaacacttagggagtcaggagaatcacttgagctcaggagttctagaccaatctgggcaacagagagaccccatctcttttaaataaaaagttaaattgcttaatttcccccgta

SEQ ID NO: 20844 - DNA, 2190 bp, Homo sapiens
  source 1..2190: mol_type = unassigned DNA
actttttccccagctgagaagtttccttgcggccagccatcatccttcgtgctgcaccctaagtctacatgggaatgggtggttgagcaagtggcagaaggggttctaagatgccctgccctgccaatccacaccagggggtctgagctccatagcctgagagaagcctggggatatgtggctgggccctggattctttgcttactccagccctttagttccccccaggttggcttccttcgattccttttcttggtatcaacgtttgattggaagaacaaccccctctttgtcaacctcaataatgagctcactgtggaggagcaggtggagatccgcagtggcttcctggcagctcgggcacagctccccgtcatggtcattgttaccccccaagaccgcaaaaactctgtgtggacacaggatggaccctcagcccagatcctgcagcagcttgtggtcctggcagctgaagccctgcccatgttagagaagcagctcatggatccccggggacctggggacatcaggacagtgttccggccgcccttggacatttacgacgtgctgattcgcctgtctcctcgccatatcccgcggcaccgccaggctgtggactcgccagctgcctccttctgccggggcctgctcagccagccggggccctcatccctgatgcccgtgctgggctatgatcctcctcagctctatctgacgcagctcagggaggcctttggggatctggcccttttcttctatgaccagcatggtggagaggtgattggtgtcctctggaagcccaccagcttccagccgcagcccttcaaggcctccagcacaaaggggcgcatggtgatgtctcgaggtggggagctagtaatggtgcccaatgttgaagcaatcctggaggactttgctgtgctgggtgaaggcctggtgcagactgtggaggcccgaagtgagaggtggactgtgtgatcccagctctggagcaagctgtagacggacagcaggacattggacctctagagcaagatgtcagtaggatgacctccaccctccttggacatgaatcctccatggagggcctgctggctgaacatgctgaatcatctccaacaaaacccagccccaactttctctctgatgctccagcattggggcaggggcatggtggcccatgtagtctcctgggcctcaccatcccagaagaggagtgggagccagctcagagaaggaactgaacccaggagatccatccacctattagccctgggcctggacctccctgcgatttcccactcctttcttagtcttcttccagaaacagagaaggggatgtgtgcctgggagaggctctgtctccttcctgctgccaggacctgtgcctagacttagcatgcccttcactgcagtgtcaggcctttagatgggacccagcgaaaatgtggcccttctgagtcacatcaccgacactgagcagtggaaaggggctatatgtgtatgaatagaccacattgaaggagcacaatgccctcctgtgttgatgccacttcccagggtggagacagtggaaaagaaccgaggacaggaaaggattgggtaggtgaaggggtcaggggactggtagtcacccaatcttggagaggtgcaaaaagcactgggggctacccgttagctgcatctgccctggctgtttgcccgttcatgtcacaaactgccactactatgtacctgcagtggggttgcagagatgggggagactcaagtcttactccccaggagctcccagggcccaaggaggagaatgctgcctcctttcagtctggtctacacccactttctggtagcctctctgcttcctgtaattctggctgtttttccagactcagctcaaatagtgcccctccttaagcccatccctcgcccccagcctgaggtgatctttccctcctctgaactattagagcagttactgtctgttcagttcgtttggcaggcacacacagtggcataaattctattgttttgaactctgatttaaaattaaattgcagctgggcgtggtggcttatgcttgtaatcccaacacttagggagtcaggagaatcacttgagctcaggagttctagaccaatctgggcaacagagagaccccatctcttttaaataaaaagttaaattgcttaa

SEQ ID NO: 20845 - DNA, 3843 bp, Homo sapiens
  source 1..3843: mol_type = unassigned DNA
ggagttaggcatttccgcccacgtgggaagctatgaggtatagacccggctagaatctgaagtgcgggagagtgctggaccctgagtgatggggccggcgccagctggagagcagcttcgcggagcgactggagagccagaggtgatggaaccagccctggaaggcacaggcaaagaggggaagaaagcatcctccaggaagcgtacattggctgaacctccagcgaagggcctcctgcagccagtgaagctcagcagggcagaactgtacaaggagcctaccaatgaggagcttaatcgccttcgggagactgagatcttgttccactccagcttgcttcgtttacaggtagaggagctactaaaggaagtaaggctgtcagagaagaagaaggatcggattgatgccttcctacgggaggtcaaccagcgggttgtgagggtgccctcagtccctgagacagagctcactgaccaggcatggctcccagctggggttcgagtgcccctccaccaagtgccctatgccgtgaagggctgtttccgcttcctgcccccagcccaggttactgttgtgggcagctaccttctgggcacctgcatccgaccagacatcaatgtggatgtggcactgaccatgcccagggaaatcctacaggacaaggacgggctgaaccagcgctacttccgcaagcgtgccctctacctggcccacttggctcaccacctggcccaggaccccctctttggcagtgtttgcttctcctacacaaatggctgccacctgaaaccctcactgttgctgcggccgcgtggaaaggatgagcgcctggtcactgtacgtctgcatccgtgccctccacctgacttcttccgcccgtgccgcttgctgccaaccaagaacaatgtgcgctctgcctggtaccgagggcagagtcctgcaggggatggtagcccagagcctcctaccccccgctataacacatgggtcctgcaagatacagttctcgagtcccatttgcagctgctgtcaaccattctgagttcagcccagggcctgaaggatggcgtggcacttctgaaggtctggctgcggcagcgggagctggacaagggccagggtgggtttactgggttccttgtctccatgctggttgtcttccttgtgtctacacgcaagatccataccaccatgagtggctaccaggtcctgagaagtgtcttgcagtttctggccactacagacctgacagtcaacgggatcagtttatgtctcagctcagatccctctttgccggccctggctgacttccaccaggccttctccgttgtcttcctggattcctcaggccatctcaacctctgtgctgatgtcactgcctctacttaccaccaggtacagcatgaggcacggctgtctatgatgttgctggacagcagagctgacgacgggttccacctgctgttgatgactcccaaacccatgatccgggcttttgaccatgtcctgcatctccgtccactgagtcgcctgcaggcagcgtgccaccggctgaagctctggccagagctgcaggacaatggtggggactatgtctcagctgctttgggccccctgaccaccctcctggagcagggcctgggggctcggctgaacctgctggctcactctcgacccccagtcccagagtgggacatcagccaagatccaccaaagcacaaagactctgggaccctgaccctgggactccttctccggcctgagggactgaccagcgtccttgagctgggtccagaggcagaccagcctgaggctgctaaattccgccagttctggggatcccgctcggagcttcggcgtttccaggacggagccattcgggaagctgtggtctgggaggcagcctctatgtcccagaagcgccttattccccaccaggtggtcacccacctcttggcactccatgctgacatcccagaaacctgtgtccactatgtggggggccccctggatgcacttatccaaggcctgaaagagacctccagcacaggtgaggaggccctggtagcggcggtacgttgctacgacgacctcagtcgcctactgtgggggctagagggtctcccactgaccgtgtctgctgttcagggagctcacccagtgctgcgctacacagaggtgttcccaccaactccagtccgtccagccttctccttctatgagactctgcgggagcggtcctcactgctgccccggctcgataagccctgtccggcctacgtggagcccatgaccgtggtttgtcacctggagggcagtggccagtggccacaggacgctgaggccgtgcagcgggtccgagctgccttccagctgcgcctggcagagctgttgacacaacagcatggtctgcagtgccgtgccactgccacgcacacggatgtccttaaggatggatttgtgtttcggattcgcgtggcctatcagcgggagccccagatcctgaaggaggtgcagagcccagaggggatgatctcgctgagggacacagctgcctccctccgccttgagagagacacaaggcagttgccactgctcaccagtgccctgcacggactgcagcagcagcacccagccttctctggtgtggcacggctggccaagcggtgggtgcgtgcccagcttcttggtgagggtttcgctgatgagagcctggatctggtggccgctgcccttttcctgcaccctgagcccttcacccctccgagttccccccaggttggcttccttcgattccttttcttggtatcaacgtttgattggaagaacaaccccctctttgtcaacctcaataatgagctcactgtggaggagcaggtggagatccgcagtggcttcctggcagctcgggcacagctccccgtcatggtcattgttaccccccaagaccgcaaaaactctgtgtggacacaggatggaccctcagcccagatcctgcagcagcttgtggtcctggcagctgaagccctgcccatgttagagaagcagctcatggatccccggggacctggggacatcaggatgggacccagcgaaaatgtggcccttctgagtcacatcaccgacactgagcagtggaaaggggctatatgtgtatgaatagaccacattgaaggagcacaatgccctcctgtgttgatgccacttcccagggtggagacagtggaaaagaaccgaggacaggaaaggattgggtaggtgaaggggtcaggggactggtagtcacccaatcttggagaggtgcaaaaagcactgggggctacccgttagctgcatctgccctggctgtttgcccgttcatgtcacaaactgccactactatgtacctgcagtggggttgcagagatgggggagactcaagtcttactccccaggagctcccagggcccaaggaggagaatgctgcctcctttcagtctggtctacacccactttctggtagcctctctgcttcctgtaattctggctgtttttccagactcagctcaaatagtgcccctccttaagcccatccctcgcccccagcctgaggtgatctttccctcctctgaactattagagcagttactgtctgttcagttcgtttggcaggcacacacagtggcataaattctattgttttgaactctgatttaaaattaaattgcagctgggcgtggtggcttatgcttgtaatcccaacacttagggagtcaggagaatcacttgagctcaggagttctagaccaatctgggcaacagagagaccccatctcttttaaataaaaagttaaattgcttaa

SEQ ID NO: 20846 - DNA, 3412 bp, Homo sapiens
  source 1..3412: mol_type = unassigned DNA
agctatgaggtatagacccggctagaatctgaagtgcgggagagtgctggaccctgagtgatggggccggcgccagctggagagcagcttcgcggagcgactggagagccagaggtgatggaaccagccctggaaggcacaggcaaagaggggaagaaagcatcctccaggaagcgtacattggctgaacctccagcgaagggcctcctgcagccagtgaagctcagcagggcagaactgtacaaggagcctaccaatgaggagcttaatcgccttcgggagactgagatcttgttccactccagcttgcttcgtttacaggtagaggagctactaaaggaagtaaggctgtcagagaagaagaaggatcggattgatgccttcctacgggaggtcaaccagcgggttgtgagggtgccctcagtccctgagacagaggaaatcctacaggacaaggacgggctgaaccagcgctacttccgcaagcgtgccctctacctggcccacttggctcaccacctggcccaggaccccctctttggcagtgtttgcttctcctacacaaatggctgccacctgaaaccctcactgttgctgcggccgcgtggaaaggatgagcgcctggtcactgtacgtctgcatccgtgccctccacctgacttcttccgcccgtgccgcttgctgccaaccaagaacaatgtgcgctctgcctggtaccgagggcagagtcctgcaggggatggtagcccagagcctcctaccccccgctataacacatgggtcctgcaagatacagttctcgagtcccatttgcagctgctgtcaaccattctgagttcagcccagggcctgaaggatggcgtggcacttctgaaggtctggctgcggcagcgggagctggacaagggccagggtgggtttactgggttccttgtctccatgctggttgtcttccttgtgtctacacgcaagatccataccaccatgagtggctaccaggtcctgagaagtgtcttgcagtttctggccactacagacctgacagtcaacgggatcagtttatgtctcagctcagatccctctttgccggccctggctgacttccaccaggccttctccgttgtcttcctggattcctcaggccatctcaacctctgtgctgatgtcactgcctctacttaccaccagggatggtcccttctgtggctccaggtacagcatgaggcacggctgtctatgatgttgctggacagcagagctgacgacgggttccacctgctgttgatgactcccaaacccatgatccgggcttttgaccatgtcctgcatctccgtccactgagtcgcctgcaggcagcgtgccaccggctgaagctctggccagagctgcaggacaatggtggggactatgtctcagctgctttgggccccctgaccaccctcctggagcagggcctgggggctcggctgaacctgctggctcactctcgacccccagtcccagagtgggacatcagccaagatccaccaaagcacaaagactctgggaccctgaccctgggactccttctccggcctgagggactgaccagcgtccttgagctgggtccagaggcagaccagcctgaggctgctaaattccgccagttctggggatcccgctcggagcttcggcgtttccaggacggagccattcgggaagctgtggtctgggaggcagcctctatgtcccagaagcgccttattccccaccaggtggtcacccacctcttggcactccatgctgacatcccagaaacctgtgtccactatgtggggggccccctggatgcacttatccaaggcctgaaagagacctccagcacaggtgaggaggccctggtagcggcggtacgttgctacgacgacctcagtcgcctactgtgggggctagagggtctcccactgaccgtgtctgctgttcagggagctcacccagtgctgcgctacacagaggtgttcccaccaactccagtccgtccagccttctccttctatgagactctgcgggagcggtcctcactgctgccccggctcgataagccctgtccggcctacgtggagcccatgaccgtggtttgtcacctggagggcagtggccagtggccacaggacgctgaggccgtgcagcgggtccgagctgccttccagctgcgcctggcagagctgttgacacaacagcatggtctgcagtgccgtgccactgccacgcacacggatgtccttaaggatggatttgtgtttcggattcgcgtggcctatcagcgggagccccagatcctgaaggaggtgcagagcccagaggggatgatctcgctgagggacacagctgcctccctccgccttgagagagacacaaggcagttgccactgctcaccagtgccctgcacggactgcagcagcagcacccagccttctctggtgtggcacggctggccaagcggtgggtgcgtgcccagcttcttggtgagggtttcgctgatgagagcctggatctggtggccgctgcccttttcctgcaccctgagcccttcacccctccgagttccccccaggttggcttccttcgattccttttcttggtatcaacgtttgattggaagaacaaccccctctttgtcaacctcaataatgagctcactgtggaggagcaggtggagatccgcagtggcttcctggcagctcgggcacagctccccgtcatggtcattgttaccccccaagaccgcaaaaactctgtgtggacacaggatggaccctcagcccagatcctgcagcagcttgtggtcctggcagctgaagccctgcccatgttagagaagcagctcatggatccccggggacctggggacatcaggacagtgttccggccgcccttggacatttacgacgtgctgattcgcctgtctcctcgccatatcccgcggcaccgccaggctgtggactcgccagctgcctccttctgccggggcctgctcagccagccggggccctcatccctgatgcccgtgctgggctatgatcctcctcagctctatctgacgcagctcagggaggcctttggggatctggcccttttcttctatgaccagcatggtggagaggtgattggtgtcctctggaagcccaccagcttccagccgcagcccttcaaggcctccagcacaaaggggcgcatggtgatgtctcgaggtggggagctagtaatggtgcccaatgttgaagcaatcctggaggactttgctgtgctgggtgaaggcctggtgcagactgtggaggcccgaagtgagaggtggactgtgtgatcccagctctggagcaagctgtagacggacagcaggacattggacctctagagcaagatgtcagtag

SEQ ID NO: 20847 - DNA, 2757 bp, Homo sapiens
  source 1..2757: mol_type = unassigned DNA
ctcagctcagatccctctttgccggccctggctgacttccaccaggccttctccgttgtcttcctggattcctcaggccatctcaacctctgtgctgatgtcactgcctctacttaccaccaggtacagcatgaggcacggctgtctatgatgttgctggacagcagagctgacgacgggttccacctgctgttgatgactcccaaacccatgatccgggcttttgaccatgtcctgcatctccgtccactgagtcgcctgcaggcagcgtgccaccggctgaagctctggccagagctgcaggacaatggtggggactatgtctcagctgctttgggccccctgaccaccctcctggagcagggcctgggggctcggctgaacctgctggctcactctcgacccccagtcccagagtgggacatcagccaagatccaccaaagcacaaagactctgggaccctgaccctgggactccttctccggcctgagggactgaccagcgtccttgagctgggtccagaggcagaccagcctgaggctgctaaattccgccagttctggggatcccgctcggagcttcggcgtttccaggacggagccattcgggaagctgtggtctgggaggcagcctctatgtcccagaagcgccttattccccaccaggtggtcacccacctcttggcactccatgctgacatcccagaaacctgtgtccactatgtggggggccccctggatgcacttatccaaggcctgaaagagacctccagcacaggtgaggaggccctggtagcggcggtacgttgctacgacgacctcagtcgcctactgtgggggctagagggtctcccactgaccgtgtctgctgttcagggagctcacccagtgctgcgctacacagaggtgttcccaccaactccagtccgtccagccttctccttctatgagactctgcgggagcggtcctcactgctgccccggctcgataagccctgtccggcctacgtggagcccatgaccgtggtttgtcacctggagggcagtggccagtggccacaggacgctgaggccgtgcagcgggtccgagctgccttccagctgcgcctggcagagctgttgacacaacagcatggtctgcagtgccgtgccactgccacgcacacggatgtccttaaggatggatttgtgtttcggattcgcgtggcctatcagcgggagccccagatcctgaaggaggtgcagagcccagaggggatgatctcgctgagggacacagctgcctccctccgccttgagagagacacaaggcagttgccactgctcaccagtgccctgcacggactgcagcagcagcacccagccttctctggtgtggcacggctggccaagcggtgggtgcgtgcccagcttcttggtgagggtttcgctgatgagagcctggatctggtggccgctgcccttttcctgcaccctgagcccttcacccctccgagttccccccaggttggcttccttcgattccttttcttggtatcaacgtttgattggaagaacaaccccctctttgtcaacctcaataatgagctcactgtggaggagcaggtggagatccgcagtggcttcctggcagctcgggcacagctccccgtcatggtcattgttaccccccaagaccgcaaaaactctgtgtggacacaggatggaccctcagcccagatcctgcagcagcttgtggtcctggcagctgaagccctgcccatgttagagaagcagctcatggatccccggggacctggggacatcaggacagtgttccggccgcccttggacatttacgacgtgctgattcgcctgtctcctcgccatatcccgcggcaccgccaggctgtggactcgccagctgcctccttctgccggggcctgctcagccagccggggccctcatccctgatgcccgtgctgggctatgatcctcctcagctctatctgacgcagctcagggaggcctttggggatctggcccttttcttctatgaccagcatggtggagaggtgattggtgtcctctggaagcccaccagcttccagccgcagcccttcaaggcctccagcacaaaggggcgcatggtgatgtctcgaggtggggagctagtaatggtgcccaatgttgaagcaatcctggaggactttgctgtgctgggtgaaggcctggtgcagactgtggaggcccgaagtgagaggtggactgtgtgatcccagctctggagcaagctgtagacggacagcaggacattggacctctagagcaagatgtcagtaggatgacctccaccctccttggacatgaatcctccatggagggcctgctggctgaacatgctgaatcatctccaacaaaacccagccccaactttctctctgatgctccagcattggggcaggggcatggtggcccatgtagtctcctgggcctcaccatcccagaagaggagtgggagccagctcagagaaggaactgaacccaggagatccatccacctattagccctgggcctggacctccctgcgatttcccactcctttcttagtcttcttccagctgccaggacctgtgcctagacttagcatgcccttcactgcagtgtcaggcctttagatgggacccagcgaaaatgtggcccttctgagtcacatcaccgacactgagcagtggaaaggggctatatgtgtatgaatagaccacattgaaggagc

SEQ ID NO: 20848 - DNA, 1100 bp, Homo sapiens
  source 1..1100: mol_type = unassigned DNA
ggggggagctgggacctaagccgcgcgcacacccctttctctgcgtctggtggaggtgcacagaggcttttgagtcaggcccaagcgcagccaggtgacctccccgcggcctttcaagcctgagctcggtggacagctccctctcccgtgagtcccgctgtcctgtacgcgcccggtcgagccccgggctgcgcaccccgctaggagctgcccggccagcccgcttctctgcccggagccatgaatctcagtagcgccagtagcacggaggaaaaggcagtgacgaccgtgctctggggctgcgagctcagtcaggagaggcggacttggaccttcagaccccagctggaggggaagcagagctgcaggctgttgcttcatacgatttgcttgggggagaaagccaaagaggagatgcatcgcgtggagatcctgcccccagcaaaccaggaggacaagaagatgcagccggtcaccattgcctcactccaggcctcagtcctccccatggtctccatggtaggagtgcagctttctcccccagttactttccagctccgggctggctcaggacccgtgttcctcagtggccaggaacgttatgaagcatcagacctaacctgggaggaggaggaggaagaagaaggggaggaggaggaagaggaagaggaagatgatgaggatgaggatgcagatatatctctggaggagcaaagccctgtcaaacaagtcaaaaggctggtgccccagaagcaggcgagcgtggctaagaaaaaaaagctggaaaaagaagaagaggaaataagagccagcgttagagacaagagccctgtgaaaaaggccaaagccacagccagagccaagaagccaggattcaagaaatgaggagccacgccttggggggcacggtgcaaagtgggccttccctgggctgtgctgcaggcacagggtgcccctgtccagcccctccacctgtgtctgaatgcaacaggggtgttgcgggggcaacatgagagcccctcacccccaactctccactttcaggaggcccccagtgaagagccccacctcggggtcacaataaagttgcctggtcagga

SEQ ID NO: 20849 - DNA, 925 bp, Homo sapiens
  source 1..925: mol_type = unassigned DNA
ctgggacctaagccgcgcgcacacccctttctctgcgtctggtggaggtgcacagaggcttttgagtcaggcccaagcgcagccaggtgacctccccgcggcctttcaagcctgagctcggtggacagctccctctcccgtgagtcccgctgtcctgtacgcgcccggtcgagccccgggctgcgcaccccgctaggagctgcccggccagcccgcttctctgcccggagccatgaatctcagtagcgccagtagcacggaggaaaaggcagtgacgaccgtgctctggggctgcgagctcagtcaggagaggcggacttggaccttcagaccccagctggaggggaagcagagctgcaggctgttgcttcatacgatttgcttgggggagaaagccaaagaggagatgcatcgcgtggagatcctgcccccagcaaaccaggaggacaagaagatgcagccggtcaccattgcctcactccaggcctcagtcctccccatggtctccatggtaggagtgcagctttctcccccagttactttccagctccgggctggctcaggacccgtgttcctcagtggccaggaacgttatgaaaaaaaagctggaaaaagaagaagaggaaataagagccagcgttagagacaagagccctgtgaaaaaggccaaagccacagccagagccaagaagccaggattcaagaaatgaggagccacgccttggggggcacggtgcaaagtgggccttccctgggctgtgctgcaggcacagggtgcccctgtccagcccctccacctgtgtctgaatgcaacaggggtgttgcgggggcaacatgagagcccctcacccccaactctccactttcaggaggcccccagtgaagagccccacctcggggtcacaataaagttgcctggtcagga

SEQ ID NO: 20850 - DNA, 1874 bp, Homo sapiens
  source 1..1874: mol_type = unassigned DNA
agtgtgctccccgccccctgccgcggcgcctcgcctcccggctcacctccccaccccacctgcccgctgcggctctccgcgggagatctcaccgttctggagacagggctcgctcgctctcacggtaggctggaagaacgggctgtctgggccttaggaaaggcccatgctgtataaggcatggggaaaggaaaggaagaaaggcaacgaacaagaaggagggcttccaactgcagcttcctgccggctgcaggcctcccttcctaagctgagctgaggcttcctctccatgggctggggagggggcgccaggaggcctcggcgggtccgcaattggccgggacagcttctcacgaaaggtcctgggccggcatcatcagcctcacctgggaactggttagaactacaaattccctcggccccacccagaccgacgccaagggcagctgtggagtggggcgcggcaatgcgccccttaacagccctccaggcttcttagcccgggcttggacagccgccttccggccagaggggatgaggttgcgctgcgctccgggagcgccgatggcgtgactggccccgcgcggagcagcgacagtaaggctgtgtggggggagctgggacctaagccgcgcgcacacccctttctctgcgtctggtggaggtgcacagaggcttttgagtcaggcccaagcgcagccaggtgacctccccgcggcctttcaagcctgagctcggtggacagctccctctcccgtgagtcccgctgtcctgtacgcgcccggtcgagccccgggctgcgcaccccgctaggaggtgggtactcgtcctccaggagttgccggtgagcccttgaccgtggcaggtcccctccagccgcgagcgacccctcagtacctgccgatgcctgctggtctctggcatcctccagtcgagggtcagggtcagggagcaaggcctcacgcgggcgccctccttgcagctgcccggccagcccgcttctctgcccggagccatgaatctcagtagcgccagtagcacggaggaaaaggcagtgacgaccgtgctctggggctgcgagctcagtcaggagaggcggacttggaccttcagaccccagctggaggggaagcagagctgcaggctgttgcttcatacgatttgcttgggggagaaagccaaagaggagatgcatcgcgtggagatcctgcccccagcaaaccaggaggacaagaagatgcagccggtcaccattgcctcactccaggcctcagtcctccccatggtctccatggtaggagtgcagctttctcccccagttactttccagctccgggctggctcaggacccgtgttcctcagtggccaggaacgttatgaagcatcagacctaacctgggaggaggaggaggaagaagaaggggaggaggaggaagaggaagaggaagatgatgaggatgaggatgcagatatatctctggaggagcaaagccctgtcaaacaagtcaaaaggctggtgccccagaagcaggcgagcgtggctaagaaaaaaaagctggaaaaagaagaagaggaaataagagccagcgttagagacaagagccctgtgaaaaaggccaaagccacagccagagccaagaagccaggattcaagaaatgaggagccacgccttggggggcacggtgcaaagtgggccttccctgggctgtgctgcaggcacagggtgcccctgtccagcccctccacctgtgtctgaatgcaacaggggtgttgcgggggcaacatgagagcccctcacccccaactctccactttcaggaggcccccagtgaagagccccacctcggggtcacaataaagttgcctggtcagg

SEQ ID NO: 20851 - DNA, 1190 bp, Homo sapiens
  source 1..1190: mol_type = unassigned DNA
agggggcgccaggaggcctcggcgggtccgcaattggccgggacagcttctcacgaaaggtcctgggccggcatcatcagcctcacctgggaactggttagaactacaaattccctcggccccacccagaccgacgccaagggcagctgtggagtggggcgcggcaatgcgccccttaacagccctccaggcttcttagcccgggcttggacagccgccttccggccagaggggatgaggttgcgctgcgctccgggagcgccgatggcgtgactggccccgcgcggagcagcgacactgcccggccagcccgcttctctgcccggagccatgaatctcagtagcgccagtagcacggaggaaaaggcagtgacgaccgtgctctggggctgcgagctcagtcaggagaggcggacttggaccttcagaccccagctggaggggaagcagagctgcaggctgttgcttcatacgatttgcttgggggagaaagccaaagaggagatgcatcgcgtggagatcctgcccccagcaaaccaggaggacaagaagatgcagccggtcaccattgcctcactccaggcctcagtcctccccatggtctccatggtaggagtgcagctttctcccccagttactttccagctccgggctggctcaggacccgtgttcctcagtggccaggaacgttatgaagcatcagacctaacctgggaggaggaggaggaagaagaaggggaggaggaggaagaggaagaggaagatgatgaggatgaggatgcagatatatctctggaggagcaaagccctgtcaaacaagtcaaaaggctggtgccccagaagcaggcgagcgtggctaagaaaaaaaagctggaaaaagaagaagaggaaataagagccagcgttagagacaagagccctgtgaaaaaggccaaagccacagccagagccaagaagccaggattcaagaaatgaggagccacgccttggggggcacggtgcaaagtgggccttccctgggctgtgctgcaggcacagggtgcccctgtccagcccctccacctgtgtctgaatgcaacaggggtgttgcgggggcaacatgagagcccctcacccccaactctccactttcaggaggcccccagtgaagagccccacctcggggtcacaataaagttgcctggtcagga

SEQ ID NO: 20852 - DNA, 1484 bp, Homo sapiens
  source 1..1484: mol_type = unassigned DNA
gtgctcctcagtgtgctccccgccccctgccgcggcgcctcgcctcccggctcacctccccaccccacctgcccgctgcggctctccgcgggagatctcaccgttctggagacagggctcgctcgctctcacggcttcttagcccgggcttggacagccgccttccggccagaggggatgaggttgcgctgcgctccgggagcgccgatggcgtgactggccccgcgcggagcagcgacagtaaggctgtgtggggggagctgggacctaagccgcgcgcacacccctttctctgcgtctggtggaggtgcacagaggcttttgagtcaggcccaagcgcagccaggtgacctccccgcggcctttcaagcctgagctcggtggacagctccctctcccgtgagtcccgctgtcctgtacgcgcccggtcgagccccgggctgcgcaccccgctaggaggtgggtactcgtcctccaggagttgccggtgagcccttgaccgtggcaggtcccctccagccgcgagcgacccctcagtacctgccgatgcctgctggtctctggcatcctccagtcgagggtcagggtcagggagcaaggcctcacgcgggcgccctccttgcagctgcccggccagcccgcttctctgcccggagccatgaatctcagtagcgccagtagcacggaggaaaaggcagtgacgaccgtgctctggggctgcgagctcagtcaggagaggcggacttggaccttcagaccccagctggaggggaagcagagctgcaggctgttgcttcatacgatttgcttgggggagaaagccaaagaggagatgcatcgcgtggagatcctgcccccagcaaaccaggaggacaagaagatgcagccggtcaccattgcctcactccaggcctcagtcctccccatggtctccatggtaggagtgcagctttctcccccagttactttccagctccgggctggctcaggacccgtgttcctcagtggccaggaacgttatgaagcatcagacctaacctgggaggaggaggaggaagaagaaggggaggaggaggaagaggaagaggaagatgatgaggatgaggatgcagatatatctctggaggagcaaagccctgtcaaacaagtcaaaaggctggtgccccagaagcaggcgagcgtggctaagaaaaaaaagctggaaaaagaagaagaggaaataagagccagcgttagagacaagagccctgtgaaaaaggccaaagccacagccagagccaagaagccaggattcaagaaatgaggagccacgccttggggggcacggtgcaaagtgggccttccctgggctgtgctgcaggcacagggtgcccctgtccagcccctccacctgtgtctgaatgcaacaggggtgttgcgggggcaacatgagagcccctcacccccaactctccactttcaggaggcccccagtgaagagcccc

SEQ ID NO: 20853 - DNA, 877 bp, Homo sapiens
  source 1..877: mol_type = unassigned DNA
agtttgaagaaggctcttacagcatggccgccggtactgcagctgccttagcgtttttgagtcaggagagccgaacgcgggccgggggtgtcgggggcctacgggtcccggccccggtcactatggacagttttttcttcggctgtgagctctccggccacacccgctccttcacctttaaggtagaggaagaggatgatgcggagcacgtgctggcactaaccatgctctgcctcaccgagggagccaaagacgagtgtaatgtggtagaagttgtggcccggaaccatgaccatcaggagatcgcagtccctgtggccaacctcaagctgtcctgccaacccatgctcagtctggatgacttccagctccaaccacctgtaaccttccgcctgaagtcgggctctggccctgtgcggatcactgggcggcaccagattgttacgatgagcaatgatgtttctgaggaggagagcgaggaagaggaagaggacagtgatgaggaagaagttgagctgtgccccatccttcctgccaaaaagcaggggggcaggccctagccctcctaggtcagctccatgtgccatgcaccgccatgcaccctgttccctgacaagtttcaacaattgtaaatatttcttccttgaagaggagagcttgggtgggggttgggtgggagggacttgggtctttggtgctaggagagggcctgtgctccacacagccgtggttttctgattttcaccatgcccggggcctcccttcccacctgcctgtgagaattggaggttagtgcctgaagctcagagctacacatttttaatagtttttacatttttggataaaggttgaaataaagtggtgtggagtttttgca

SEQ ID NO: 20854 - DNA, 3653 bp, Homo sapiens
  source 1..3653: mol_type = unassigned DNA
tacttcattcttcccagtaggagaacccagggcctgttccacgcccacagactttggtcaggcaaagcggccgcagggcgtctgggctaaacgcaaccaggaacacattggcaaacttttgcgcctgcgcccaccgggcgtgcacctgtaggctgaagtcgcgcatgcgctagatgggaacgttgtttcttctcccctaccccttttctgtgggtctgttttagggacagactgcttccgggtcgaagggcttgcttccggagagcgggaaggctaaaacgcggtagctaaactgcagccaactttggttgtgtgtggaaaaggctttagccatggacaggagtggctttggagagatatcatcccctgtaatccgggaggcagaggtgacacggactgcacggaaacagagtgctcagaaaagagttttacttcaggcatctcaagatgaaaattttggtaatactacaccaagaaaccaggttatccctcgaactcctagctcatttcgacagccttttaccccaacaagccgaagcttactaaggcagccagatatttcctgcattcttggaacaggagggaagtcgccccgacttacgcagtcttcagggttctttggaaatctctccatggttactaatctggatgacagtaactgggcagctgcattttcatcacagcgttccgggctgttcacaaacacagagccccacagtataacagaagatgtaactatcagtgctgttatgttacgtgaggatgatcctggagaagctgcatccatgagtatgttttctgatttcctgcagtcttttctgaagcactcttcgagtacagtttttgatcttgtggaagagtatgaaaacatctgtggtagtcaggtgaatatactgagtaaaatagtgagtcgagcaacacctggacttcaaaaattttcaaaaacagccagtatgctctggcttcttcaacaggagatggtcacatggaggctgctggcttctttgtatagagacagaatacagtctgcattagaagaggaaagtgtattcgcagttactgctgttaatgccagtgaaaaaacagttgtggaagcgttatttcagagggattcacttgttcgacaaagtcagctggtggtagattggttagagagtattgccaaagatgaaattggagaattttctgataatattgagttttatgcaaaatcagtatattgggaaaatactctgcataccttaaaacaacggcagctgacttcttacgttggaagtgttcgtccgcttgtcactgaattggaccctgatgctcccataagacagaaaatgccccttgatgatctggatagagaagatgaagttagattactcaaatatctctttactctaatccgtgctggaatgacagaagaggcacaacgactctgtaaacgctgtggtcaagcatggagagctgcaacacttgaaggctggaaactgtaccatgaccctaatgttaatggaggaacagaattagaacctgttgaagggaatccatatagacgcatttggaaaataagttgctggagaatggcagaagatgagctttttaatagatacgagagagcaatttatgcagctttaagtgggaatcttaagcagctgcttcctgtctgtgacacctgggaagacacagtttgggcctacttccgggtgatggtggacagtctggtagaacaggagatccagacatcagtagcaactctggatgaaactgaagaactccctagagaatatctgggagcaaactggacgttagaaaaggtttttgaggaacttcaagctactgacaaaaagagagttctggaagagaatcaagaacattatcatatagttcaaaagtttcttatcctgggagacattgatggtttgatggatgagtttagcaaatggctttccaaaagcagaaacaatctacctggacacctgcttcgctttatgactcaccttattttgtttttccgtactctgggactacagaccaaggaggaagtttctattgaagttttaaagacatacatacagcttttaataagagagaaacatacaaatcttatagcattttatacctgtcatttgcctcaagacctagctgttgcccagtatgcattatttttggaaagtgttacagaatttgaacagcgccaccattgcctggagttggctaaagaagcagatttggatgttgcaacaataacaaaaactgtagttgagaatattcgaaagaaagataatggtgaatttagtcatcatgacctggccccagccctagatactggcactactgaggaggatcgtttaaaaattgatgtaattgactggttggtatttgacccagcgcagagggcagaagcactgaaacaaggcaatgcaattatgagaaaattcttggcatcaaaaaagcacgaagctgcaaaagaagtatttgtgaaaattcctcaggattctatagcagaaatctataatcagtgcgaggaacaaggaatggaaagtccacttcctgctgaagatgataatgctatccgagaacatttgtgcatcagagcttatttggaagcccatgaaacctttaatgagtggtttaagcatatgaattcagttccacaaaaacctgctttgatacctcaaccaacttttactgagaaagtggctcatgaacacaaagaaaagaaatatgaaatggattttggtatttggaaagggcatttggatgccctaactgctgatgtgaaggagaaaatgtataacgtcttgttgtttgttgatggagggtggatggtggatgttagagaggatgccaaagaagaccatgaaagaacacatcaaatggtcttactgagaaagctttgtctgccaatgttgtgttttctgcttcatacgatattgcacagtactggtcagtatcaggaatgcctacagttagcagatatggtatcctctgagcgccacaaactgtacctggtattttctaaggaagagctaaggaagttgctgcagaagctcagagagtcctctctaatgctcctagaccagggacttgacccattagggtatgaaattcagttatagtttaatctttgtaatctcactaattttcatgataaatgaagtttttaataaaatatacttgttattagtaattttttcttttgcattaccatgtaaaatttagacatttgaattttgtacttttcagaatattatcgtgacactttcaacatgtagggatatcagcgtttctctgtgtgcttgttaataaaactatataaaaattaaaattttctgtttttacaaattccagggttgtctctttttcatgtaataagaaaattaaattttctgttctagttttttctgtaatcataagcattctgatattttaaaatcataaagatgatggaaagtagatttatttttaagccaggtacgtaattttttatttatcataaaatttagtatttttgaatattaaaattaagaagatgactataacaagaatttttctaacataacatgctattattattttagttattttgaagacatttctagtttaactttcatttagcaaacttcctatcaaaataagagcatataaagacttagcgtagt

SEQ ID NO: 20855 - DNA, 2650 bp, Homo sapiens
  source 1..2650: mol_type = unassigned DNA
gctaaaacgcggtagctaaactgcagccaactttggttgtgtgtggaaaaggctttagccatggacaggagtggctttggagagatatcatcccctgtaatccgggaggcagaggtgacacggactgcacggaaacagagtgctcagaaaagagttttacttcaggcatctcaagatgaaaattttggtaatactacaccaagaaaccaggttatccctcgaactcctagctcatttcgacagccttttaccccaacaagccgaagcttactaaggcagccagatatttcctgcattcttggaacaggagggaagtcgccccgacttacgcagtcttcagggttctttggaaatctctccatgcatccatgagtatgttttctgatttcctgcagtcttttctgaagcactcttcgagtacagtttttgatcttgtggaagagtatgaaaacatctgtggtagtcaggtgaatatactgagtaaaatagtgagtcgagcaacacctggacttcaaaaattttcaaaaacagccagtatgctctggcttcttcaacaggagatggtcacatggaggctgctggcttctttgtatagagacagaatacagtctgcattagaagaggaaagtgtattcgcagttactgctgttaatgccagtgaaaaaacagttgtggaagcgttatttcagagggattcacttgttcgacaaagtcagctggtggtagattggttagagagtattgccaaagatgaaattggagaattttctgataatattgagttttatgcaaaatcagtatattgggaaaatactctgcataccttaaaacaacggcagctgacttcttacgttggaagtgttcgtccgcttgtcactgaattggaccctgatgctcccataagacagaaaatgccccttgatgatctggatagagaagatgaagttagattactcaaatatctctttactctaatccgtgctggaatgacagaagaggcacaacgactctgtaaacgctgtggtcaagcatggagagctgcaacacttgaaggctggaaactgtaccatgaccctaatgttaatggaggaacagaattagaacctgttgaagggaatccatatagacgcatttggaaaataagttgctggagaatggcagaagatgagctttttaatagatacgagagagcaatttatgcagctttaagtgggaatcttaagcagctgcttcctgtctgtgacacctgggaagacacagtttgggcctacttccgggtgatggtggacagtctggtagaacaggagatccagacatcagtagcaactctggatgaaactgaagaactccctagagaatatctgggagcaaactggacgttagaaaaggtttttgaggaacttcaagctactgacaaaaagagagttctggaagagaatcaagaacattatcatatagttcaaaagtttcttatcctgggagacattgatggtttgatggatgagtttagcaaatggctttccaaaagcagaaacaatctacctggacacctgcttcgctttatgactcaccttattttgtttttccgtactctgggactacagaccaaggaggaagtttctattgaagttttaaagacatacatacaggaggatcgtttaaaaattgatgtaattgactggttggtatttgacccagcgcagagggcagaagcactgaaacaaggcaatgcaattatgagaaaattcttggcatcaaaaaagcacgaagctgcaaaagaagtatttgtgaaaattcctcaggattctatagcagaaatctataatcagtgcgaggaacaaggaatggaaagtccacttcctgctgaagatgataatgctatccgagaacatttgtgcatcagagcttatttggaagcccatgaaacctttaatgagtggtttaagcatatgaattcagttccacaaaaacctgctttgatacctcaaccaacttttactgagaaagtggctcatgaacacaaagaaaagaaatatgaaatggattttggtatttggaaagggcatttggatgccctaactgctgatgtgaaggagaaaatgtataacgtcttgttgtttgttgatggagggtggatggtggatgttagagaggatgccaaagaagaccatgaaagaacacatcaaatggtcttactgagaaagctttgtctgccaatgttgtgttttctgcttcatacgatattgcacagtactggtcagtatcaggaatgcctacagttagcagatatggtatcctctgagcgccacaaactgtacctggtattttctaaggaagagctaaggaagttgctgcagaagctcagagagtcctctctaatgctcctagaccagggacttgacccattagggtatgaaattcagttatagtttaatctttgtaatctcactaattttcatgataaatgaagtttttaataaaatatacttgttattagtaattttttcttttgcattaccatgtaaaatttagacatttgaattttgtacttttcagaatattatcgtgacactttcaacatgtagggatatcagcgtttctctgtgtgcttgttaataaaactatataaaaattaaaattttctgttttt

SEQ ID NO: 20856 - DNA, 3004 bp, Homo sapiens
  source 1..3004: mol_type = unassigned DNA
aagtgccagcatcagattctgagttccctctatgatctgggtactgtgctagccgcctacaacaaagatcagttattcaagatccttcccctcggggaattagttgtgtaatggagacaaccaagcagtgtaaagtggagtggctttggagagatatcatcccctgtaatccgggaggcagaggtgacacggactgcacggaaacagagtgctcagaaaagagttttacttcaggcatctcaagatgaaaattttggtaatactacaccaagaaaccaggttatccctcgaactcctagctcatttcgacagccttgttctttctaccaaccttttgtttatagttaccccaacaagccgaagcttactaaggcagccagatatttcctgcattcttggaacaggagggaagtcgccccgacttacgcagtcttcagggttctttggaaatctctccatggttactaatctggatgacagtaactgggcagctgcattttcatcacagcgttccgggctgttcacaaacacagagccccacagtataacagaagatgtaactatcagtgctgttatgttacgtgaggatgatcctggagaagctgcatccatgagtatgttttctgatttcctgcagtcttttctgaagcactcttcgagtacagtttttgatcttgtggaagagtatgaaaacatctgtggtagtcaggtgaatatactgagtaaaatagtgagtcgagcaacacctggacttcaaaaattttcaaaaacagccagtatgctctggcttcttcaacaggagatggtcacatggaggctgctggcttctttgtatagagacagaatacagtctgcattagaagaggaaagtgtattcgcagttactgctgttaatgccagtgaaaaaacagttgtggaagcgttatttcagagggattcacttgttcgacaaagtcagctggtggtagattggttagagagtattgccaaagatgaaattggagaattttctgataatattgagttttatgcaaaatcagtatattgggaaaatactctgcataccttaaaacaacggcagctgacttcttacgttggaagtgttcgtccgcttgtcactgaattggaccctgatgctcccataagacagaaaatgccccttgatgatctggatagagaagatgaagttagattactcaaatatctctttactctaatccgtgctggaatgacagaagaggcacaacgactctgtaaacgctgtggtcaagcatggagagctgcaacacttgaaggctggaaactgtaccatgaccctaatgttaatggaggaacagaattagaacctgttgaagggaatccatatagacgcatttggaaaataagttgctggagaatggcagaagatgagctttttaatagatacgagagagcaatttatgcagctttaagtgggaatcttaagcagctgcttcctgtctgtgacacctgggaagacacagtttgggcctacttccgggtgatggtggacagtctggtagaacaggagatccagacatcagtagcaactctggatgaaactgaagaactccctagagaatatctgggagcaaactggacgttagaaaaggtttttgaggaacttcaagctactgacaaaaagagagttctggaagagaatcaagaacattatcatatagttcaaaagtttcttatcctgggagacattgatggtttgatggatgagtttagcaaatggctttccaaaagcagaaacaatctacctggacacctgcttcgctttatgactcaccttattttgtttttccgtactctgggactacagaccaaggaggaagtttctattgaagttttaaagacatacatacagcttttaataagagagaaacatacaaatcttatagcattttatacctgtcatttgcctcaagacctagctgttgcccagtatgcattatttttggaaagtgttacagaatttgaacagcgccaccattgcctggagttggctaaagaagcagatttggatgttgcaacaataacaaaaactgtagttgagaatattcgaaagaaagataatggtgaatttagtcatcatgacctggccccagccctagatactggcactactgaggaggatcgtttaaaaattgatgtaattgactggttggtatttgacccagcgcagagggcagaagcactgaaacaaggcaatgcaattatgagaaaattcttggcatcaaaaaagcacgaagctgcaaaagaagtatttgtgaaaattcctcaggattctatagcagaaatctataatcagtgcgaggaacaaggaatggaaagtccacttcctgctgaagatgataatgctatccgagaacatttgtgcatcagagcttatttggaagcccatgaaacctttaatgagtggtttaagcatatgaattcagttccacaaaaacctgctttgatacctcaaccaacttttactgagaaagtggctcatgaacacaaagaaaagaaatatgaaatggattttggtatttggaaagggcatttggatgccctaactgctgatgtgaaggagaaaatgtataacgtcttgttgtttgttgatggagggtggatggtggatgttagagaggatgccaaagaagaccatgaaagaacacatcaaatggtcttactgagaaagctttgtctgccaatgttgtgttttctgcttcatacgatattgcacagtactggtcagtatcaggaatgcctacagttagcagatatggtatcctctgagcgccacaaactgtacctggtattttctaaggaagagctaaggaagttgctgcagaagctcagagagtcctctctaatgctcctagaccagggacttgacccattagggtatgaaattcagttatagtttaatctttgtaatctcactaattttcatgataaatgaagtttttaataaaatatacttgttattagt

SEQ ID NO: 20857 - DNA, 4169 bp, Homo sapiens
  source 1..4169: mol_type = unassigned DNA
ctcttcccttaggtgtttaagttccgcgcgcaggccaggctgcaacctgacggccagatccctcgctgtcctagtcgctgctccttggagtcatgttcccagccgccccttctccgcggaccccgggtaccgggtcccgaaggggcccgctggccggactcgggcccggctccacgccccggacggctagcaggaagggtctgcccctggggtctgcagtcagctccccagtgctcttctcgccggtcggccggcgtagctcgctaagctcgcggggaacaccaacacgaatgttcccacaccactccataactgagtctgtgaactatgatgtgaaaacgtttggatcttctcttcctgttaaagtcatggaagccctaacattggctgaagtcgatgaccagctgaccattaacatagatgaaggtggatgggcttgtctggtgtgcaaagagaagctcattatttggaagattgctctgtcacctattactaagttatccgtttgcaaagaacttcagctgccacctagtgatttccactggagtgccgacttagtggctctttcttactcttctccctcaggtgaagcacattctactcaggctgttgctgtcatggttgccaccagagaaggatctatccgctattggccaagccttgctggtgaagatacctacacagaggcttttgtagattcgggaggtgataagacttacagtttcctaacagcagtgcagggaggaagttttattttgtcttcatcaggaagccaactaattcggttgatacctgagagctcaggaaagattcatcagcatatcctgcctcaggggcaaggcatgctttcaggaattggtcgaaaagtttcttctctttttggaattttatctcctagtagtgatctcacactttcaagtgttctctgggatagagagagatcaagcttttatagcctgacgagttcaaacatcagtaaatgggaattagatgattcttcagaaaagcatgcatacagttgggatataaatagagccctgaaggaaaacattaccgatgctatttggggatctgaaagtaactatgaagctattaaagaaggagtcaacattcgatatttggacttgaagcaaaactgtgatgggctggtgattttggcagcagcatggcactcagcagacaatccatgtctcatctattactctctgataacaatagaagataatggttgccaaatgtcagatgcagttactgtagaagtcactcaatataatccaccttttcagtctgaagacctgattttgtgtcagttgacggtcccaaacttttcaaaccagactgcctatctgtataacgaaagtgctgtctatgtgtgctccacaggaactgggaaattttctcttccccaggagaaaattgtctttaatgcacaaggagatagtgttttaggtgctggtgcctgtggtggtgttcctatcattttttctagaaacagtggactggtgtctattacttcaagggaaaatgtgtctatattggcagaagacttggaagggtctttagcatcttcagttgctggaccaaacagtgagagtatgatttttgagaccactacaaagaatgaaactatagcccaggaagataaaatcaagttgctgaaagctgcctttctgcaatactgcagaaaagatttaggtcatgctcaaatggtggttgatgagctcttttcctctcactctgatttggattctgattctgaactagacagggcagttacccaaatcagtgtagacctgatggatgactacccagcatctgacccacggtgggctgagtctgtccctgaggaagcacctgggttcagcaatacgtcactgattatccttcaccagctagaagacaagatgaaagctcactcttttcttatggactttattcatcaagttggcttatttggacgtctaggcagttttccagttagagggacaccgatggccactcgactgttgctctgtgagcatgccgaaaagctgtcagccgccattgttctcaagaaccaccactcccggctttctgaccttgtcaacacagccatattgattgctttgaacaagagggagtatgaaatcccatccaacctgactcctgcagatgtctttttcagggaggtatcccaagtagataccatctgtgagtgcttactggagcatgaggagcaagtcttgagggatgcacctatggattccattgaatgggctgaagtggtgatcaatgtgaacaatattctcaaggatatgctgcaggctgctagtcattatcgccaaaatagaaactctttgtatagaagagaagaatcactagaaaaagaacctgaatatgttccatggacggcaacaagtggtcctggtggcatccgaacggtaataatacgccagcatgagattgtcctgaaggtggcttatccacaggcagacagcaacctccgaaacatcgtgaccgagcagctggtagccctgatcgattgcttcctggatggttatgtttctcagcttaagtctgtggataaatccagtaatcgggaaagatatgacaatctggagatggaatacctacagaaaagatcagatctcttatctcctcttctttcactaggccagtacctgtgggctgcttctctagcagagaaatactgtgactttgatatattggtacaaatgtgtgagcagactgacaaccagagccgactccagcgctacatgacccagtttgctgatcagaatttttcagactttctcttccgttggtatctggagaaaggaaagcgaggcaaattattatctcagcccatttctcagcatggacagttggcaaattttttgcaagctcatgaacatctcagctggttacatgaaattaatagccaagaattagaaaaggctcatgcaacacttctgggtttggcaaatatggaaactcgttactttgcaaagaagaaaacccttcttggcttgagtaaattggctgcattagcttcagacttttcagaggatatgctacaagaaaaaattgaagaaatggctgagcaggagcgctttctactgcatcaggagaccctacctgaacagctgctggcggagaaacagctaaatctcagtgcgatgccagtattgactgcaccacaactcattggtctatatatctgtgaagaaaatagaagagctaatgaatatgatttcaagaaagctttggacttgttggaatatattgatgaggaagaagatataaatataaatgatctaaaactggaaatcctttgcaaagctcttcagagagataactggtccagttctgatggcaaagatgatccaattgaagtatctaaagacagtatatttgtgaagatcttacagaaacttttaaaagatggcattcagctcagtgagtacttaccggaggtgaaagacctgctacaagcggatcagcttggaagcttaaagtccaatccttacttcgagtttgttttgaaagcaaattatgaatattatgttcagggacaaatataactttttctaaaaatggccattgtttatgaaatctgtataagtgtgtccttatacaaattttaggccataaacaagtgtaagtttgtacaatttcataacatgtatagctgagtttttatactttatatgtaggaagctaatataaaatagttatgtaactgtgattttggttttcagttatgtgacttgttttttccacctgaaatgtgtcagttgttgttcctgtactcggtgccctttctttttactctcacgtggtcccaggttctggagttcttgtcctggttctagctgctcacatgtacaaatcacttctaggcctcagtttctgcgactatgaaaattactagattgcactagcttgtctctaaaattgctgtgactccagatactttgcactgaagagaatctagggtgtttgatatctgtttcagttagggctaatgggaaatgtctagtaagataaatgtcaacttttgctgacttattatgagatgaaaaaccaaaggagagtgggcctaactcatgtgagcttgataactgatgaactcattgggagcattttaaacttttctacataaataataaatgagcactaatgaaagt

SEQ ID NO: 20858 - DNA, 779 bp, Homo sapiens
  source 1..779: mol_type = unassigned DNA
tttaagttccgcgcgcaggccaggctgcaacctgacggccagatccctcgctgtcctagtcgctgctccttggagtcatgttcccagccgccccttctccgcggaccccgggtaccgggtcccgaaggggcccgctggccggactcgggcccggctccacgccccggacggctagcaggaagggtctgcccctggggtctgcagtcagctccccagtgctcttctcgccggtcggccggcgtagctcgctaagctcgcggggaacaccaacacgaatgttcccacaccactccataactgagtctgtgaactatgatgtgaaaacgtttggatcttctcttcctgttaaagtcatggaagccctaacattggctgaagtcgatgaccagctgaccattaacatagatgaaggtggatgggcttgtctggtgtgcaaagagaagctcattatttggaagattgctctgtcacctattactaagttatccgtttgcaaagaacttcagctgccacctagtgatttccactggagtgccgacttagtggctctttcttactcttctccctcaggtgaagcacattctactcaggctgttgctgtcatggttgccaccagagaaggatctatccgctattggccaagccttgctggtgaagatacctacacagaggcttttgtagattcgggaggtgataagacttacagtttcctaacagcagtgcaggttcacaaagaaacaaaatctggctgagcatggtggctcatgcgtgcagtctca

SEQ ID NO: 20859 - DNA, 3374 bp, Homo sapiens
  source 1..3374: mol_type = unassigned DNA
aacctgacggccagatccctcgctgtcctagtcgctgctccttggagtcatgttcccagccgccccttctccgcggaccccgggtaccgggtcccgaaggggcccgctggccggactcgggcccggctccacgccccggacggctagcaggaagggtctgcccctggggtctgcagtcagctccccagtgctcttctcgccggtcggccggcgtagctcgctaagctcgcggggaacaccaacacgaatgttcccacaccactccataactgagtctgtgaactatgatgtgaaaacgtttggatcttctcttcctgttaaagtcatggaagccctaacattggctgaagtcgatgaccagctgaccattaacatagatgaaggtggatgggcttgtctggtgtgcaaagagaagctcattatttggaagattgctctgtcacctattactaagttatccgtttgcaaagaacttcagctgccacctagtgatttccactggagtgccgacttagtggctctttcttactcttctccctcaggtgaagcacattctactcaggctgttgctgtcatggttgccaccagagaaggatctatccgctattggccaagccttgctggtgaagatacctacacagaggcttttgtagattcgggaggtgataagacttacagtttcctaacagcagtgcagggaggaagttttattttgtcttcatcaggaagccaactaattcggttgatacctgagagctcaggaaagattcatcagcatatcctgcctcaggggcaaggcatgctttcaggaattggtcgaaaagtttcttctctttttggaattttatctcctagtagtgatctcacactttcaagtgttctctgggatagagagagatcaagcttttatagcctgacgagttcaaacatcagtaaatgggaattagatgattcttcagaaaagcatgcatacagttgggatataaatagagccctgaaggaaaacattaccgatgctatttggggatctgaaagtaactatgaagctattaaagaaggagtcaacattcgatatttggacttgaagcaaaactgtgatgggctggtgattttggcagcagcatggcactcagcagacaatccatgtctcatctattactctctgataacaatagaagataatggttgccaaatgtcagatgcagttactgtagaagtcactcaatataatccaccttttcagtctgaagacctgattttgtgtcagttgacggtcccaaacttttcaaaccagactgcctatctgtataacgaaagtgctgtctatgtgtgctccacaggaactgggaaattttctcttccccaggagaaaattgtctttaatgcacaaggagatagtgttttaggtgctggtgcctgtggtggtgttcctatcattttttctagaaacagtggactggtgtctattacttcaagggaaaatgtgtctatattggcagaagacttggaagggtctttagcatcttcagttgctggaccaaacagtgagagtatgatttttgagaccactacaaagaatgaaactatagcccaggaagataaaatcaagttgctgaaagctgcctttctgcaatactgcagaaaagatttaggtcatgctcaaatggtggttgatgagctcttttcctctcactctgatttggattctgattctgaactagacagggcagttacccaaatcagtgtagacctgatggatgactacccagcatctgacccacggtgggctgagtctgtccctgaggaagcacctgggttcagcaatacgtcactgattatccttcaccagctagaagacaagatgaaagctcactcttttcttatggactttattcatcaagttggcttatttggacgtctaggcagttttccagttagagggacaccgatggccactcgactgttgctctgtgagcatgccgaaaagctgtcagccgccattgttctcaagaaccaccactcccggctttctgaccttgtcaacacagccatattgattgctttgaacaagagggagtatgaaatcccatccaacctgactcctgcagatgtctttttcagggaggtatcccaagtagataccatctgtgagtgcttactggagcatgaggagcaagtcttgagggatgcacctatggattccattgaatgggctgaagtggtgatcaatgtgaacaatattctcaaggatatgctgcaggctgctagtcattatcgccaaaatagaaactctttgtatagaagagaagaatcactagaaaaagaacctgaatatgttccatggacggcaacaagtggtcctggtggcatccgaacggtaataatacgccagcatgagattgtcctgaaggtggcttatccacaggcagacagcaacctccgaaacatcgtgaccgagcagctggtagccctgatcgattgcttcctggatggttatgtttctcagcttaagtctgtggataaatccagtaatcgggaaagatatgacaatctggagaaaggaaagcgaggcaaattattatctcagcccatttctcagcatggacagttggcaaattttttgcaagctcatgaacatctcagctggttacatgaaattaatagccaagaattagaaaaggctcatgcaacacttctgggtttggcaaatatggaaactcgttactttgcaaagaagaaaacccttcttggcttgagtaaattggctgcattagcttcagacttttcagaggatatgctacaagaaaaaattgaagaaatggctgagcaggagcgctttctactgcatcaggagaccctacctgaacagctgctggcggagaaacagctaaatctcagtgcgatgccagtattgactgcaccacaactcattggtctatatatctgtgaagaaaatagaagagctaatgaatatgatttcaagaaagctttggacttgttggaatatattgatgaggaagaagatataaatataaatgatctaaaactggaaatcctttgcaaagctcttcagagagataactggtccagttctgatggcaaagatgatccaattgaagtatctaaagacagtatatttgtgaagatcttacagaaacttttaaaagatggcattcagctcagtgagtacttaccggaggtgaaagacctgctacaagcggatcagcttggaagcataaatgtcaacttttgctgacttattatgagatgaaaaaccaaaggagagtgggcctaactcatgtgagcttgataactgatgaactcattgggagcattttaaacttttctacataaataataaatgagcactaatg

SEQ ID NO: 20860 - DNA, 3957 bp, Homo sapiens
  source 1..3957: mol_type = unassigned DNA
ctcttcccttaggtgtttaagttccgcgcgcaggccaggctgcaacctgacggccagatccctcgctgtcctagtcgctgctccttggagtcatgttcccagccgccccttctccgcggaccccgggtaccgggtcccgaaggggcccgctggccggactcgggcccggctccacgccccggacggctagcaggaagggtctgcccctggggtctgcagtcagctccccagtgctcttctcgccggtcggccggcgtagctcgctaagctcgcggggaacaccaacacgaatgttcccacaccactccataactgagtctgtgaactatgatgtgaaaacgtttggatcttctcttcctgttaaagtcatggaagccctaacattggctgaagtcgatgaccagctgaccattaacatagatgaaggtggatgggcttgtctggtgtgcaaagagaagctcattatttggaagattgctctgtcacctattactaagttatccgtttgcaaagaacttcagctgccacctagtgatttccactggagtgccgacttagtggctctttcttactcttctccctcaggtgaagcacattctactcaggctgttgctgtcatggttgccaccagagaaggatctatccgctattggccaagccttgctggtgaagatacctacacagaggcttttgtagattcgggaggtgataagacttacagtttcctaacagcagtgcagggaggaagttttattttgtcttcatcaggaagccaactaattcggttgatacctgagagctcaggaaagattcatcagcatatcctgcctcaggggcaaggcatgctttcaggaattggtcgaaaagtttcttctctttttggaattttatctcctagtagtgatctcacactttcaagtgttctctgggatagagagagatcaagcttttatagcctgacgagttcaaacatcagtaaatgggaattagatgattcttcagaaaagcatgcatacagttgggatataaatagagccctgaaggaaaacattaccgatgctatttggggatctgaaagtaactatgaagctattaaagaaggagtcaacattcgatatttggacttgaagcaaaactgtgatgggctggtgattttggcagcagcatggcactcagcagacaatccatgtctcatctattactctctgataacaatagaagataatggttgccaaatgtcagatgcagttactgtagaagtcactcaatataatccaccttttcagtctgaagacctgattttgtgtcagttgacggtcccaaacttttcaaaccagactgcctatctgtataacgaaagtgctgtctatgtgtgctccacaggaactgggaaattttctcttccccaggagaaaattgtctttaatgcacaaggagatagtgttttaggtgctggtgcctgtggtggtgttcctatcattttttctagaaacagtggactggtgtctattacttcaagggaaaatgtgtctatattggcagaagacttggaagggtctttagcatcttcagttgctggaccaaacagtgagagtatgatttttgagaccactacaaagaatgaaactatagcccaggaagataaaatcaagttgctgaaagctgcctttctgcaatactgcagaaaagatttaggtcatgctcaaatggtggttgatgagctcttttcctctcactctgatttggattctgattctgaactagacagggcagttacccaaatcagtgtagacctgatggatgactacccagcatctgacccacggtgggctgagtctgtccctgaggaagcacctgggttcagcaatacgtcactgattatccttcaccagctagaagacaagatgaaagctcactcttttcttatggactttattcatcaagttggcttatttggacgtctaggcagttttccagttagagggacaccgatggccactcgactgttgctctgtgagcatgccgaaaagctgtcagccgccattgttctcaagaaccaccactcccggctttctgaccttgtcaacacagccatattgattgctttgaacaagagggagtatgaaatcccatccaacctgactcctgcagatgtctttttcagggaggtatcccaagtagataccatctgtgagtgcttactggagcatgaggagcaagtcttgagggatgcacctatggattccattgaatgggctgaagtggtgatcaatgtgaacaatattctcaaggatatgctgcaggctgctagtcattatcgccaaaatagaaactctttgtatagaagagaagaatcactagaaaaagaacctgaatatgttccatggacggcaacaagtggtcctggtggcatccgaacggtaataatacgccagcatgagattgtcctgaaggtggcttatccacaggcagacagcaacctccgaaacatcgtgaccgagcagctggtagccctgatcgattgcttcctggatggttatgtttctcagcttaagtctgtggataaatccagtaatcgggaaagatatgacaatctggagaaaggaaagcgaggcaaattattatctcagcccatttctcagcatggacagttggcaaattttttgcaagctcatgaacatctcagctggttacatgaaattaatagccaagaattagaaaaggctcatgcaacacttctgggtttggcaaatatggaaactcgttactttgcaaagaagaaaacccttcttggcttgagtaaattggctgcattagcttcagacttttcagaggatatgctacaagaaaaaattgaagaaatggctgagcaggagcgctttctactgcatcaggagaccctacctgaacagctgctggcggagaaacagctaaatctcagtgcgatgccagtattgactgcaccacaactcattggtctatatatctgtgaagaaaatagaagagctaatgaatatgatttcaagaaagctttggacttgttggaatatattgatgaggaagaagatataaatataaatgatctaaaactggaaatcctttgcaaagctcttcagagagataactggtccagttctgatggcaaagatgatccaattgaagtatctaaagacagtatatttgtgaagatcttacagaaacttttaaaagatggcattcagctcagtgagtacttaccggaggtgaaagacctgctacaagcggatcagcttggaagcttaaagtccaatccttacttcgagtttgttttgaaagcaaattatgaatattatgttcagggacaaatataactttttctaaaaatggccattgtttatgaaatctgtataagtgtgtccttatacaaattttaggccataaacaagtgtaagtttgtacaatttcataacatgtatagctgagtttttatactttatatgtaggaagctaatataaaatagttatgtaactgtgattttggttttcagttatgtgacttgttttttccacctgaaatgtgtcagttgttgttcctgtactcggtgccctttctttttactctcacgtggtcccaggttctggagttcttgtcctggttctagctgctcacatgtacaaatcacttctaggcctcagtttctgcgactatgaaaattactagattgcactagcttgtctctaaaattgctgtgactccagatactttgcactgaagagaatctagggtgtttgatatctgtttcagttagggctaatgggaaatgtctagtaagataaatgtcaacttttgctgacttattatgagatgaaaaaccaaaggagagtgggcctaactcatgtgagcttgataactgatgaactcattgggagcattttaaacttttctacataaataataaatgagcactaatgaaagta

SEQ ID NO: 20861 - DNA, 3538 bp, Homo sapiens
  source 1..3538: mol_type = unassigned DNA
atcatcgcgcgccatctcttcccttaggtgtttaagttccgcgcgcaggccaggctgcaacctgacggccagatccctcgctgtcctagtcgctgctccttggagtcatgggcccgctggccggactcgggcccggctccacgccccggacggctagcaggaagggtctgcccctggggtctgcagtcagctccccagtgctcttctcgccggtcggccggcgtagctcgctaagctcgcggggaacaccaacacgaatgttcccacaccactccataactgagtctgtgaactatgatgtgaaaacgtttggatcttctcttcctgttaaagtcatggaagccctaacattggctgaagtcgatgaccagctgaccattaacatagatgaaggtggatgggcttgtctggtgtgcaaagagaagctcattatttggaagattgctctgtcacctattactaagttatccgtttgcaaagaacttcagctgccacctagtgatttccactggagtgccgacttagtggctctttcttactcttctccctcaggtgaagcacattctactcaggctgttgctgtcatggttgccaccagagaaggatctatccgctattggccaagccttgctggtgaagatacctacacagaggcttttgtagattcgggaggtgataagacttacagtttcctaacagcagtgcagggaggaagttttattttgtcttcatcaggaagccaactaattcggttgatacctgagagctcaggaaagattcatcagcatatcctgcctcaggggcaaggcatgctttcaggaattggtcgaaaagtttcttctctttttggaattttatctcctagtagtgatctcacactttcaagtgttctctgggatagagagagatcaagcttttatagcctgacgagttcaaacatcagtaaatgggaattagatgattcttcagaaaagcatgcatacagttgggatataaatagagccctgaaggaaaacattaccgatgctatttggggatctgaaagtaactatgaagctattaaagaaggagtcaacattcgatatttggacttgaagcaaaactgtgatgggctggtgattttggcagcagcatggcactcagcagacaatccatgtctcatctattactctctgataacaatagaagataatggttgccaaatgtcagatgcagttactgtagaagtcactcaatataatccaccttttcagtctgaagacctgattttgtgtcagttgacggtcccaaacttttcaaaccagactgcctatctgtataacgaaagtgctgtctatgtgtgctccacaggaactgggaaattttctcttccccaggagaaaattgtctttaatgcacaaggagatagtgttttaggtgctggtgcctgtggtggtgttcctatcattttttctagaaacagtggactggtgtctattacttcaagggaaaatgtgtctatattggcagaagacttggaagggtctttagcatcttcagttgctggaccaaacagtgagagtatgatttttgagaccactacaaagaatgaaactatagcccaggaagataaaatcaagttgctgaaagctgcctttctgcaatactgcagaaaagatttaggtcatgctcaaatggtggttgatgagctcttttcctctcactctgatttggattctgattctgaactagacagggcagttacccaaatcagtgtagacctgatggatgactacccagcatctgacccacggtgggctgagtctgtccctgaggaagcacctgggttcagcaatacgtcactgattatccttcaccagctagaagacaagatgaaagctcactcttttcttatggactttattcatcaagttggcttatttggacgtctaggcagttttccagttagagggacaccgatggccactcgactgttgctctgtgagcatgccgaaaagctgtcagccgccattgttctcaagaaccaccactcccggctttctgaccttgtcaacacagccatattgattgctttgaacaagagggagtatgaaatcccatccaacctgactcctgcagatgtctttttcagggaggtatcccaagtagataccatctgtgagtgcttactggagcatgaggagcaagtcttgagggatgcacctatggattccattgaatgggctgaagtggtgatcaatgtgaacaatattctcaaggatatgctgcaggctgctagtcattatcgccaaaatagaaactctttgtatagaagagaagaatcactagaaaaagaacctgaatatgttccatggacggcaacaagtggtcctggtggcatccgaacggtaataatacgccagcatgagattgtcctgaaggtggcttatccacaggcagacagcaacctccgaaacatcgtgaccgagcagctggtagccctgatcgattgcttcctggatggttatgtttctcagcttaagtctgtggataaatccagtaatcgggaaagatatgacaatctggagatggaatacctacagaaaagatcagatctcttatctcctcttctttcactaggccagtacctgtgggctgcttctctagcagagaaatactgtgactttgatatattggtacaaatgtgtgagcagactgacaaccagagccgactccagcgctacatgacccagtttgctgatcagaatttttcagactttctcttccgttggtatctggagaaaggaaagcgaggcaaattattatctcagcccatttctcagcatggacagttggcaaattttttgcaagctcatgaacatctcagctggttacatgaaattaatagccaagaattagaaaaggctcatgcaacacttctgggtttggcaaatatggaaactcgttactttgcaaagaagaaaacccttcttggcttgagtaaattggctgcattagcttcagacttttcagaggatatgctacaagaaaaaattgaagaaatggctgagcaggagcgctttctactgcatcaggagaccctacctgaacagctgctggcggagaaacagctaaatctcagtgcgatgccagtattgactgcaccacaactcattggtctatatatctgtgaagaaaatagaagagctaatgaatatgatttcaagaaagctttggacttgttggaatatattgatgaggaagaagatataaatataaatgatctaaaactggaaatcctttgcaaagctcttcagagagataactggtccagttctgatggcaaagatgatccaattgaagtatctaaagacagtatatttgtgaagatcttacagaaacttttaaaagatggcattcagctcagtgagtacttaccggaggtgaaagacctgctacaagcggatcagcttggaagcttaaagtccaatccttacttcgagtttgttttgaaagcaaattatgaatattatgttcagggacaaatataactttttct

SEQ ID NO: 20862 - DNA, 5487 bp, Homo sapiens
  source 1..5487: mol_type = unassigned DNA
atggcctcgggagccggaggagtcggagggggcggtggcggcaagatccggacgcggcgttgccaccaggggccaattaagccttaccagcaggggcgacaacagcatcagggcattcttagcagggttacagaatctgttaagaatattgtgccagggtggctacaaagatacttcaacaagaatgaagatgtatgcagctgttcaacagacacaagcgaggttccacgctggccagaaaataaagaggaccatctggtatatgccgatgaggagagctctaatattactgatgggagaatcacacctgagccagcagtcagtaatacagaagaaccttcaacaactagtactgcttcaaattatccagatgtgttaacaaggccttctcttcatcggagccatctgaatttttccatgttggaatcccctgcattacactgtcagccatctacatcctcggcattcccaattggcagttcgggattttcccttgtaaaggaaattaaagattctacctctcagcatgatgatgataacatctcaactaccagtggtttttcttcaagagcttctgataaagatataactgtttcaaagaacacttcattgccacctctgtggtccccagaagctgaacgttctcactcactctcacagcacactgccaccagctcaaaaaaaccagcattcaacttgtctgcctttggaacactttccccttcacttgggaattcttcaatccttaaaaccagtcagcttggagattctcctttttatcctggaaaaacaacatacggtggggcagcagctgctgtaagacagtctaaactacgaaatacaccttatcaggcaccagttagaagacaaatgaaagctaagcaactcagtgcacaatcttacggtgtgaccagttcaacagctcggcgaatattgcagtctttagagaagatgtcaagccctttagcggatgcaaaaagaattccatccattgtttcttctcctctgaattctcctcttgataggagtgggatagatatcacagattttcaggccaaaagagaaaaggtggattctcaatatcctcctgttcagagacttatgaccccaaagccagtttccatagcaacaaatcgaagtgtttattttaaaccatctctgactccttctggtgaattcaggaagactaatcaaagaatagataacaagtgcagtactggatatgaaaaaaatatgacacccggacaaaatagagaacaacgagaaagtggcttttcatatccaaatttcagtttgcctgcagccaatggtttatcttctggagtaggtggtggaggtggcaagatgagacgagaaagaacacgctttgttgcttctaaacctctggaggaggaggaaatggaagttccagtattaccgaaaatctctctaccgatcaccagttcttcactgcctacctttaattttagttcccctgagatcacaacttcctctccatcacccatcaattcgtctcaagcattaacaaacaaggtacaaatgacctctccgagcagcactggcagtcccatgtttaaattttcatctccaatcgtaaaatctactgaggcaaatgtactacctccatcatctattggatttacatttagtgtgcctgttgcaaaaacagcagaactttctggttctagtagtactttagaaccaattataagtagttcagctcatcatgtcactacagtgaacagtacaaattgtaagaagacaccacctgaagattgtgagggtccttttagacctgcagaaatcctgaaagaaggaagtgttctagatattctgaaaagccctggtttcgcatcgccgaagatagattctgttgctgctcagcccaccgcaacaagcccagtagtttatacaagaccagcaataagtagcttttcttctagtggaattgggtttggggagagtttaaaagctgggtcatcatggcagtgtgatacatgtctactccagaacaaagttacagacaacaaatgcatagcctgtcaagcagcaaaattgtcacccagagatactgctaaacagactggaattgaaacaccaaataaaagtggcaaaacaactctttctgcatcagggacaggctttggagacaaatttaaaccagtgataggcacttgggattgtgatacctgtttagtgcaaaataaacctgaagcaataaaatgtgtagcctgtgaaacaccgaaacctggaacttgtgtgaagcgagcccttacattgacagtggtttcggaaagtgctgagactatgactgcttcatcttccagctgcactgtaaccactggtaccttaggatttggagataaattcaaaaggcccattggatcttgggagtgttcagtatgctgtgtttctaataatgcagaagacaataagtgtgtgtcctgtatgtctgagaaaccaggaagttcagtacctgcttcaagtagcagcactgtacctgtctctctgccttctggaggctctctaggattggaaaagttcaagaaacccgagggaagctgggactgtgaattgtgcctagtgcagaataaggcagactctaccaaatgtttggcatgtgaaagtgcaaagccaggcacaaaatctgggtttaaaggctttgacacatcttcctcatcttcgaactcagcagcctcctcatccttcaaatttggtgtctcatcatcctcttctgggccttctcagactttaacaagcactggaaattttaaatttggagatcagggaggattcaaaataggtgtgtcatccgattctgggtctataaaccccatgagtgaaggctttaaattttctaaaccaataggagattttaaatttggagtttcatctgaatctaagcccgaagaagttaaaaaagatagtaagaatgataattttaagtttggactttcttctggtttaagcaacccagtttctttaactccatttcaatttggggtatctaatcttggacaggaagaaaagaaagaggaactgcccaaatcttcctctgcaggttttagctttggtacaggtgttattaactccacccctgctcctgctaacaccatagtgacctctgagaacaagagcagcttcaaccttggaaccatagaaaccaagagtgcttcagtggctcctttcacatgtaagacatcagaagctaaaaaagaagaaatgcctgccaccaaaggaggattctcttttggcaacgtggagcctgcctctctgccatctgcctcagtgtttgttttgggaaggacagaagagaaacagcaagagcctgtcacttctacttccctagtttttgggaagaaagctgacaatgaagagccaaagtgtcaaccagtgttttcctttgggaattcagagcaaaccaaagatgagaattcttcaaagtccacatttagttttagtatgacaaaaccatctgagaaggaatctgaacagccagcaaaagccacttttgcctttggagctcaaactagtactacagctgatcaaggtgcagcaaagccagtttttagtttcttgaacaacagttcctctagttcaagtacaccagccacttctgctggtggtggcatatttggtagttccacctcttcctccaatccacctgtggctacctttgtgtttggacagtccagcaatcctgtgagcagctctgcctttggtaacactgctgaatccagcacctctcagtctttgctattttctcaagatagcaaactagcaaccacatccagcacaggtacagctgtcaccccatttgtctttggtccaggagccagcagtaataatactaccacctctggtttcggctttggagccacaaccacatctagctctgcaggatcctcctttgtatttggaactggaccctcagcaccatctgccagtccagcatttggtgctaaccagaccccaacatttggacaaagtcaaggtgccagccagcccaatcccccaggctttggatctatatcatcttccacagcattatttcccactggttctcagcctgcaccacctacttttgggacagtgtcaagcagtagccagccccctgtgtttggacagcaacctagtcagtctgcatttggctctggaacaactcctaattctagttcggctttccagtttggcagcagcactacaaatttcaacttcacaaacaacagtccatcaggagtgttcacatttggtgcaaattctagcacacctgcagcctcagcccagccttcaggctcggggggctttccatttaaccagtctccagcagcatttacagtggggtcaaatgggaaaaatgtgttctcttcttctggaacttcattctctggtcgcaagataaagactgctgttagacgcaggaaataaaggtcacattggtgttgtactcaattttaacaacagctggtgccctgctttcagatactggattgtactttgtgctggggttatctgaagtcagatctgcctaaggacttctttaattttggaattttcctcctttctctttcgttacagaagccccaccctgcctcacccacccttttttaaataaataaatagctagactggtgactgattcttcagcaaaaatattttatgatccagcagattattcactgatttgacatagtctggctgtacccaggaatggagcctgcacggtgaatggctttgtatagaacctctttgtctacaccattatgtgcgctgataagcgttcatggaacgcgttgaaattgtaattatatctgaggaattctgtatagattagaattctgtatagattagagagtgttgaaacggatgatttctatgctgagtttgtgctggtgtatgtgtgaagtgagtgagttgggtgtattgtgcgctaaacttttctgatagaggaagcctgattaaagaatggtccgtgctaaggacttgttagatctagttcactctccatttaataattatatgctatttctatattttcattctcctatcacctgtcttgcctttttcattattttattatgaaacttgtgtaaatacaattttgtttctgtactttttggcataacataaatctgtgaacttgaaatttgaattttgtgttagagatttttttgttgtttgtttagtcttgtctcagattttattatgtaaatcccattattcaaagttgcctaaatccatttggaaatctttaaaaaaaaaattggggattcttaaagttgaatttattggcttttctgatccagttttgtttggaccaaaaaccagtattgtacaaagtattaagcatatatttttatatttactaaaatggactgtggtgactttggataataaggaaaagtttaatattaaagccatgtttattacagtataattaacatgttaaaccatgggataaatgccatcaataaaaaattatgacat

SEQ ID NO: 20863 - DNA, 5561 bp, Homo sapiens
  source 1..5561: mol_type = unassigned DNA
ttccccgctgccagcactcaccctctctccgctcctgctcgcaacctcgcggttcctggggtgcttgtgcccactgtgtggacagcgcgggcggacttttgggccggggccgggcggcgggggaggctctctaaggcctccgcctctgcctctcccgcccccttacccgccccggagcgggaagcggcggaggctccgccatggcctcgggagccggaggagtcggagggggcggtggcggcaagatccggacgcggcgttgccaccaggggccaattaagccttaccagcaggggcgacaacagcatcagggcattcttagcagggttacagaatctgttaagaatattgtgccagggtggctacaaagatacttcaacaagaatgaagatgtatgcagctgttcaacagacacaagcgaggttccacgctggccagaaaataaagaggaccatctggtatatgccgatgaggagagctctaatattactgatgggagaatcacacctgagccagcagtcagtaatacagaagaaccttcaacaactagtactgcttcaaattatccagatgtgttaacaaggccttctcttcatcggagccatctgaatttttccatgttggaatcccctgcattacactgtcagccatctacatcctcggcattcccaattggcagttcgggattttcccttgtaaaggaaattaaagattctacctctcagcatgatgatgataacatctcaactaccagtggtttttcttcaagagcttctgataaagatataactgtttcaaagaacacttcattgccacctctgtggtccccagaagctgaacgttctcactcactctcacagcacactgccaccagctcaaaaaaaccagcattcaacttgtctgcctttggaacactttccccttcacttgggaattcttcaatccttaaaaccagtcagcttggagattctcctttttatcctggaaaaacaacatacggtggggcagcagctgctgtaagacagtctaaactacgaaatacaccttatcaggcaccagttagaagacaaatgaaagctaagcaactcagtgcacaatcttacggtgtgaccagttcaacagctcggcgaatattgcagtctttagagaagatgtcaagccctttagcggatgcaaaaagaattccatccattgtttcttctcctctgaattctcctcttgataggagtgggatagatatcacagattttcaggccaaaagagaaaaggtggattctcaatatcctcctgttcagagacttatgaccccaaagccagtttccatagcaacaaatcgaagtgtttattttaaaccatctctgactccttctggtgaattcaggaagactaatcaaagaatagataacaagtgcagtactggatatgaaaaaaatatgacacccggacaaaatagagaacaacgagaaagtggcttttcatatccaaatttcagtttgcctgcagccaatggtttatcttctggagtaggtggtggaggtggcaagatgagacgagaaagaacacgctttgttgcttctaaacctctggaggaggaggaaatggaagttccagtattaccgaaaatctctctaccgatcaccagttcttcactgcctacctttaattttagttcccctgagatcacaacttcctctccatcacccatcaattcgtctcaagcattaacaaacaaggtacaaatgacctctccgagcagcactggcagtcccatgtttaaattttcatctccaatcgtaaaatctactgaggcaaatgtactacctccatcatctattggatttacatttagtgtgcctgttgcaaaaacagcagaactttctggttctagtagtactttagaaccaattataagtagttcaggtttcgcatcgccgaagatagattctgttgctgctcagcccaccgcaacaagcccagtagtttatacaagaccagcaataagtagcttttcttctagtggaattgggtttggggagagtttaaaagctgggtcatcatggcagtgtgatacatgtctactccagaacaaagttacagacaacaaatgcatagcctgtcaagcagcaaaattgtcacccagagatactgctaaacagactggaattgaaacaccaaataaaagtggcaaaacaactctttctgcatcagggacaggctttggagacaaatttaaaccagtgataggcacttgggattgtgatacctgtttagtgcaaaataaacctgaagcaataaaatgtgtagcctgtgaaacaccgaaacctggaacttgtgtgaagcgagcccttacattgacagtggtttcggaaagtgctgagactatgactgcttcatcttccagctgcactgtaaccactggtaccttaggatttggagataaattcaaaaggcccattggatcttgggagtgttcagtatgctgtgtttctaataatgcagaagacaataagtgtgtgtcctgtatgtctgagaaaccaggaagttcagtacctgcttcaagtagcagcactgtacctgtctctctgccttctggaggctctctaggattggaaaagttcaagaaacccgagggaagctgggactgtgaattgtgcctagtgcagaataaggcagactctaccaaatgtttggcatgtgaaagtgcaaagccaggcacaaaatctgggtttaaaggctttgacacatcttcctcatcttcgaactcagcagcctcctcatccttcaaatttggtgtctcatcatcctcttctgggccttctcagactttaacaagcactggaaattttaaatttggagatcagggaggattcaaaataggtgtgtcatccgattctgggtctataaaccccatgagtgaaggctttaaattttctaaaccaataggagattttaaatttggagtttcatctgaatctaagcccgaagaagttaaaaaagatagtaagaatgataattttaagtttggactttcttctggtttaagcaacccagtttctttaactccatttcaatttggggtatctaatcttggacaggaagaaaagaaagaggaactgcccaaatcttcctctgcaggttttagctttggtacaggtgttattaactccacccctgctcctgctaacaccatagtgacctctgagaacaagagcagcttcaaccttggaaccatagaaaccaagagtgcttcagtggctcctttcacatgtaagacatcagaagctaaaaaagaagaaatgcctgccaccaaaggaggattctcttttggcaacgtggagcctgcctctctgccatctgcctcagtgtttgttttgggaaggacagaagagaaacagcaagagcctgtcacttctacttccctagtttttgggaagaaagctgacaatgaagagccaaagtgtcaaccagtgttttcctttgggaattcagagcaaaccaaagatgagaattcttcaaagtccacatttagttttagtatgacaaaaccatctgagaaggaatctgaacagccagcaaaagccacttttgcctttggagctcaaactagtactacagctgatcaaggtgcagcaaagccagtttttagtttcttgaacaacagttcctctagttcaagtacaccagccacttctgctggtggtggcatatttggtagttccacctcttcctccaatccacctgtggctacctttgtgtttggacagtccagcaatcctgtgagcagctctgcctttggtaacactgctgaatccagcacctctcagtctttgctattttctcaagatagcaaactagcaaccacatccagcacaggtacagctgtcaccccatttgtctttggtccaggagccagcagtaataatactaccacctctggtttcggctttggagccacaaccacatctagctctgcaggatcctcctttgtatttggaactggaccctcagcaccatctgccagtccagcatttggtgctaaccagaccccaacatttggacaaagtcaaggtgccagccagcccaatcccccaggctttggatctatatcatcttccacagcattatttcccactggttctcagcctgcaccacctacttttgggacagtgtcaagcagtagccagccccctgtgtttggacagcaacctagtcagtctgcatttggctctggaacaactcctaattctagttcggctttccagtttggcagcagcactacaaatttcaacttcacaaacaacagtccatcaggagtgttcacatttggtgcaaattctagcacacctgcagcctcagcccagccttcaggctcggggggctttccatttaaccagtctccagcagcatttacagtggggtcaaatgggaaaaatgtgttctcttcttctggaacttcattctctggtcgcaagataaagactgctgttagacgcaggaaataaaggtcacattggtgttgtactcaattttaacaacagctggtgccctgctttcagatactggattgtactttgtgctggggttatctgaagtcagatctgcctaaggacttctttaattttggaattttcctcctttctctttcgttacagaagccccaccctgcctcacccacccttttttaaataaataaatagctagactggtgactgattcttcagcaaaaatattttatgatccagcagattattcactgatttgacatagtctggctgtacccaggaatggagcctgcacggtgaatggctttgtatagaacctctttgtctacaccattatgtgcgctgataagcgttcatggaacgcgttgaaattgtaattatatctgaggaattctgtatagattagaattctgtatagattagagagtgttgaaacggatgatttctatgctgagtttgtgctggtgtatgtgtgaagtgagtgagttgggtgtattgtgcgctaaacttttctgatagaggaagcctgattaaagaatggtccgtgctaaggacttgttagatctagttcactctccatttaataattatatgctatttctatattttcattctcctatcacctgtcttgcctttttcattattttattatgaaacttgtgtaaatacaattttgtttctgtactttttggcataacataaatctgtgaacttgaaatttgaattttgtgttagagatttttttgttgtttgtttagtcttgtctcagattttattatgtaaatcccattattcaaagttgcctaaatccatttggaaatctttaaaaaaaaaattggggattcttaaagttgaatttattggcttttctgatccagttttgtttggaccaaaaaccagtattgtacaaagtattaagcatatatttttatatttactaaaatggactgtggtgactttggataataaggaaaagtttaatattaaagccatgtttattacagtataattaacatgttaaaccatgggataaatgccatcaataaaaaattatgacat

SEQ ID NO: 20864 - DNA, 4613 bp, Homo sapiens
  source 1..4613: mol_type = unassigned DNA
ttacccgccccggagcgggaagcggcggaggctccgccatggcctcgggagccggaggagtcggagggggcggtggcggcaagatccggacgcggcgttgccaccaggggccaattaagccttaccagcaggggcgacaacagcatcagggcattcttagcagggttacagaatctgttaagaatattgtgccagggtggctacaaagatacttcaacaagaatgaagatgtatgcagctgttcaacagacacaagcgaggttccacgctggccagaaaataaagaggaccatctggtatatgccgatgaggagagctctaatattactgatgggagaatcacacctgagccagcagtcagtaatacagaagaaccttcaacaactagtactgcttcaaattatccagatgtgttaacaaggccttctcttcatcggagccatctgaatttttccatgttggaatcccctgcattacactgtcagccatctacatcctcggcattcccaattggcagttcgggattttcccttgtaaaggaaattaaagattctacctctcagcatgatgatgataacatctcaactaccagtggtttttcttcaagagcttctgataaagatataactgtttcaaagaacacttcattgccacctctgtggtccccagaagctgaacgttctcactcactctcacagcacactgccaccagctcaaaaaaaccagcattcaacttgtctgcctttggaacactttccccttcacttgggaattcttcaatccttaaaaccagtcagcttggagattctcctttttatcctggaaaaacaacatacggtggggcagcagctgctgtaagacagtctaaactacgaaatacaccttatcaggcaccagttagaagacaaatgaaagctaagcaactcagtgcacaatcttacggtgtgaccagttcaacagctcggcgaatattgcagtctttagagaagatgtcaagccctttagcggatgcaaaaagaattccatccattgtttcttctcctctgaattctcctcttgataggagtgggatagatatcacagattttcaggccaaaagagaaaaggtggattctcaatatcctcctgttcagagacttatgaccccaaagccagtttccatagcaacaaatcgaagtgtttattttaaaccatctctgactccttctggtgaattcaggaagactaatcaaagaatagataacaagtgcagtactggatatgaaaaaaatatgacacccggacaaaatagagaacaacgagaaagtggcttttcatatccaaatttcagtttgcctgcagccaatggtttatcttctggagtaggtggtggaggtggcaagatgagacgagaaagaacacgctttgttgcttctaaacctctggaggaggagagacaaggtctcaccgtattgcccaagctgatctcgagctcctgcgctcaagcgatcatcccatcttggcctctcaaagtgctgagattacaggaaatggaagttccagtattaccgaaaatctctctaccgatcaccagttcttcactgcctacctttaattttagttcccctgagatcacaacttcctctccatcacccatcaattcgtctcaagcattaacaaacaaggtacaaatgacctctccgagcagcactggcagtcccatgtttaaattttcatctccaatcgtaaaatctactgaggcaaatgtactacctccatcatctattggatttacatttagtgtgcctgttgcaaaaacagcagaactttctggttctagtagtactttagaaccaattataagtagttcagctcatcatgtcactacagtgaacagtacaaattgtaagaagacaccacctgaagattgtgagggtccttttagacctgcagaaatcctgaaagaaggaagtgttctagatattctgaaaagccctggtttcgcatcgccgaagatagattctgttgctgctcagcccaccgcaacaagcccagtagtttatacaagaccagcaataagtagcttttcttctagtggaattgggtttggggagagtttaaaagctgggtcatcatggcagtgtgatacatgtctactccagaacaaagttacagacaacaaatgcatagcctgtcaagcagcaaaattgtcacccagagatactgctaaacagactggaattgaaacaccaaataaaagtggcaaaacaactctttctgcatcagggacaggctttggagacaaatttaaaccagtgataggcacttgggattgtgatacctgtttagtgcaaaataaacctgaagcaataaaatgtgtagcctgtgaaacaccgaaacctggaacttgtgtgaagcgagcccttacattgacagtggtttcggaaagtgctgagactatgactgcttcatcttccagctgcactgtaaccactggtaccttaggatttggagataaattcaaaaggcccattggatcttgggagtgttcagtatgctgtgtttctaataatgcagaagacaataagtgtgtgtcctgtatgtctgagaaaccaggaagttcagtacctgcttcaagtagcagcactgtacctgtctctctgccttctggaggctctctaggattggaaaagttcaagaaacccgagggaagctgggactgtgaattgtgcctagtgcagaataaggcagactctaccaaatgtttggcatgtgaaagtgcaaagccaggcacaaaatctgggtttaaaggctttgacacatcttcctcatcttcgaactcagcagcctcctcatccttcaaatttggtgtctcatcatcctcttctgggccttctcagactttaacaagcactggaaattttaaatttggagatcagggaggattcaaaataggtgtgtcatccgattctgggtctataaaccccatgagtgaaggctttaaattttctaaaccaataggagattttaaatttggagtttcatctgaatctaagcccgaagaagttaaaaaagatagtaagaatgataattttaagtttggactttcttctggtttaagcaacccagtttctttaactccatttcaatttggggtatctaatcttggacaggaagaaaagaaagaggaactgcccaaatcttcctctgcaggttttagctttggtacaggtgttattaactccacccctgctcctgctaacaccatagtgacctctgagaacaagagcagcttcaaccttggaaccatagaaaccaagagtgcttcagtggctcctttcacatgtaagacatcagaagctaaaaaagaagaaatgcctgccaccaaaggaggattctcttttggcaacgtggagcctgcctctctgccatctgcctcagtgtttgttttgggaaggacagaagagaaacagcaagagcctgtcacttctacttccctagtttttgggaagaaagctgacaatgaagagccaaagtgtcaaccagtgttttcctttgggaattcagagcaaaccaaagatgagaattcttcaaagtccacatttagttttagtatgacaaaaccatctgagaaggaatctgaacagccagcaaaagccacttttgcctttggagctcaaactagtactacagctgatcaaggtgcagcaaagccagtttttagtttcttgaacaacagttcctctagttcaagtacaccagccacttctgctggtggtggcatatttggtagttccacctcttcctccaatccacctgtggctacctttgtgtttggacagtccagcaatcctgtgagcagctctgcctttggtaacactgctgaatccagcacctctcagtctttgctattttctcaagatagcaaactagcaaccacatccagcacaggtacagctgtcaccccatttgtctttggtccaggagccagcagtaataatactaccacctctggtttcggctttggagccacaaccacatctagctctgcaggatcctcctttgtatttggaactggaccctcagcaccatctgccagtccagcatttggtgctaaccagaccccaacatttggacaaagtcaaggtgccagccagcccaatcccccaggctttggatctatatcatcttccacagcattatttcccactggttctcagcctgcaccacctacttttgggacagtgtcaagcagtagccagccccctgtgtttggacagcaacctagtcagtctgcatttggctctggaacaactcctaattctagttcggctttccagtttggcagcagcactacaaatttcaacttcacaaacaacagtccatcaggagtgttcacatttggtgcaaattctagcacacctgcagcctcagcccagccttcaggctcggggggctttccatttaaccagtctccagcagcatttacagtggggtcaaatgggaaaaatgtgttctcttcttctggaacttcattctctggtcgcaagataaagactgctgttagacgcaggaaataaaggtcacattggtgttgtactcaattttaacaacagctggtgccctgctttcag

SEQ ID NO: 20865 - DNA, 8143 bp, Homo sapiens
  source 1..8143: mol_type = unassigned DNA
ctcccaacagcttcctcttcccaggccagaacggcgtcttccagttccccaccggatgaagcggaagtgcgtcatgtcgaggcgccaaggcgctcgtttggcgcgcgcgccctaggcggcggatctaagctaacttcttggatcttttcttgtttctccttggtttttgactttttctggaccctggtgtctacgatttccgagatgccgtcttctttgttgggcgcggcgatgccggcctctacatctgccgcagccctgcaggaagctctggaaaatgctggacggctcatcgaccgtcagttgcaagaggaccgcatgtacccggacctttccgagctgcttatggtgtctgccccaaataatcccaccgtttctggcatgtcagatatggattatcctttgcaaggacctggtttgctgtccgtacccaaccttccagagatcagttccatccgaagagttcctctcccacctgaacttgttgagcagtttggacatatgcagtgtaattgcatgatgggtgtgttccctcctatcagcagagcttggctcacaattgacagtgatatattcatgtggaactatgaggatggaggagaccttgcctattttgatggacttagtgagactattcttgctgtggggcttgtgaagccaaaagcaggcatctttcaacctcatgtgcgacacctcctggttttggcgacccctgtagacatagtaattcttggactcagctatgctaatttgcaaacaggttctggagttcttaatgatagtttgtctggtggaatgcagttgcttccagatcctttatattctcttcctactgataatacttaccttttaacaataacttccactgataatggcagaattttcttggctggaaaggatggctgtttatatgaagtagcctaccaggctgaagcagggtggtttagccaaagatgtaggaaaataaaccactcaaagagctcactttctttccttgttccttccttgctacaattcacgttctcagaagatgatcctattcttcaaattgcaattgataattctagaaatattttatatacacgatctgagaaaggagtaatacaggtgtatgatttgggacaagatggacaaggaatgagcagagttgcctctgtgtcacagaatgccattgtctctgctgctggtaacattgctaggaccatcgatcgttctgtttttaaaccaattgtccaaatagcagtgattgaaaattctgaatcactggactgtcagttattggctgtcacacatgcaggtgttaggttatattttagcacttgtccattcagacagccattagcacggcctaatacactgacgctggttcatgtccgcttacctcctggattctcagcatcttcaaccgtggaaaagccttcaaaagtacatagagctctttatagtaaaggtattctattgatggcagcctcagaaaatgaggataatgatattttatggtgtgtcaaccatgatacttttcctttccaaaagccaatgatggaaacccagatgacagctggtgttgatggtcattcctgggctctttctgcgatagatgaattgaaagtagataaaataattacacctttaaacaaggatcatattccaataactgattcaccagttgttgtacagcagcacatgttacctccgaagaaatttgttctcctctcagcacaggggagccttatgtttcataaacttagacctgtagatcaactgaggcatctacttgtgagtaatgtgggaggagatggagaagagattgaaagattctttaaattacatcaggaagaccaggcttgtgcaacttgccttattcttgcttgctccactgctgcctgtgatagagaagtatctgcctgggctactcgggctttctttaggtatggtggtgaagcacagatgagatttccaaccactcttccgcctccaagtaatgttggtcccatcttggggtctcctgtctattctagttctcctgttcctagtggtagtccctatccaaatccatcctttttgggaacaccgtctcatggtatacagcctcctgccatgtcaactccagtgtgtgctctgggaaacccagcaactcaggccacaaatatgagttgtgtgactggaccagagattgtgtactctggaaaacacaatggtatttgcatttacttttctcggatcatgggaaacatttgggatgcaagcttagttgtggagagaatattcaagagtggcaacagagagatcactgcaattgaaagtagtgttccctgccaactgctagagtcagtgctacaagaactaaagggtttgcaggaatttctagacagaaactcccagtttgcaggaggaccattaggaaatccaaatactactgctaaagtgcagcagaggctgataggattcatgcgtcctgaaaacggaaatccccagcaaatgcaacaggaactgcagaggaagtttcatgaggctcaactaagtgaaaagatttcacttcaggcaattcagcagttggttcgaaaatcatatcaggctctggctttatggaaacttctttgtgaacatcaattcactatcattgtggcagaacttcagaaggaacttcaagagcagctgaagatcaccacctttaaagatcttgtaatcagggacaaagaactcacaggggcattaattgcttctcttatcaactgctacatcagagataatgccgctgttgatggcattagtttacatttacaggatatctgcccacttctatatagcactgatgatgcaatttgttctaaggcaaatgagcttctccagcgttcccgacaagttcaaaataagactgaaaaagaaagaatgttaagggaatcattaaaggaatatcaaaaaattagcaatcaagtggacctttccaatgtttgtgctcagtatagacaagtgagattttatgagggtgtggtggaactttctcttacggctgcagagaaaaaagatcctcaaggtcttgggcttcatttctataaacatggagaaccagaagaagacatagttggacttcaggccttccaagaaagattaaacagttacaaatgcattacagacacacttcaagaactggtaaatcaaagtaaggccgctcctcagtctcccagtgtacccaaaaaacctggtcctccagtgttgtcatctgatccaaatatgctgagtaatgaagaagcaggacatcattttgaacaaatgcttaaattgtcacagcgatccaaggatgagctctttagtattgccctttataattggctaatacaagtcgaccttgcagataagctgctacaggttgcttctccatttctggagccacatctagtccgaatggccaaagttgatcaaaacagagttcgttatatggatttactctggcggtattacgagaagaacagaagtttcagtaatgctgctcgtgtactgtccagactggctgacatgcatagcacagaaatttcacttcagcagcgactagagtacattgctcgagccattcttagtgccaaaagttccactgccatttcatcaatagctgccgatggtgaatttcttcatgaattagaagaaaaaatggaggttgctaggatccaacttcagatacaggagacactacaaaggcagtattcccatcattcttctgtacaggatgcagtttctcagctggattctgagctgatggacataactaagctttatggggaatttgctgacccatttaaacttgcagagtgcaaacttgcaataattcattgtgccggttattcagaccctatattggtgcagacactttggcaagatatcatagagaaagaattgagtgacagtgtgacattgagctcctcggatagaatgcatgctcttagtctcaagattgttctccttggcaaaatttatgctggcacaccacgcttctttcctttagattttattgtacagtttttagaacagcaggtttgtactttgaactgggatgtgggcttcgtaatacagacaatgaatgaaattggagtaccattacctagactactagaagtttatgatcagttgttcaaatcacgggatccattctggaacagaatgaagaagccactgcaccttttggattgtatacatgtattattgataagatatgttgagaatcccagccaagttttaaattgtgaaaggagaagatttacaaatctctgcctggatgctgtttgtggttaccttgttgagctccagtctatgagctcgtcagtagcagtacaagccatcactgggaattttaaatctcttcaagctaaattagaacggcttcattaattactgtgatatactttcatccgttttatgatctgtaaaataaaaactcagctgggtccagatatcaggtgttctaaatctaagaatgtaagaacaatcttaatagaaatatgtttttaataagtggctaatatctacaaatagtacctttgctaaatgaattcttttttatgactattttgttttttagtaattgggtgaaaaaacaactgaaatgagattatttattattttaacataaggattaaaaaaatttagaaactcttattttgaattgtactgcaggcagaaatttcgaatttatattattcattttcaagttagtccaaggatattggcattaaaactccactaggcggccaggcacagtgacttacacctgtaatcccagcactttgggaggccaaggtgggcgaatcacgaggccaagagtttgagaccaacctggccaacatggtgaaaccccatctctactaaaaatacaaaaaaaaatagccaggcgtggtggcgggcgcctgtaatcccagctactcgggaggctgagggaggcgaatcacttgaacccgggaggcagaggtttcagtgagtcaaaatcgcaccattgcactccagcccaggcaacagggcgagactctgtctcaaaaaacaaaaaaacctcaaataggctaagcagatccattcccataatagtggattctaaaaccgtccttaaataggcaaataactgactttttcaaaactttttttaggtgttgggttcacccttgaaagaactgtcctctaacaactggttttgtcagttaaagcccttgagaattgacatagctatatacctggttgagcaggtgataaaacttgtaactaatgttgtgtcctgaaaacctacacagggaggtactgttttcccttagtgtctacctggctgcttggccttgtgactactgattccattagagcagtggttctcaaagtatgtgctccaaaccagaagcatcagcatcagcatcagcatcacctaggaatttgttagaaatgcaaattctcgagccccaacccagacctactgaatcaaaaacgtgggggatgaggccctgctttctatgttttaacaagctctccaggagattttggtgcatgtcaaatttgaaagccactgcagtaaaggatactgctaccttccatagtttatggactgagctacctatctggctcctcctctgtgaataaccacacacacaaattttgcccaaggcacacaatatataaagcaaaactgttagtaatgtactttttaattattccttaacaaaatagaataaccaaaccaaatgcttcaaagtaatagcaacaagagagaagaagagtgggaatgaccagagctaacaaaacactctattcctttctctcttttttttttttttggagacagaatctcaccctgtagcccagcctggagtgcagtggtgcgatcccggctcactgcaacctctgcctcacaggtttgaagcaatttgcctgcctcagcctctcgagtagctgggattgcaggtgtgcgccaccatacccagctaatttttgtatttttagtagagatgggtttcaccatgttggccaggctggtcttgaactcctgacctcaagtgatctgcccgcctccacctcccaaagtgttgagattacagacgtgagccaatgtgcctggcctattcccttctctctttatgctaccacaaataattaccttctgtttattgtaagtgatgcatgtctaacaatttgtacaatacattttgaatatatttttccttccattattgtcttttcccaagaccatagggttgccttctctacatttgttctcttagaattcagctcccttttccctataatcttctaatgtagaatatttaatagaatgccagaacgtcactcagtgggtactactacctcttatttttcaacttttcagtttcttaagtttagcgttttttgaatatgtaaagtgaatgtatgcgatacattaattcgttttataaatttaaaattctgtcatgtctacttaaaaggaaggccttgtctgaatgttgtaatttaggtgtgactccagttctgctagagataagaacttcatttttgttttaagcacatttacatactagcaatatgttgttatatatactcagctcacaacattgaaagtacatgttttaaaagggctgtaggcttccatggttagatggtctgttagagtcagaaatctgaacactgtccttttattcacacagcatgctttgagaggttttaggaattccagccccacaacagatgcttgcaataccttttggggggtaagattcctaagagagaagaaattaggtcccctcatttttacccttggaacagtgtttctaaaactttcacattcagaacaatcagccggatagcctgttatgacagattcttgagttccatctgtagtgtcatgctgatcctggcagtcagtggatcagagttggagtagcatttatccactgtattagtatactttgtacttggtgtttgttcaacgcattacttttttgaatttttttgttttttgaagacaagggcttgccctggagtgcagtggcatgatcttggctcactgcagcctcgagctcctgggctcaactcagtcttcccacctcatcctcttaaatagctgggactacaggcacgtgctgctacaccctgctattgtctgtttgtttgtttgagactgagttttgctcttgttgcccaggctggagtgcaatggcacaatcttggctcaccacagccttttttatgagactgagttttgctcttgttgcccaggctggagtgcaatggcacgatcttggctcaccacaacctccacttcctgggttcaagcaattcttctgcctcagcctcccgagtagctgagattacaggcatgcgccaccatgcctggctaattttttttttttgtatttttagtagagatggggtttcaccgtgttggtcaggctggtcttgaactcctgacctcaggtgatccaccccccttggcctcccaaagagctgggattacaggcatgagccactgcgcctagccccaccccccctactttttttttttttttttttttaattttttgtgtagccaaaagatctcactctgttgcccagactgctctcaaaactcctggccttaagtgattcccctgcctcagtctcccaaagtgctgggattataggcatgagccaccatgcctgtccattatttctttatagtgactattatatgtaggcaatgtataattggtagaacatagtctatgaaacagtgcgttaattgtgggcagtgaagaatcattgaagttgtgaaatttgtattttaactagatcattgtagtatggcaaaacggttaggaaagagaaagctatcttgactaactgtttatgctatgagatactgactgatgtacatgtacatttagtgtttctttaggtatacctgacttattcattgaacacctatccactgatctcaaaagtattcctcagggtagtctccattcctgtcatttttcctcctattcatgagacggaaaaattatgaccatggtacagagttgtatcaaggaaatgaagaactagaacattgaattgaaaggttttgaaagggttcacaatttcttttcattttctattaatgtcttcttttaaattctcttaagaataaaacttttttctaata

SEQ ID NO: 20866 - DNA, 4200 bp, Homo sapiens
  source 1..4200: mol_type = unassigned DNA
gactctcgcctgacttcctaatttgctacttatccccagcgttggtcccggcgaggatatgctgagatttatggcactgttggctgcatttttggagaacagcaagcagcttcttttcagataatcccaccgtttctggcatgtcagatatggattatcctttgcaaggacctggtttgctgtccgtacccaaccttccagagatcagttccatccgaagagttcctctcccacctgaacttgttgagcagtttggacatatgcagtgtaattgcatgatgggtgtgttccctcctatcagcagagcttggctcacaattgacagtgatatattcatgtggaactatgaggatggaggagaccttgcctattttgatggacttagtgagactattcttgctgtggggcttgtgaagccaaaagcaggcatctttcaacctcatgtgcgacacctcctggttttggcgacccctgtagacatagtaattcttggactcagctatgctaatttgcaaacaggttctggagttcttaatgatagtttgtctggtggaatgcagttgcttccagatcctttatattctcttcctactgataatacttaccttttaacaataacttccactgataatggcagaattttcttggctggaaaggatggctgtttatatgaagtagcctaccaggctgaagcagggtggtttagccaaagatgtaggaaaataaaccactcaaagagctcactttctttccttgttccttccttgctacaattcacgttctcagaagatgatcctattcttcaaattgcaattgataattctagaaatattttatatacacgatctgagaaaggagtaatacaggtgtatgatttgggacaagatggacaaggaatgagcagagttgcctctgtgtcacagaatgccattgtctctgctgctggtaacattgctaggaccatcgatcgttctgtttttaaaccaattgtccaaatagcagtgattgaaaattctgaatcactggactgtcagttattggctgtcacacatgcaggtgttaggttatattttagcacttgtccattcagacagccattagcacggcctaatacactgacgctggttcatgtccgcttacctcctggattctcagcatcttcaaccgtggaaaagccttcaaaagtacatagagctctttatagtaaaggtattctattgatggcagcctcagaaaatgaggataatgatattttatggtgtgtcaaccatgatacttttcctttccaaaagccaatgatggaaacccagatgacagctggtgttgatggtcattcctgggctctttctgcgatagatgaattgaaagtagataaaataattacacctttaaacaaggatcatattccaataactgattcaccagttgttgtacagcagcacatgttacctccgaagaaatttgttctcctctcagcacaggggagccttatgtttcataaacttagacctgtagatcaactgaggcatctacttgtgagtaatgtgggaggagatggagaagagattgaaagattctttaaattacatcaggaagaccaggcttgtgcaacttgccttattcttgcttgctccactgctgcctgtgatagagaagtatctgcctgggctactcgggctttctttaggtatggtggtgaagcacagatgagatttccaaccactcttccgcctccaagtaatgttggtcccatcttggggtctcctgtctattctagttctcctgttcctagtggtagtccctatccaaatccatcctttttgggaacaccgtctcatggtatacagcctcctgccatgtcaactccagtgtgtgctctgggaaacccagcaactcaggccacaaatatgagttgtgtgactggaccagagattgtgtactctggaaaacacaatggtatttgcatttacttttctcggatcatgggaaacatttgggatgcaagcttagttgtggagagaatattcaagagtggcaacagagagatcactgcaattgaaagtagtgttccctgccaactgctagagtcagtgctacaagaactaaagggtttgcaggaatttctagacagaaactcccagtttgcaggaggaccattaggaaatccaaatactactgctaaagtgcagcagaggctgataggattcatgcgtcctgaaaacggaaatccccagcaaatgcaacaggaactgcagaggaagtttcatgaggctcaactaagtgaaaagatttcacttcaggcaattcagcagttggttcgaaaatcatatcaggctctggctttatggaaacttctttgtgaacatcaattcactatcattgtggcagaacttcagaaggaacttcaagagcagctgaagatcaccacctttaaagatcttgtaatcagggacaaagaactcacaggggcattaattgcttctcttatcaactgctacatcagagataatgccgctgttgatggcattagtttacatttacaggatatctgcccacttctatatagcactgatgatgcaatttgttctaaggcaaatgagcttctccagcgttcccgacaagttcaaaataagactgaaaaagaaagaatgttaagggaatcattaaaggaatatcaaaaaattagcaatcaagtggacctttccaatgtttgtgctcagtatagacaagtgagattttatgagggtgtggtggaactttctcttacggctgcagagaaaaaagatcctcaaggtcttgggcttcatttctataaacatggagaaccagaagaagacatagttggacttcaggccttccaagaaagattaaacagttacaaatgcattacagacacacttcaagaactggtaaatcaaagtaaggccgctcctcagtctcccagtgtacccaaaaaacctggtcctccagtgttgtcatctgatccaaatatgctgagtaatgaagaagcaggacatcattttgaacaaatgcttaaattgtcacagcgatccaaggatgagctctttagtattgccctttataattggctaatacaagtcgaccttgcagataagctgctacaggttgcttctccatttctggagccacatctagtccgaatggccaaagttgatcaaaacagagttcgttatatggatttactctggcggtattacgagaagaacagaagtttcagtaatgctgctcgtgtactgtccagactggctgacatgcatagcacagaaatttcacttcagcagcgactagagtacattgctcgagccattcttagtgccaaaagttccactgccatttcatcaatagctgccgatggtgaatttcttcatgaattagaagaaaaaatggaggttgctaggatccaacttcagatacaggagacactacaaaggcagtattcccatcattcttctgtacaggatgcagtttctcagctggattctgagctgatggacataactaagctttatggggaatttgctgacccatttaaacttgcagagtgcaaacttgcaataattcattgtgccggttattcagaccctatattggtgcagacactttggcaagatatcatagagaaagaattgagtgacagtgtgacattgagctcctcggatagaatgcatgctcttagtctcaagattgttctccttggcaaaatttatgctggcacaccacgcttctttcctttagattttattgtacagtttttagaacagcaggtttgtactttgaactgggatgtgggcttcgtaatacagacaatgaatgaaattggagtaccattacctagactactagaagtttatgatcagttgttcaaatcacgggatccattctggaacagaatgaagaagccactgcaccttttggattgtatacatgtattattgataagatatgttgagaatcccagccaagttttaaattgtgaaaggagaagatttacaaatctctgcctggatgctgtttgtggttaccttgttgagctccagtctatgagctcgtcagtagcagtacaagccatcactgggaattttaaatctcttcaagctaaattagaacggcttcattaattactgtgatatactttcatccgttttatgatctgtaaaataaaaactcagctgggtccag

SEQ ID NO: 20867 - DNA, 4224 bp, Homo sapiens
  source 1..4224: mol_type = unassigned DNA
gaggcgccaaggcgctcgtttggcgcgcgcgccctaggcggcggatctaagctctggaaaatgctggacggctcatcgaccgtcagttgcaagaggaccgcatgtacccggacctttccgagctgcttatggtgtctgccccaaataatcccaccgtttctggcatgtcagatatggattatcctttgcaaggacctggtttgctgtccgtacccaaccttccagagatcagttccatccgaagagttcctctcccacctgaacttgttgagcagtttggacatatgcagtgtaattgcatgatgggtgtgttccctcctatcagcagagcttggctcacaattgacagtgatatattcatgtggaactatgaggatggaggagaccttgcctattttgatggacttagtgagactattcttgctgtggggcttgtgaagccaaaagcaggcatctttcaacctcatgtgcgacacctcctggttttggcgacccctgtagacatagtaattcttggactcagctatgctaatttgcaaacaggttctggagttcttaatgatagtttgtctggtggaatgcagttgcttccagatcctttatattctcttcctactgataatacttaccttttaacaataacttccactgataatggcagaattttcttggctggaaaggatggctgtttatatgaagtagcctaccaggctgaagcagggtggtttagccaaagatgtaggaaaataaaccactcaaagagctcactttctttccttgttccttccttgctacaattcacgttctcagaagatgatcctattcttcaaattgcaattgataattctagaaatattttatatacacgatctgagaaaggagtaatacaggtgtatgatttgggacaagatggacaaggaatgagcagagttgcctctgtgtcacagaatgccattgtctctgctgctggtaacattgctaggaccatcgatcgttctgtttttaaaccaattgtccaaatagcagtgattgaaaattctgaatcactggactgtcagttattggctgtcacacatgcaggtgttaggttatattttagcacttgtccattcagacagccattagcacggcctaatacactgacgctggttcatgtccgcttacctcctggattctcagcatcttcaaccgtggaaaagccttcaaaagtacatagagctctttatagtaaaggtattctattgatggcagcctcagaaaatgaggataatgatattttatggtgtgtcaaccatgatacttttcctttccaaaagccaatgatggaaacccagatgacagctggtgttgatggtcattcctgggctctttctgcgatagatgaattgaaagtagataaaataattacacctttaaacaaggatcatattccaataactgattcaccagttgttgtacagcagcacatgttacctccgaagaaatttgttctcctctcagcacaggggagccttatgtttcataaacttagacctgtagatcaactgaggcatctacttgtgagtaatgtgggaggagatggagaagagattgaaagattctttaaattacatcaggaagaccaggcttgtgcaacttgccttattcttgcttgctccactgctgcctgtgatagagaagtatctgcctgggctactcgggctttctttaggtatggtggtgaagcacagatgagatttccaaccactcttccgcctccaagtaatgttggtcccatcttggggtctcctgtctattctagttctcctgttcctagtggtagtccctatccaaatccatcctttttgggaacaccgtctcatggtatacagcctcctgccatgtcaactccagtgtgtgctctgggaaacccagcaactcaggccacaaatatgagttgtgtgactggaccagagattgtgtactctggaaaacacaatggtatttgcatttacttttctcggatcatgggaaacatttgggatgcaagcttagttgtggagagaatattcaagagtggcaacagagagatcactgcaattgaaagtagtgttccctgccaactgctagagtcagtgctacaagaactaaagggtttgcaggaatttctagacagaaactcccagtttgcaggaggaccattaggaaatccaaatactactgctaaagtgcagcagaggctgataggattcatgcgtcctgaaaacggaaatccccagcaaatgcaacaggaactgcagaggaagtttcatgaggctcaactaagtgaaaagatttcacttcaggcaattcagcagttggttcgaaaatcatatcaggctctggctttatggaaacttctttgtgaacatcaattcactatcattgtggcagaacttcagaaggaacttcaagagcagctgaagatcaccacctttaaagatcttgtaatcagggacaaagaactcacaggggcattaattgcttctcttatcaactgctacatcagagataatgccgctgttgatggcattagtttacatttacaggatatctgcccacttctatatagcactgatgatgcaatttgttctaaggcaaatgagcttctccagcgttcccgacaagttcaaaataagactgaaaaagaaagaatgttaagggaatcattaaaggaatatcaaaaaattagcaatcaagtggacctttccaatgtttgtgctcagtatagacaagtgagattttatgagggtgtggtggaactttctcttacggctgcagagaaaaaagatcctcaaggtcttgggcttcatttctataaacatggagaaccagaagaagacatagttggacttcaggccttccaagaaagattaaacagttacaaatgcattacagacacacttcaagaactggtaaatcaaagtaaggccgctcctcagtctcccagtgtacccaaaaaacctggtcctccagtgttgtcatctgatccaaatatgctgagtaatgaagaagcaggacatcattttgaacaaatgcttaaattgtcacagcgatccaaggatgagctctttagtattgccctttataattggctaatacaagtcgaccttgcagataagctgctacaggttgcttctccatttctggagccacatctagtccgaatggccaaagttgatcaaaacagagttcgttatatggatttactctggcggtattacgagaagaacagaagtttcagtaatgctgctcgtgtactgtccagactggctgacatgcatagcacagaaatttcacttcagcagcgactagagtacattgctcgagccattcttagtgccaaaagttccactgccatttcatcaatagctgccgatggtgaatttcttcatgaattagaagaaaaaatggaggttgctaggatccaacttcagatacaggagacactacaaaggcagtattcccatcattcttctgtacaggatgcagtttctcagctggattctgagctgatggacataactaagctttatggggaatttgctgacccatttaaacttgcagagtgcaaacttgcaataattcattgtgccggttattcagaccctatattggtgcagacactttggcaagatatcatagagaaagaattgagtgacagtgtgacattgagctcctcggatagaatgcatgctcttagtctcaagattgttctccttggcaaaatttatgctggcacaccacgcttctttcctttagattttattgtacagtttttagaacagcaggtttgtactttgaactgggatgtgggcttcgtaatacagacaatgaatgaaattggagtaccattacctagactactagaagtttatgatcagttgttcaaatcacgggatccattctggaacagaatgaagaagccactgcaccttttggattgtatacatgtattattgataagatatgttgagaatcccagccaagttttaaattgtgaaaggagaagatttacaaatctctgcctggatgctgtttgtggttaccttgttgagctccagtctatgagctcgtcagtagcagtacaagccatcactgggaattttaaatctcttcaagctaaattagaacggcttcattaattactgtgatatactttcatccgttttatgatctgtaaaataaaaactcagctgggtccag

SEQ ID NO: 20868 - DNA, 4088 bp, Homo sapiens
  source 1..4088: mol_type = unassigned DNA
gcgcgcgcgccctaggcggcggatctaagctaacttcttggatcttttcttgtttctccttggtttttgactttttctggaccctggtgtctacgatttccgagatgccgtcttctttgttgggcgcggcgatgccggcctctacatctgccgcagccctgcaggaagctctggaaaatgctggacggctcatcgaccgtcagttgcaagaggaccgcatgtacccggacctttccgagctgcttatggtgtctgccccaaataatcccaccgtttctggcatgtcagatatggattatcctttgcaaggacctggtttgctgtccgtacccaaccttccagagatcagttccatccgaagagttcctctcccacctgaacttgttgagcagtttggacatatgcagtgtaattgcatgatgggtgtgttccctcctatcagcagagcttggctcacaattgacagtgatatattcatgtggaactatgaggatggaggagaccttgcctattttgatggacttagtgagactattcttgctgtggggcttgtgaagccaaaagcaggcatctttcaacctcatgtgcgacacctcctggttttggcgacccctgtagacatagtaattcttggactcagctatgctaatttgcaaacaggttctggagttcttaatgatagtttgtctggtggaatgcagttgcttccagatcctttatattctcttcctactgataatacttaccttttaacaataacttccactgataatggcagaattttcttggctggaaaggatggctgtttatatgaagtagcctaccaggctgaagcagggtggtttagccaaagatgtaggaaaataaaccactcaaagagctcactttctttccttgttccttccttgctacaattcacgttctcagaagatgatcctattcttcaaattgcaattgataattctagaaatattttatatacacgatctgagaaaggagtaatacaggtgtatgatttgggacaagatggacaaggaatgagcagagttgcctctgtgtcacagaatgccattgtctctgctgctggtaacattgctaggaccatcgatcgttctgtttttaaaccaattgtccaaatagcagtgattgaaaattctgaatcactggactgtcagttattggctgtcacacatgcaggtgttaggttatattttagcacttgtccattcagacagccattagcacggcctaatacactgacgctggttcatgtccgcttacctcctggattctcagcatcttcaaccgtggaaaagccttcaaaagtacatagagctctttatagtaaaggtattctattgatggcagcctcagaaaatgaggataatgatattttatggtgtgtcaaccatgatacttttcctttccaaaagccaatgatggaaacccagatgacagctggtgttgatggtcattcctgggctctttctgcgatagatgaattgaaagtagataaaataattacacctttaaacaaggatcatattccaataactgattcaccagttgttgtacagcagcacatgttacctccgaagaaatttgttctcctctcagcacaggggagccttatgtttcataaacttagacctgtagatcaactgaggcatctacttgtgagtaatgtgggaggagatggagaagagattgaaagattctttaaattacatcaggaagaccaggcttgtgcaacttgccttattcttgcttgctccactgctgcctgtgatagagaagtatctgcctgggctactcgggctttctttaggtatggtggtgaagcacagatgagatttccaaccactcttccgcctccaagtaatgttggtcccatcttggggtctcctgtctattctagttctcctgttcctagtggtagtccctatccaaatccatcctttttgggaacaccgtctcatggtatacagcctcctgccatgtcaactccagtgtgtgctctgggaaacccagcaactcaggccacaaatatgagttgtgtgactggaccagagattgtgtactctggaaaacacaatggtatttgcatttacttttctcggatcatgggaaacatttgggatgcaagcttagttgtggagagaatattcaagagtggcaacagagagatcactgcaattgaaagtagtgttccctgccaactgctagagtcagtgctacaagaactaaagggtttgcaggaatttctagacagaaactcccagtttgcaggaggaccattaggaaatccaaatactactgctaaagtgcagcagaggctgataggattcatgcgtcctgaaaacggaaatccccagcaaatgcaacaggaactgcagaggaagtttcatgaggctcaactaagtgaaaagatttcacttcaggcaattcagcagttggttcgaaaatcatatcaggctctggctttatggaaacttctttgtgaacatcaattcactatcattgtggcagaacttcagaaggcaaatgagcttctccagcgttcccgacaagttcaaaataagactgaaaaagaaagaatgttaagggaatcattaaaggaatatcaaaaaattagcaatcaagtggacctttccaatgtttgtgctcagtatagacaagtgagattttatgagggtgtggtggaactttctcttacggctgcagagaaaaaagatcctcaaggtcttgggcttcatttctataaacatggagaaccagaagaagacatagttggacttcaggccttccaagaaagattaaacagttacaaatgcattacagacacacttcaagaactggtaaatcaaagtaaggccgctcctcagtctcccagtgtacccaaaaaacctggtcctccagtgttgtcatctgatccaaatatgctgagtaatgaagaagcaggacatcattttgaacaaatgcttaaattgtcacagcgatccaaggatgagctctttagtattgccctttataattggctaatacaagtcgaccttgcagataagctgctacaggttgcttctccatttctggagccacatctagtccgaatggccaaagttgatcaaaacagagttcgttatatggatttactctggcggtattacgagaagaacagaagtttcagtaatgctgctcgtgtactgtccagactggctgacatgcatagcacagaaatttcacttcagcagcgactagagtacattgctcgagccattcttagtgccaaaagttccactgccatttcatcaatagctgccgatggtgaatttcttcatgaattagaagaaaaaatggaggttgctaggatccaacttcagatacaggagacactacaaaggcagtattcccatcattcttctgtacaggatgcagtttctcagctggattctgagctgatggacataactaagctttatggggaatttgctgacccatttaaacttgcagagtgcaaacttgcaataattcattgtgccggttattcagaccctatattggtgcagacactttggcaagatatcatagagaaagaattgagtgacagtgtgacattgagctcctcggatagaatgcatgctcttagtctcaagattgttctccttggcaaaatttatgctggcacaccacgcttctttcctttagattttattgtacagtttttagaacagcaggtttgtactttgaactgggatgtgggcttcgtaatacagacaatgaatgaaattggagtaccattacctagactactagaagtttatgatcagttgttcaaatcacgggatccattctggaacagaatgaagaagccactgcaccttttggattgtatacatgtattattgataagatatgttgagaatcccagccaagttttaaattgtgaaaggagaagatttacaaatctctgcctggatgctgtttgtggttaccttgttgagctccagtctatgagctcgtcagtagcagtacaagccatcactgggaattttaaatctcttcaagctaaattagaacggcttcattaa

SEQ ID NO: 20869 - DNA, 5376 bp, Homo sapiens
  source 1..5376: mol_type = unassigned DNA
gtggaagcctcgcaacgaagggccggagccgcctttctgctcccggaatgcttcacctgtccgcagctccgcccgccccacccccggaagtgacggcgaccgcgcggccctgcctttgttccgttgggcgtcgcggcgacggcgggaagatggcggcggcgggagccctggaacggagcttcgtggagctaagcggagctgagcgcgaaaggccgaggcactttcgggaattcacagtctgcagcattgggactgcaaatgccgtggctggcgccgtaaaatacagtgaaagcgcgggaggcttttactacgtggagagtggcaagttgttctccgtaaccagaaacaggttcattcattggaagacctctggagatacattggagctgatggaggagtcactggacataaatctgttgaataatgccattcgcctaaaattccaaaattgcagtgttttacctggaggggtttatgtctctgagactcagaatcgtgtgataatcttgatgttaaccaatcaaacagtgcacaggttacttttaccacacccctcccggatgtataggagtgagttggtagttgacagtcagatgcagtcaatattcactgacattggaaaagttgatttcacagatccttgcaactatcagttaattccagcagtacctggaatatctcctaattccaccgcctctacagcctggctcagcagtgatggggaggccctgtttgccttaccatgtgcttctgggggaatctttgttcttaagctacctccttatgacatacctggtatggtgtcagtcgtggaactgaaacagagttcagtaatgcaacgattgcttacaggctggatgccaacagctatcaggggtgaccagtcgccttcagatcgtcccctcagtcttgctgttcattgtgtggagcatgatgccttcatctttgctttgtgtcaggatcataaactacgaatgtggtcttacaaggagcaaatgtgcctaatggtagctgacatgctggagtatgtccctgtgaagaaagaccttcggcttactgctggaactggacacaaattacggcttgcttattcccccaccatgggactctacctggggatatacatgcatgcaccaaaacgaggacagttctgcattttccagttggtgagcactgagagtaatcgctatagtctcgatcatatttcttcactgttcacttctcaggagacactgattgactttgccttaacttccacggatatctgggccctgtggcatgatgctgagaaccaaacagtagtgaaatacatcaactttgaacataatgttgcaggtcagtggaatccagtttttatgcagcctctgccagaggaagagattgtcatcagagatgatcaagaccccagagagatgtatctgcaaagtctttttacaccaggacaattcacaaatgaagctttatgtaaggctttacagattttctgccgaggaactgagaggaatttggatctttcctggagtgaactgaagaaagaagttactttagctgttgaaaatgagcttcaaggaagtgtaacagagtatgaattctcccaggaggagtttcgaaatttacaacaagaattctggtgcaagttctatgcctgttgtcttcagtatcaagaagccctctctcaccctcttgccctacatttgaatccacacacaaacatggtgtgcctgctgaaaaaagggtacctgtctttccttattccctcatccttagtggatcatttgtatctcctgccttatgagaaccttttgacagaagatgagacaaccatatctgatgatgtggacatcgctcgggatgtcatatgtcttataaaatgcctccggctgattgaagagtcagtaactgtggatatgtcagttataatggaaatgagttgttataacctacagtctccggaaaaggctgcagagcagattctggaagatatgatcactattgatgtagaaaatgtgatggaggatatttgtagtaaactgcaagagattaggaacccaatccatgcaattggactacttatacgggaaatggattatgaaacagaagtggaaatggaaaagggattcaatccagctcagcctttgaatattcgaatgaatcttacccagctctatggtagtaacacagcagggtatattgtgtgcagaggggtgcataaaatcgccagtactcgtttcctgatctgcagagatcttttgatcttacagcagctgttaatgaggcttggagatgctgtgatttggggaactggtcagctctttcaagctcagcaagacctactacatcgaacagctcccctactcttatcttattacctcattaaatggggaagtgagtgcttggcaactgatgttccacttgacacactggagtctaatctccaacacttatcagtactggaattaacagactctggtgctttaatggcaaataggtttgtatctagtcctcagactattgtggagttattcttccaagaagttgcaagaaaacacattatatctcacctcttctctcagccaaaggcacctctgagccaaactggattgaattggcctgaaatgattactgcaattaccagttatttattgcagcttttatggcctagcaatcctggttgtctctttctagaatgtttgatgggaaattgccaatatgtacaattgcaggattatattcaactgctacatccctggtgtcaagtcaatgttggttcctgtcgatttatgctgggaaggtgttacctagttacaggagaaggacagaaggctctggaatgtttttgtcaggcagcatctgaagtaggcaaagaggaattcttggatcgcttgattcgctcagaggatggggagatcgtgtctacccccaggctgcagtattatgacaaggttttacgactactagatgtcattggtttgcctgaactggttattcagttggctacatcagccataactgaagcaggtgatgactggaaaagtcaggctactctaaggacatgtattttcaaacatcatttggatttgggtcacaatagccaagcatatgaagccttaacccaaattcctgattccagcaggcaattagattgtttacggcagttggtggtagttctttgtgaacgctcacagctacaggatcttgtagagtttccctatgtgaatctgcataatgaggttgtgggaataattgagtcacgtgctagagctgtggaccttatgactcacaattactatgaacttctgtatgcctttcacatctatcgccacaattaccgcaaggctggcacagtgatgtttgagtatggaatgcggcttggcagagaagttcgaactctccggggacttgagaaacaaggcaactgttatctggctgctctcaattgtttacgacttattcgtccagaatatgcgtggattgtgcagccagtgtctggtgcagtgtatgatcgccctggagcatcccctaagaggaatcatgatggagaatgcacagctgcccccacaaatcgacaaattgaaatcctggaactggaagatctggagaaagagtgttccttggctcgcatccgcctcactttggctcagcatgatccatcagcggttgcagttgctggaagttcatcagcagaggaaatggtcactctcttggttcaggcgggcctctttgacactgccatatcactctgtcagacttttaagcttcccttaacgccagtctttgaagggcttgccttcaaatgcatcaaattgcaatttggaggagaggcagcacaagcagaagcctgggcctggctagcagccaatcagctctcatctgtcatcactactaaggagtctagtgctacagatgaagcatggcgactattatccacttacctggagaggtacaaagtccagaataacttgtatcaccactgtgtaatcaacaagctcttgtctcatggagtgcctctgcctaattggcttataaacagttacaagaaggttgatgctgctgaattgcttcgtttatacttaaactatgaccttttagaagaagctgtggatttggtgtcagaatatgtggatgctgtattgggaaaaggacatcaatacttcggaattgagtttccactgtccgcaacagccccaatggtgtggcttccatactcctctattgatcagcttctccaagctctgggagagaacagtgccaacagtcacaacatcgcactgtcccagaaaatacttgacaaattggaggactaccagcaaaaagttgataaggcaacacgggatttattatatcgtcggaccttgtgatttggattgtcacctagcctttgtaaccgcttggtgcctcttaggacttaagactaccctacaggaaccctgtactcaaggccgatttttgtaactgtaaatgatgtgtacaacattcaagtctgcattctgcacaagataggagggcggaagagtcagaggaccctgtgcttgctggtggtgctaacacaatttctggtgttcaaccttggtctcaaatagctgcttttgtatatgattcacgagcttttttagagtttatatttttttaaactaccgaagacattcattatctgcaaattaagactcaccttcactttccaaaatagctgagggttgttggcttgttgtagctgaccaccaaaagcagtcactgcaaatcttttaattcttccctatcaccttttgtattttaatgcaattattttggtccagaactgacctgtattttctgtattgtacacaaaagctaataattttgtgtactttttatttattttggaggttttatatgatcttcaattgagtattaaataatttgcctagattaagcctaaaatgatgaccagctaattaaagaagatattttgaatctggttctgagctaaagttgagtaaattcttagctaagaaaaaattggaaatccatcatctatattagcaacagattctcagagtaaattgttaacttctatgatttatgataatcaagctggacttgatcatacaagttagtctcataatgtattggaccaaaatgtaaacttcattggtcagatttagaagcattcatgctcacaagttttgggaaagtgaaaaataataaaatcatcttggattttattctgtatattaaaatttatcttttaaggaaacaatctgtatactacttgcttgtatagccttttgacccttcttgagtttttcagaagcctttaatttttatactttcaataccatatttacattatatactttaattaacaatgtgagtttctctgtggtactgttgttgata

SEQ ID NO: 20870 - DNA, 5503 bp, Homo sapiens
  source 1..5503: mol_type = unassigned DNA
ctcttctggattcctcgctgcccaccctcattctcccggtggaagcctcgcaacgaagggccggagccgcctttctgctcccggaatgcttcacctgtccgcagctccgcccgccccacccccggaagtgacggcgaccgcgcggccctgcctttgttccgttgggcgtcgcggcgacggcgggaagatggcggcggcgggagccctggaacggagcttcgtggagctaagcggagctgagcgcgaaaggccgaggcactttcgggaattcacagtctgcagcattgggactgcaaatgccgtggctggcgccgtaaaatacagtgaaagcgcgggaggcttttactacgtggagagtggcaagttgttctccgtaaccagaaacaggttcattcattggaagacctctggagatacattggagctgatggaggagtcactggacataaatctgttgaataatgccattcgcctaaaattccaaaattgcagtgttttacctggaggggtttatgtctctgagactcagaatcgtgtgataatcttgatgttaaccaatcaaacagtgcacaggttacttttaccacacccctcccggatgtataggagtgagttggtagttgacagtcagatgcagtcaatattcactgacattggaaaagttgatttcacagatccttgcaactatcagttaattccagcagtacctggaatatctcctaattccaccgcctctacagcctggctcagcagtgatggggaggccctgtttgccttaccatgtgcttctgggggaatctttgttcttaagctacctccttatgacatacctggtatggtgtcagtcgtggaactgaaacagagttcagtaatgcaacgattgcttacaggctggatgccaacagctatcaggggtgaccagtcgccttcagatcgtcccctcagtcttgctgttcattgtgtggagcatgatgccttcatctttgctttgtgtcaggatcataaactacgaatgtggtcttacaaggagcaaatgtgcctaatggtagctgacatgctggagtatgtccctgtgaagaaagaccttcggcttactgctggaactggacacaaattacggcttgcttattcccccaccatgggactctacctggggatatacatgcatgcaccaaaacgaggacagagacggggtttcgccatgttgcctggtctcaaactcctgagttcaagcagtccacccacctcggcttcccaatgtgctgggattacaagtgtgaaccacagcacccagcctgaatttttcttctgcattttccagttggtgagcactgagagtaatcgctatagtctcgatcatatttcttcactgttcacttctcaggagacactgattgactttgccttaacttccacggatatctgggccctgtggcatgatgctgagaaccaaacagtagtgaaatacatcaactttgaacataatgttgcaggtcagtggaatccagtttttatgcagcctctgccagaggaagagattgtcatcagagatgatcaagaccccagagagatgtatctgcaaagtctttttacaccaggacaattcacaaatgaagctttatgtaaggctttacagattttctgccgaggaactgagaggaatttggatctttcctggagtgaactgaagaaagaagttactttagctgttgaaaatgagcttcaaggaagtgtaacagagtatgaattctcccaggaggagtttcgaaatttacaacaagaattctggtgcaagttctatgcctgttgtcttcagtatcaagaagccctctctcaccctcttgccctacatttgaatccacacacaaacatggtgtgcctgctgaaaaaagggtacctgtctttccttattccctcatccttagtggatcatttgtatctcctgccttatgagaaccttttgacagaagatgagacaaccatatctgatgatgtggacatcgctcgggatgtcatatgtcttataaaatgcctccggctgattgaagagtcagtaactgtggatatgtcagttataatggaaatgagttgttataacctacagtctccggaaaaggctgcagagcagattctggaagatatgatcactattgatgtagaaaatgtgatggaggatatttgtagtaaactgcaagagattaggaacccaatccatgcaattggactacttatacgggaaatggattatgaaacagaagtggaaatggaaaagggattcaatccagctcagcctttgaatattcgaatgaatcttacccagctctatggtagtaacacagcagggtatattgtgtgcagaggggtgcataaaatcgccagtactcgtttcctgatctgcagagatcttttgatcttacagcagctgttaatgaggcttggagatgctgtgatttggggaactggtcagctctttcaagctcagcaagacctactacatcgaacagctcccctactcttatcttattacctcattaaatggggaagtgagtgcttggcaactgatgttccacttgacacactggagtctaatctccaacacttatcagtactggaattaacagactctggtgctttaatggcaaataggtttgtatctagtcctcagactattgtggagttattcttccaagaagttgcaagaaaacacattatatctcacctcttctctcagccaaaggcacctctgagccaaactggattgaattggcctgaaatgattactgcaattaccagttatttattgcagcttttatggcctagcaatcctggttgtctctttctagaatgtttgatgggaaattgccaatatgtacaattgcaggattatattcaactgctacatccctggtgtcaagtcaatgttggttcctgtcgatttatgctgggaaggtgttacctagttacaggagaaggacagaaggctctggaatgtttttgtcaggcagcatctgaagtaggcaaagaggaattcttggatcgcttgattcgctcagaggatggggagatcgtgtctacccccaggctgcagtattatgacaaggttttacgactactagatgtcattggtttgcctgaactggttattcagttggctacatcagccataactgaagcaggtgatgactggaaaagtcaggctactctaaggacatgtattttcaaacatcatttggatttgggtcacaatagccaagcatatgaagccttaacccaaattcctgattccagcaggcaattagattgtttacggcagttggtggtagttctttgtgaacgctcacagctacaggatcttgtagagtttccctatgtgaatctgcataatgaggttgtgggaataattgagtcacgtgctagagctgtggaccttatgactcacaattactatgaacttctgtatgcctttcacatctatcgccacaattaccgcaaggctggcacagtgatgtttgagtatggaatgcggcttggcagagaagttcgaactctccggggacttgagaaacaaggcaactgttatctggctgctctcaattgtttacgacttattcgtccagaatatgcgtggattgtgcagccagtgtctggtgcagtgtatgatcgccctggagcatcccctaagaggaatcatgatggagaatgcacagctgcccccacaaatcgacaaattgaaatcctggaactggaagatctggagaaagagtgttccttggctcgcatccgcctcactttggctcagcatgatccatcagcggttgcagttgctggaagttcatcagcagaggaaatggtcactctcttggttcaggcgggcctctttgacactgccatatcactctgtcagacttttaagcttcccttaacgccagtctttgaagggcttgccttcaaatgcatcaaattgcaatttggaggagaggcagcacaagcagaagcctgggcctggctagcagccaatcagctctcatctgtcatcactactaaggagtctagtgctacagatgaagcatggcgactattatccacttacctggagaggtacaaagtccagaataacttgtatcaccactgtgtaatcaacaagctcttgtctcatggagtgcctctgcctaattggcttataaacagttacaagaaggttgatgctgctgaattgcttcgtttatacttaaactatgaccttttagaagaagctgtggatttggtgtcagaatatgtggatgctgtattgggaaaaggacatcaatacttcggaattgagtttccactgtccgcaacagccccaatggtgtggcttccatactcctctattgatcagcttctccaagctctgggagagaacagtgccaacagtcacaacatcgcactgtcccagaaaatacttgacaaattggaggactaccagcaaaaagttgataaggcaacacgggatttattatatcgtcggaccttgtgatttggattgtcacctagcctttgtaaccgcttggtgcctcttaggacttaagactaccctacaggaaccctgtactcaaggccgatttttgtaactgtaaatgatgtgtacaacattcaagtctgcattctgcacaagataggagggcggaagagtcagaggaccctgtgcttgctggtggtgctaacacaatttctggtgttcaaccttggtctcaaatagctgcttttgtatatgattcacgagcttttttagagtttatatttttttaaactaccgaagacattcattatctgcaaattaagactcaccttcactttccaaaatagctgagggttgttggcttgttgtagctgaccaccaaaagcagtcactgcaaatcttttaattcttccctatcaccttttgtattttaatgcaattattttggtccagaactgacctgtattttctgtattgtacacaaaagctaataattttgtgtactttttatttattttggaggttttatatgatcttcaattgagtattaaataatttgcctagattaagcctaaaatgatgaccagctaattaaagaagatattttgaatctggttctgagctaaagttgagtaaattcttagctaagaaaaaattggaaatccatcatctatattagcaacagattctcagagtaaattgttaacttctatgatttatgataatcaagctggacttgatcatacaagttagtctcataatgtattggaccaaaatgtaaacttcattggtcagatttagaagcattcatgctcacaagttttgggaaagtgaaaaataataaaatcatcttggattttattctgtatattaaaatttatcttttaaggaaacaatctgtatactacttgcttgtatagccttttgacccttcttgagtttttcagaagcctttaatttttatactttcaataccatatttacattatatactttaattaacaa

SEQ ID NO: 20871 - DNA, 1537 bp, Homo sapiens
  source 1..1537: mol_type = unassigned DNA
ccggccactggaaggttcccgcagatagagtctgcctcccctgcccccttctcttctggattcctcgctgcccaccctcattctcccggtggaagcctcgcaacgaagggccggagccgcctttctgctcccggaatgcttcacctgtccgcagctccgcccgccccacccccggaagtgacggcgaccgcgcggccctgcctttgttccgttgggcgtcgcggcgacggcgggaagatggcggcggcgggagccctggaacggagcttcgtggagctaagcggagctgagcgcgaaaggccgaggcactttcgggaattcacagtctgcagcattgggactgcaaatgccgtggctggcgccgtaaaatacagtgaaagcgcgggaggcttttactacgtggagagtggcaagttgttctccgtaaccagaaacaggttcattcattggaagacctctggagatacattggagctgatggaggagtcactggacataaatctgttgaataatgccattcgcctaaaattccaaaattgcagtgttttacctggaggggtttatgtctctgagactcagaatcgtgtgataatcttgatgttaaccaatcaaacagtgcacaggttacttttaccacacccctcccggatgtataggagtgtaagttggctaagtgcaatatcttttatttcccaaattactctgggtgtcacaaatgtagtgctggagcgatgtcttttggaattgaaggaaatttggattctcgttatccctcaccaagcatactttgatagctaccgcttaaaatgatcaggcatacattttaagttgagaattagttttcattaagaagaatagctttcttaaacttgacagttttttactttaaaaacttttttagcaatagagaggaactgagcaaaattctggttattttgatttaatagatttttctttttaattactcaacaggagttggtagttgacagtcagatgcagtcaatattcactgacattggaaaagttgatttcacagatccttgcaactatcagttaattccagcagtacctggaatatctcctaattccaccgcctctacagcctggctcagcagtgatggggaggccctgtttgccttaccatgtgcttctgggggaatctttgttcttaagctacctccttatgacatacctggtaagaatgggaactgagcatggatttaactttaaacaaggaatgttaacattgaaacagttcaacctcgtcatccaatgcagggattgcatctctactgccccggaactggtcattcattattgcttgcctaatgagtccctaatgctttacttttatacagtggataaggaactataaagcatattggagcacggaaaaacaaatagacaagtataagacagcctattctaaatcttgtagtagagatgggttgcctaattgtctgccctgagatggaggcattataacattataattaaattaattgaaacaaagacattaaataccctgcaccaagtt

SEQ ID NO: 20872 - DNA, 6266 bp, Homo sapiens
  source 1..6266: mol_type = unassigned DNA
aagggctctgttagtgcgcctctaagatggcgacgcctttggcggtaaattcggctgctagtctatggggtccttacaaagacatttggcataaagtgggaaatgctctttggagaagacaacctgaagctgttcaccttcttgataagattttgaagaaacacaaacctgacttcatctcattgttcaaaaatccgccaaaaaatgttcaacagcatgagaaggttcagaaagccagtacagagggagtcgccattcagggtcaacagggaactcgacttcttcctgaacagctcattaaagaagcctttattctcagtgacctttttgatattggagaattggcagctgttgagcttcttcttgctggagagcatcaacagccacattttcctggccttaccagaggattagtagctgttcttctgtactgggatggaaagcgatgcattgcgaattccttgaaagccttgatacagtctagacggggaaagacatggaccctagaactcagtccagagctggcttccatgacaacacgctttacagatgagctgatggagcaaggattgacttataaagttcttacgctggtgtcacagattgatgtgaataatgagtttgagaaactacagcgagagagaggtttgggcagtgaaaaacatcgcaaagaggtttctgatctcattaaggagtgcaggcagtctcttgcagaaagcctttttgcctgggcttgccagtcacctttaggcaaagaagacactctcctcctcattggacatttggaaagagtgacagttgaggctaatggctcactggatgcagtgaatctggctcttcttatggcgcttctatactgttttgatatcagttttatagagcaaagcacagaggaacgagatgatatgattcatcaacttccactgttgacagaaaaacagtacattgcaacaattcactctcgtcttcaggactcacagctttggaaactgcctgggctccaagccactgttagacttgcctgggcgctggcattgaggggaatatcccagctacctgatgtgacagctctggcagaattcacagaggcagatgaagcaatggcagaactcgcaattgctgacaacgttttcctgttcctcatggaatctgtagtggtatcagaatacttttatcaggaagaattttatattcgcagagtccataatctcatcacagatttccttgcacttatgccaatgaaggtgaaacagctgaggaatcgggcagatgaagatgctcgaatgattcacatgagtatgcagatgggtaatgaaccccccatttcacttagaagggacctggaacacttaatgcttttgattggcgagctatataaaaagaacccttttcatctggagcttgctctagaatattggtgtcccacagagcctcttcagactccgactatcatgggctcttatctaggggtggctcatcagcggccccctcaacgccaggttgtcttgtcaaagtttgttaggcaaatgggtgacctgttgcctccaactatttatattccttatttgaagatgctccagggattggccaatgggcctcagtgtgcccactactgtttcagcctgctcaaagtcaatggtagtagtcatgttgaaaatattcagggagcaggtggcagtcctgtttcctgggaacatttctttcactccttgatgctttaccacgaacaccttcggaaggatcttccaagtgcagatagtgtccagtaccgtcaccttccttcccgtggcatcacccagaaggagcaagatggattgattgcttttttgcagctcacgtctaccatcattacttggagtgaaaatgctcgcttggcactctgtgaacaccctcagtggacccctgttgtggtgattctgggactcctccaatgcagtattccccctgtcctaaaagctgagctactgaagacactcgcagcttttggaaaatctcctgaaattgctgcttccctctggcagtcattggaatacactcagatactgcagaccgtgaggattccaagccaaaggcaagctattggtattgaggttgaactaaatgaaatagaatcccggtgtgaagaatacccattgactcgggccttttgccagcttattagtactctggtggagagctcatttccttctaatttgggtgctggactgcggccccctggctttgacccttatttgcagttccttagagactctgtgtttctacgattccgtacaagagcttaccggagagcagctgaaaagtgggaagttgctgaggtggttttggaggtgttttataaattgctcagagattatgagcctcagcttgaagattttgtagaccagtttgtggaactacaaggagaagaaatcatagcctataagccacctggatttagtctgatgtatcatctgctgaatgagtcaccaatgttggagcttgctctcagtttactggaagaaggagttaagcagcttgacacctatgccccctttcctgggaaaaaacacctggagaaagcagtacagcattgccttgcacttctcaatcttactctgcaaaaggaaaatctttttatggaccttctaagagagagtcaactggctctaatagtctgtcctttagaacagcttttgcagggaattaatcccagaactaagaaggcagataatgtggtaaacattgccagatacctatatcatggcaatactaatccagaattggcttttgaaagtgccaagatcctctgttgtatctcttgcaactctaatattcagataaagttggttggagatttcacacatgaccagagtataagtcagaaactaatggctggatttgtggagtgtttggattgtgaagatgcagaagaatttgtacgtctggaagagggatcagaacttgaaaagaaattagttgcaattcgtcatgaaacaagaatccacatcttgaatcttctcattacctctctggaatgcaatccacccaatcttgctctctacctgttgggctttgaattgaaaaaacctgtcagtactacaaacctacaagatccaggagtgttaggttgccctcggacatgccttcacgccattctaaacatcttggagaaaggaacggaagggagaacaggcccagtggcggtgcgagaatctcctcagctggctgagctatgttaccaggtcatatatcagttatgtgcatgctctgatacatctggtcctactatgaggtacttgagaaccagccaggatttcttattttcccagttgcagtatctaccattttctaacaaagaatatgaaatatctatgctgaaccagatgtcatggcttatgaaaactgcctcaatagagctaagggtaacctctctgaatcgtcagcggtcacatacccagaggctcctacacctcttactggatgacatgccagtgaaaccatactcagatggtgaaggaggaatagaagatgaaaacaggtctgtttctgggttccttcactttgacactgctacaaaagtacgtcgaaaaattctaaatattcttgactcgattgacttcagtcaggagatccctgagcctttgcagttggatttttttgatcgggcccagattgaacaagttattgctaactgtgaacacaagaatttacggggacagacagtctgcaatgtcaagcttcttcatagggttcttgtagctgaagtaaatgcccttcagggtatggcagccataggacagagacctctactaatggaggaaatcagcactgtacttcagtatgtggtaggaagaaataaattgctgcagtgtcttcatgcaaaacgtcatgctctggagtcgtggaggcaactagtagaaattatactgacagcttgtccccaggacctcattcaggcagaggatcgacaactgattattcgtgatattttacaagatgtgcatgataagatactggatgatgaagctgcgcaagagttaatgcctgtggtcgccggggcagtgttcacactgactgctcacctaagccaggccgtcctcactgaacagaaggaaacatcagtcttgggaccagcagaggcccattacgcttttatgcttgatagttgcttcacctcacctcctcctgaagagaacccattagtgggttttgcttctattggagattcttcactttacatcatattgaagaaactgttagacttcattttgaagacaggtggtggattccaacgagtgaggactcacttgtatggctctctgctttattacttacagattgcccagagacctgatgaaccagacaccttagaagcagccaagaaaaccatgtgggaaaggctgacagcccctgaagatgtatttagcaaattacagcgagaaaacatagccattattgaaagttatggcgccgccctcatggaagtggtctgtcgagatgcttgtgatggtcatgagattggaaggatgctggccctggctctacttgatagaattgtctccgtggataaacagcagcagtggcttttgtatctttctaacagtggctacttgaaggtcctcgtagacagcttggtagaagatgaccgtactttgcagagcttactcaccccacagcctccccttttaaaagcactttatacttatgaatctaaaatggcatttctcacaagagtggcaaagatacagcagggtgcattagagctgctaagatcaggggtgattgtgagactagctcaatgccaagtctatgacatgcgcccagaaacggacccgcagagcatgtttggcatgagagaccctccaatgttcatccctaccccagtggatcgctaccgccagattctcctcccagctctccagctgtgccaggtcatcctcacatctagtatggcccagcacttgcaggcagcagggcaggtattgcagtttcttatttcacattctgataccatacaagcaattctgcgctgtcaggatgttagtgctgggtctttgcaggaattggctctgctgacaggaattataagtaaagcagcacttcctggaatattaagtgaacttgacgttgatgtaaatgaagggtctctaatggagctacagggacatattggaagattccagcgccagtgcttaggactactaagtcgctttggtggctctgacagactgcgtcagtttaaatttcaagacgataatgtggagggagataaagtaagcaagaaagatgagattgaactggctatgcagcagatttgtgccaatgtaatggaatattgccagtcactcatgttacagagttcccctaccttccagcatgctgtgtgtctcttcactcctagcctttcagaaacagttaatagagatggaccgcggcaagatacccaagctccagtggttccatactggcgcctgcctggtttaggcattatcatctacctgctgaaacagagtgctaatgatttcttcagctattatgacagtcatcgacagagtgtcagcaagctacaaaatgtagagcagcttcccccagatgagataaaagagttgtgtcagtctgtgatgcctgctggtgttgataaaatctccactgctcagaaatatgttctagcaagacggcgcttggtgaaggtgatcaacaatcgagctaaactgctttccctttgttcttttatcatagagacctgcctatttattctttggcgccatctggagtactacttgttacattgcatgcccacggattctcaagattccttatttgcctcgagaaccttgtttaaaagcagaagactgcaagattccttcgcctcagaaaccaatctagattttagaagtgggctggctatagtgagccaacatgatttagaccagcttcaggctgatgcaatcaacgcttttggagaatcactacaaaagaaacttctggacattgaaggattatattcaaaagttcgatctcgatatagtttcatacaggctcttgtcagacgtatccgtggcctcttgaggatatcaaggaactgagagcccgtgcttatgctcttctatgagagagatgaattggggagaattgtctccattttatagattagtttctttctaaattatgaccaaaaatattttgctatttctttctttgtatatggacatcttttctgtaaacttcttcccctagttccatcctcactagtaaaaaataaatactttttaaaaaaacaaaacaaa

SEQ ID NO: 20873 - DNA, 1638 bp, Homo sapiens
  source 1..1638: mol_type = unassigned DNA
agtgcgcctctaagatggcgacgcctttggcggtaaattcggctgctagtctatggggtccttacaaagacatttggcataaagtgggaaatgctctttggagaagacaacctgaagctgttcaccttcttgataagattttgaagaaacacaaacctgacttcatctcattgttcaaaaatccgccaaaaaatgttcaacagcatgagaaggttcagaaagccagtacagagggagtcgccattcagggtcaacagggaactcgacttcttcctgaacagctcattaaagaagcctttattctcagtgacctttttgatattggagaattggcagctgttgagcttcttcttgctggagagcatcaacagccacattttcctggccttaccagaggattagtagctgttcttctgtactgggatggaaagcgatgcattgcgaattccttgaaagccttgatacagtctagacggggaaagacatggaccctagaactcagtccagagctggcttccatgacaacacgctttacagatgagctgatggagcaaggattgacttataaagttcttacgctggtgtcacagattgatgtgaataatgagtttgagaaactacagcgagagagaggtttctgatctcattaaggagtgcaggcagtctcttgcagaaagcctttttgcctgggcttgccagtcacctttaggcaaagaagacactctcctcctcattggacatttggaaagagtgacagttgaggctaatggctcactggatgcagtgaatctggctcttcttatggcgcttctatactgttttgatatcagttttatagagcaaagcacagaggaacgagatgatatgattcatcaacttccactgttgacagaaaaacagtacattgcaacaattcactctcgtcttcaggactcacagctttggaaactgcctgggctccaagccactgttagacttgcctgggcgctggcattgaggggaatatcccagctacctgatgtgacagctctggcagaattcacagaggcagatgaagcaatggcagaactcgcaattgctgacaacgttttcctgttcctcatggaatctgtagtggtatcagaatacttttatcaggaagaattttatattcgcagagtccataatctcatcacagatttccttgcacttatgccaatgaaggtgaaacagctgaggaatcgggcagatgaagatgctcgaatgattcacatgagtatgcagatgggtaatgaaccccccatttcacttagaagggacctggaacacttaatgcttttggtaagcaagctattggtattgaggttgaactaaatgaaatagaatcccggtgtgaagaatacccattgactcgggccttttgccagcttattagtactctggtggagagctcatttccttctaatttgggtgctggactgcggccccctggctttgacccttatttgcagttccttagagactctgtgtttctacgattccgtacaagagcttaccggagagcagctgaaaagtgggaagttgctgaggtggttttggaggtgttttataaattgctcagagattatgagcctcagcttgaagattttgtagaccagt

SEQ ID NO: 20874 - DNA, 7191 bp, Homo sapiens
  source 1..7191: mol_type = unassigned DNA
gcgcgcgcgcgggcgggagcggagggcaacggggcggcgcgggcggccgggcgcagggtcgcgggaggtgacgcgcggcgaggatggcggcgcggggccgggggctgctgctgctgacgctgtcggtgctgttggcggcgggcccctccgccgctgcggccaagctcaacatccccaaagtgctgctgcccttcacgcgggccacgcgcgttaacttcacgctggaggcctcggagggctgctaccgctggttgtccacccggccggaggtggccagcatcgagccgctgggcctggacgagcagcagtgctcccagaaggcagtggtgcaggcccgcctgacccagcctgcccgcctcaccagcatcatcttcgcagaggacatcaccacaggccaggtcctgcgctgtgatgccattgtggacctcatccatgacatccagatcgtctccaccacccgcgagctctacctggaggactcccccctggagctgaagatccaggccctggactccgaagggaacaccttcagcactctggctggactggtcttcgagtggacgattgtgaaggactccgaggcggacaggttctcagactcccacaatgcgctgcgaatcctcactttcttggagtctacgtacatccctccttcttacatctcagagatggagaaggctgccaagcaaggggacaccatcctggtgtctgggatgaagaccgggagctccaagctcaaggctcgcatccaggaggctgtctacaagaatgtacgccctgcagaagtcaggctgctgattttggaaaacatccttctgaacccggcctatgacgtctacctgatggtgggaacctccattcactacaaggtgcagaagatcaggcaagggaaaattacagaactctccatgccttccgatcagtacgagttgcagcttcagaacagcatcccgggccccgaaggagacccagcccggccggtggctgtcttggcccaggacacgtcgatggtcactgcactgcagctgggacagagcagcctcgtccttggccacaggagtattcgcatgcaaggtgcttctaggttacccaacagcactatctacgtggtcgaacctggatacctagggttcactgttcaccctggtgacaggtgggtgctggagaccggccgcctgtatgaaatcaccatcgaagtttttgacaagttcagcaacaaggtctatgtatctgacaacatccgaattgaaactgtgcttcctgctgagttcttcgaggtgctctcgtcctcccagaatgggtcataccatcgcatcagggcactaaagaggggacagacggccattgacgcggccctcacctctgtggtggaccaggatggaggggtccacatactacaggtgcctgtgtggaaccagcaggaggtggaaattcacatcccgatcaccctgtatcccagcatcttgacatttccgtggcaaccaaagacgggcgcctatcagtacacaataagggcccacggtggcagtgggaacttcagctggtcttcgtcaagccacctggttgccacagttactgtcaagggcgtgatgaccacaggcagtgacatcgggttcagtgtgatccaggcacatgatgtgcagaacccactccatttcggtgagatgaaggtgtatgtgatcgagccccacagcatggagtttgccccgtgccaggtggaggcacgtgtgggccaggccctggagctgcccctgaggatcagtggcctcatgcccggcggggccagtgaggtggtcaccttgagcgactgctcccactttgacttggctgtcgaggtggagaaccagggtgtgttccagccactcccagggaggctgccgccaggctctgagcactgcagcggcatccgggtaaaggccgaggcccagggctctaccacgcttcttgtgagctacagacacggccacgtccacctgagtgccaagatcaccattgctgcctacctgcccctcaaggctgtggatccctcctctgttgccttggtaaccctgggctcctcaaaggagatgctgtttgaaggaggtcccagaccttggatcctcgagccgtccaaattcttccagaacgtcaccgctgaggacactgacagcatcggcctggctctctttgccccccattcctcccggaattatcagcaacactggatccttgtgacctgtcaggccttgggtgagcaggtcatcgccctgtcggtggggaacaagcccagcctcaccaacccctttcctgcggtggagcctgccgtggtgaagttcgtctgcgccccaccgtccaggctcaccctcgcgcctgtctacaccagcccccagctggacatgtcctgtccgctgctgcagcagaacaagcaggtggtcccagtgtccagccaccgcaacccccggctggacctggctgcttacgaccaggagggccgccggttcgacaacttcagctctctgagcatccagtgggagtccaccaggccagtgttggccagcatcgagcctgagctgcccatgcagctggtgtcccaggacgatgagagtggccaaaagaagctgcacggtttgcaggccattttggttcacgaggcatcaggaaccacagccatcactgccactgccactggctaccaggagtcccacctcagctctgccagaacaaagcagccgcatgaccctctggtgcctctgtcggcctccatagagctcatcctggtggaggacgtgagggtgagcccagaagaggtgaccatctacaaccaccctggcatccaggcagagctccgcatcagggaaggctcaggttacttcttcctcaacaccagcaccgcagatgttgtcaaggtggcctaccaggaggccaggggtgtcgccatggtgcaccctttgctcccgggctcatccaccatcatgatccatgacttgtgcctcgtcttcccggccccagccaaggctgtcgtttacgtgtcggacattcaggagctgtacatccgtgtggttgacaaggtggagattgggaagacagtgaaggcatacgtccgcgtgctggacttgcacaagaagcccttccttgccaaatacttcccctttatggacctgaagctccgagcagcctccccgatcattacattggtggcccttgatgaagcccttgacaactacaccatcacattcctcatccgcggtgtggccatcggccagaccagtctaactgcaagtgtgaccaataaagctggacagagaatcaactcagccccacaacagattgaagtctttcccccgttcaggctgatgcccaggaaggtgacactgcttatcggggccacgatgcaggtcacctccgagggcggcccccagcctcagtccaacatccttttctccatcagcaatgagagcgttgcgctggtgagcgctgctgggctggtacagggcctcgccatcgggaacggcactgtgtctgggctcgtgcaggcagtggatgcagagaccggcaaggtggtcatcatctctcaggacctcgtgcaggtggaggtgctgctgctaagggccgtgaggatccgcgcccccatcatgcggatgaggacgggcacccagatgcccatctatgtcaccggcatcaccaaccaccagaaccctttctcctttggcaatgccgtgccaggcctgaccttccactggtctgtcaccaagcgggacgtcctggacctccgagggcggcaccacgaggcgtcgatccgactcccgtcacagtacaactttgccatgaacgtgctcggccgggtaaaaggccggaccgggctgagggtggtggtcaaggctgtggaccccacatcggggcagctgtatggcctggccagagaactctcggatgagatccaagtccaggtgtttgagaagctgcagctgctcaaccctgaaatagaagcagaacaaatattaatgtcgcccaactcatatataaagctgcagacaaacagggatggtgcagcctctctgagctaccgcgtcctggatggacccgaaaaggttccagttgtgcatgttgatgagaaaggctttctagcatcagggtctatgatcgggacatccaccatcgaagtgattgcacaagagccctttggggccaaccaaaccatcattgttgctgtaaaggtatcccctgtttcctacctgagggtttccatgagccctgtcctgcacacccagaacaaggaggccctggtggccgtgcctttgggaatgaccgtgaccttcactgtccacttccacgacaactctggagatgtcttccatgctcacagttcggtcctcaactttgccactaacagagacgactttgtgcagatcgggaagggccccaccaacaacacctgcgttgtccgcacagtcagcgtgggcctgacactgctccgtgtgtgggacgcagagcacccgggcctctcggacttcatgcccctgcctgtcctacaggccatctccccagagctgtctggggccatggtggtgggggacgtgctctgtctggccactgttctgaccagcctggaaggcctctcaggaacctggagctcctcggccaacagcatcctccacatcgaccccaagacgggtgtggctgtggcccgggccgtgggatccgtgacggtttactatgaggtcgctgggcacctgaggacctacaaggaggtggtggtcagcgtccctcagaggatcatggcccgtcacctccaccccatccagaccagcttccaggaggctacagcctccaaagtgattgttgccgtgggagacagaagctctaacctgagaggcgagtgcacccccacccagagggaagtcatccaggccttgcacccagagaccctcatcagctgccagtcccagttcaagccggccgtctttgatttcccatctcaagatgtgttcaccgtggagccacagtttgacactgctctcggccagtacttctgctcaatcacaatgcacaggctgacggacaagcagcggaagcacctgagcatgaagaagacagctctggtggtcagtgcctccctctccagcagccacttctccacagagcaggtgggggccgaggtgcccttcagcccaggtctcttcgccgaccaggctgaaatccttttgagcaaccactacaccagttccgagatcagggtctttggtgccccggaggttctggagaacttggaggtgaaatccgggtccccggccgtgctggcattcgcaaaggagaagtcttttgggtggcccagcttcatcacatacacggtcggcgtcttggaccccgcggctggcagccaagggcctctgtccactaccctgaccttctccagccccgtgaccaaccaagccattgccatcccagtgacagtggcttttgtggtggatcgccgtgggcccggtccttatggagccagcctcttccagcacttcctggattcctaccaggtcatgttcttcacgctcttcgccctgttggctgggacagcggtcatgatcatagcctaccacactgtctgcacgccccgggatcttgctgtgcctgcagccctcacgcctcgagccagccctggacacagcccccactatttcgctgcctcatcacccacatctcccaatgcattgcctcctgctcgcaaagccagccctccctcagggctgtggagcccagcctatgcctcccactaggccgcgtgaaggttcccggaggatgggtctcagccgagcctcgtgcacccccaagatggaacatccctgctgcattcacactggaacaagcccctccagatgagtgccccggccccaggccagcttcactgccgtctcttcacacagagctgtagtttcggctctgcccattagctcattttatgtaggagttttaaatgtgtgtttttttcctttcaagtcttacaaagctaagactttttggctcattcctttttgcatggttgtctagggtttctggacaatgtgctgttgcatttttattttcctagccttgctaaaatctttcccttctcaagactttgagcagttagaagtgctctttagaagttgtctgtgggtgatgttactgtagtggtctcagggaaaggattgtccagttactttagggggtttttggtggggtttttccccctgtgaaaacttactttgcccctagtctggctgctgctaggacttctgaggagcaatgggacatgagtgtccctgtatctgcgccactgccgcaagggaagcctcaggaaccagcacctggaggccaggatagccaagccctgggtgagcgagaggctggagaacacaggagctcacccagggctgctgcccaaccatgggccactgtgaacagacttcagtcctctgtttttgtttcataagccgttgagacatctgatggacttggcttaggccctgctgggacatcccacgtgtgatccctttcactccatcaggacaccaggactgtccttaggaaaatgtccttgagatggcagcaggagtcatattttctgtgtgtgtgtttcggaaagccgctgtgtcctgcctcagcacaaagacccagtgtcatttgctcctcctgttcctgtgccactccagaacctcagcagatctgagccaccgcctgccagtgtgagaggcggccactttcatggcagctcatcaggcgcagggccccagacagcttcccagcaggccctagagcccggcctgggccaatgatggagggcggccgccagcccagggcctgcccatccagaagggactccccagggcctgggggaggagacccttggaaaagtcctctcttcccagctcctgattctggatctgagattctcagatcacaggcccctgtgctccaggccgaggctgggctaccctcagggagatccagagactcatgcccatggccatccatgcgtggacgctgtgtggagagtccaggatgacgggatcccgcacaagctcccttcagtccttcagggctgggccatgtggttgatttttctaaagctggagaaaggaagaattgtgccttgcatattacttgagcttaaactgacaacctggatgtaaataggagcctttctactggtttatttaataaagttctatgtgatttttt

SEQ ID NO: 20875 - DNA, 7600 bp, Homo sapiens
  source 1..7600: mol_type = unassigned DNA
cgtcaccaaagcgcgccggaaatgcgaggtcaactgcgcgccgctggcgctgaggggaggaagtttgctgtcgagcggcctgggttccgtgggcaaggccgtgggaggcagcgttggctgcttcgacacactgagggcggcgcgatgggagacgagatggatgccatgattcccgagcgggagatgaaggattttcagtttagagcgctaaagaaggtgagaatctttgactcccctgaggaattgcccaaggaacgctcgagtctgcttgctgtgtccaacaaatatggtctggtcttcgctggtggagccagtggcttgcagatttttcctactaaaaatcttcttattcaaaataaacccggagatgatcccaacaaaatagttgataaagtccaaggcttgctagttcctatgaaattcccaatccatcacctggccttgagctgtgataacctcacactctctgcgtgcatgatgtccagtgaatatggttccattattgctttttttgatgttcgcacattctcaaatgaggctaaacagcaaaaacgcccatttgcctatcataagcttttgaaagatgcaggaggcatggtgattgatatgaagtggaaccccactgtcccctccatggtggcagtttgtctggctgatggtagtattgctgtcctgcaagtcacggaaacagtgaaagtatgtgcaactcttccttccacggtagcagtaacctctgtgtgctggagccccaaaggaaagcagctggcagtgggaaaacagaatggaactgtggtccagtatcttcctactttgcaggaaaaaaaagtcattccttgtcctccgttttatgagtcagatcatcctgtcagagttctggatgtgctgtggattggtacctacgtcttcgccatagtgtatgctgctgcagatgggaccctggaaacgtctccagatgtggtgatggctctactaccgaaaaaagaagaaaagcacccagagatatttgtgaactttatggagccctgttatggcagctgcacggagagacagcatcattactacctcagttacattgaggaatgggatttagtgctggcagcatctgcggcttcaacagaagttagtatccttgctcgacaaagtgatcagattaattgggaatcttggctactggaggattctagtcgagctgaattgcctgtgacagacaagagtgatgactccttgcccatgggagttgtcgtagactatacaaaccaagtggaaatcaccatcagtgatgaaaagactcttcctcctgctccagttctcatgttactttcaacagatggtgtgctttgtccattttatatgattaatcaaaatcctggggttaagtctctcatcaaaacaccagagcgactttcattagaaggagagcgacagcccaagtcaccaggaagtactcccactaccccaacctcctctcaagccccacagaaactggatgcttctgcagctgcagcccctgcctctctgccaccttcatcacctgctgctcccattgccactttttctttgcttcctgctggtggagcccccactgtgttctcctttggttcttcatctttgaagtcatctgctacggtcactggggagcccccttcatattccagtggctccgacagctccaaagcagccccaggccctggcccatcaaccttctcttttgttcccccttctaaagcctccctagcccccacccctgcagcgtctcctgtggctccatcagctgcttcattctcctttggatcatctggttttaagcctaccctggaaagcacaccagtgccaagtgtgtctgctccaaatatagcaatgaagccctccttcccaccctcaacctctgctgtcaaagtcaaccttagtgaaaagtttactgctgcagctacctctactcctgttagtagctcccagagcgcacccccgatgtcgccattctcttctgcctccaagccagctgcttctggaccactcagccaccccacacctctctcagcaccacctagttccgtgccattgaagtcctcagtcttgccctcaccatcaggacgatctgctcagggcagttcaagcccagtgccctcaatggtacagaaatcacccaggataacccctccagcggcaaagccaggctctccccaggcaaagtcacttcagcctgctgttgcagaaaagcagggacatcagtggaaagattcagatcctgtaatggctggaattggggaggagattgcacactttcagaaggagttggaagagttaaaagcccgaacttccaaagcctgtttccaagtgggcacttctgaggagatgaagatgctgcgaacagaatcagatgacttgcatacctttcttttggagattaaagagaccacagagtcgcttcatggagatataagtagcctgaaaacaactttacttgagggctttgctggtgttgaggaagccagagaacaaaatgaaagaaatcgtgactctggttatctgcatttgctttataaaagaccactggatcccaagagtgaagctcagcttcaggaaattcggcgccttcatcagtatgtgaaatttgctgtccaagatgtgaatgatgttctagacttggagtgggatcagcatctggaacaaaagaaaaaacaaaggcacctgcttgtgccagagcgagagacactgtttaacaccctagccaacaatcgggaaatcatcaaccaacagaggaagaggctgaatcacctggtggatagtcttcagcagctccgcctttacaaacagacttccctgtggagcctgtcctcggctgttccttcccagagcagcattcacagttttgacagtgacctggaaagcctgtgcaatgctttgttgaaaaccaccatagaatctcacaccaaatccttgcccaaagtaccagccaaactgtcccccatgaaacaggcacaactgagaaacttcttggccaagaggaagaccccaccagtgagatccactgctccagccagcctgtctcgatcagcctttctgtctcagagatattatgaagacttggatgaagtcagctcaacgtcatctgtctcccagtctctggagagtgaagatgcacggacgtcctgtaaagatgacgaggcagtggttcaggcccctcggcacgcccccgtggttcgcactccttccatccagcccagtctcttgccccatgcagcaccttttgctaaatctcacctggttcatggttcttcacctggtgtgatgggaacttcagtggctacatctgctagcaaaattattcctcaaggggccgatagcacaatgcttgccacgaaaaccgtgaaacatggtgcacctagtccttcccaccccatctcagccccgcaggcagctgccgcagcagcactcaggcggcagatggccagtcaggcaccagctgtaaacactttgactgaatcaacgttgaagaatgtccctcaagtggtaaatgtgcaggaattgaagaataaccctgcaaccccttctacagccatgggttcttcagtgccctactccacagccaaaacacctcacccagtgttgaccccagtggctgctaaccaagccaagcaggggtctctaataaattcccttaagccatctgggcctacaccagcatccggtcagttatcatctggtgacaaagcttcagggacagccaagatagaaacagctgtgacttcaaccccatctgcttctgggcagttcagcaagcctttctcattttctccatcagggactggctttaattttgggataatcacaccaacaccgtcttctaatttcactgctgcacaaggggcaacaccctccactaaagagtcaagccagccggacgcattctcatctggtgggggaagcaaaccttcttatgaggccattcctgaaagctcacctccctcaggaatcacatccgcatcaaacaccaccccaggagaacctgccgcatctagcagcagacctgtggcaccttctggaactgctctttccaccacctctagtaagctggaaaccccaccgtccaagctgggagagcttctgtttccaagttctttggctggagagactctgggaagtttttcaggactgcgggttggccaagcagatgattctacaaaaccaaccaataaggcttcatccacaagcctaactagtacccagccaaccaagacgtcaggcgtgccctcagggtttaattttactgcccccccggtgttagggaagcacacggagccccctgtgacatcctctgcaaccaccacctcagtagcaccaccagcagccaccagcacttcctcaactgccgtttttggcagtctgccagtcaccagtgcaggatcctctggggtcatcagttttggtgggacatctctaagtgctggcaagactagtttttcatttggaagccaacagaccaatagcacagtgcccccatctgccccaccaccaactacagctgccactccccttccaacatcattccccacattgtcatttggtagcctcctgagttcagcaactaccccctccctgcctatgtccgctggcagaagcacagaagaggccacttcatcagctttgcctgagaagccaggtgacagtgaggtctcagcatcagcagcctcacttctagaggagcaacagtcagcccagcttccccaggctcctccgcaaacttctgactctgttaaaaaagaacctgttcttgcccagcctgcagtcagcaactctggcactgcagcatctagtactagtcttgtagcactttctgcagaggctaccccagccaccacgggggtccctgatgccaggacggaggcagtaccacctgcttcctccttttctgtgcctgggcagactgctgtcacagcagctgctatctcaagtgcaggccctgtggccgtcgaaacatcaagtacccccatagcctccagcaccacgtccattgttgctcccggcccatctgcagaggcagcagcatttggtaccgtcacttctggctcatccgtctttgctcagcctcctgctgccagttctagctcagctttcaaccagctcaccaacaacacagccactgccccctctgccacgcccgtgtttgggcaagtggcagccagcaccgcaccaagtctgtttgggcagcagactggtagcacagccagcacagcagctgccacaccacaggtcagcagctcagggtttagcagcccagcttttggtaccacagccccaggggtctttggacagacaaccttcgggcaggcctcagtctttgggcagtcggcgagcagtgctgcaagtgtcttttccttcagtcagcctgggttcagttccgtgcctgccttcggtcagcctgcttcctccactcccacatccaccagtggaagtgtctttggtgccgcctcaagtaccagtagctccagttccttctcatttggacagtcttctcccaacacaggaggggggctgtttggccaaagcaacgctcctgcttttgggcagagtcctggctttggacagggaggctctgtctttggtggtacctcagctgccaccacaacagcagcaacctctgggttcagcttttgccaagcttcaggttttgggtctagtaatactggttctgtgtttggtcaagcagccagtactggtggaatagtctttggccagcaatcatcctcttccagtggtagcgtgtttgggtctggaaacactggaagagggggaggtttcttcagtggccttggaggaaaacccagtcaggatgcagccaacaaaaacccattcagctcggccagtgggggctttggatccacagctacctcaaatacctctaacctatttggaaacagtggggccaagacatttggtggatttgccagctcgtcgtttggagagcagaaacccactggcactttcagctctggaggaggaagtgtggcatcccaaggctttgggttttcctctccaaacaaaacaggtggcttcggtgctgctccagtgtttggcagccctcctacttttgggggatcccctgggtttggaggggtgccagcattcggttcagccccagcctttacaagccctctgggctcgacgggaggcaaagtgttcggagagggcactgcagctgccagcgcaggaggattcgggtttgggagcagcagcaacaccacatccttcggcacgctcgcgagtcagaatgcccccactttcggatcactgtcccaacagacttctggttttgggacccagagtagcggattctctggttttggatcaggcacaggagggttcagctttgggtcaaataactcgtctgtccagggttttggtggctggcgaagctgagggcgtgtcagcaggcctttcgatccctgggaccaaccgcatcctcagcttcttccccgagaaatgctggagcaggctgttcagaccgacgttgccatcaaaacacatacacccagaaagaaacaacagaaaccaaaactcacaaggcgcatgattacttgttttatatttcatgttgggttttccctcccactattaaacagtctgtttccgtacagaacgtatgtgggttttttcagatcacagccaagaagattgccccgtttctgtggctctgagaagccagcagagcctccatcagccagaacactgtgtcttcaaggatggcatcagaagtcaccagcgtcgggtgttgataaacagcatcgaatgtgccgtggtctcacttggacctagcgccctccacatagggaagaggttgaatgctggtgggtcatctttttgaggctgaaacttggttatctcctctccttgttcttttagccattgtgtatcaggaccatccaaggacgcactctgcgattgagtggaggcagaggaagccactcatgccagcagcagttgagtttcagaagcagccatagcgcttttcagtacagtacaatagtagccagcgtgaggcaggacagtgctgcgccttagccggccttggctctcatctccatgtggctcttgggtgccatgtgtcctactccagagaggagggggccggtcacttgagaagacagcctttatattctgtatgtggcagtgacattggtagccacacctacccagtgtctactaaccacagtgcagatagcccttgggtagacccaggaagtgtgaagacagacactgctgttgccagacaacactagcagaacgatgctggatttgacaacagtgtttgctaggacggcccagagctcatcactgcagttttattagagtgcttctttatctttaatgcagtatctttgaggcctgtaacatcctagatagttgccatcaaacaaggaccgtctcgcattgaaaacagatgtaagaatttctctttcaggcccagaatctgacagtgctttggcttgggtcatgagcagcggggagttgggaagagatttttttttttagagttttacatattggcaggttgtatttttttaatgttttaataaaagtttgacatgacattaattcatca

SEQ ID NO: 20876 - DNA, 7538 bp, Homo sapiens
  source 1..7538: mol_type = unassigned DNA
gaggtcaactgcgcgccgctggcgctgaggggaggaagtttgctgtcgagcggcctgggttccgtgggcaaggccgtgggaggcagcgttggctgcttcgacacactgagggcggcgcgatgggagacgagatggatgccatgattcccgagcgggagatgaaggattttcagtttagagcgctaaagaaggtgagaatctttgactcccctgaggaattgcccaaggaacgctcgagtctgcttgctgtgtccaacaaatatggtctggtcttcgctggtggagccagtggcttgcagatttttcctactaaaaatcttcttattcaaaataaacccggagatgatcccaacaaaatagttgataaagtccaaggcttgctagttcctatgaaattcccaatccatcacctggccttgagctgtgataacctcacactctctgcgtgcatgatgtccagtgaatatggttccattattgctttttttgatgttcgcacattctcaaatgaggctaaacagcaaaaacgcccatttgcctatcataagcttttgaaagatgcaggaggcatggtgattgatatgaagtggaaccccactgtcccctccatggtggcagtttgtctggctgatggtagtattgctgtcctgcaagtcacggaaacagtgaaagtatgtgcaactcttccttccacggtagcagtaacctctgtgtgctggagccccaaaggaaagcagctggcagtgggaaaacagaatggaactgtggtccagtatcttcctactttgcaggaaaaaaaagtcattccttgtcctccgttttatgagtcagatcatcctgtcagagttctggatgtgctgtggattggtacctacgtcttcgccatagtgtatgctgctgcagatgggaccctggaaacgtctccagatgtggtgatggctctactaccgaaaaaagaagaaaagcacccagagatatttgtgaactttatggagccctgttatggcagctgcacggagagacagcatcattactacctcagttacattgaggaatgggatttagtgctggcagcatctgcggcttcaacagaagttagtatccttgctcgacaaagtgatcagattaattgggaatcttggctactggaggattctagtcgagctgaattgcctgtgacagacaagagtgatgactccttgcccatgggagttgtcgtagactatacaaaccaagtggaaatcaccatcagtgatgaaaagactcttcctcctgctccagttctcatgttactttcaacagatggtgtgctttgtccattttatatgattaatcaaaatcctggggttaagtctctcatcaaaacaccagagcgactttcattagaaggagagcgacagcccaagtcaccaggaagtactcccactaccccaacctcctctcaagccccacagaaactggatgcttctgcagctgcagcccctgcctctctgccaccttcatcacctgctgctcccattgccactttttctttgcttcctgctggtggagcccccactgtgttctcctttggttcttcatctttgaagtcatctgctacggtcactggggagcccccttcatattccagtggctccgacagctccaaagcagccccaggccctggcccatcaaccttctcttttgttcccccttctaaagcctccctagcccccacccctgcagcgtctcctgtggctccatcagctgcttcattctcctttggatcatctggttttaagcctaccctggaaagcacaccagtgccaagtgtgtctgctccaaatatagcaatgaagccctccttcccaccctcaacctctgctgtcaaagtcaaccttagtgaaaatagctcccagagcgcacccccgatgtcgccattctcttctgcctccaagccagctgcttctggaccactcagccaccccacacctctctcagcaccacctagttccgtgccattgaagtcctcagtcttgccctcaccatcagcaggacgatctgctcagggcagttcaagcccagtgccctcaatggtacagaaatcacccaggataacccctccagcggcaaagccaggctctccccaggcaaagtcacttcagcctgctgttgcagaaaagcagggacatcagtggaaagattcagatcctgtaatggctggaattggggaggagattgcacactttcagaaggagttggaagagttaaaagcccgaacttccaaagcctgtttccaagtgggcacttctgaggagatgaagatgctgcgaacagaatcagatgacttgcatacctttcttttggagattaaagagaccacagagtcgcttcatggagatataagtagcctgaaaacaactttacttgagggctttgctggtgttgaggaagccagagaacaaaatgaaagaaatcgtgactctggttatctgcatttgctttataaaagaccactggatcccaagagtgaagctcagcttcaggaaattcggcgccttcatcagtatgtgaaatttgctgtccaagatgtgaatgatgttctagacttggagtgggatcagcatctggaacaaaagaaaaaacaaaggcacctgcttgtgccagagcgagagacactgtttaacaccctagccaacaatcgggaaatcatcaaccaacagaggaagaggctgaatcacctggtggatagtcttcagcagctccgcctttacaaacagacttccctgtggagcctgtcctcggctgttccttcccagagcagcattcacagttttgacagtgacctggaaagcctgtgcaatgctttgttgaaaaccaccatagaatctcacaccaaatccttgcccaaagtaccagccaaactgtcccccatgaaacaggcacaactgagaaacttcttggccaagaggaagaccccaccagtgagatccactgctccagccagcctgtctcgatcagcctttctgtctcagagatattatgaagacttggatgaagtcagctcaacgtcatctgtctcccagtctctggagagtgaagatgcacggacgtcctgtaaagatgacgaggcagtggttcaggcccctcggcacgcccccgtggttcgcactccttccatccagcccagtctcttgccccatgcagcaccttttgctaaatctcacctggttcatggttcttcacctggtgtgatgggaacttcagtggctacatctgctagcaaaattattcctcaaggggccgatagcacaatgcttgccacgaaaaccgtgaaacatggtgcacctagtccttcccaccccatctcagccccgcaggcagctgccgcagcagcactcaggcggcagatggccagtcaggcaccagctgtaaacactttgactgaatcaacgttgaagaatgtccctcaagtggtaaatgtgcaggaattgaagaataaccctgcaaccccttctacagccatgggttcttcagtgccctactccacagccaaaacacctcacccagtgttgaccccagtggctgctaaccaagccaagcaggggtctctaataaattcccttaagccatctgggcctacaccagcatccggtcagttatcatctggtgacaaagcttcagggacagccaagatagaaacagctgtgacttcaaccccatctgcttctgggcagttcagcaagcctttctcattttctccatcagggactggctttaattttgggataatcacaccaacaccgtcttctaatttcactgctgcacaaggggcaacaccctccactaaagagtcaagccagccggacgcattctcatctggtgggggaagcaaaccttcttatgaggccattcctgaaagctcacctccctcaggaatcacatccgcatcaaacaccaccccaggagaacctgccgcatctagcagcagacctgtggcaccttctggaactgctctttccaccacctctagtaagctggaaaccccaccgtccaagctgggagagcttctgtttccaagttctttggctggagagactctgggaagtttttcaggactgcgggttggccaagcagatgattctacaaaaccaaccaataaggcttcatccacaagcctaactagtacccagccaaccaagacgtcaggcgtgccctcagggtttaattttactgcccccccggtgttagggaagcacacggagccccctgtgacatcctctgcaaccaccacctcagtagcaccaccagcagccaccagcacttcctcaactgccgtttttggcagtctgccagtcaccagtgcaggatcctctggggtcatcagttttggtgggacatctctaagtgctggcaagactagtttttcatttggaagccaacagaccaatagcacagtgcccccatctgccccaccaccaactacagctgccactccccttccaacatcattccccacattgtcatttggtagcctcctgagttcagcaactaccccctccctgcctatgtccgctggcagaagcacagaagaggccacttcatcagctttgcctgagaagccaggtgacagtgaggtctcagcatcagcagcctcacttctagaggagcaacagtcagcccagcttccccaggctcctccgcaaacttctgactctgttaaaaaagaacctgttcttgcccagcctgcagtcagcaactctggcactgcagcatctagtactagtcttgtagcactttctgcagaggctaccccagccaccacgggggtccctgatgccaggacggaggcagtaccacctgcttcctccttttctgtgcctgggcagactgctgtcacagcagctgctatctcaagtgcaggccctgtggccgtcgaaacatcaagtacccccatagcctccagcaccacgtccattgttgctcccggcccatctgcagaggcagcagcatttggtaccgtcacttctggctcatccgtctttgctcagcctcctgctgccagttctagctcagctttcaaccagctcaccaacaacacagccactgccccctctgccacgcccgtgtttgggcaagtggcagccagcaccgcaccaagtctgtttgggcagcagactggtagcacagccagcacagcagctgccacaccacaggtcagcagctcagggtttagcagcccagcttttggtaccacagccccaggggtctttggacagacaaccttcgggcaggcctcagtctttgggcagtcggcgagcagtgctgcaagtgtcttttccttcagtcagcctgggttcagttccgtgcctgccttcggtcagcctgcttcctccactcccacatccaccagtggaagtgtctttggtgccgcctcaagtaccagtagctccagttccttctcatttggacagtcttctcccaacacaggaggggggctgtttggccaaagcaacgctcctgcttttgggcagagtcctggctttggacagggaggctctgtctttggtggtacctcagctgccaccacaacagcagcaacctctgggttcagcttttgccaagcttcaggttttgggtctagtaatactggttctgtgtttggtcaagcagccagtactggtggaatagtctttggccagcaatcatcctcttccagtggtagcgtgtttgggtctggaaacactggaagagggggaggtttcttcagtggccttggaggaaaacccagtcaggatgcagccaacaaaaacccattcagctcggccagtgggggctttggatccacagctacctcaaatacctctaacctatttggaaacagtggggccaagacatttggtggatttgccagctcgtcgtttggagagcagaaacccactggcactttcagctctggaggaggaagtgtggcatcccaaggctttgggttttcctctccaaacaaaacaggtggcttcggtgctgctccagtgtttggcagccctcctacttttgggggatcccctgggtttggaggggtgccagcattcggttcagccccagcctttacaagccctctgggctcgacgggaggcaaagtgttcggagagggcactgcagctgccagcgcaggaggattcgggtttgggagcagcagcaacaccacatccttcggcacgctcgcgagtcagaatgcccccactttcggatcactgtcccaacagacttctggttttgggacccagagtagcggattctctggttttggatcaggcacaggagggttcagctttgggtcaaataactcgtctgtccagggttttggtggctggcgaagctgagggcgtgtcagcaggcctttcgatccctgggaccaaccgcatcctcagcttcttccccgagaaatgctggagcaggctgttcagaccgacgttgccatcaaaacacatacacccagaaagaaacaacagaaaccaaaactcacaaggcgcatgattacttgttttatatttcatgttgggttttccctcccactattaaacagtctgtttccgtacagaacgtatgtgggttttttcagatcacagccaagaagattgccccgtttctgtggctctgagaagccagcagagcctccatcagccagaacactgtgtcttcaaggatggcatcagaagtcaccagcgtcgggtgttgataaacagcatcgaatgtgccgtggtctcacttggacctagcgccctccacatagggaagaggttgaatgctggtgggtcatctttttgaggctgaaacttggttatctcctctccttgttcttttagccattgtgtatcaggaccatccaaggacgcactctgcgattgagtggaggcagaggaagccactcatgccagcagcagttgagtttcagaagcagccatagcgcttttcagtacagtacaatagtagccagcgtgaggcaggacagtgctgcgccttagccggccttggctctcatctccatgtggctcttgggtgccatgtgtcctactccagagaggagggggccggtcacttgagaagacagcctttatattctgtatgtggcagtgacattggtagccacacctacccagtgtctactaaccacagtgcagatagcccttgggtagacccaggaagtgtgaagacagacactgctgttgccagacaacactagcagaacgatgctggatttgacaacagtgtttgctaggacggcccagagctcatcactgcagttttattagagtgcttctttatctttaatgcagtatctttgaggcctgtaacatcctagatagttgccatcaaacaaggaccgtctcgcattgaaaacagatgtaagaatttctctttcaggcccagaatctgacagtgctttggcttgggtcatgagcagcggggagttgggaagagatttttttttttagagttttacatattggcaggttgtatttttttaatgttttaataaaagtttgacatgacattaa

SEQ ID NO: 20877 - DNA, 5021 bp, Homo sapiens
  source 1..5021: mol_type = unassigned DNA
gtgccaggcactgtggtagtcatcgcggcagccctacgaagtagtcgttaacgtagaggagtaagttgaggctcggaaagtaatttccctaaagtcacatttgacgcggggctgaaagccagcatcatttaagacctttgcgtctcctgtggctccatcagctgcttcattctcctttggatcatctggttttaagcctaccctggaaagcacaccagtgccaagtgtgtctgctccaaatatagcaatgaagccctccttcccaccctcaacctctgctgtcaaagtcaaccttagtgaaaagtttactgctgcagctacctctactcctgttagtagctcccagagcgcacccccgatgtcgccattctcttctgcctccaagccagctgcttctggaccactcagccaccccacacctctctcagcaccacctagttccgtgccattgaagtcctcagtcttgccctcaccatcaggacgatctgctcagggcagttcaagcccagtgccctcaatggtacagaaatcacccaggataacccctccagcggcaaagccaggctctccccaggcaaagtcacttcagcctgctgttgcagaaaagcagggacatcagtggaaagattcagatcctgtaatggctggaattggggaggagattgcacactttcagaaggagttggaagagttaaaagcccgaacttccaaagcctgtttccaagtgggcacttctgaggagatgaagatgctgcgaacagaatcagatgacttgcatacctttcttttggagattaaagagaccacagagtcgcttcatggagatataagtagcctgaaaacaactttacttgagggctttgctggtgttgaggaagccagagaacaaaatgaaagaaatcgtgactctggttatctgcatttgctttataaaagaccactggatcccaagagtgaagctcagcttcaggaaattcggcgccttcatcagtatgtgaaatttgctgtccaagatgtgaatgatgttctagacttggagtgggatcagcatctggaacaaaagaaaaaacaaaggcacctgcttgtgccagagcgagagacactgtttaacaccctagccaacaatcgggaaatcatcaaccaacagaggaagaggctgaatcacctggtggatagtcttcagcagctccgcctttacaaacagacttccctgtggagcctgtcctcggctgttccttcccagagcagcattcacagttttgacagtgacctggaaagcctgtgcaatgctttgttgaaaaccaccatagaatctcacaccaaatccttgcccaaagtaccagccaaactgtcccccatgaaacaggcacaactgagaaacttcttggccaagaggaagaccccaccagtgagatccactgctccagccagcctgtctcgatcagcctttctgtctcagagatattatgaagacttggatgaagtcagctcaacgtcatctgtctcccagtctctggagagtgaagatgcacggacgtcctgtaaagatgacgaggcagtggttcaggcccctcggcacgcccccgtggttcgcactccttccatccagcccagtctcttgccccatgcagcaccttttgctaaatctcacctggttcatggttcttcacctggtgtgatgggaacttcagtggctacatctgctagcaaaattattcctcaaggggccgatagcacaatgcttgccacgaaaaccgtgaaacatggtgcacctagtccttcccaccccatctcagccccgcaggcagctgccgcagcagcactcaggcggcagatggccagtcaggcaccagctgtaaacactttgactgaatcaacgttgaagaatgtccctcaagtggtaaatgtgcaggaattgaagaataaccctgcaaccccttctacagccatgggttcttcagtgccctactccacagccaaaacacctcacccagtgttgaccccagtggctgctaaccaagccaagcaggggtctctaataaattcccttaagccatctgggcctacaccagcatccggtcagttatcatctggtgacaaagcttcagggacagccaagatagaaacagctgtgacttcaaccccatctgcttctgggcagttcagcaagcctttctcattttctccatcagggactggctttaattttgggataatcacaccaacaccgtcttctaatttcactgctgcacaaggggcaacaccctccactaaagagtcaagccagccggacgcattctcatctggtgggggaagcaaaccttcttatgaggccattcctgaaagctcacctccctcaggaatcacatccgcatcaaacaccaccccaggagaacctgccgcatctagcagcagacctgtggcaccttctggaactgctctttccaccacctctagtaagctggaaaccccaccgtccaagctgggagagcttctgtttccaagttctttggctggagagactctgggaagtttttcaggactgcgggttggccaagcagatgattctacaaaaccaaccaataaggcttcatccacaagcctaactagtacccagccaaccaagacgtcaggcgtgccctcagggtttaattttactgcccccccggtgttagggaagcacacggagccccctgtgacatcctctgcaaccaccacctcagtagcaccaccagcagccaccagcacttcctcaactgccgtttttggcagtctgccagtcaccagtgcaggatcctctggggtcatcagttttggtgggacatctctaagtgctggcaagactagtttttcatttggaagccaacagaccaatagcacagtgcccccatctgccccaccaccaactacagctgccactccccttccaacatcattccccacattgtcatttggtagcctcctgagttcagcaactaccccctccctgcctatgtccgctggcagaagcacagaagaggccacttcatcagctttgcctgagaagccaggtgacagtgaggtctcagcatcagcagcctcacttctagaggagcaacagtcagcccagcttccccaggctcctccgcaaacttctgactctgttaaaaaagaacctgttcttgcccagcctgcagtcagcaactctggcactgcagcatctagtactagtcttgtagcactttctgcagaggctaccccagccaccacgggggtccctgatgccaggacggaggcagtaccacctgcttcctccttttctgtgcctgggcagactgctgtcacagcagctgctatctcaagtgcaggccctgtggccgtcgaaacatcaagtacccccatagcctccagcaccacgtccattgttgctcccggcccatctgcagaggcagcagcatttggtaccgtcacttctggctcatccgtctttgctcagcctcctgctgccagttctagctcagctttcaaccagctcaccaacaacacagccactgccccctctgccacgcccgtgtttgggcaagtggcagccagcaccgcaccaagtctgtttgggcagcagactggtagcacagccagcacagcagctgccacaccacaggtcagcagctcagggtttagcagcccagcttttggtaccacagccccaggggtctttggacagacaaccttcgggcaggcctcagtctttgggcagtcggcgagcagtgctgcaagtgtcttttccttcagtcagcctgggttcagttccgtgcctgccttcggtcagcctgcttcctccactcccacatccaccagtggaagtgtctttggtgccgcctcaagtaccagtagctccagttccttctcatttggacagtcttctcccaacacaggaggggggctgtttggccaaagcaacgctcctgcttttgggcagagtcctggctttggacagggaggctctgtctttggtggtacctcagctgccaccacaacagcagcaacctctgggttcagcttttgccaagcttcaggttttgggtctagtaatactggttctgtgtttggtcaagcagccagtactggtggaatagtctttggccagcaatcatcctcttccagtggtagcgtgtttgggtctggaaacactggaagagggggaggtttcttcagtggccttggaggaaaacccagtcaggatgcagccaacaaaaacccattcagctcggccagtgggggctttggatccacagctacctcaaatacctctaacctatttggaaacagtggggccaagacatttggtggatttgccagctcgtcgtttggagagcagaaacccactggcactttcagctctggaggaggaagtgtggcatcccaaggctttgggttttcctctccaaacaaaacaggtggcttcggtgctgctccagtgtttggcagccctcctacttttgggggatcccctgggtttggaggggtgccagcattcggttcagccccagcctttacaagccctctgggctcgacgggaggcaaagtgttcggagagggcactgcagctgccagcgcaggaggattcgggtttgggagcagcagcaacaccacatccttcggcacgctcgcgagtcagaatgcccccactttcggatcactgtcccaacagacttctggttttgggacccagagtagcggattctctggttttggatcaggcacaggagggttcagctttgggtcaaataactcgtctgtccagggttttggtggctggcgaagctgagggcgtgtcagcaggcctttcgatccctgggaccaaccgcatcctcagcttcttccccgagaaatgctggagcaggctgttcagaccgacgttgccatcaaaacacatacacccagaaagaaacaacagaaaccaaaactcacaaggcgcatgattacttgttttatatttcatgttgggttttccctcccactattaaacagtctgtttccgt

SEQ ID NO: 20878 - DNA, 6601 bp, Homo sapiens
  source 1..6601: mol_type = unassigned DNA
ctgcgcgccgctggcgctgaggggaggaagtttgctgtcgagcggcctgggttccgtgggcaaggccgtgggaggcagcgttggctgcttcgacacactgagggcggcgcgatgggagacgagatggatgccatgattcccgagcgggagatgaaggattttcagtttagagcgctaaagaaggtgagaatctttgactcccctgaggaattgcccaaggaacgctcgagtctgcttgctgtgtccaacaaatatggtctggtcttcgctggtggagccagtggcttgcagatttttcctactaaaaatcttcttattcaaaataaacccggagatgatcccaacaaaatagttgataaagtccaaggcttgctagttcctatgaaattcccaatccatcacctggccttgagctgtgataacctcacactctctgcgtgcatgatgtccagtgaatatggttccattattgctttttttgatgttcgcacattctcaaatgaggctaaacagcaaaaacgcccatttgcctatcataagcttttgaaagatgcaggaggcatggtgattgatatgaagtggaaccccactgtcccctccatggtggcagtttgtctggctgatggtagtattgctgtcctgcaagtcacggaaacagtgaaagtatgtgcaactcttccttccacggtagcagtaacctctgtgtgctggagccccaaaggaaagcagctggcagtgggaaaacagaatggaactgtggtccagtatcttcctactttgcaggaaaaaaaagtcattccttgtcctccgttttatgagtcagatcatcctgtcagagttctggatgtgctgtggattggtacctacgtcttcgccatagtgtatgctgctgcagatgggaccctggaaacgtctccagatgtggtgatggctctactaccgaaaaaagaagaaaagcacccagagatatttgtgaactttatggagccctgttatggcagctgcacggagagacagcatcattactacctcagttacattgaggaatgggatttagtgctggcagcatctgcggcttcaacagaagttagtatccttgctcgacaaagtgatcagattaattgggaatcttggctactggaggattctagtcgagctgaattgcctgtgacagacaagagtgatgactccttgcccatgggagttgtcgtagactatacaaaccaagtggaaatcaccatcagtgatgaaaagactcttcctcctgctccagttctcatgttactttcaacagatggtgtgctttgtccattttatatgattaatcaaaatcctggggttaagtctctcatcaaaacaccagagcgactttcattagaaggagagcgacagcccaagtcaccaggaagtactcccactaccccaacctcctctcaagccccacagaaactggatgcttctgcagctgcagcccctgcctctctgccaccttcatcacctgctgctcccattgccactttttctttgcttcctgctggtggagcccccactgtgttctcctttggttcttcatctttgaagtcatctgctacggtcactggggagcccccttcatattccagtggctccgacagctccaaagcagccccaggccctggcccatcaaccttctcttttgttcccccttctaaagcctccctagcccccacccctgcagcgtctcctgtggctccatcagctgcttcattctcctttggatcatctggttttaagcctaccctggaaagcacaccagtgccaagtgtgtctgctccaaatatagcaatgaagccctccttcccaccctcaacctctgctgtcaaagtcaaccttagtgaaaagtttactgctgcagctacctctactcctgttagtagctcccagagcgcacccccgatgtcgccattctcttctgcctccaagccagctgcttctggaccactcagccaccccacacctctctcagcaccacctagttccgtgccattgaagtcctcagtcttgccctcaccatcagcaggacgatctgctcagggcagttcaagcccagtgccctcaatggtacagaaatcacccaggataacccctccagcggcaaagccaggctctccccaggcaaagtcacttcagcctgctgttgcagaaaagcagggacatcagtggaaagattcagatcctgtaatggctggaattggggaggagattgcacactttcagaaggagttggaagagttaaaagcccgaacttccaaagcctgtttccaagtgggcacttctgaggagatgaagatgctgcgaacagaatcagatgacttgcatacctttcttttggagattaaagagaccacagagtcgcttcatggagatataagtagcctgaaaacaactttacttgagggctttgctggtgttgaggaagccagagaacaaaatgaaagaaatcgtgactctggttatctgcatttgctttataaaagaccactggatcccaagagtgaagctcagcttcaggaaattcggcgccttcatcagtatgtgaaatttgctgtccaagatgtgaatgatgttctagacttggagtgggatcagcatctggaacaaaagaaaaaacaaaggcacctgcttgtgccagagcgagagacactgtttaacaccctagccaacaatcgggaaatcatcaaccaacagaggaagaggctgaatcacctggtggatagtcttcagcagctccgcctttacaaacagacttccctgtggagcctgtcctcggctgttccttcccagagcagcattcacagttttgacagtgacctggaaagcctgtgcaatgctttgttgaaaaccaccatagaatctcacaccaaatccttgcccaaagtaccagccaaactgtcccccatgaaacaggcacaactgagaaacttcttggccaagaggaagaccccaccagtgagatccactgctccagccagcctgtctcgatcagcctttctgtctcagagatattatgaagacttggatgaagtcagctcaacgtcatctgtctcccagtctctggagagtgaagatgcacggacgtcctgtaaagatgacgaggcagtggttcaggcccctcggcacgcccccgtggttcgcactccttccatccagcccagtctcttgccccatgcagcaccttttgctaaatctcacctggttcatggttcttcacctggtgtgatgggaacttcagtggctacatctgctagcaaaattattcctcaaggggccgatagcacaatgcttgccacgaaaaccgtgaaacatggtgcacctagtccttcccaccccatctcagccccgcaggcagctgccgcagcagcactcaggcggcagatggccagtcaggcaccagctgtaaacactttgactgaatcaacgttgaagaatgtccctcaagtggtaaatgtgcaggaattgaagaataaccctgcaaccccttctacagccatgggttcttcagtgccctactccacagccaaaacacctcacccagtgttgaccccagtggctgctaaccaagccaagcaggggtctctaataaattcccttaagccatctgggcctacaccagcatccggtcagttatcatctggtgacaaagcttcagggacagccaagatagaaacagctgtgacttcaaccccatctgcttctgggcagttcagcaagcctttctcattttctccatcagggactggctttaattttgggataatcacaccaacaccgtcttctaatttcactgctgcacaaggggcaacaccctccactaaagagtcaagccagccggacgcattctcatctggtgggggaagcaaaccttcttatgaggccattcctgaaagctcacctccctcaggaatcacatccgcatcaaacaccaccccaggagaacctgccgcatctagcagcagacctgtggcaccttctggaactgctctttccaccacctctagtaagctggaaaccccaccgtccaagctgggagagcttctgtttccaagttctttggctggagagactctgggaagtttttcaggactgcgggttggccaagcagatgattctacaaaaccaaccaataaggcttcatccacaagcctaactagtacccagccaaccaagacgtcaggcgtgccctcagggtttaattttactgcccccccggtgttagggaagcacacggagccccctgtgacatcctctgcaaccaccacctcagtagcaccaccagcagccaccagcacttcctcaactgccgtttttggcagtctgccagtcaccagtgcaggatcctctggggtcatcagttttggtgggacatctctaagtgctggcaagactagtttttcatttggaagccaacagaccaatagcacagtgcccccatctgccccaccaccaactacagctgccactccccttccaacatcattccccacattgtcatttggtagcctcctgagttcagcaactaccccctccctgcctatgtccgctggcagaagcacagaagaggccacttcatcagctttgcctgagaagccaggtgacagtgaggtctcagcatcagcagcctcacttctagaggagcaacagtcagcccagcttccccaggctcctccgcaaacttctgactctgttaaaaaagaacctgttcttgcccagcctgcagtcagcaactctggcactgcagcatctagtactagtcttgtagcactttctgcagaggctaccccagccaccacgggggtccctgatgccaggacggaggcagtaccacctgcttcctccttttctgtgcctgggcagactgctgtcacagcagctgctatctcaagtgcaggccctgtggccgtcgaaacatcaagtacccccatagcctccagcaccacgtccattgttgctcccggcccatctgcagaggcagcagcatttggtaccgtcacttctggctcatccgtctttgctcagcctcctgctgccagttctagctcagctttcaaccagctcaccaacaacacagccactgccccctctgccacgcccgtgtttgggcaagtggcagccagcaccgcaccaagtctgtttgggcagcagactggtagcacagccagcacagcagctgccacaccacaggtcagcagctcagggtttagcagcccagcttttggtaccacagccccaggggtctttggacagacaaccttcgggcaggcctcagtctttgggcagtcggcgagcagtgctgcaagtgtcttttccttcagtcagcctgggttcagttccgtgcctgccttcggtcagcctgcttcctccactcccacatccaccagtggaagtgtctttggtgccgcctcaagtaccagtagctccagttccttctcatttggacagtcttctcccaacacaggaggggggctgtttggccaaagcaacgctcctgcttttgggcagagtcctggctttggacagggaggctctgtctttggtggtacctcagctgccaccacaacagcagcaacctctgggttcagcttttgccaagcttcaggttttgggtctagtaatactggttctgtgtttggtcaagcagccagtactggtggaatagtctttggccagcaatcatcctcttccagtggtagcgtgtttgggtctggaaacactggaagagggggaggtttcttcagtggccttggaggaaaacccagtcaggatgcagccaacaaaaacccattcagctcggccagtgggggctttggatccacagctacctcaaatacctctaacctatttggaaacagtggggccaagacatttggtggatttgccagctcgtcgtttggagagcagaaacccactggcactttcagctctggaggaggaagtgtggcatcccaaggctttgggttttcctctccaaacaaaacaggtggcttcggtgctgctccagtgtttggcagccctcctacttttgggggatcccctgggtttggaggggtgccagcattcggttcagccccagcctttacaagccctctgggctcgacgggaggcaaagtgttcggagagggcactgcagctgccagcgcaggaggattcgggtttgggagcagcagcaacaccacatccttcggcacgctcgcgagtcagaatgcccccactttcggatcactgtcccaacagacttctggttttgggacccagagtagcggattctctggttttggatcaggcacaggagggttcagctttgggtcaaataactcgtctgtccagggttttggtggctggcgaagctgagggcgtgtcagcaggcctttcgatccctgggaccaaccgcatcctcagcttcttccccgagaaatgctggagcaggctgttcagaccgacgttgccatcaaaacacatacacccagaaagaaacaacagaaaccaaaactcacaaggcgcatgattacttgttttatatttcatgttgggttttccctcccactattaaacagtctgtttccgt

SEQ ID NO: 20879 - DNA, 393 bp, Homo sapiens
  source 1..393: mol_type = unassigned DNA
ggagagggcactgcagctgccagcgcaggaggattcgggtttgggagcagcagcaacaccacatccttcggcacgctcgcgagtcagaatgcccccactttcggatcactgtcccaacagacttctggttttgggacccagagtagcggattctctggttttggatcaggcacaggagggttcagctttgggtcaaataactcgtctgtccagggttttggtggctggcgaagctgagggcgtgtcagcaggctgttcagaccgacgttgccatcaaaacacatacacccagaaagaaacaacagaaaccaaaactcacaaggcgcatgattacttgttttatatttcatgttgggttttccctcccactattaaacagtctgtttccgtaca

SEQ ID NO: 20880 - DNA, 5269 bp, Homo sapiens
  source 1..5269: mol_type = unassigned DNA
ggcgctgaggggaggaagtttgctgtcgagcggcctgggttccgtgggcaaggccgtgggaggcagcgttggctgcttcgacacactaccccaacctcctctcaagccccacagaaactggatgcttctgcagctgcagcccctgcctctctgccaccttcatcacctgctgctcccattgccactttttctttgcttcctgctggtggagcccccactgtgttctcctttggttcttcatctttgaagtcatctgctacggtcactggggagcccccttcatattccagtggctccgacagctccaaagcagccccaggccctggcccatcaaccttctcttttgttcccccttctaaagcctccctagcccccacccctgcagcgtctcctgtggctccatcagctgcttcattctcctttggatcatctggttttaagcctaccctggaaagcacaccagtgccaagtgtgtctgctccaaatatagcaatgaagccctccttcccaccctcaacctctgctgtcaaagtcaaccttagtgaaaagtttactgctgcagctacctctactcctgttagtagctcccagagcgcacccccgatgtcgccattctcttctgcctccaagccagctgcttctggaccactcagccaccccacacctctctcagcaccacctagttccgtgccattgaagtcctcagtcttgccctcaccatcagcaggacgatctgctcagggcagttcaagcccagtgccctcaatggtacagaaatcacccaggataacccctccagcggcaaagccaggctctccccaggcaaagtcacttcagcctgctgttgcagaaaagcagggacatcagtggaaagattcagatcctgtaatggctggaattggggaggagattgcacactttcagaaggagttggaagagttaaaagcccgaacttccaaagcctgtttccaagtgggcacttctgaggagatgaagatgctgcgaacagaatcagatgacttgcatacctttcttttggagattaaagagaccacagagtcgcttcatggagatataagtagcctgaaaacaactttacttgagggctttgctggtgttgaggaagccagagaacaaaatgaaagaaatcgtgactctggttatctgcatttgctttataaaagaccactggatcccaagagtgaagctcagcttcaggaaattcggcgccttcatcagtatgtgaaatttgctgtccaagatgtgaatgatgttctagacttggagtgggatcagcatctggaacaaaagaaaaaacaaaggcacctgcttgtgccagagcgagagacactgtttaacaccctagccaacaatcgggaaatcatcaaccaacagaggaagaggctgaatcacctggtggatagtcttcagcagctccgcctttacaaacagacttccctgtggagcctgtcctcggctgttccttcccagagcagcattcacagttttgacagtgacctggaaagcctgtgcaatgctttgttgaaaaccaccatagaatctcacaccaaatccttgcccaaagtaccagccaaactgtcccccatgaaacaggcacaactgagaaacttcttggccaagaggaagaccccaccagtgagatccactgctccagccagcctgtctcgatcagcctttctgtctcagagatattatgaagacttggatgaagtcagctcaacgtcatctgtctcccagtctctggagagtgaagatgcacggacgtcctgtaaagatgacgaggcagtggttcaggcccctcggcacgcccccgtggttcgcactccttccatccagcccagtctcttgccccatgcagcaccttttgctaaatctcacctggttcatggttcttcacctggtgtgatgggaacttcagtggctacatctgctagcaaaattattcctcaaggggccgatagcacaatgcttgccacgaaaaccgtgaaacatggtgcacctagtccttcccaccccatctcagccccgcaggcagctgccgcagcagcactcaggcggcagatggccagtcaggcaccagctgtaaacactttgactgaatcaacgttgaagaatgtccctcaagtggtaaatgtgcaggaattgaagaataaccctgcaaccccttctacagccatgggttcttcagtgccctactccacagccaaaacacctcacccagtgttgaccccagtggctgctaaccaagccaagcaggggtctctaataaattcccttaagccatctgggcctacaccagcatccggtcagttatcatctggtgacaaagcttcagggacagccaagatagaaacagctgtgacttcaaccccatctgcttctgggcagttcagcaagcctttctcattttctccatcagggactggctttaattttgggataatcacaccaacaccgtcttctaatttcactgctgcacaaggggcaacaccctccactaaagagtcaagccagccggacgcattctcatctggtgggggaagcaaaccttcttatgaggccattcctgaaagctcacctccctcaggaatcacatccgcatcaaacaccaccccaggagaacctgccgcatctagcagcagacctgtggcaccttctggaactgctctttccaccacctctagtaagctggaaaccccaccgtccaagctgggagagcttctgtttccaagttctttggctggagagactctgggaagtttttcaggactgcgggttggccaagcagatgattctacaaaaccaaccaataaggcttcatccacaagcctaactagtacccagccaaccaagacgtcaggcgtgccctcagggtttaattttactgcccccccggtgttagggaagcacacggagccccctgtgacatcctctgcaaccaccacctcagtagcaccaccagcagccaccagcacttcctcaactgccgtttttggcagtctgccagtcaccagtgcaggatcctctggggtcatcagttttggtgggacatctctaagtgctggcaagactagtttttcatttggaagccaacagaccaatagcacagtgcccccatctgccccaccaccaactacagctgccactccccttccaacatcattccccacattgtcatttggtagcctcctgagttcagcaactaccccctccctgcctatgtccgctggcagaagcacagaagaggccacttcatcagctttgcctgagaagccaggtgacagtgaggtctcagcatcagcagcctcacttctagaggagcaacagtcagcccagcttccccaggctcctccgcaaacttctgactctgttaaaaaagaacctgttcttgcccagcctgcagtcagcaactctggcactgcagcatctagtactagtcttgtagcactttctgcagaggctaccccagccaccacgggggtccctgatgccaggacggaggcagtaccacctgcttcctccttttctgtgcctgggcagactgctgtcacagcagctgctatctcaagtgcaggccctgtggccgtcgaaacatcaagtacccccatagcctccagcaccacgtccattgttgctcccggcccatctgcagaggcagcagcatttggtaccgtcacttctggctcatccgtctttgctcagcctcctgctgccagttctagctcagctttcaaccagctcaccaacaacacagccactgccccctctgccacgcccgtgtttgggcaagtggcagccagcaccgcaccaagtctgtttgggcagcagactggtagcacagccagcacagcagctgccacaccacaggtcagcagctcagggtttagcagcccagcttttggtaccacagccccaggggtctttggacagacaaccttcgggcaggcctcagtctttgggcagtcggcgagcagtgctgcaagtgtcttttccttcagtcagcctgggttcagttccgtgcctgccttcggtcagcctgcttcctccactcccacatccaccagtggaagtgtctttggtgccgcctcaagtaccagtagctccagttccttctcatttggacagtcttctcccaacacaggaggggggctgtttggccaaagcaacgctcctgcttttgggcagagtcctggctttggacagggaggctctgtctttggtggtacctcagctgccaccacaacagcagcaacctctgggttcagcttttgccaagcttcaggttttgggtctagtaatactggttctgtgtttggtcaagcagccagtactggtggaatagtctttggccagcaatcatcctcttccagtggtagcgtgtttgggtctggaaacactggaagagggggaggtttcttcagtggccttggaggaaaacccagtcaggatgcagccaacaaaaacccattcagctcggccagtgggggctttggatccacagctacctcaaatacctctaacctatttggaaacagtggggccaagacatttggtggatttgccagctcgtcgtttggagagcagaaacccactggcactttcagctctggaggaggaagtgtggcatcccaaggctttgggttttcctctccaaacaaaacaggtggcttcggtgctgctccagtgtttggcagccctcctacttttgggggatcccctgggtttggaggggtgccagcattcggttcagccccagcctttacaagccctctgggctcgacgggaggcaaagtgttcggagagggcactgcagctgccagcgcaggaggattcgggtttgggagcagcagcaacaccacatccttcggcacgctcgcgagtcagaatgcccccactttcggatcactgtcccaacagacttctggttttgggacccagagtagcggattctctggttttggatcaggcacaggagggttcagctttgggtcaaataactcgtctgtccagggttttggtggctggcgaagctgagggcgtgtcagcaggcctttcgatccctgggaccaaccgcatcctcagcttcttccccgagaaatgctggagcaggctgttcagaccgacgttgccatcaaaacacatacacccagaaagaaacaacagaaaccaaaactcacaaggcgcatgattacttgttttatatttcatgttgggttttccctcccactattaaacagtctgtttccgt

SEQ ID NO: 20881 - DNA, 6698 bp, Homo sapiens
  source 1..6698: mol_type = unassigned DNA
ctgcgcgccgctggcgctgaggggaggaagtttgctgtcgagcggcctgggttccgtgggcaaggccgtgggaggcagcgttggctgcttcgacacactgagggcggcgcgatgggagacgagatggatgccatgattcccgagcgggagatgaaggattttcagtttagagcgctaaagaaggtgagaatctttgactcccctgaggaattgcccaaggaacgctcgagtctgcttgctgtgtccaacaaatatggtctggtcttcgctggtggagccagtggcttgcagatttttcctactaaaaatcttcttattcaaaataaacccggagatgatcccaacaaaatagttgataaagtccaaggcttgctagttcctatgaaattcccaatccatcacctggccttgagctgtgataacctcacactctctgcgtgcatgatgtccagtgaatatggttccattattgctttttttgatgttcgcacattctcaaatgaggctaaacagcaaaaacgcccatttgcctatcataagcttttgaaagatgcaggaggcatggtgattgatatgaagtggaaccccactgtcccctccatggtggcagtttgtctggctgatggtagtattgctgtcctgcaagtcacggaaacagtgaaagtatgtgcaactcttccttccacggtagcagtaacctctgtgtgctggagccccaaaggaaagcagctggcagtgggaaaacagaatggaactgtggtccagtatcttcctactttgcaggaaaaaaaagtcattccttgtcctccgttttatgagtcagatcatcctgtcagagttctggatgtgctgtggattggtacctacgtcttcgccatagtgtatgctgctgcagatgggaccctggaaacgtctccagatgtggtgatggctctactaccgaaaaaagaagaaaagcacccagagatatttgtgaactttatggagccctgttatggcagctgcacggagagacagcatcattactacctcagttacattgaggaatgggatttagtgctggcagcatctgcggcttcaacagaagttagtatccttgctcgacaaagtgatcagattaattgggaatcttggctactggaggattctagtcgagctgaattgcctgtgacagacaagagtgatgactccttgcccatgggagttgtcgtagactatacaaaccaagtggaaatcaccatcagtgatgaaaagactcttcctcctgctccagttctcatgttactttcaacagatggtgtgctttgtccattttatatgattaatcaaaatcctggggttaagtctctcatcaaaacaccagagcgactttcattagaaggagagcgacagcccaagtcaccaggaagtactcccactaccccaacctcctctcaagccccacagaaactggatgcttctgcagctgcagcccctgcctctctgccaccttcatcacctgctgctcccattgccactttttctttgcttcctgctggtggagcccccactgtgttctcctttggttcttcatctttgaagtcatctgctacggtcactggggagcccccttcatattccagtggctccgacagctccaaagcagccccaggccctggcccatcaaccttctcttttgttcccccttctaaagcctccctagcccccacccctgcagcgtctcctgtggctccatcagctgcttcattctcctttggatcatctggttttaagcctaccctggaaagcacaccagtgccaagtgtgtctgctccaaatatagcaatgaagccctccttcccaccctcaacctctgctgtcaaagtcaaccttagtgaaaatagctcccagagcgcacccccgatgtcgccattctcttctgcctccaagccagctgcttctggaccactcagccaccccacacctctctcagcaccacctagttccgtgccattgaagtcctcagtcttgccctcaccatcaggacgatctgctcagggcagttcaagcccagtgccctcaatggtacagaaatcacccaggataacccctccagcggcaaagccaggctctccccaggcaaagtcacttcagcctgctgttgcagaaaagcagggacatcagtggaaagattcagatcctgtaatggctggaattggggaggagattgcacactttcagaaggagttggaagagttaaaagcccgaacttccaaagcctgtttccaagtgggcacttctgaggagatgaagatgctgcgaacagaatcagatgacttgcatacctttcttttggagattaaagagaccacagagtcgcttcatggagatataagtagcctgaaaacaactttacttgagggctttgctggtgttgaggaagccagagaacaaaatgaaagaaatcgtgactctggttatctgcatttgctttataaaagaccactggatcccaagagtgaagctcagcttcaggaaattcggcgccttcatcagtatgtgaaatttgctgtccaagatgtgaatgatgttctagacttggagtgggatcagcatctggaacaaaagaaaaaacaaaggcacctgcttgtgccagagcgagagacactgtttaacaccctagccaacaatcgggaaatcatcaaccaacagaggaagaggctgaatcacctggtggatagtcttcagcagctccgcctttacaaacagacttccctgtggagcctgtcctcggctgttccttcccagagcagcattcacagttttgacagtgacctggaaagcctgtgcaatgctttgttgaaaaccaccatagaatctcacaccaaatccttgcccaaagtaccagccaaactgtcccccatgaaacaggcacaactgagaaacttcttggccaagaggaagaccccaccagtgagatccactgctccagccagcctgtctcgatcagcctttctgtctcagagatattatgaagacttggatgaagtcagctcaacgtcatctgtctcccagtctctggagagtgaagatgcacggacgtcctgtaaagatgacgaggcagtggttcaggcccctcggcacgcccccgtggttcgcactccttccatccagcccagtctcttgccccatgcagcaccttttgctaaatctcacctggttcatggttcttcacctggtgtgatgggaacttcagtggctacatctgctagcaaaattattcctcaaggggccgatagcacaatgcttgccacgaaaaccgtgaaacatggtgcacctagtccttcccaccccatctcagccccgcaggcagctgccgcagcagcactcaggcggcagatggccagtcaggcaccagctgtaaacactttgactgaatcaacgttgaagaatgtccctcaagtggtaaatgtgcaggaattgaagaataaccctgcaaccccttctacagccaaaacacctcacccagtgttgaccccagtggctgctaaccaagccaagcaggggtctctaataaattcccttaagccatctgggcctacaccagcatccggtcagttatcatctggtgacaaagcttcagggacagccaagatagaaacagctgtgacttcaaccccatctgcttctgggcagttcagcaagcctttctcattttctccatcagggactggctttaattttgggataatcacaccaacaccgtcttctaatttcactgctgcacaaggggcaacaccctccactaaagagtcaagccagccggacgcattctcatctggtgggggaagcaaaccttcttatgaggccattcctgaaagctcacctccctcaggaatcacatccgcatcaaacaccaccccaggagaacctgccgcatctagcagcagacctgtggcaccttctggaactgctctttccaccacctctagtaagctggaaaccccaccgtccaagctgggagagcttctgtttccaagttctttggctggagagactctgggaagtttttcaggactgcgggttggccaagcagatgattctacaaaaccaaccaataaggcttcatccacaagcctaactagtacccagccaaccaagacgtcaggcgtgccctcagggtttaattttactgcccccccggtgttagggaagcacacggagccccctgtgacatcctctgcaaccaccacctcagtagcaccaccagcagccaccagcacttcctcaactgccgtttttggcagtctgccagtcaccagtgcaggatcctctggggtcatcagttttggtgggacatctctaagtgctggcaagactagtttttcatttggaagccaacagaccaatagcacagtgcccccatctgccccaccaccaactacagctgccactccccttccaacatcattccccacattgtcatttggtagcctcctgagttcagcaactaccccctccctgcctatgtccgctggcagaagcacagaagaggccacttcatcagctttgcctgagaagccaggtgacagtgaggtctcagcatcagcagcctcacttctagaggagcaacagtcagcccagcttccccaggctcctccgcaaacttctgactctgttaaaaaagaacctgttcttgcccagcctgcagtcagcaactctggcactgcagcatctagtactagtcttgtagcactttctgcagaggctaccccagccaccacgggggtccctgatgccaggacggaggcagtaccacctgcttcctccttttctgtgcctgggcagactgctgtcacagcagctgctatctcaagtgcaggccctgtggccgtcgaaacatcaagtacccccatagcctccagcaccacgtccattgttgctcccggcccatctgcagaggcagcagcatttggtaccgtcacttctggctcatccgtctttgctcagcctcctgctgccagttctagctcagctttcaaccagctcaccaacaacacagccactgccccctctgccacgcccgtgtttgggcaagtggcagccagcaccgcaccaagtctgtttgggcagcagactggtagcacagccagcacagcagctgccacaccacaggtcagcagctcagggtttagcagcccagcttttggtaccacagccccaggggtctttggacagacaaccttcgggcaggcctcagtctttgggcagtcggcgagcagtgctgcaagtgtcttttccttcagtcagcctgggttcagttccgtgcctgccttcggtcagcctgcttcctccactcccacatccaccagtggaagtgtctttggtgccgcctcaagtaccagtagctccagttccttctcatttggacagtcttctcccaacacaggaggggggctgtttggccaaagcaacgctcctgcttttgggcagagtcctggctttggacagggaggctctgtctttggtggtacctcagctgccaccacaacagcagcaacctctgggttcagcttttgccaagcttcaggttttgggtctagtaatactggttctgtgtttggtcaagcagccagtactggtggaatagtctttggccagcaatcatcctcttccagtggtagcgtgtttgggtctggaaacactggaagagggggaggtttcttcagtggccttggaggaaaacccagtcaggatgcagccaacaaaaacccattcagctcggccagtgggggctttggatccacagctacctcaaatacctctaacctatttggaaacagtggggccaagacatttggtggatttgccagctcgtcgtttggagagcagaaacccactggcactttcagctctggaggaggaagtgtggcatcccaaggctttgggttttcctctccaaacaaaacaggtggcttcggtgctgctccagtgtttggcagccctcctacttttgggggatcccctgggtttggaggggtgccagcattcggttcagccccagcctttacaagccctctgggctcgacgggaggcaaagtgttcggagagggcactgcagctgccagcgcaggaggattcgggtccctggccatgagcctgtctccgaccctgaagggcaggctgttgctgatgaggcccaaggcaggaggaggaagggagcaggccgctcctgggagaaagtccaatgagagcagatcccttggccacctttgtatggaaagagccttgacctcaccattaaaagtttgggagcagcagcaacaccacatccttcggcacgctcgcgagtcagaatgcccccactttcggatcactgtcccaacagacttctggttttgggacccagagtagcggattctctggttttggatcaggcacaggagggttcagctttgggtcaaataactcgtctgtccagggttttggtggctggcgaagctgagggcgtgtcagcaggcctttcgatccctgggaccaaccgcatcctcagcttcttccccgagaaatgctggagcaggctgttcagaccgacgttgccatcaaaacacatacacccagaaagaaacaacagaaaccaaaactcacaaggcgcatgattacttgttttatatttcatgttgggttttccctcccactattaaacagtctgtttccgt

SEQ ID NO: 20882 - DNA, 2818 bp, Homo sapiens
  source 1..2818: mol_type = unassigned DNA
atgaaatcctctcttttgttacgaggtgttcacttctgttttcacttgccaggggcaacaccctccactaaagagtcaagccagccggacgcattctcatctggtgggggaagcaaaccttcttatgaggccattcctgaaagctcacctccctcaggaatcacatccgcatcaaacaccaccccaggagaacctgccgcatctagcagcagacctgtggcaccttctggaactgctctttccaccacctctagtaagctggaaaccccaccgtccaagctgggagagcttctgtttccaagttctttggctggagagactctgggaagtttttcaggactgcgggttggccaagcagatgattctacaaaaccaaccaataaggcttcatccacaagcctaactagtacccagccaaccaagacgtcaggcgtgccctcagggtttaattttactgcccccccggtgttagggaagcacacggagccccctgtgacatcctctgcaaccaccacctcagtagcaccaccagcagccaccagcacttcctcaactgccgtttttggcagtctgccagtcaccagtgcaggatcctctggggtcatcagttttggtgggacatctctaagtgctggcaagactagtttttcatttggaagccaacagaccaatagcacagtgcccccatctgccccaccaccaactacagctgccactccccttccaacatcattccccacattgtcatttggtagcctcctgagttcagcaactaccccctccctgcctatgtccgctggcagaagcacagaagaggccacttcatcagctttgcctgagaagccaggtgacagtgaggtctcagcatcagcagcctcacttctagaggagcaacagtcagcccagcttccccaggctcctccgcaaacttctgactctgttaaaaaagaacctgttcttgcccagcctgcagtcagcaactctggcactgcagcatctagtactagtcttgtagcactttctgcagaggctaccccagccaccacgggggtccctgatgccaggacggaggcagtaccacctgcttcctccttttctgtgcctgggcagactgctgtcacagcagctgctatctcaagtgcaggccctgtggccgtcgaaacatcaagtacccccatagcctccagcaccacgtccattgttgctcccggcccatctgcagaggcagcagcatttggtaccgtcacttctggctcatccgtctttgctcagcctcctgctgccagttctagctcagctttcaaccagctcaccaacaacacagccactgccccctctgccacgcccgtgtttgggcaagtggcagccagcaccgcaccaagtctgtttgggcagcagactggtagcacagccagcacagcagctgccacaccacaggtcagcagctcagggtttagcagcccagcttttggtaccacagccccaggggtctttggacagacaaccttcgggcaggcctcagtctttgggcagtcggcgagcagtgctgcaagtgtcttttccttcagtcagcctgggttcagttccgtgcctgccttcggtcagcctgcttcctccactcccacatccaccagtggaagtgtctttggtgccgcctcaagtaccagtagctccagttccttctcatttggacagtcttctcccaacacaggaggggggctgtttggccaaagcaacgctcctgcttttgggcagagtcctggctttggacagggaggctctgtctttggtggtacctcagctgccaccacaacagcagcaacctctgggttcagcttttgccaagcttcaggttttgggtctagtaatactggttctgtgtttggtcaagcagccagtactggtggaatagtctttggccagcaatcatcctcttccagtggtagcgtgtttgggtctggaaacactggaagagggggaggtttcttcagtggccttggaggaaaacccagtcaggatgcagccaacaaaaacccattcagctcggccagtgggggctttggatccacagctacctcaaatacctctaacctatttggaaacagtggggccaagacatttggtggatttgccagctcgtcgtttggagagcagaaacccactggcactttcagctctggaggaggaagtgtggcatcccaaggctttgggttttcctctccaaacaaaacaggtggcttcggtgctgctccagtgtttggcagccctcctacttttgggggatcccctgggtttggaggggtgccagcattcggttcagccccagcctttacaagccctctgggctcgacgggaggcaaagtgttcggagagggcactgcagctgccagcgcaggaggattcgggtttgggagcagcagcaacaccacatccttcggcacgctcgcgagtcagaatgcccccactttcggatcactgtcccaacagacttctggttttgggacccagagtagcggattctctggttttggatcaggcacaggagggttcagctttgggtcaaataactcgtctgtccagggttttggtggctggcgaagctgagggcgtgtcagcaggcctttcgatccctgggaccaaccgcatcctcagcttcttccccgagaaatgctggagcaggctgttcagaccgacgttgccatcaaaacacatacacccagaaagaaacaacagaaaccaaaactcacaaggcgcatgattacttgttttatatttcatgttgggttttccctcccactattaaacagtctgtttccgt

SEQ ID NO: 20883 - DNA, 1633 bp, Homo sapiens
  source 1..1633: mol_type = unassigned DNA
acgcaaccccataaggtagcacgccgttacccgtggggagcgtttccgccatttttgaaaattaattgggaaggtactggttttaagtgtagttgccgacgcaatggcagcctttgcagtggaacctcaggggcccgcgttaggatctgaaccaatgatgctgggttcacccacatctccaaagccaggagttaatgcccagttcttacctggatttttaatgggggatttgccagctccggtgactccacaacctcgatcaattagtggcccttcagtaggagtaatggaaatgagatcacctttacttgcaggtgggtcaccaccacaaccagttgtaccagctcataaagataaaagtggcgctccaccagttagaagtatatatgatgacatttctagcccaggacttggatcaacacctttaacttcaagaagacagccaaacatttcagtaatgcagagtcctcttgttggagttacatctactcctggaacagggcaaagtatgtttagtccagcaagtatcggtcagccacgaaagacgacattatctcctgcccagttggatcctttttatactcaaggagattctttgacttcagaagatcacctcgatgactcttgggtgactgtatttgggtttcctcaagcatctgcttcctacatattactacaatttgcacagtatgggaatatcttaaaacatgtgatgtctaatacaggaaattggatgcatattcgttatcaatctaaactgcaggctcggaaagccttaagcaaagatgggaggatttttggagaatccatcatgattggtgtaaaaccatgtattgacaaaagtgttatggaaagcagtgacagatgtgctttatcatctccatctttagcctttacaccaccaatcaaaactctaggtacaccaacacaacctggaagtactcctaggatttctaccatgagacctcttgctacagcatacaaagcctctactagtgattatcaggttatttctgacagacaaacgccaaaaaaagatgaaagtcttgtatccaaagcaatggagtacatgtttggctggtagtagaacaccaagaaggaggttgctacactaaaacagagttagcagagtgctgctggttccttcggttagttatataactgttcctgcagtattggatagctatctcatacttcttttagaaagaagcctttttcattaaggatacaacctatttgtagctcgcactttaaaagatgcttgagatacattttaaagaaaactaaaaatccctgtaaataggattttgtgctttctgtaacagtgcatgcttcagcacagaaaactcagcattgattattgtaaattaaataactgaaattgtggtgagacgtcatagtcttcatgagaacgtgggggtgaatttcatgaaggggaactatagttatttctaccgacacaaatattataattagcaatttgaattatggtcttttaatttagatagtatttaatattttaattatccttgtttgtatatgtcctgtcacagagtgtcctcttggtgtattctaaaacgagcattcttttaaaaaacctaaagtttcttgataataaacattgtcaatgata

SEQ ID NO: 20884 - DNA, 1470 bp, Homo sapiens
  source 1..1470: mol_type = unassigned DNA
acaccaggtgctgaaggctgagacggtgagagcatgagtgataagatgctctctccccttgctctctttctgaagatgacaaactccatcttttttctaaagtcttactaaaggtgacaatgtatatagtataatgaaggatgttactaaatgacatgtgctgcacacctgagtcttgtggaggctgaagaaaaggaggcttctgtagaaaataggaactcagatctgaaccaatgatgctgggttcacccacatctccaaagccaggagttaatgcccagttcttacctggatttttaatgggggatttgccagctccggtgactccacaacctcgatcaattagtggcccttcagtaggagtaatggaaatgagatcacctttacttgcaggtgggtcaccaccacaaccagttgtaccagctcataaagataaaagtggcgctccaccagttagaagtatatatgatgacatttctagcccaggacttggatcaacacctttaacttcaagaagacagccaaacatttcagtaatgcagagtcctcttgttggagttacatctactcctggaacagggcaaagtatgtttagtccagcaagtatcggtcagccacgaaagacgacattatctcctgcccagttggatcctttttatactcaaggagattctttgacttcagaagatcacctcgatgactcttgggtgactgtatttgggtttcctcaagcatctgcttcctacatattactacaatttgcacagtatgggaatatcttaaaacatgtgatgtctaatacaggaaattggatgcatattcgttatcaatctaaactgcaggctcggaaagccttaagcaaagatgggaggatttttggagaatccatcatgattggtgtaaaaccatgtattgacaaaagtgttatggaaagcagtgacagatgtgctttatcatctccatctttagcctttacaccaccaatcaaaactctaggtacaccaacacaacctggaagtactcctaggatttctaccatgagacctcttgctacagcatacaaagcctctactagtgattatcaggttatttctgacagacaaacgccaaaaaaagatgaaagtcttgtatccaaagcaatggagtacatgtttggctggtagtagaacaccaagaaggaggttgctacactaaaacagagttagcagagtgctgctggttccttcggttagttatataactgttcctgcagtattggatagctatctcatacttcttttagaaagaagcctttttcattaaggatacaacctatttgtagctcgcactttaaaagatgcttgagatacattttaaagaaaactaaaaatccctgtaaataggattttgtgctttctgtaacagtgcatgcttcagcacagaaaactcagcattgattattgtaaattaaataactgaaattgtggtgag

SEQ ID NO: 20885 - DNA, 1624 bp, Homo sapiens
  source 1..1624: mol_type = unassigned DNA
agttgccgacgcaatggcagcctttgcagtggaacctcaggggcccgcgttaggatctgaaccaatgatgctgggttcacccacatctccaaagccaggagttaatgcccagttcttacctggatttttaatgggggatttgccagctccggtgactccacaacctcgatcaattagtggcccttcagtaggagtaatggaaatgagatcacctttacttgcaggtgggtcaccaccacaaccagttgtaccagctcataaagataaaagtggcgctccaccagttagaagtatatatgatgacatttctagcccaggacttggatcaacacctttaacttcaagaagacagggtccccaacagggtcctgatcagttgcccaggctagagtgcagcggcacagtcataactctgcagccttgaactcctgggttcaaccaatcctcctgcctcaactgtcctattgggatatagccaaacatttcagtaatgcagagtcctcttgttggagttacatctactcctggaacagggcaaagtatgtttagtccagcaagtatcggtcagccacgaaagacgacattatctcctgcccagttggatcctttttatactcaaggagattctttgacttcagaagatcacctcgatgactcttgggtgactgtatttgggtttcctcaagcatctgcttcctacatattactacaatttgcacagtatgggaatatcttaaaacatgtgatgtctaatacaggaaattggatgcatattcgttatcaatctaaactgcaggctcggaaagccttaagcaaagatgggaggatttttggagaatccatcatgattggtgtaaaaccatgtattgacaaaagtgttatggaaagcagtgacagatgtgctttatcatctccatctttagcctttacaccaccaatcaaaactctaggtacaccaacacaacctggaagtactcctaggatttctaccatgagacctcttgctacagcatacaaagcctctactagtgattatcaggttatttctgacagacaaacgccaaaaaaagatgaaagtcttgtatccaaagcaatggagtacatgtttggctggtagtagaacaccaagaaggaggttgctacactaaaacagagttagcagagtgctgctggttccttcggttagttatataactgttcctgcagtattggatagctatctcatacttcttttagaaagaagcctttttcattaaggatacaacctatttgtagctcgcactttaaaagatgcttgagatacattttaaagaaaactaaaaatccctgtaaataggattttgtgctttctgtaacagtgcatgcttcagcacagaaaactcagcattgattattgtaaattaaataactgaaattgtggtgagacgtcatagtcttcatgagaacgtgggggtgaatttcatgaaggggaactatagttatttctaccgacacaaatattataattagcaatttgaattatggtcttttaatttagatagtatttaatattttaattatccttgtttgtatatgtcctgtcacagagtgtcctcttggtgtattctaaaacgagcattctttt

SEQ ID NO: 20886 - DNA, 1203 bp, Homo sapiens
  source 1..1203: mol_type = unassigned DNA
tttcgtgaccttgtccagtagaaggctatttaattttcacaactgcttgaattttgacatacaagatgaagcaagatgcctcaagaaatgctgcctacactgtggattgtgaagattatgtgcatgtggtagaatttaatccctttgagaatggggattcaggaaacctaattgcatatggtggcaataattatgtggtcattggcacgtgtacgtttcaggaagaagaagcagacgttgaaggcattcagtataaaacacttcgaacatttcaccatggagtcagggttgatggcatagcttggagcccagagactagacttgattcattgcctccagtaatcaaattttgtacttcagctgctgatatgaaaattagattatttacttcagatcttcaggataaaaatgaatataaggttttagagggccataccgatttcattaatggtttggtgtttgatcccaaagaaggccaagaaattgcaagtgtgagtgacgatcacacctgcaggatttggaacttggaaggagtgcaaacagctcattttgttcttcattctcctggcatgagtgtgtgctggcatcctgaggagacttttaagctaatggttgcagagaagaatggaacaatccggttttatgatcttttggcccaacaggctattttatctcttgaatcagaacaagtgccattaatgtcagcacactggtgcttaaaaaacaccttcaaagttggagccgttgcaggaaatgattggttaatttgggatattactcggtccagttatcctcaaaataagagacctgttcacatggatcgagcctgcttattcaggtggtccacaattagtgaaaatctgtttgcaaccactggttatcctggcaaaatggcaagccagtttcaaattcatcatttaggacaccctcagcccatcctcatgggttctgtagccgttggatctggactgtcctggcatcgaactctccctctgtgtgtaattggaggagaccacaagctgttgttttgggtgactgaagtataaagtgttttctgtaccttagattcacaaactttgtatttttagtacatattttgaagaatttctatagtacatattttgaagaatttttatatcaaatataccgtatactttagaaaatgtctcagttgcttttattaaataaaatgttgatggtttg

SEQ ID NO: 20887 - DNA, 645 bp, Homo sapiens
  source 1..645: mol_type = unassigned DNA
tattttaatttttaagttccgggatacgtgtgcgggacgtgcaggtttattacaaaggtaaaacgtgtgctatggtggtttgcacacccatcacctaggtattaagctccacatgcattagctatttatcctgatgctctccctccgcccaaccccctgaacattatttttatatcacacattttggtactccttaacaacagatcctgtattttctatctgtttatattatagcccttttcacgttgagtcataactatccctaaactgtggtctccttcaagccaggaggctgtttttttcttcattagcgctggttctccacacacaatgaagtcttccaaatcctggccctgcttatgagcttggcaagttagttaacctactgaagcctcagtttctccatctacaaaatggagaccagagtttcgtgaccttgtccagtagaaggctatttaattttcacaactgcttgaattttgacatacaagatgaagcaagatgcctcaagaaatgctgcctacactgtggattgtgaagattatgtgcatgtggtagaatttaatccctttgagaatggggattcaggaaacctaattgcatatggtggcaataattatgtggtcattggcacgtgtacgtttc

SEQ ID NO: 20888 - DNA, 1286 bp, Homo sapiens
  source 1..1286: mol_type = unassigned DNA
aagcagagccacagcgcgtcgcggcagcccccaaggaagaccagcctgcctctggtcggttcctggcgctctgcgtttcgtgaccttgtccagtagaaggctatttaattttcacaactgcttgaattttgacatacaagatgaagcaagatgcctcaagaaatgctgcctacactgtggattgtgaagattatgtgcatgtggtagaatttaatccctttgagaatggggattcaggaaacctaattgcatatggtggcaataattatgtggtcattggcacgtgtacgtttcaggaagaagaagcagacgttgaaggcattcagtataaaacacttcgaacatttcaccatggagtcagggttgatggcatagcttggagcccagagactagacttgattcattgcctccagtaatcaaattttgtacttcagctgctgatatgaaaattagattatttacttcagatcttcaggataaaaatgaatataaggttttagagggccataccgatttcattaatggtttggtgtttgatcccaaagaaggccaagaaattgcaagtgtgagtgacgatcacacctgcaggatttggaacttggaaggagtgcaaacagctcattttgttcttcattctcctggcatgagtgtgtgctggcatcctgaggagacttttaagctaatggttgcagagaagaatggaacaatccggttttatgatcttttggcccaacaggctattttatctcttgaatcagaacaagtgccattaatgtcagcacactggtgcttaaaaaacaccttcaaagttggagccgttgcaggaaatgattggttaatttgggatattactcggtccagttatcctcaaaataagagacctgttcacatggatcgagcctgcttattcaggtggtccacaattagtgaaaatctgtttgcaaccactggttatcctggcaaaatggcaagccagtttcaaattcatcatttaggacaccctcagcccatcctcatgggttctgtagccgttggatctggactgtcctggcatcgaactctccctctgtgtgtaattggaggagaccacaagctgttgttttgggtgactgaagtataaagtgttttctgtaccttagattcacaaactttgtatttttagtacatattttgaagaatttctatagtacatattttgaagaatttttatatcaaatataccgtatactttagaaaatgtctcagttgcttttattaaataaaatgttgatggtttgaaaaatta

SEQ ID NO: 20889 - DNA, 3874 bp, Homo sapiens
  source 1..3874: mol_type = unassigned DNA
gttccgcgggaagaggcggtgctgagaggcgcgtactgtgcttgctttttgcagtacctgctgcggccgctttcggcatggaggaaatttatgcgaagtttgtgtcccagaaaatcagcaaaacccgctggcgaccgctgcctccgggaagtttacagaccgcggagacgttcgctacaggatcttgggacaatgaggaaaattatatttcactgtggtctattggagattttggaaacttggactctgatggagggtttgaaggagaccatcagttattgtgtgatatcagacaccatggtgatgtaatggatttacagttttttgaccaggaaagaattgtcgctgcttcatcaacaggatgtgtaacagttttccttcaccatccaaataaccagactctgtcagtcaaccagcagtggactacagctcactaccacacaggccctggcagtccttcctatagcagtgcaccatgtacaggtgttgtgtgcaacaacccagaaatcgttacagttggagaggatggtcgaataaatctcttcagagctgatcacaaggaagctgtaagaaccatagacaatgcagatagtagtacactccatgctgtaacctttcttcgaactcctgagattcttactgtaaattcaattggacagttgaaaatatgggatttcagacaacaaggaaatgagccttctcagatattgtcactgactggtgaccgagtgccactccactgtgttgatagacatcccaaccaacagcatgttgtagctactggtggccaagatggaatgttgagtatttgggatgttagacaaggtactatgcctgtatctctgctgaaggctcatgaagctgaaatgtgggaagttcactttcacccatccaacccagaacatctttttacctgctctgaagatggatccctctggcactgggatgcttccacagatgtacctgaaaagtcgtcactctttcaccaaggaggaagaagcagtacttttttgtctcatagcattagtaaccaagctaatgttcaccagtctgtcattagctcctggctcagcactgatcctgcaaaagaccgaattgaaatcacaagcttacttcccagtaggtctctgtctgtgaacactttggatgttttaggtccttgtcttgtttgtggaaccgatgcagaagcaatttatgttactagacatcttttttcgtagaagtactataattataagatttcagatagaacatgcaattagccttttgaaatccaacttctgtgcaaaattttagtatcagaaaatacgagatttgcaggggaaacatcagtaaactaccattaatgtcaatgcccagttttgacttttgttagcctgacactcccaaacagttgtagaatccgatagatgactgatggcaaaagattgtgaacatgtggaagaaaatcagtgggattctggtgctgatgaataggttgccttcagagtattattgacagacagcttgtggaactaattctttatttttgatgttgtgggaattaacacatcaatggtggttatgggaactaccaatgggttcctacaatttttatcagtagtatgtggcatatacaccttcctagtggcagttgccaatgttaatgattattctttttattgcaagtatttcctatgatccttccacactttatttccttaataataataaactttttcagaaagaattgagtagagcaaaaatgacaaagatgtgtagctgtgttcaatttttttttttttttttttttgaggcagagtcttgctctgctggagtgcggtggtgcaatctcggctcactgcaacctccacctcccaggttcaagcaattctcctgcctcagtctcctgagtagctggaactacaggtgtgcgccaccacgcccagctaatttttgtaattttagtagagacagagtttcaccatgttggccaggatggtctcgatctcttgacctcatgatccacccgcctcgacctcccaaagtgctgtgattacaggtgtgagccactgcacccggcctgaaatttttttaaggtgaaaatgttttgacaagttcctttttcagaataggtttttgagcagaactctttcagcttgttagacccaactttgcttttgtttagcttcacagcatagctgaaagttgccaaactggacattgtgcaataaagtagaattctatattgataagcaaactatttccaaactaaaaatgtgatagataaaagtgtgattaatcaaatgatatgatcagagtaaagaattttgccattttgatccttttactttgttttagccacctatagtgttaccaaccatctttatccttgtctgcagggataataatgaactaatgtagtgttttaagataatttaatgatactatctttccaaactttgttagattttaaatgtattattgacctgagaccttaatgacaaatcactgctattagacaattgaagtgttcatttactttgtaattccaataatcatagttatggaattatggtaaggttttgcttttctgtcctaataaatatatatattttttgagatggagttttgctcttgttgctgaggctggagtgaaatggcatgatctcagctcactgcaacctccgtctcttaggttcaagcaattctcctgcctcagcctcccgagtagctgggattacaggtgctcaccaccacacccagctaatttttgtatttttagtagagatggggtttcactgtgttggccaggctggtcttgaactgacctcatgatccacctgcctcagcctcccaaaatgctgggattacaggcttgagccactgctcccggctgatttttgtattagtagagacgacagggtttcaccatgttggccagggctggtctcgaactcctgaccacaggtaatcagcccgcctcggcctcccaaagtgctgggattacaggcgtgagccacttagtatttgtaaccataagagaaagtatattttaacagcattacatttcatgccaattgacaagttttgccaattttaataagaaactaagctttatgtaatgtaacaccgtaatttatgaatttgttcattgtcactgcctttattcatgaaactgtcaaatagagtgtctttcaagggttgcaggatcttagagatagaaagtaccttggtgatcatctccagcctaaatttcatcatcccttctatggtattcccaacaaattatcatccaacctatacttaaaaacatatggtggccaggcatggtggctcacgcctgtaatgctagcactttgggaggccgaggtgggtgaagcacctgaggtcaagagttcgagatcagcctggccaacatggcgaaaccccgtctccactaaaaatgcaaaaaaaaaattaaccgggcgtggtggcaggcatctataatcccagctacttgggaggctgaggcaggagaattgctcaaacccgggaggcagaggttgcagtgacccaagatcgtgccacttcactccagcctgggcaaaagagcaaaacgccatctcaaaaaatatacatatataaggagataaagtttcccattttccaatacagtttcacatttgaacagccctaattgatacaactttatggcagggttttagtgtgtgagtgggatccaaaacactcaatcctgtaaaagggtacagtcctattgtatgttaacacactgatgatgtgagcctgtgagatgagccaatcaccagttgttatgttcgaatctgctttgtgttgggacgctttaatgtcagggtttcactaaataaatgaattttcatatactgaactgaaa

SEQ ID NO: 20890 - DNA, 3836 bp, Homo sapiens
  source 1..3836: mol_type = unassigned DNA
atgggtgggcctctcagtctaggtactgactgtgcccacactggctatcgacgagaattgactctctgcagccaccgtctccgtcctaaagtcccatccaatcagggttccgcgggaagaggcggtgctgagaggcgcgtactgtgcttgctttttgcagtacctgctgcggccgctttcggcatggaggaaatttatgcgaagtttgtgtcccagaaaatcagcaaaacccgctggcgaccgctgcctccgggaagtttacagaccgcggagacgttcgctacaggatcttgggacaatgaggaaaattatatttcactgtggtctattggagattttggaaacttggactctgatggagggtttgaaggagaccatcagttattgtgtgatatcagacaccatggtgatgtaatggatttacagttttttgaccaggaaagaattgtcgctgcttcatcaacaggatgtgtaacagttttccttcaccatccaaataaccagactctgtcagtcaaccagcagtggactacagctcactaccacacaggccctggcagtccttcctatagcagtgcaccatgtacaggtgttgtgtgcaacaacccagaaatcgttacagttggagaggatggtcgaataaatctcttcagagctgatcacaaggaagctgtaagaaccataggactggtgaccgagtgccactccactgtgttgatagacatcccaaccaacagcatgttgtagctactggtggccaagatggaatgttgagtatttgggatgttagacaaggtactatgcctgtatctctgctgaaggctcatgaagctgaaatgtgggaagttcactttcacccatccaacccagaacatctttttacctgctctgaagatggatccctctggcactgggatgcttccacagatgtacctgaaaagtcgtcactctttcaccaaggaggaagaagcagtacttttttgtctcatagcattagtaaccaagctaatgttcaccagtctgtcattagctcctggctcagcactgatcctgcaaaagaccgaattgaaatcacaagcttacttcccagtaggtctctgtctgtgaacactttggatgttttaggtccttgtcttgtttgtggaaccgatgcagaagcaatttatgttactagacatcttttttcgtagaagtactataattataagatttcagatagaacatgcaattagccttttgaaatccaacttctgtgcaaaattttagtatcagaaaatacgagatttgcaggggaaacatcagtaaactaccattaatgtcaatgcccagttttgacttttgttagcctgacactcccaaacagttgtagaatccgatagatgactgatggcaaaagattgtgaacatgtggaagaaaatcagtgggattctggtgctgatgaataggttgccttcagagtattattgacagacagcttgtggaactaattctttatttttgatgttgtgggaattaacacatcaatggtggttatgggaactaccaatgggttcctacaatttttatcagtagtatgtggcatatacaccttcctagtggcagttgccaatgttaatgattattctttttattgcaagtatttcctatgatccttccacactttatttccttaataataataaactttttcagaaagaattgagtagagcaaaaatgacaaagatgtgtagctgtgttcaatttttttttttttttttttttgaggcagagtcttgctctgctggagtgcggtggtgcaatctcggctcactgcaacctccacctcccaggttcaagcaattctcctgcctcagtctcctgagtagctggaactacaggtgtgcgccaccacgcccagctaatttttgtaattttagtagagacagagtttcaccatgttggccaggatggtctcgatctcttgacctcatgatccacccgcctcgacctcccaaagtgctgtgattacaggtgtgagccactgcacccggcctgaaatttttttaaggtgaaaatgttttgacaagttcctttttcagaataggtttttgagcagaactctttcagcttgttagacccaactttgcttttgtttagcttcacagcatagctgaaagttgccaaactggacattgtgcaataaagtagaattctatattgataagcaaactatttccaaactaaaaatgtgatagataaaagtgtgattaatcaaatgatatgatcagagtaaagaattttgccattttgatccttttactttgttttagccacctatagtgttaccaaccatctttatccttgtctgcagggataataatgaactaatgtagtgttttaagataatttaatgatactatctttccaaactttgttagattttaaatgtattattgacctgagaccttaatgacaaatcactgctattagacaattgaagtgttcatttactttgtaattccaataatcatagttatggaattatggtaaggttttgcttttctgtcctaataaatatatatattttttgagatggagttttgctcttgttgctgaggctggagtgaaatggcatgatctcagctcactgcaacctccgtctcttaggttcaagcaattctcctgcctcagcctcccgagtagctgggattacaggtgctcaccaccacacccagctaatttttgtatttttagtagagatggggtttcactgtgttggccaggctggtcttgaactgacctcatgatccacctgcctcagcctcccaaaatgctgggattacaggcttgagccactgctcccggctgatttttgtattagtagagacgacagggtttcaccatgttggccagggctggtctcgaactcctgaccacaggtaatcagcccgcctcggcctcccaaagtgctgggattacaggcgtgagccacttagtatttgtaaccataagagaaagtatattttaacagcattacatttcatgccaattgacaagttttgccaattttaataagaaactaagctttatgtaatgtaacaccgtaatttatgaatttgttcattgtcactgcctttattcatgaaactgtcaaatagagtgtctttcaagggttgcaggatcttagagatagaaagtaccttggtgatcatctccagcctaaatttcatcatcccttctatggtattcccaacaaattatcatccaacctatacttaaaaacatatggtggccaggcatggtggctcacgcctgtaatgctagcactttgggaggccgaggtgggtgaagcacctgaggtcaagagttcgagatcagcctggccaacatggcgaaaccccgtctccactaaaaatgcaaaaaaaaaattaaccgggcgtggtggcaggcatctataatcccagctacttgggaggctgaggcaggagaattgctcaaacccgggaggcagaggttgcagtgacccaagatcgtgccacttcactccagcctgggcaaaagagcaaaacgccatctcaaaaaatatacatatataaggagataaagtttcccattttccaatacagtttcacatttgaacagccctaattgatacaactttatggcagggttttagtgtgtgagtgggatccaaaacactcaatcctgtaaaagggtacagtcctattgtatgttaacacactgatgatgtgagcctgtgagatgagccaatcaccagttgttatgttcgaatctgctttgtgttgggacgctttaatgtcagggtttcactaaataaatgaattttcatatactg

SEQ ID NO: 20891 - DNA, 2186 bp, Homo sapiens
  source 1..2186: mol_type = unassigned DNA
gcagtacctgctgcggccgctttcggcatggaggaaatttatgcgaagtttgtgtcccagaaaatcagcaaaacccgctggcgaccgctgcctccgggaagtttacagaccgcggagacgttcgctacaggatcttgggacaatgaggaaaattatatttcactgtggtctattggagattttggaaacttggactctgatggagggtttgaaggagaccatcagttattgtgtgatatcagacaccatggtgatgtaatggatttacagttttttgaccaggaaagaattgtcgctgcttcatcaacaggatgtgtaacagttttccttcaccatccaaataaccagactctgtcagtcaaccagcagtggactacagctcactaccacacaggccctggcagtccttcctatagcagtgcaccatgtacaggtgttgtgtgcaacaacccagaaatcgttacagttggagaggatggtcgaataaatctcttcagagctgatcacaaggaagctgtaagaaccatagacaatgcagatagtagtacactccatgctgtaacctttcttcgaactcctgagattcttactgtaaattcaattggacagttgaaaatatgggatttcagacaacaaggaaatgagccttctcagatattgtcactgactggtgaccgagtgccactccactgtgttgatagacatcccaaccaacagcatgttgtagctactggtggccaagatggaatgttgagtatttgggatgttagacaaggtactatgcctgtatctctgctgaaggctcatgaagctgaaatgtgggaagttcactttcacccatccaacccagaacatctttttacctgctctgaagatggatccctctggcactgggatgcttccacagatgtacctgaaaagtcgtcactctttcaccaaggaggaagaagcagtacttttttgtctcatagcattagtaaccaagctaatgttcaccagtctgtcattagctcctggctcagcactgatcctgcaaaagaccgaattgaaatcacaagcttacttcccagtaggtctctgtctgtgaacactttggatgttttaggtccttgtcttgtttgtggaaccgatgcagaagcaatttatgttactagacatcttttttcgtagaagtactataattataagatttcagatagaacatgcaattagccttttgaaatccaacttctgtgcaaaattttagtatcagaaaatacgagatttgcaggggaaacatcagtaaactaccattaatgtcaatgcccagttttgacttttgttagcctgacactcccaaacagttgtagaatccgatagatgactgatggcaaaagattgtgaacatgtggaagaaaatcagtgggattctggtgctgatgaataggttgccttcagagtattattgacagacagcttgtggaactaattctttatttttgatgttgtgggaattaacacatcaatggtggttatgggaactaccaatgggttcctacaatttttatcagtagtatgtggcatatacaccttcctagtggcagttgccaatgttaatgattattctttttattgcaagtatttcctatgatccttccacactttatttccttaataataataaactttttcagaaagaattgagtagagcaaaaatgacaaagatgtgtagctgtgttcaatttttttttttttttttttttgaggcagagtcttgctctgctggagtgcggtggtgcaatctcggctcactgcaacctccacctcccaggagaattgctcaaacccgggaggcagaggttgcagtgacccaagatcgtgccacttcactccagcctgggcaaaagagcaaaacgccatctcaaaaaatatacatatataaggagataaagtttcccattttccaatacagtttcacatttgaacagccctaattgatacaactttatggcagggttttagtgtgtgagtgggatccaaaacactcaatcctgtaaaagggtacagtcctattgtatgttaacacactgatgatgtgagcctgtgagatgagccaatcaccagttgttatgttcgaatctgctttgtgttgggacgctttaatgtcagggtttcactaaataaatgaattttcatatactgaactg

SEQ ID NO: 20892 - DNA, 5229 bp, Homo sapiens
  source 1..5229: mol_type = unassigned DNA
agccccgcgccggtttccagggagctgggcgcatgcgccgcgtaaggggcccggccggcggaaggaggtgctactgccggaagcgccggcgcgcttgcgcagtagctgaacgcgggcgtttctttcctccctttttttcgaattggttttgggggtagattcgagttacaaaatggccgcccggagcgtgttcggcgcggttcccccagctgtctctggctgaaccggcgctctcgcctccctgccgaacacagcgtgaggagcccccccagggatatggtgtttgagtctctgggcttgccgagcactaagtcctctgagttccgcagcgcagcaccggaagcggccgagcgcgctcagcccggcgacccctgcgggctccagacccctgcgccgctgcgccccgggtttcgccgcaaccaagacccagcgagtgcagcggcggccgccgaggaggttcgaaaacatggccaaaagaaatgccgagaaggaactgacagataggaattgggatcaagaagatgaagctgaagaggtgggaacattctccatggccagtgaggaagtcttgaagaatagagccataaagaaagcaaagcgcagaaatgttggatttgaatctgacactggaggagcctttaaaggttttaaaggtttggtggtaccttctggaggaggacgcttttctggatttggtagtggcgctggagggaagcctttggaaggactgtcgaatggaaacaacataaccagtgcccctcccttcgccagtgcaaaggcagcggcagatcccaaggtagcctttggttctcttgctgcaaatggccctaccaccttggttgataaagtttcaaatcccaaaactaatggggacagtcagcagccctcctcctctggccttgcttccagtaaagcttgtgtcggaaatgcctatcacaagcagttggccgccttgaactgctccgtgcgggattggatagtgaagcacgtgaatacaaaccccctctgtgatctgacacctatctttaaagactatgagaaatatttagcaaacattgaacagcaacacgggaacagtggcaggaattctgaaagtgaatctaacaaagtggcagctgaaacacagtctccttccctttttggctcaacaaaattacagcaagagtcaacgtttttgtttcatggcaacaaaactgaagatacacctgacaagaagatggaggtggcatctgaaaagaaaacggacccatcatcactaggagcgacaagtgcctcatttaatttcggcaagaaagttgatagctctgttttgggctcattaagctctgtccccctgactggattttctttctcccctggaaactccagtttatttggcaaagatactacccagagtaaaccagtctcttcaccatttcccactaaaccattggagggccaagcagaaggtgacagtggtgaatgcaaaggtggagatgaagaagagaatgatgagccacccaaagtagtagttaccgaagtaaaagaagaagatgctttttactccaaaaagtgtaaactgttttacaagaaagacaatgagtttaaagagaaaggcataggtactctgcatttaaaacctacagcaaatcagaagacacagcttttggtgcgggcagacaccaatttaggcaacatattgctgaacgttctgattccacccaatatgccatgtacgcgaacagggaagaataacgttcttatcgtctgtgttccaaatccaccaattgacgagaagaatgccaccatgccagtcaccatgttgattcgggtaaaaaccagcgaggatgcagacgagttgcacaaaattttactggagaaaaaggatgcctgaacacgcaaagtcggctgcagaattattgccaagttgctgctgcttccaccgccccttaaagttagtcagtttttcttctcttctttgacattctaagaacttatagataacttaaaacttttgtgaggaagattaatgtggccaataaaacctttaaatgttaagtgtcaagaaactgcactctcccttcttaagaactgcctaaagtgtaaaatacatttgaatgcaatttttggaagattttttaatgttcgtttattaaactaaccctaagtgatttcttcaaggactgcaatcagggtatcaatttgctttcccaaaggctcttccaacccgtgggttttggggtccaccgccaccacgagagaggcttttgaacaggtgcctggctgtgttcagaaggaagctggcctgtgtgcttctctccggtgggctcagccgacgtgtgagacttgttctgttaccaaatgaaccgggctgccacgctgtgacaggcgtttgtcctctgctttatttttactttgaagctcaaatgcgagtactaagtgttcacctcagcgttcgaatcattggcctgtaaccctgtgggctgcttcacgagaattcaggacctgcattttcattctaaaaagaaatgaacagcttgtgaaggagttttttggcttcatagtttctattcatgaggtagtgttacttctttatccccctaaagacaaaatgaagataaagggggattgccaggaatgggtttaaaagcacaaatgtggtagcttatcatctacaccatggagagtgaacccttacgaaatgaaagtcaaatgagaccatccgagaaaaagatgcgcataggcatttgtaccatgatcaaccccacgcacatgaaaactgtgaccaagtgacgtgcctgggagctttgacacacgagccgtgtgaattcactaggaaacatgtaataaagtcatggaagagaaaatcgtgtgtaaactttgcctttaactttagaccgcagtatattataatacatttgatatctgaaatatctttacttttttaagagtaagattccatatgtctgtctggaagggagccatggttattcacacgaatatccctgtcacttctccagaggtgtcaggtaactaacacgagcattctttgaagactctgggcacatgaatgatacacagaattgaatgtttaaatttccactgagtcctcatgaatcatttgagactagtaccagctgatcttgtgtacaggctcagggtcagtgcccaagggctcccgcgtgtgtgttctgatcttcagtgcgtagcacattctccatttagaaaagagtggtcagaataattgtggacggtacagtggctttttaaaactacagtctttaggtgtaaggtttggcgccgggagcaattttatgatcaaatatgatgaactcctaagtcactgaggtgtgattgggccaatgttggcatgaggttcttgctctacttccagtgttttgattccactgggagaatttggcctagtgtgtggctttggatgaatccgtgtagagagaggtgagcttgtcctgttacagatgctgtcagacatagcgatagtaggcacctagggaggaagtggccgttagttttacactgactttttaagaatggagaatgcacgtgggtttctgttgcggatgattcatagtaagcaagcggttgatgctgttaataccggccccacccgattgacattaagtttattcagcttttaaaaagatgaagaactaaggggaacaaatttaagtttgttgcaacttagccacacatgcttccctggtaccagctggaatcagcagctcacaggcatcttcaggacacttcagtgtatatgacacagtactttgttagcgtctgcgtgtgtatggaaagttgacaaaaaatggcatgaaaagatcatgattggattttcttttaaacctgcccttctgtaaaaaatagtttatatatttttaaattagtaggtatgtgtggcttccttttttcctaacattcccagcaaatttttgctgctaagactatcactgttaaagtgaaaattacagggaaaaatgtgatgaatataccgtaactcaaaatgtgatattttcttaaaatcactcttttatgctttaggaactggttggtctccactttgattattagtgtaaagagcctgagtatacgtggatttcattgtaaaatttaactccttgtcttttacttggggcacggggcccctggagggcttccctactttccccactatgttaacaggtaattctgatttatgcgtttagtttgacttatttttaacaaaatattagaagttatgctttaaaatgtttaatgtggactgaaattttcatcttttgtttgagaatctatgaagtgtatcatatacgtggcctaaagcaaggtgtgtattttgttattctgaaattgttttgcatctggacaaatactaaatatcccagtggcctttttttttttttttttaaaacctgtgtatccatctcatccttttgcgcattcctagtaagcaaaaaaatttgttatgccatcttcattattcgaattacagactgaaaaaatatggccagtttttaaagaagtttagattatgttttccatggaaggacaagtctgactgttcataggctgattttctttaagaggattattctgttttacaatttcaattctagatcacattttatatatgctgcatgccaaaaaaaaaaaaaagagaaaactgccttttctggtgtggaggggaagaaaaactaatattctaccttactagtagagttcaaaacaagttttcactgagagccttttcagtaaaagttaaacaagtttgttttttgagcatttgtcagttattctatttcagaagagtcaaaattcaagcacgatacattttgaaggctttgcaaactcctaaacccctgatgagtcctctcattctggaagtgggaatttgagtagatactgatttgtcccgtagtatggcagatgacagggaggtcttttccaagcaggcactcagaacacaggtcaccgtatgttctcagccagtaacaatcatactgaggacgaaggactctccgtttgatgcagacacaattgtaatggagatgtaaaacttcttagcaatcagatggataaattgtttgctttttactttaaataggaaattgttttctaaaactaaaatacttgaattgtcagacaatataatctcagcttgtattagtttttgaatgctcccatcgaggaagtgtaacaatccatgaaatgtgaataaatgaaaagtaaacaaaa

SEQ ID NO: 20893 - DNA, 1895 bp, Homo sapiens
  source 1..1895: mol_type = unassigned DNA
ggggtgggatgacagcggcgacgcagccccggctgtttttgaagcggggcccgggccccaccgggctgcggcgtccgactcgagtgagactctcccctgcggccccgccggaggttcgaaaacatggccaaaagaaatgccgagaaggaactgacagataggaattgggatcaagaagatgaagctgaagagggtaaaagaagggctataaactaaagccgaagatattcagcagctttctgacgtggacatcagaagtgtggacatgagtgtgctttgagcgcactgtggaagagcagtggttgtccagcaaggtcctaggtgcctccgtggcctttcgtacagtgggcaagttgggcaggactcatcttaaaaatcatgtgtgggaacattctccatggccagtgaggaagtcttgaagaatagagccataaagaaagcaaagcgcagaaatgttggatttgaatctgacactggaggagcctttaaaggttttaaaggtttggtggtaccttctggaggaggacgcttttctggatttggtagtggcgctggagggaagcctttggaaggactgtcgaatggaaacaacataaccagtgcccctcccttcgccagtgcaaaggcagcggcagatcccaaggtagcctttggttctcttgctgcaaatggccctaccaccttggttgataaagtttcaaatcccaaaactaatggggacagtcagcagccctcctcctctggccttgcttccagtaaagcttgtgtcggaaatgcctatcacaagcagttggccgccttgaactgctccgtgcgggattggatagtgaagcacgtgaatacaaaccccctctgtgatctgacacctatctttaaagactatgagaaatatttagcaaacattgaacagcaacacgggaacagtggcaggaattctgaaagtgaatctaacaaagtggcagctgaaacacagtctccttccctttttggctcaacaaaattacagcaagagtcaacgtttttgtttcatggcaacaaaactgaagatacacctgacaagaagatggaggtggcatctgaaaagaaaacggacccatcatcactaggagcgacaagtgcctcatttaatttcggcaagaaagttgatagctctgttttgggctcattaagctctgtccccctgactggattttctttctcccctggaaactccagtttatttggcaaagatactacccagagtaaaccagtctcttcaccatttcccactaaaccattggagggccaagcagaaggtgacagtggtgaatgcaaaggtggagatgaagaagagaatgatgagccacccaaagtagtagttaccgaagtaaaagaagaagatgctttttactccaaaaagtgtaaactgttttacaagaaagacaatgagtttaaagagaaaggcataggtactctgcatttaaaacctacagcaaatcagaagacacagcttttggtgcgggcagacaccaatttaggcaacatattgctgaacgttctgattccacccaatatgccatgtacgcgaacagggaagaataacgttcttatcgtctgtgttccaaatccaccaattgacgagaagaatgccaccatgccagtcaccatgttgattcgggtaaaaaccagcgaggatgcagacgagttgcacaaaattttactggagaaaaaggatgcctgaacacgcaaagtcggctgcagaattattgccaagttgctgctgcttccaccgccccttaaagttagtcagtttttcttctcttctttgacattctaagaacttatagataacttaaaacttttgtgaggaagattaatgtggccaataaaacctttaaatgttaagtgtcaagaaa

SEQ ID NO: 20894 - DNA, 2059 bp, Homo sapiens
  source 1..2059: mol_type = unassigned DNA
gttttgggggtagattcgagttacaaaatggccgcccggagcgtgttcggcgcggttcccccagctgtctctggctgaaccggcgctctcgcctccctgccgaacacagcgtgaggagcccccccagggatatggtgtttgagtctctgggcttgccgagcactaagtcctctgagttccgcagcgcagcaccggaagcggccgagcgcgctcagcccggcgacccctgcgggctccagacccctgcgccgctgcgccccgggtttcgccgcaaccaagacccagcgagtgcagcggcggccgccgaggaggttcgaaaacatggccaaaagaaatgccgagaaggaactgacagataggaattgggatcaagaagatgaagctgaagagggtaaaagaagggctataaactaaagccgaagatattcagcagctttctgacgtggacatcagaagtgtggacatgagtgtgctttgagcgcactgtggaagagcagtggttgtccagcaaggtcctaggtgcctccgtggcctttcgtacagtgggtgggaacattctccatggccagtgaggaagtcttgaagaatagagccataaagaaagcaaagcgcagaaatgttggatttgaatctgacactggaggagcctttaaaggttttaaaggtttggtggtaccttctggaggaggacgcttttctggatttggtagtggcgctggagggaagcctttggaaggactgtcgaatggaaacaacataaccagtgcccctcccttcgccagtgcaaaggcagcggcagatcccaaggtagcctttggttctcttgctgcaaatggccctaccaccttggttgataaagtttcaaatcccaaaactaatggggacagtcagcagccctcctcctctggccttgcttccagtaaagcttgtgtcggaaatgcctatcacaagcagttggccgccttgaactgctccgtgcgggattggatagtgaagcacgtgaatacaaaccccctctgtgatctgacacctatctttaaagactatgagaaatatttagcaaacattgaacagcaacacgggaacagtggcaggaattctgaaagtgaatctaacaaagtggcagctgaaacacagtctccttccctttttggctcaacaaaattacagcaagagtcaacgtttttgtttcatggcaacaaaactgaagatacacctgacaagaagatggaggtggcatctgaaaagaaaacggacccatcatcactaggagcgacaagtgcctcatttaatttcggcaagaaagttgatagctctgttttgggctcattaagctctgtccccctgactggattttctttctcccctggaaactccagtttatttggcaaagatactacccagagtaaaccagtctcttcaccatttcccactaaaccattggagggccaagcagaaggtgacagtggtgaatgcaaaggtggagatgaagaagagaatgatgagccacccaaagtagtagttaccgaagtaaaagaagaagatgctttttactccaaaaagtgtaaactgttttacaagaaagacaatgagtttaaagagaaaggcataggtactctgcatttaaaacctacagcaaatcagaagacacagcttttggtgcgggcagacaccaatttaggcaacatattgctgaacgttctgattccacccaatatgccatgtacgcgaacagggaagaataacgttcttatcgtctgtgttccaaatccaccaattgacgagaagaatgccaccatgccagtcaccatgttgattcgggtaaaaaccagcgaggatgcagacgagttgcacaaaattttactggagaaaaaggatgcctgaacacgcaaagtcggctgcagaattattgccaagttgctgctgcttccaccgccccttaaagttagtcagtttttcttctcttctttgacattctaagaacttatagataacttaaaacttttgtgaggaagattaatgtggccaataaaacctttaaatgttaagtgtcaagaaa

SEQ ID NO: 20895 - DNA, 584 bp, Homo sapiens
  source 1..584: mol_type = unassigned DNA
agattcgagttacaaaatggccgcccggagcgtgttcggcgcggttcccccagctgtctctggctgaaccggcgctctcgcctccctgccgaacacagcgtgaggagcccccccagggatatggtgtttgagtctctgggcttgccgagcactaagtcctctgagttccgcagcgcagcaccggaagcggccgagcgcgctcagcccggcgacccctgcgggctccagacccctgcgccgctgcgccccgggtttcgccgcaaccaagacccagcgagtgcagcggcggccgccgaggaggttcgaaaacatggccaaaagaaatgccgagaaggaactgacagataggaattgggatcaagaagatgaagctgaagagggtaaaagaagggctataaactaaagccgaagatattcagcagctttctgacgtggacatcagaagtgtggacatgagtgtgctttgagcgcactgtggaagagcagtggttgtccagcaaggtcctaggtgcctccgtggcctttcgtacagtgggcaagttgggtgggaacattctccatggccagtgaggaagtcttgaaga

SEQ ID NO: 20896 - DNA, 543 bp, Homo sapiens
  source 1..543: mol_type = unassigned DNA
cgaaaacatggccaaaagaaatgccgagaaggaactgacagataggaattgggatcaagaagatgaagctgaagaggtgggaacattctccatggccagtgaggaagtcttgaagaatagagccataaagaaagcaaagcgcagaaatgttggatttgaatctgacactggaggagcctttaaaggttttaaaggtttggtggtaccttctggaggaggacgcttttctggatttggtagtggcgctggagggaagcctttggaaggactgtcgaatggaaacaacataaccagtgcccctcccttcgccagtgcaaaggcagcggcagatcccaaggtagcctttggtggagatgaagaagagaatgatgagccacccaaagtagtagttaccgaagtaaaagaagaagatgctttttactccaaaaagtgtaaactgttttacaagaaagacaatgagtttaaagagaaaggcataggtactctgcatttaaaacctacagcaaatcagaagacacagcttttggtgcgggcagacaccaa

SEQ ID NO: 20897 - DNA, 579 bp, Homo sapiens
  source 1..579: mol_type = unassigned DNA
ttttgggggtagattcgagttacaaaatggccgcccggagcgtgttcggcgcggttcccccagctgtctctggctgaaccggcgctctcgcctccctgccgaacacagcgtgaggagcccccccagggatatggtgtttgagtctctgggcttgccgagcactaagtcctctgagttccgcagcgcagcaccggaagcggccgagcgcgctcagcccggcgacccctgcgggctccagacccctgcgccgctgcgccccgggtttcgccgcaaccaagacccagcgagtgcagcggcggccgccgaggagatggagtcttgctctgtcacataggctggagtgcattggcgcgatctcagctcactgcaacctccacctcctgggttcaagagattctcctgcctcagcctccggagtagctgggattacaggttcgaaaacatggccaaaagaaatgccgagaaggaactgacagataggaattgggatcaagaagatgaagctgaagaggtgggaacattctccatggccagtgaggaagtcttgaagaatagagccataaagaaagcaaagcgcag

SEQ ID NO: 20898 - DNA, 2030 bp, Homo sapiens
  source 1..2030: mol_type = unassigned DNA
attcgagttacaaaatggccgcccggagcgtgttcggcgcggttcccccagctgtctctggctgaaccggcgctctcgcctccctgccgaacacagcgtgaggagcccccccagggatatggtgtttgagtctctgggcttgccgagcactaagtcctctgagttccgcagcgcagcaccggaagcggccgagcgcgctcagcccggcgacccctgcgggctccagacccctgcgccgctgcgccccgggtttcgccgcaaccaagacccagcgagtgcagcggcggccgccgaggaggttcgaaaacatggccaaaagaaatgccgagaaggaactgacagataggaattgggatcaagaagatgaagctgaagaggtgggaacattctccatggccagtgaggaagtcttgaagaatagagccataaagaaagcaaagcgcagaaatgttggatttgaagttctcttgctgcaaatggccctaccaccttggttgataaagtttcaaatcccaaaactaatggggacagtcagcagccctcctcctctggccttgcttccagtaaagcttgtgtcggaaatgcctatcacaagcagttggccgccttgaactgctccgtgcgggattggatagtgaagcacgtgaatacaaaccccctctgtgatctgacacctatctttaaagactatgagaaatatttagcaaacattgaacagcaacacgggaacagtggcaggaattctgaaagtgaatctaacaaagtggcagctgaaacacagtctccttccctttttggctcaacaaaattacagcaagagtcaacgtttttgtttcatggcaacaaaactgaagatacacctgacaagaagatggaggtggcatctgaaaagaaaacggacccatcatcactaggagcgacaagtgcctcatttaatttcggcaagaaagttgatagctctgttttgggctcattaagctctgtccccctgactggattttctttctcccctggaaactccagtttatttggcaaagatactacccagagtaaaccagtctcttcaccatttcccactaaaccattggagggccaagcagaaggtgacagtggtgaatgcaaaggtggagatgaagaagagaatgatgagccacccaaagtagtagttaccgaagtaaaagaagaagatgctttttactccaaaaagtgtaaactgttttacaagaaagacaatgagtttaaagagaaaggcataggtactctgcatttaaaacctacagcaaatcagaagacacagcttttggtgcgggcagacaccaatttaggcaacatattgctgaacgttctgattccacccaatatgccatgtacgcgaacagggaagaataacgttcttatcgtctgtgttccaaatccaccaattgacgagaagaatgccaccatgccagtcaccatgttgattcgggtaaaaaccagcgaggatgcagacgagttgcacaaaattttactggagaaaaaggatgcctgaacacgcaaagtcggctgcagaattattgccaagttgctgctgcttccaccgccccttaaagttagtcagtttttcttctcttctttgacattctaagaacttatagataacttaaaacttttgtgaggaagattaatgtggccaataaaacctttaaatgttaagtgtcaagaaactgcactctcccttcttaagaactgcctaaagtgtaaaatacatttgaatgcaatttttggaagattttttaatgttcgtttattaaactaaccctaagtgatttcttcaaggactgcaatcagggtatcaatttgctttcccaaaggctcttccaacccgtgggttttggggtccaccgccaccacgagagaggcttttgaacaggtgcctggctgtgttcagaaggaagctggcctgtgtgcttctctccggtgggctcagccgacgtgtgagacttgttctgttaccaaatgaaccgggctgccacgctgtgacaggcgtttgt

SEQ ID NO: 20899 - DNA, 537 bp, Homo sapiens
  source 1..537: mol_type = unassigned DNA
ttcgagttacaaaatggccgcccggagcgtgttcggcgcggttcccccagctgtctctggctgaaccggcgctctcgcctccctgccgaacacagcgtgaggagcccccccagggatatggtgtttgagtctctgggcttgccgagcactaagtcctctgagttccgcagcgcagcaccggaagcggccgagcgcgctcagcccggcgacccctgcgggctccagacccctgcgccgctgcgccccgggtttcgccgcaaccaagacccagcgagtgcagcggcggccgccgaggaggttcgaaaacatggccaaaagaaatgccgagaaggaactgacagataggaattgggatcaagaagatgaagctgaagaggtgggaacattctccatggccagtgaggaagtcttgaagaatagagccataaagaaagcaaagcgcagaaatgttggatttgaagttctcttgctgcaaatggccctaccaccttggttgataaagtttcaaatcccaaaactaatggggacagtcagcag

SEQ ID NO: 20900 - DNA, 551 bp, Homo sapiens
  source 1..551: mol_type = unassigned DNA
gtttttgaagcggggcccgggccccaccgggctgcggcgtccgactcgagtgagactctcccctgcggccccgccggaggtagggggctggcagggctgtcctggcgtggtcttctccgtttccttcctagcgattcctctcgagcttcctctccccctggccgcccctcgtctctcttctcttgggcgcattacctctctggcctgtcttactgcgttcccgggttattcatcacccatttgctcggttccattaagaaccagcttggagattagatgaagaaactgaggcacaaaaattaaatataacttgcccaagttctcacagctagaaaatggcaaaactgggatgccagcatcttttagtattttttgaaatactttatgctcactggggaaatacttccccagctcactgatctaatgacagacaggacacctgctgtttgagctgggcactgttggggcatttggagtatatctgtaaacaaaacaaagatccctgcgttttggttatatactgatttggttcgaaaacatggccaaaagaa

SEQ ID NO: 20901 - DNA, 443 bp, Homo sapiens
  source 1..443: mol_type = unassigned DNA
gggcggggcgcgcggtgggggagcgacgggtggagggtggggtgggatgacagcggcgacgcagccccggctgtttttgaagcggggcccgggccccaccgggctgcggcgtccgactcgagtgagactctcccctgcggccccgccggagatgaagaaactgaggcacaaaaattaaatataacttgcccaagttctcacagctagaaaatggcaaaactgggatgccagcatcttttagtattttttgaaatactttatgctcactggggaaatacttccccagctcactgatctaatgacagacaggacacctgctgtttgagctgggcactgttggggcatttggagtatatctgtaaacaaaacaaagatccctgcgttttggttatatactgatttggttcgaaaacatggccaaaagaaatgccgagaaggaactg

SEQ ID NO: 20902 - DNA, 2367 bp, Homo sapiens
  source 1..2367: mol_type = unassigned DNA
cttggcgccttccggcctcttaggctaggtcagaaaggaggcggaactcggtgatctgactggcggtttcccggccggactgagaaggggagcgcgctgcgcgtcgcaggagtaacctacttggtctcctgctttcgcgacatggccttcaattttggggctccctcgggcacctccggtaccgctgcagccaccgcggcccccgcgggtgggtttggaggatttgggacaacatctacaactgcaggttctgcattcagcttttctgccccaactaacacaggcactactggactctttggtggtactcagaacaaaggttttggatttggtactggttttggcacaacaacgggaactagtactggtttaggtactggtttgggaactggactgggatttggaggatttaatacacagcagcagcagcaaactacattaggtggtctcttcagtcagcctacacaagctcctacccagtccaaccagctgataaatactgcgagtgctctttctgctccaacgctgttgggagatgagagagatgctattttggcaaaatggaatcaactgcaggccttttggggaacaggaaaagggtatttcaacaataatattccgccagtggaattcacacaagaaaatcccttttgccgatttaaggcagtaggttatagttgcatgcccagtaataaagatgaagatgggctagtggttttagttttcaacaaaaaagaaacagagattcgaagccaacaacaacagttggtagaatcattgcataaagttttgggaggaaaccagacccttactgtaaatgtagagggcactaaaacattgccagatgatcagacagaagttgttatttatgttgttgagcgttcgccaaatggtacttcaagaagagttccagctacaacgctatatgcccattttgaacaagccaatataaaaacacaattgcagcaacttggtgtaaccctttctatgactagaacagaactttctcctgcacagatcaaacagcttttacagaatcctcctgctggtgttgatcctattatctgggaacaggccaaggtagataaccctgattctgaaaagttaattcctgtaccaatggtgggttttaaggaacttctccgaagactgaaggttcaagatcagatgactaagcagcatcaaaccagattagatatcatatctgaagatattagtgagctacaaaagaatcaaactacatctgtagccaaaattgcacaatacaagaggaaactcatggatctttcccatagaactttacaggtcctaatcaaacaggaaattcaaaggaagagtggttatgccattcaggctgatgaagagcagttgcgagttcagctggatacgattcagggtgaactaaatgcacctactcagttcaagggccgactaaatgaattgatgtctcaaatcaggatgcagaatcattttggagcagtcagatctgaagaaaggtattacatagatgcagatctgttacgagaaatcaagcagcatttgaaacaacaacaggaaggccttagccatttgattagcatcattaaagacgatctagaagatataaagctggtcgaacatggattgaatgaaaccatccacatcagaggtggtgtctttagttgacagttcacaaacttgtgtaaaggtttgtgaaatgcatcttcttactgcatcagaccttccttaagaatgaaaccgaccacatggagggaaaaagaaaacaattctttcttggattggttttttgagaagtttactgacaaattactgttcatcaaatctgaaatagtcacctcacagctcttcaaagaaaacctttgaaagatttatatctaaaagctgtatttactttaaaagaagtgcataattaccaaaattgtatgtactattgtacatttttacaacagcattttcttaaacataatctgtgtttaatgattattgtccattgagcctgtactctgctttccataccaagtaaatatgaaataatctactttgcacataacagaacaaactataattacttggctgttggagatttgtacttgagtataaatgtacaccagtttttgtatttgtgaactcatctgtgggaggagtaaagaaaatccaaaagcatttaatgttttgtttttgttctataaagatatgaaaatgtatttttatattattttacttatttggaatttacagagcacacctaagcaattaggatataacaaaactacttaaccatttttgcaaccattttgttttttaagcctttttatttctaaaaagatgaaaacttataaataaattcttaatttgtaattactttta

SEQ ID NO: 20903 - DNA, 2142 bp, Homo sapiens
  source 1..2142: mol_type = unassigned DNA
ctacttggtctcctgctttcgcgacatggccttcaattttggggctccctcgggcacctccggtaccgctgcagccaccgcggcccccgcgggtgggtttggaggatttgggacaacatctacaactgcaggttctgcattcagcttttctgccccaactaacacaggcactactggactctttggtggtactcagaacaaaggttttggatttggtactggttttggcacaacaacgggaactagtactggtttaggtactggtttgggaactggactgggatttggaggatttaatacacagcagcagcagcaaactacattaggtggtctcttcagtcagcctacacaagctcctacccagtccaaccagctgataaatactgcgagtgctctttctgctccaacgctgttgggagatgagagagatgctattttggcaaaatggaatcaactgcaggccttttggggaacaggaaaagggtatttcaacaataatattccgccagtggaattcacacaagaaaatcccttttgccgatttaaggcagtaggttatagttgcatgcccagtaataaagatgaagatgggctagtggttttagttttcaacaaaaaagaaacagagattcgaagccaacaacaacagttggtagaatcattgcataaagttttgggaggaaaccagacccttactgtaaatgtagagggcactaaaacattgccagatgatcagacagaagttgttatttatgttgttgagcgttcgccaaatggtacttcaagaagagttccagctacaacgctatatgcccattttgaacaagccaatataaaaacacaattgcagcaacttggtgtaaccctttctatgactagaacagaactttctcctgcacagatcaaacagcttttacagaatcctcctgctggtgttgatcctattatctgggaacaggccaaggtagataaccctgattctgaaaagttaattcctgtaccaatggtgggttttaaggaacttctccgaagactgaaggttcaagatcagatgactaagcagcatcaaaccagattagatgtcctaatcaaacaggaaattcaaaggaagagtggttatgccattcaggctgatgaagagcagttgcgagttcagctggatacgattcagggtgaactaaatgcacctactcagttcaagggccgactaaatgaattgatgtctcaaatcaggatgcagaatcattttggagcagtcagatctgaagaaaggtattacatagatgcagatctgttacgagaaatcaagcagcatttgaaacaacaacaggaaggccttagccatttgattagcatcattaaagacgatctagaagatataaagctggtcgaacatggattgaatgaaaccatccacatcagaggtggtgtctttagttgacagttcacaaacttgtgtaaaggtttgtgaaatgcatcttcttactgcatcagaccttccttaagaatgaaaccgaccacatggagggaaaaagaaaacaattctttcttggattggttttttgagaagtttactgacaaattactgttcatcaaatctgaaatagtcacctcacagctcttcaaagaaaacctttgaaagatttatatctaaaagctgtatttactttaaaagaagtgcataattaccaaaattgtatgtactattgtacatttttacaacagcattttcttaaacataatctgtgtttaatgattattgtccattgagcctgtactctgctttccataccaagtaaatatgaaataatctactttgcacataacagaacaaactataattacttggctgttggagatttgtacttgagtataaatgtacaccagtttttgtatttgtgaactcatctgtgggaggagtaaagaaaatccaaaagcatttaatgttttgtttttgttctataaagatatgaaaatgtatttttatattattttacttatttggaatttacagagcacacctaagcaattaggatataacaaaactacttaaccatttttgcaaccattttgttttttaagcctttttatttctaaaaagatgaaaacttataaataaattcttaatttgtaattactttt

SEQ ID NO: 20904 - DNA, 1385 bp, Homo sapiens
  source 1..1385: mol_type = unassigned DNA
acttggtctcctgctttcgcgacatggccttcaattttggggctccctcgggcacctccggtaccgctgcagccaccgcggcccccgcgggtgggtttggaggatttgggacaacatctacaactgcaggttctgcattcagcttttctgccccaactaacacaggcactactggactctttggtggtactcagaacaaaggttttggatttggtactggttttggcacaacaacgggaactagtactggtttaggtactggtttgggaactggactgggatttggaggatttaatacacagcagcagcagcaaactagcagtaggttatagttgcatgcccagtaataaagatgaagatgggctagtggttttagttttcaacaaaaaagaaacagagattcgaagccaacaacaacagttggtagaatcattgcataaagttttgggaggaaaccagacccttactgtaaatgtagagggcactaaaacattgccagatgatcagacagaagttgttatttatgttgttgagcgttcgccaaatggtacttcaagaagagttccagctacaacgctatatgcccattttgaacaagccaatataaaaacacaattgcagcaacttggtgtaaccctttctatgactagaacagaactttctcctgcacagatcaaacagcttttacagaatcctcctgctggtgttgatcctattatctgggaacaggccaaggtagataaccctgattctgaaaagttaattcctgtaccaatggtgggttttaaggaacttctccgaagactgaaggttcaagatcagatgactaagcagcatcaaaccagattagatatcatatctgaagatattagtgagctacaaaagaatcaaactacatctgtagccaaaattgcacaatacaagaggaaactcatggatctttcccatagaactttacaggtcctaatcaaacaggaaattcaaaggaagagtggttatgccattcaggctgatgaagagcagttgcgagttcagctggatacgattcagggtgaactaaatgcacctactcagttcaagggccgactaaatgaattgatgtctcaaatcaggatgcagaatcattttggagcagtcagatctgaagaaaggtattacatagatgcagatctgttacgagaaatcaagcagcatttgaaacaacaacaggaaggccttagccatttgattagcatcattaaagacgatctagaagatataaagctggtcgaacatggattgaatgaaaccatccacatcagaggtggtgtctttagttgacagttcacaaacttgtgtaaaggtttgtgaaatgcatcttcttactgcatcagaccttccttaag

SEQ ID NO: 20905 - DNA, 1563 bp, Homo sapiens
  source 1..1563: mol_type = unassigned DNA
acttggtctcctgctttcgcgacatggccttcaattttggggctccctcgggcacctccggtaccgctgcagccaccgcggcccccgcgggtgggtttggaggatttgggacaacatctacaactgcaggttctgcattcagcttttctgccccaactaacacaggcactactgcattaggtggtctcttcagtcagcctacacaagctcctacccagtccaaccagctgataaatactgcgagtgctctttctgctccaacgctgttgggagatgagagagatgctattttggcaaaatggaatcaactgcaggccttttggggaacaggaaaagggtatttcaacaataatattccgccagtggaattcacacaagaaaatcccttttgccgatttaaggcagtaggttatagttgcatgcccagtaataaagatgaagatgggctagtggttttagttttcaacaaaaaagaaacagagattcgaagccaacaacaacagttggtagaatcattgcataaagttttgggaggaaaccagacccttactgtaaatgtagagggcactaaaacattgccagatgatcagacagaagttgttatttatgttgttgagcgttcgccaaatggtacttcaagaagagttccagctacaacgctatatgcccattttgaacaagccaatataaaaacacaattgcagcaacttggtgtaaccctttctatgactagaacagaactttctcctgcacagatcaaacagcttttacagaatcctcctgctggtgttgatcctattatctgggaacaggccaaggtagataaccctgattctgaaaagttaattcctgtaccaatggtgggttttaaggaacttctccgaagactgaaggttcaagatcagatgactaagcagcatcaaaccagattagatatcatatctgaagatattagtgagctacaaaagaatcaaactacatctgtagccaaaattgcacaatacaagaggaaactcatggatctttcccatagaactttacaggtcctaatcaaacaggaaattcaaaggaagagtggttatgccattcaggctgatgaagagcagttgcgagttcagctggatacgattcagggtgaactaaatgcacctactcagttcaagggccgactaaatgaattgatgtctcaaatcaggatgcagaatcattttggagcagtcagatctgaagaaaggtattacatagatgcagatctgttacgagaaatcaagcagcatttgaaacaacaacaggaaggccttagccatttgattagcatcattaaagacgatctagaagatataaagctggtcgaacatggattgaatgaaaccatccacatcagaggtggtgtctttagttgacagttcacaaacttgtgtaaaggtttgtgaaatgcatcttcttactgcatcagaccttccttaagaatgaaaccgaccacatggagggaaaaagaaaacaattctttcttggattggttttttgagaagtttactgacaaattactgttcatcaaatctg

SEQ ID NO: 20906 - DNA, 1961 bp, Homo sapiens
  source 1..1961: mol_type = unassigned DNA
cgctcccggcctcagcatattttattaataggaactctggggcccagtctcatttcttccttaccacttgtaagagccgcagacgttggactgtccaacacctgctgtcattcttctgtctccctcatccctctaaagtgtctgtttccagctatcctcatcttccattccaaatgatgggtgcccaggccccatcccctggcagggattcagacatcgaggccccagctgcgtccttttctccatcccttgcccttggcttcctttcaaaccgtccttcagcttccactggataggaactatctcccaaccctgccaaaaatggaagatctccgttttcgtttagtcacagggtagccatcttgccccttctcatgcactgggccctcctccaccagccgaggtggatgtccgtcttttctctgttgcagaaacccaccttgtcccatccacatcaggacatcccagctggagttcaaccttcatcccttctgtggcagttaggagactgaatcaaggtccagagaaggtggaggaatcctgatactgagcgaaatcttcccaaggctgcagacaccgacggatttgctttgggagccagagtagctgccgccaccagagtccggagccatgagcgggtttaattttggaggcactggggcccctacaggcgggttcacgtttggcactgcaaagacggcaacaaccacacctgctacagggttttctttctccacctctggcactggagggtttaattttggggctcccttccaaccagccacaagtaccccttccaccggcctgttctcacttgccacccagactccggccacacagacgacaggcttcacttttggaacagcgactcttgcttcggggggaactggattttctttggggatcggtgcttcaaagctcaacttgagcaacacagctgccaccccagccatggcaaaccccagcggctttgggctgggcagcagcaacctcactaatgccatatcgagcaccgtcacctccagccagggcacagcacccaccggctttgtgtttggcccctccaccacctctgtggctccagctaccacatctggaggcttctcattcactggtggaagcacggcccaaccctccggtttcaacattggctcagcagggaattcagcccagcccacggcacctgccacgttgcccttcactccagcctaggcaacagagactctgtctcaaaaaaaaaaaaaaaaaaaaagaaactcccaggagacagcagcctagttttcgagtgtgagcttgtgcttgtgaaagctaaccatgctaaccaccaaggcaaagcagcacagtgtgaatagaacagagcgggatcaagaatttcacagaagacaggtcagctgaggggcctgcacacacagggtgttgaggaaccacagatgggcgccgagaggcctgccttttgcctggcccaggctcacccccaccttgggcctcacctcctccaggaagccttcccagctacccgaagctcaggtggccttcttgcaggtccccgtagcaccctgagcctgtaccttgggtggcacttgttatgctatcctgtgctagccgtttgtgcctcgtctcgctgttagattgtgagttcccatgggcagagacccactgtcgttccccgtgtgtccccagcccggtccctgtcacatttgttaaatgaaagaacaatgaagcccagtgtaacgtcagtccacagaaatagccacagcttccagtggtggccgtagacttggctcggaacttagtggcaccagagtaactctagtcagttacagtaaaatccactgtgtgtggaaggcagaagctagcggttgtatcccaagcatcttttgtatttgtctttatactttgctgaattctctgaaatacctattactgtatgttgcttttctaaataaatgtattgtgaaacc

SEQ ID NO: 20907 - DNA, 3415 bp, Homo sapiens
  source 1..3415: mol_type = unassigned DNA
actacttctgcgcctgcgcgaccgtgattccccgctcgcgactccccaccccccagggctccctaaagagggccacgagctgcgaaagggcgggaaaggcagttggagaagaggtaagcggttactcactccatggctgcagcaaggagaggcggcggcggcctcggctgaagaaagaaggtgggagcggagagcgcaggcgtgccgaggtggatgtccgtcttttctctgttgcagaaacccaccttgtcccatccacatcaggacatcccagctggagttcaaccttcatcccttctgtggcagttaggagactgaatcaaggtccagagaaggtggaggaatcctgatactgagcgaaatcttcccaaggctgcagacaccgacggatttgctttgggagccagagtagctgccgccaccagagtccggagccatgagcgggtttaattttggaggcactggggcccctacaggcgggttcacgtttggcactgcaaagacggcaacaaccacacctgctacagggttttctttctccacctctggcactggagggtttaattttggggctcccttccaaccagccacaagtaccccttccaccggcctgttctcacttgccacccagactccggccacacagacgacaggcttcacttttggaacagcgactcttgcttcggggggaactggattttctttggggatcggtgcttcaaagctcaacttgagcaacacagctgccaccccagccatggcaaaccccagcggctttgggctgggcagcagcaacctcactaatgccatatcgagcaccgtcacctccagccagggcacagcacccaccggctttgtgtttggcccctccaccacctctgtggctccagctaccacatctggaggcttctcattcactggtggaagcacggcccaaccctccggtttcaacattggctcagcagggaattcagcccagcccacggcacctgccacgttgcccttcactccggccacgccagcagccaccacagcaggtgccacacagccagctgctcccacacccacagccaccatcaccagcactgggcccagcctctttgcgtcaatagcaactgctccaacctcatctgccaccactggactctccctctgtacccctgtgaccacagcgggcgcccccactgctgggacacagggcttcagcttaaaggcacctggagcagcttccggcacctccacaacaacatccaccgctgccaccgccaccgccaccaccaccagcagcagcagcaccaccggctttgccttgaatttaaaaccactggcgccagccgggatccccagcaatacagcagctgccgtgaccgctccacctggccctggcgcagctgcaggggcggctgccagctccgccatgacctacgcgcagctggagagcctgatcaacaaatggagcctggagctagaggaccaggagcggcacttcctccagcaggccacccaggtcaacgcctgggaccgcacgctgatcgagaatggagaaaagatcaccagcctgcaccgcgaggtggagaaggtgaagctggaccagaagaggctggaccaggagctcgacttcatcctgtcccagcagaaggagctggaagacctgctgagcccactggaggagttggtcaaggagcagagcgggaccatctacctgcagcacgcggatgaggagcgtgagaaaacctacaagctggctgagaacatcgatgcacagctcaagcgcatggcccaggatctcaaggacatcatcgagcacctgaacacgtccggggcccccgccgacaccagtgacccactgcagcagatctgcaagatcctcaatgcgcacatggactcactgcagtggatcgaccagaactcggccctgctgcagaggaaggtggaggaggtgaccaaggtgtgcgagggccggcgcaaggagcaggagcgcagcttccggatcacctttgactgagcgacagcagccctggggcccgcaggtccctagggagttcatgaggggaatgcgccctgttgtctgtagtttggggttgtggcaagatacttgtttgtttgtttctttctttcacatgactgcccttgacatgatcgctgtgtgctttgcgtttttccatttaggagggtattctgggccttctgcccaggcagcagcctcatgggtgtggcttctgtggctttcatttgagtatctttggccccttttcacctactgcgaccacccacctcatcctggctcagcctggtgatggagaagtgctgatggtcttggtcccagccagggtcgtgggggcagccactctctccaaagcatagtcataggtgtcatgaaaaaataccaaatgtaagagaacctccaagtcagggcgcagtggctcacccctgtaatctcagcactttgggtggccaaggcgggcagatgacttgaggtcaggagttcgagaccagcctggccaacatggtgaaaccccgtctctactaaaaatacaaaaattagtcaggtgtggtggacgcctgtgatctcaatctcagctactcgggaggctgaggcaggagaatcacttgaacccaggaggtgttgcagtgaaccaagatcacaccactgcactccagcctaggcaacagagactctgtctcaaaaaaaaaaaaaaaaaaaaagaaactcccaggagacagcagcctagttttcgagtgtgagcttgtgcttgtgaaagctaaccatgctaaccaccaaggcaaagcagcacagtgtgaatagaacagagcgggatcaagaatttcacagaagacaggtcagctgaggggcctgcacacacagggtgttgaggaaccacagatgggcgccgagaggcctgccttttgcctggcccaggctcacccccaccttgggcctcacctcctccaggaagccttcccagctacccgaagctcaggtggccttcttgcaggtccccgtagcaccctgagcctgtaccttgggtggcacttgttatgctatcctgtgctagccgtttgtgcctcgtctcgctgttagattgtgagttcccatgggcagagacccactgtcgttccccgtgtgtccccagcccggtccctgtcacatttgttaaatgaaagaacaatgaagcccagtgtaacgtcagtccacagaaatagccacagcttccagtggtggccgtagacttggctcggaacttagtggcaccagagtaactctagtcagttacagtaaaatccactgtgtgtggaaggcagaagctagcggttgtatcccaagcatcttttgtatttgtctttatactttgctgaattctctgaaatacctattactgtatgttgcttttctaaataaatgtattgtgaaacc

SEQ ID NO: 20908 - DNA, 3236 bp, Homo sapiens
  source 1..3236: mol_type = unassigned DNA
actacttctgcgcctgcgcgaccgtgattccccgctcgcgactccccaccccccagggctccctaaagagggccacgagctgcgaaagggcgggaaaggcagttggagaagaggtaagcggttactcactccatggctgcagcaaggagaggcggcggcggcctcggctgaagaaagaagaaatcttcccaaggctgcagacaccgacggatttgctttgggagccagagtagctgccgccaccagagtccggagccatgagcgggtttaattttggaggcactggggcccctacaggcgggttcacgtttggcactgcaaagacggcaacaaccacacctgctacagggttttctttctccacctctggcactggagggtttaattttggggctcccttccaaccagccacaagtaccccttccaccggcctgttctcacttgccacccagactccggccacacagacgacaggcttcacttttggaacagcgactcttgcttcggggggaactggattttctttggggatcggtgcttcaaagctcaacttgagcaacacagctgccaccccagccatggcaaaccccagcggctttgggctgggcagcagcaacctcactaatgccatatcgagcaccgtcacctccagccagggcacagcacccaccggctttgtgtttggcccctccaccacctctgtggctccagctaccacatctggaggcttctcattcactggtggaagcacggcccaaccctccggtttcaacattggctcagcagggaattcagcccagcccacggcacctgccacgttgcccttcactccggccacgccagcagccaccacagcaggtgccacacagccagctgctcccacacccacagccaccatcaccagcactgggcccagcctctttgcgtcaatagcaactgctccaacctcatctgccaccactggactctccctctgtacccctgtgaccacagcgggcgcccccactgctgggacacagggcttcagcttaaaggcacctggagcagcttccggcacctccacaacaacatccaccgctgccaccgccaccgccaccaccaccagcagcagcagcaccaccggctttgccttgaatttaaaaccactggcgccagccgggatccccagcaatacagcagctgccgtgaccgctccacctggccctggcgcagctgcaggggcggctgccagctccgccatgacctacgcgcagctggagagcctgatcaacaaatggagcctggagctagaggaccaggagcggcacttcctccagcaggccacccaggtcaacgcctgggaccgcacgctgatcgagaatggagaaaagatcaccagcctgcaccgcgaggtggagaaggtgaagctggaccagaagaggctggaccaggagctcgacttcatcctgtcccagcagaaggagctggaagacctgctgagcccactggaggagttggtcaaggagcagagcgggaccatctacctgcagcacgcggatgaggagcgtgagaaaacctacaagctggctgagaacatcgatgcacagctcaagcgcatggcccaggatctcaaggacatcatcgagcacctgaacacgtccggggcccccgccgacaccagtgacccactgcagcagatctgcaagatcctcaatgcgcacatggactcactgcagtggatcgaccagaactcggccctgctgcagaggaaggtggaggaggtgaccaaggtgtgcgagggccggcgcaaggagcaggagcgcagcttccggatcacctttgactgagcgacagcagccctggggcccgcaggtccctagggagttcatgaggggaatgcgccctgttgtctgtagtttggggttgtggcaagatacttgtttgtttgtttctttctttcacatgactgcccttgacatgatcgctgtgtgctttgcgtttttccatttaggagggtattctgggccttctgcccaggcagcagcctcatgggtgtggcttctgtggctttcatttgagtatctttggccccttttcacctactgcgaccacccacctcatcctggctcagcctggtgatggagaagtgctgatggtcttggtcccagccagggtcgtgggggcagccactctctccaaagcatagtcataggtgtcatgaaaaaataccaaatgtaagagaacctccaagtcagggcgcagtggctcacccctgtaatctcagcactttgggtggccaaggcgggcagatgacttgaggtcaggagttcgagaccagcctggccaacatggtgaaaccccgtctctactaaaaatacaaaaattagtcaggtgtggtggacgcctgtgatctcaatctcagctactcgggaggctgaggcaggagaatcacttgaacccaggaggtgttgcagtgaaccaagatcacaccactgcactccagcctaggcaacagagactctgtctcaaaaaaaaaaaaaaaaaaaaagaaactcccaggagacagcagcctagttttcgagtgtgagcttgtgcttgtgaaagctaaccatgctaaccaccaaggcaaagcagcacagtgtgaatagaacagagcgggatcaagaatttcacagaagacaggtcagctgaggggcctgcacacacagggtgttgaggaaccacagatgggcgccgagaggcctgccttttgcctggcccaggctcacccccaccttgggcctcacctcctccaggaagccttcccagctacccgaagctcaggtggccttcttgcaggtccccgtagcaccctgagcctgtaccttgggtggcacttgttatgctatcctgtgctagccgtttgtgcctcgtctcgctgttagattgtgagttcccatgggcagagacccactgtcgttccccgtgtgtccccagcccggtccctgtcacatttgttaaatgaaagaacaatgaagcccagtgtaacgtcagtccacagaaatagccacagcttccagtggtggccgtagacttggctcggaacttagtggcaccagagtaactctagtcagttacagtaaaatccactgtgtgtggaaggcagaagctagcggttgtatcccaagcatcttttgtatttgtctttatactttgctgaattctctgaaatacctattactgtatgttgcttttctaaataaatgtattgtgaaacc

SEQ ID NO: 20909 - DNA, 3260 bp, Homo sapiens
  source 1..3260: mol_type = unassigned DNA
actacttctgcgcctgcgcgaccgtgattccccgctcgcgactccccaccccccagggctccctaaagagggccacgagctgcgaaagggcgggaaaggcagttggagaagaggtaagcggttactcactccatggctgcagcaaggagaggcggcggcggcctcggctgaagaaagaaggtgggagcggagagcgcaggcgtgaaatcttcccaaggctgcagacaccgacggatttgctttgggagccagagtagctgccgccaccagagtccggagccatgagcgggtttaattttggaggcactggggcccctacaggcgggttcacgtttggcactgcaaagacggcaacaaccacacctgctacagggttttctttctccacctctggcactggagggtttaattttggggctcccttccaaccagccacaagtaccccttccaccggcctgttctcacttgccacccagactccggccacacagacgacaggcttcacttttggaacagcgactcttgcttcggggggaactggattttctttggggatcggtgcttcaaagctcaacttgagcaacacagctgccaccccagccatggcaaaccccagcggctttgggctgggcagcagcaacctcactaatgccatatcgagcaccgtcacctccagccagggcacagcacccaccggctttgtgtttggcccctccaccacctctgtggctccagctaccacatctggaggcttctcattcactggtggaagcacggcccaaccctccggtttcaacattggctcagcagggaattcagcccagcccacggcacctgccacgttgcccttcactccggccacgccagcagccaccacagcaggtgccacacagccagctgctcccacacccacagccaccatcaccagcactgggcccagcctctttgcgtcaatagcaactgctccaacctcatctgccaccactggactctccctctgtacccctgtgaccacagcgggcgcccccactgctgggacacagggcttcagcttaaaggcacctggagcagcttccggcacctccacaacaacatccaccgctgccaccgccaccgccaccaccaccagcagcagcagcaccaccggctttgccttgaatttaaaaccactggcgccagccgggatccccagcaatacagcagctgccgtgaccgctccacctggccctggcgcagctgcaggggcggctgccagctccgccatgacctacgcgcagctggagagcctgatcaacaaatggagcctggagctagaggaccaggagcggcacttcctccagcaggccacccaggtcaacgcctgggaccgcacgctgatcgagaatggagaaaagatcaccagcctgcaccgcgaggtggagaaggtgaagctggaccagaagaggctggaccaggagctcgacttcatcctgtcccagcagaaggagctggaagacctgctgagcccactggaggagttggtcaaggagcagagcgggaccatctacctgcagcacgcggatgaggagcgtgagaaaacctacaagctggctgagaacatcgatgcacagctcaagcgcatggcccaggatctcaaggacatcatcgagcacctgaacacgtccggggcccccgccgacaccagtgacccactgcagcagatctgcaagatcctcaatgcgcacatggactcactgcagtggatcgaccagaactcggccctgctgcagaggaaggtggaggaggtgaccaaggtgtgcgagggccggcgcaaggagcaggagcgcagcttccggatcacctttgactgagcgacagcagccctggggcccgcaggtccctagggagttcatgaggggaatgcgccctgttgtctgtagtttggggttgtggcaagatacttgtttgtttgtttctttctttcacatgactgcccttgacatgatcgctgtgtgctttgcgtttttccatttaggagggtattctgggccttctgcccaggcagcagcctcatgggtgtggcttctgtggctttcatttgagtatctttggccccttttcacctactgcgaccacccacctcatcctggctcagcctggtgatggagaagtgctgatggtcttggtcccagccagggtcgtgggggcagccactctctccaaagcatagtcataggtgtcatgaaaaaataccaaatgtaagagaacctccaagtcagggcgcagtggctcacccctgtaatctcagcactttgggtggccaaggcgggcagatgacttgaggtcaggagttcgagaccagcctggccaacatggtgaaaccccgtctctactaaaaatacaaaaattagtcaggtgtggtggacgcctgtgatctcaatctcagctactcgggaggctgaggcaggagaatcacttgaacccaggaggtgttgcagtgaaccaagatcacaccactgcactccagcctaggcaacagagactctgtctcaaaaaaaaaaaaaaaaaaaaagaaactcccaggagacagcagcctagttttcgagtgtgagcttgtgcttgtgaaagctaaccatgctaaccaccaaggcaaagcagcacagtgtgaatagaacagagcgggatcaagaatttcacagaagacaggtcagctgaggggcctgcacacacagggtgttgaggaaccacagatgggcgccgagaggcctgccttttgcctggcccaggctcacccccaccttgggcctcacctcctccaggaagccttcccagctacccgaagctcaggtggccttcttgcaggtccccgtagcaccctgagcctgtaccttgggtggcacttgttatgctatcctgtgctagccgtttgtgcctcgtctcgctgttagattgtgagttcccatgggcagagacccactgtcgttccccgtgtgtccccagcccggtccctgtcacatttgttaaatgaaagaacaatgaagcccagtgtaacgtcagtccacagaaatagccacagcttccagtggtggccgtagacttggctcggaacttagtggcaccagagtaactctagtcagttacagtaaaatccactgtgtgtggaaggcagaagctagcggttgtatcccaagcatcttttgtatttgtctttatactttgctgaattctctgaaatacctattactgtatgttgcttttctaaataaatgtattgtgaaacc

SEQ ID NO: 20910 - DNA, 2311 bp, Homo sapiens
  source 1..2311: mol_type = unassigned DNA
cggtactctgagtgcagtcagtcctcggcgctgttttccctgatttgctgtcgacgccaggaaggaaggacgcgtgcagaggaccgcagaggggtggccgtggctgagaggagacagcgccgcagcactgagggtttgggcttgcaggcgctgcaggagacgcccaggcggagtcttgtctcgcagccagctctgagcgggaggcctgagcgggaagcattggcgtccgagcgacttctaggagcctggggttcggcgctatggaggagctcgatggcgagccaacagtcactttgattccaggcgtgaattccaagaagaaccaaatgtattttgactggggtccaggggagatgctggtatgtgaaacctccttcaacaaaaaagaaaaatcagagatggtgccaagttgcccctttatctatatcatccgtaaggatgtagatgtttactctcaaatcttgagaaaactcttcaatgaatcccatggaatctttctgggcctccagagaattgacgaagagttgactggaaaatccagaaaatctcaattggttcgagtgagtaaaaactaccgatcagtcatcagagcatgtatggaggaaatgcaccaggttgcaattgctgctaaagatccagccaatggccgccagttcagcagccaggtctccattttgtcagcaatggagctcatctggaacctgtgtgagattctttttattgaagtggccccagctggccctctcctcctccatctccttgactgggtccggctccatgtgtgcgaggtggacagtttgtcggcagatgttctgggcagtgagaatccaagcaaacatgacagcttctggaacttggtgaccatcttggtgctgcagggccggctggatgaggcccgacagatgctctccaaggaagccgatgccagccccgcctctgcaggcatatgccgaatcatgggggacctgatgaggacaatgcccattcttagtcccgggaacacccagacactgacagagctggagctgaagtggcagcactggcacgaggaatgtgagcggtacctccaggacagcacattcgccaccagccctcacctggagtctctcttgaagattatgctgggagacgaagctgccttgttagagcagaaggaacttctgagtaattggtatcatttcctagtgactcggctcttgtactccaatcccacagtaaaacccattgatctgcactactatgcccagtccagcctggacctgtttctgggaggtgagagcagcccagaacccctggacaacatcttgttggcagcctttgagtttgacatccatcaagtaatcaaagagtgcagcatcgccctgagcaactggtggtttgtggcccacctgacagacctgctggaccactgcaagctcctccagtcacacaacctctatttcggttccaacatgagagagttcctcctgctggagtacgcctcgggactgtttgctcatcccagcctgtggcagctgggggtcgattactttgattactgccccgagctgggccgagtctccctggagctgcacattgagcggatacctctgaacaccgagcagaaagccctgaaggtgctgcggatctgtgagcagcggcagatgactgaacaagttcgcagcatttgtaagatcttagccatgaaagccgtccgcaacaatcgcctgggttctgccctctcttggagcatccgtgctaaggatgccgcctttgccacgctcgtgtcagacaggttcctcagggattactgtgagcgaggctgcttttctgatttggatctcattgacaacctggggccagccatgatgctcagtgaccgactgacattcctgggaaagtatcgcgagttccaccgtatgtacggggagaagcgttttgccgacgcagcttctctccttctgtccttgatgacgtctcggattgcccctcggtctttctggatgactctgctgacagacgccttgccccttttggaacagaaacaggtgattttctcagcagaacagacttatgagttgatgcggtgtctggaggacttgacgtcaagaagacctgtgcatggagaatctgataccgagcagctccaggatgatgacatagagaccaccaaggtggaaatgctgagactttctctggcacgaaatcttgctcgggcaattataagagaaggctcactggaaggttcctgagaactgcttcaatgtggtatctttgtatggcaatgtatatagatttttttaaaagaataaatgttgttttgcaaatgtag

SEQ ID NO: 20911 - DNA, 2233 bp, Homo sapiens
  source 1..2233: mol_type = unassigned DNA
attggcgtccgagcgacttctaggagcctggggttcggcgctatggaggagctcgatggcgagccaacagtcactttgattccaggcgtgaattccaagaagaaccaaatgtattttgactggggtccaggggagatgctggtatgtgaaacctccttcaacaaaaaagaaaaatcagagatggtgccaagttgcccctttatctatatcatccgtaaggatgtagatgtttactctcaaatcttgagaaaactcttcaatgaatcccatggaatctttctgggcctccagagaattgacgaagagttgactggaaaatccagaaaatctcaattggttcgagtgagtaaaaactaccgatcagtcatcagagcatgtatggaggaaatgcaccaggttgcaattgctgctaaagatccagccaatggccgccagttcagcagccaggtctccattttgtcagcaatggagctcatctggaacctgtgtgagattctttttattgaagtggccccaggtgaccatcttggtgctgcagggccggctggatgaggcccgacagatgctctccaaggaagccgatgccagccccgcctctgcaggcatatgccgaatcatgggggacctgatgaggacaatgcccattcttagtcccgggaacacccagacactgacagagctggagctgaagtggcagcactggcacgaggaatgtgagcggtacctccaggacagcacattcgccaccagccctcacctggagtctctcttgaagattatgctgggagacgaagctgccttgttagagcagaaggaacttctgagtaattggtatcatttcctagtgactcggctcttgtactccaatcccacagtaaaacccattgatctgcactactatgcccagtccagcctggacctgtttctgggaggtgagagcagcccagaacccctggacaacatcttgttggcagcctttgagtttgacatccatcaagtaatcaaagagtgcagcatcgccctgagcaactggtggtttgtggcccacctgacagacctgctggaccactgcaagctcctccagtcacacaacctctatttcggttccaacatgagagagttcctcctgctggagtacgcctcgggactgtttgctcatcccagcctgtggcagctgggggtcgattactttgattactgccccgagctgggccgagtctccctggagctgcacattgagcggatacctctgaacaccgagcagaaagccctgaaggtgctgcggatctgtgagcagcggcagatgactgaacaagttcgcagcatttgtaagatcttagccatgaaagccgtccgcaacaatcgcctgggttctgccctctcttggagcatccgtgctaaggatgccgcctttgccacgctcgtgtcagacaggttcctcagggattactgtgagcgaggctgcttttctgatttggatctcattgacaacctggggccagccatgatgctcagtgaccgactgacattcctgggaaagtatcgcgagttccaccgtatgtacggggagaagcgttttgccgacgcagcttctctccttctgtccttgatgacgtctcggattgcccctcggtctttctggatgactctgctgacagacgccttgccccttttggaacagaaacaggtgaaggttgcagcagcagtggttttctttgcttgtcagtccctgctagagcttagttgtatagctgttgccgatgtgcgtgtttcctcctttgtcgttctgcctgtgcgcgtgtattccccttagcgccctctctgggattccagactcacacaggaaacaaacactgcttgatttgaaatgaggtattcgtatacaaagcacactattgcgaagggtatgaaaggaagaacgtccgaacatgggcccctgccccaaccaatgcaggccagggctgggggcagccaagcaaggcaggctctcttccctaggtgattttctcagcagaacagacttatgagttgatgcggtgtctggaggacttgacgtcaagaagacctgtgcatggagaatctgataccgagcagctccaggatgatgacatagagaccaccaaggtggaaatgctgagactttctctggcacgaaatcttgctcgggcaattataagagaaggctcactggaaggttcctgagaactgcttcaatgtggtatctttgtatggc

SEQ ID NO: 20912 - DNA, 1287 bp, Homo sapiens
  source 1..1287: mol_type = unassigned DNA
gagcgggaagcattggcgtccgagcgacttctaggagcctggggttcggcgctatggaggagctcgatggcgagccaacagtcactaaaaatcagagatggtgccaagttgcccctttatctatatcatccgtaaggatgtagatgtttactctcaaatcttgagaaaactcttcaatgaatcccatggaatctttctgggcctccagagaattgacgaagagttgactggaaaatccagaaaatctcaattggttcgagtgagtaaaaactaccgatcagtcatcagagcatgtatggaggaaatgcaccaggttgcaattgctgctaaagatccagccaatggccgccagttcagcagccaggtctccattttgtcagcaatggagctcatctggaacctgtgtgagattctttttattgaagtggccccagctggccctctcctcctccatctccttgactgggtccggctccatgtgtgcgaggtggacagtttgtcggcagatgttctgggcagtgagaatccaagcaaacatgacagcttctggaacttggtgaccatcttggtgctgcagggccggctggatgaggcccgacagatgctctccaaggaagccgatgccagccccgcctctgcaggcatatgccgaatcatgggggacctgatgaggacaatgcccattcttagtcccgggaacacccagacactgacagagctggagctgaagtggcagcactggcacgaggaatgtgagcggtacctccaggacagcacattcgccaccagccctcacctggagtctctcttgaagattatgctgggagacgaagctgccttgttagagcagaaggaacttctgagtaattggtatcatttcctagtgactcggctcttgtactccaatcccacagtaaaacccattgatctgcactactatgcccagtccagcctggacctgtttctgggaggtgagagcagcccagaacccctggacaacatcttgttggcagcctttgagtttgacatccatcaagtaatcaaagagtgcagggatgttcatttaaaataacatcgcgggaaactactttgacatttaaaatctagaaaaagccagcaagcctgtttcttggcacctaatggacaccttatgggatggcgtgttccaagagtctcactccagtgacgtgagctaccgaaccactgggcttcaggctgggtattattcagaatttccagccctctatccaaaagagggtgttctatgattgcactgaatctttagca

SEQ ID NO: 20913 - DNA, 1926 bp, Homo sapiens
  source 1..1926: mol_type = unassigned DNA
tttaggaataaaacagatttgagcagaagaagtctgttggatgcagggagtataaaaggggaaagcatcctgctgtttccagtggcagaagagaaagagaagtaccatgaagaggggtgaacaacatcactctcgtgccggacacagacaaggaatgattaggcttgcagtcccccagtctcagcctctctccactctcacaagcaggaagggatctgagctctgttagtgggaaatcttggagtttgcatttctctgatcacgaggctacctcctatcctgttttgaaagaggaacagaaaagcagagcttgtcccaggaattgtgaaatgggctgcaatgtcttcagaggcagtagcagttttaggaagtgtgccctcctggctctggggaaaggttgaattggggtcttgtgggcacttgttttctcatgggatgtatcagtcagacccatgcacagttctgggcggcagggaagtgtgtctctttctggacttgagccagtgagctgttggcatgcctttttaaaggcattagaaaaaaggtttctttcttttttttcctttcctgttcacaccaccttcatatgaacatggagaagggaggtttctaagtgggcccctgatttactcctatgtcaataatcgtgccagaccctaaggggcagaaaaggcagccaggggatcctgactcagaggctgtagttcgtcagccctgctaaagggccaggggtttgtctctcagtgcctgggtgggcatgcttgactgctaaccccttagctgaaaggagatggcaggagtcctccacagggtcccttcttccctcctggcttacagcttcctctgaagacgggccagttccttgctgtctggcaagaggaaacagctggggtgcacttcactgggagttgggcaagatgtcggcagtttcctggtgcccttcaagtcctccaaaagtatcgagctaaaagcatcgccctgagcaactggtggtttgtggcccacctgacagacctgctggaccactgcaagctcctccagtcacacaacctctatttcggttccaacatgagagagttcctcctgctggagtacgcctcgggactgtttgctcatcccagcctgtggcagctgggggtcgattactttgattactgccccgagctgggccgagtctccctggagctgcacattgagcggatacctctgaacaccgagcagaaagccctgaaggtgctgcggatctgtgagcagcggcagatgactgaacaagttcgcagcatttgtaagatcttagccatgaaagccgtccgcaacaatcgcctgggttctgccctctcttggagcatccgtgctaaggatgccgcctttgccacgctcgtgtcagacaggttcctcagggattactgtgagcgaggctgcttttctgatttggatctcattgacaacctggggccagccatgatgctcagtgaccgactgacattcctgggaaagtatcgcgagttccaccgtatgtacggggagaagcgttttgccgacgcagcttctctccttctgtccttgatgacgtctcggattgcccctcggtctttctggatgactctgctgacagacgccttgccccttttggaacagaaacaggtgattttctcagcagaacagacttatgagttgatgcggtgtctggaggacttgacgtcaagaagacctgtgcatggagaatctgataccgagcagctccaggatgatgacatagagaccaccaaggtggaaatgctgagactttctctggcacgaaatcttgctcgggcaattataagagaaggctcactggaaggttcctgagaactgcttcaatgtggtatctttgtatggcaatgtatatagatttttttaaaagaataaatgttgttttgcaaatgt

SEQ ID NO: 20914 - DNA, 2010 bp, Homo sapiens
  source 1..2010: mol_type = unassigned DNA
ctgagcgggaagcattggcgtccgagcgacttctaggagcctggggttcggcgctatggaggagctcgatggcgagccaacagtcactaaaaatcagagatggtgccaagttgcccctttatctatatcatccgtaaggatgtagatgtttactctcaaatcttgagaaaactcttcaatgaatcccatggaatctttctgggcctccagagaattgacgaagagttgactggaaaatccagaaaatctcaattggttcgagtgagtaaaaactaccgatcagtcatcagagcatgtatggaggaaatgcaccaggttgcaattgctgctaaagatccagccaatggccgccagttcagcagccaggtctccattttgtcagcaatggagctcatctggaacctgtgtgagattctttttattgaagtggccccagctggccctctcctcctccatctccttgactgggtccggctccatgtgtgcgaggtggacagtttgtcggcagatgttctgggcagtgagaatccaagcaaacatgacagcttctggaacttggtgaccatcttggtgctgcagggccggctggatgaggcccgacagatgctctccaaggaagccgatgccagccccgcctctgcaggcatatgccgaatcatgggggacctgatgaggacaatgcccattcttagtcccgggaacacccagacactgacagagctggagctgaagtggcagcactggcacgaggaatgtgagcggtacctccaggacagcacattcgccaccagccctcacctggagtctctcttgaagattatgctgggagacgaagctgccttgttagagcagaaggaacttctgagtaattggtatcatttcctagtgactcggctcttgtactccaatcccacagtaaaacccattgatctgcactactatgcccagtccagcctggacctgtttctgggaggtgagagcagcccagaacccctggacaacatcttgttggcagcctttgagtttgacatccatcaagtaatcaaagagtgcagcatcgccctgagcaactggtggtttgtggcccacctgacagacctgctggaccactgcaagctcctccagtcacacaacctctatttcggttccaacatgagagagttcctcctgctggagtacgcctcgggactgtttgctcatcccagcctgtggcagctgggggtcgattactttgattactgccccgagctgggccgagtctccctggagctgcacattgagcggatacctctgaacaccgagcagaaagccctgaaggtgctgcggatctgtgagcagcggcagatgactgaacaagttcgcagcatttgtaagatcttagccatgaaagccgtccgcaacaatcgcctgggttctgccctctcttggagcatccgtgctaaggatgccgcctttgccacgctcgtgtcagacaggttcctcagggattactgtgagcgaggctgcttttctgatttggatctcattgacaacctggggccagccatgatgctcagtgaccgactgacattcctgggaaagtatcgcgagttccaccgtatgtacggggagaagcgttttgccgacgcagcttctctccttctgtccttgatgacgtctcggattgcccctcggtctttctggatgactctgctgacagacgccttgccccttttggaacagaaacaggtgattttctcagcagaacagacttatgagttgatgcggtgtctggaggacttgacgtcaagaagacctgtgcatggagaatctgataccgagcagctccaggatgatgacatagagaccaccaaggtggaaatgctgagactttctctggcacgaaatcttgctcgggcaattataagagaaggctcactggaaggttcctgagaactgcttcaatgtggtatctttgtatggcaatgtatatagatttttttaaaagaataaatgttgttttgcaaatgt

SEQ ID NO: 20915 - DNA, 2436 bp, Homo sapiens
  source 1..2436: mol_type = unassigned DNA
aactggagtgaggggagcagttgggccaagatggcggccgccgagggaccggtgggcgacggcgagctgtggcagacctggcttcctaaccacgtcgtgttcttgcggctccgggagggactgaaaaaccagagtccaaccgaagctgagaaaccagcttcttcgtcgttgccttcgtcgccgccgccgcagttgctgacgagaaacgtggtctttggcctcggcggagagcttttcctgtgggacggagaagacagctccttcttagtcgttcgccttcggggccccagcggcggcggcgaagagcccgccctgtcccagtaccagagattgctttgcataaatccacccctgtttgaaatctatcaagtcttgttaagcccaacacaacatcatgtagcacttataggaataaaaggacttatggtattagaattacctaaaagatgggggaagaattctgaatttgaaggtggaaaatcaacagtgaattgtagtaccactccagttgcggagagatttttcaccagttccacctctctgactctaaagcatgctgcatggtatccaagtgaaatcctggatccccacgtagtgctgttaacatcagacaacgtaatcagaatttactcactacgtgagccgcagacacccactaacgtgataatactttcagaagccgaagaggaaagtctagtactcaataaaggaagggcgtataccgcatctctaggagagacagcagttgcatttgactttgggccattggcagcagtcccaaagactctatttggacaaaacggcaaagatgaagtagtggcatacccactgtacatcttatatgaaaatggagagactttcctgacatacatcagtctgttacacagccctggaaatattggaaagctgttgggtccattgcccatgcatcctgcggctgaagataactatggttatgatgcgtgtgctgtactctgcttaccctgtgtccccaatatcttagtgatcgctactgaatcaggaatgctgtatcactgtgtcgtgctagaaggggaagaagaagatgaccacacgtcagaaaagtcctgggattccaggattgacctcattccttctctgtatgtgtttgaatgtgttgagttggagcttgctttgaaactggcatctggagaggatgacccttttgattctgacttttcttgtccagtcaaacttcatagagatcccaagtgtccttcaagatatcactgtactcatgaagctggtgtacatagtgttgggctaacttggattcataaacttcacaaatttcttggatcagatgaagaagataaggatagtttacaggaactctctacagaacagaaatgctttgttgaacacatcctttgtacgaagccattgccctgcaggcagccagctccaattcgaggattttggattgtacctgacattctgggacccacgatgatctgcatcaccagtacctatgaatgcctcatatggccgttattaagtacagtccatccagcgtctcctcccctgctttgtactcgagaagatgttgaagtggcagagtctcccctccgtgttctggctgaaaccccagattcctttgaaaagcatattagaagcattttgcaacgtagtgttgccaatccagcatttttgaaagcttctgaaaaggacatagcccctcctcctgaagaatgccttcagctcctcagcagagccacccaggtgttcagagagcagtacattctcaaacaggacttggcaaaggaggagattcagcggagggtcaaattattatgtgaccaaaaaaagaaacaactagaagatctcagttattgtcgagaagagaggaaaagtctgcgggaaatggctgagcgtttagctgacaaatatgaggaagctaaagaaaaacaagaggatatcatgaacaggatgaaaaaactacttcacagttttcactctgagctcccagttctctctgatagtgagcgagacatgaagaaagaattacagctgatacctgatcaacttcgacatttgggcaatgccatcaaacaggttactatgaaaaaggattatcaacagcaaaagatggagaaggtgttgagtcttccaaaacccaccattattctcagtgcctaccagcgaaagtgcattcagtccatcctgaaagaggagggtgaacatataagggaaatggtgaagcaaatcaatgatatccgcaatcatgtaaacttctgacaccaccaggagctgactcacacctgaactgaacaccattgaaggcttaaacccatattgtaaaacaggtagaattatctaatttataaaaaggtgttttgatgacctttggtgtggttcatctttttaaatatgttgttttataataattgagtaaatgcttttatttaaaatttggaa

SEQ ID NO: 20916 - DNA, 2244 bp, Homo sapiens
  source 1..2244: mol_type = unassigned DNA
agttgggccaagatggcggccgccgagggaccggtgggcgacggcgagctgtggcctcggcggagagcttttcctgtgggacggagaagacagctccttcttagtcgttcgccttcggggccccagcggcggcggcgaagagcccgccctgtcccagtaccagagattgctttgcataaatccacccctgtttgaaatctatcaagtcttgttaagcccaacacaacatcatgtagcacttataggaataaaaggacttatggtattagaattacctaaaagatgggggaagaattctgaatttgaaggtggaaaatcaacagtgaattgtagtaccactccagttgcggagagatttttcaccagttccacctctctgactctaaagcatgctgcatggtatccaagtgaaatcctggatccccacgtagtgctgttaacatcagacaacgtaatcagaatttactcactacgtgagccgcagacacccactaacgtgataatactttcagaagccgaagaggaaagtctagtactcaataaaggaagggcgtataccgcatctctaggagagacagcagttgcatttgactttgggccattggcagcagtcccaaagactctatttggacaaaacggcaaagatgaagtagtggcatacccactgtacatcttatatgaaaatggagagactttcctgacatacatcagtctgttacacagccctggaaatattggaaagctgttgggtccattgcccatgcatcctgcggctgaagataactatggttatgatgcgtgtgctgtactctgcttaccctgtgtccccaatatcttagtgatcgctactgaatcaggaatgctgtatcactgtgtcgtgctagaaggggaagaagaagatgaccacacgtcagaaaagtcctgggattccaggattgacctcattccttctctgtatgtgtttgaatgtgttgagttggagcttgctttgaaactggcatctggagaggatgacccttttgattctgacttttcttgtccagtcaaacttcatagagatcccaagtgtccttcaagatatcactgtactcatgaagctggtgtacatagtgttgggctaacttggattcataaacttcacaaatttcttggatcagatgaagaagataaggatagtttacaggaactctctacagaacagaaatgctttgttgaacacatcctttgtacgaagccattgccctgcaggcagccagctccaattcgaggattttggattgtacctgacattctgggacccacgatgatctgcatcaccagtacctatgaatgcctcatatggccgttattaagtacagtccatccagcgtctcctcccctgctttgtactcgagaagatgttgaagtggcagagtctcccctccgtgttctggctgaaaccccagattcctttgaaaagcatattagaagcattttgcaacgtagtgttgccaatccagcatttttgaattgttttactcagctaaggaaaataaaggtagaaactttgtttttaagagcttctgaaaaggacatagcccctcctcctgaagaatgccttcagctcctcagcagagccacccaggtgttcagagagcagtacattctcaaacaggacttggcaaaggaggagattcagcggagggtcaaattattatgtgaccaaaaaaagaaacaactagaagatctcagttattgtcgagaagagaggaaaagtctgcgggaaatggctgagcgtttagctgacaaatatgaggaagctaaagaaaaacaagaggatatcatgaacaggatgaaaaaactacttcacagttttcactctgagctcccagttctctctgatagtgagcgagacatgaagaaagaattacagctgatacctgatcaacttcgacatttgggcaatgccatcaaacaggttactatgaaaaaggattatcaacagcaaaagatggagaaggtgttgagtcttccaaaacccaccattattctcagtgcctaccagcgaaagtgcattcagtccatcctgaaagaggagggtgaacatataagggaaatggtgaagcaaatcaatgatatccgcaatcatgtaaacttctgacaccaccaggagctgactcacacctgaactgaacaccattgaaggcttaaacccatattgtaaaacaggtagaattatctaatttataaaaaggtgttttgatg

SEQ ID NO: 20917 - DNA, 2916 bp, Homo sapiens
  source 1..2916: mol_type = unassigned DNA
acagacccctgggaggtgtactttccgggtgcagaccgcgaatggatcgcagcgtattctgggaagtgttgttttatcgaccggccccacgtggagacagatttaggcatccaagcgaaatgcgtgaggccagcccgacctgcactgagggaggtaagtcttgagggaaagttctggatgcctgggtttacccagatggaggtgtccaataggcaattagatacacaagtctcaggctctccccaggtgctagatttccagcagcaccaccattatgttgacttctcgtcccgcccccttgggcttcagaaataatggtgattggctttcccttggtgacgcccctgcttggtgggctggcctcgccttcgccccccgacctggcacgagcctctcgagcttccgggccgtctgctcggtgattggccgaaacagtgagtggacggccgcggattggctgtgctcagcggcgggctgagcaactggagtgaggggagcagttgggccaagatggcggccgccgagggaccggtgggcgacggcgagctgtggcagacctggcttcctaaccacgtcgtgttcttgcggctccgggagggactgaaaaaccagagtccaaccgaagctgagaaaccagcttcttcgtcgttgccttcgtcgccgccgccgcagttgctgacgagaaacgtggtctttggcctcggcggagagcttttcctgtgggacggagaagacagctccttcttagtcgttcgccttcggggccccagcggcggcggcgaagagcccgccctgtcccagtaccagagattgctttgcataaatccacccctgtttgaaatctatcaagtcttgttaagcccaacacaacatcatgtagcacttataggaataaaaggacttatggtattagaattacctaaaagatgggggaagaattctgaatttgaaggtggaaaatcaacagtgaattgtagtaccactccagttgcggagagatttttcaccagttccacctctctgactctaaagcatgctgcatggtatccaagtgaaatcctggatccccacgtagtgctgttaacatcagacaacgtaatcagaatttactcactacgtgagccgcagacacccactaacgtgataatactttcagaagccgaagaggaaagtctagtactcaataaaggaagggcgtataccgcatctctaggagagacagcagttgcatttgactttgggccattggcagcagtcccaaagactctatttggacaaaacggcaaagatgaagtagtggcatacccactgtacatcttatatgaaaatggagagactttcctgacatacatcagtctgttacacagccctggaaatattggaaagctgttgggtccattgcccatgcatcctgcggctgaagataactatggttatgatgcgtgtgctgtactctgcttaccctgtgtccccaatatcttagtgatcgctactgaatcaggaatgctgtatcactgtgtcgtgctagaaggggaagaagaagatgaccacacgtcagaaaagtcctgggattccaggattgacctcattccttctctgtatgtgtttgaatgtgttgagttggagcttgctttgaaactggcatctggagaggatgacccttttgattctgacttttcttgtccagtcaaacttcatagagatcccaagtgtccttcaagatatcactgtactcatgaagctggtgtacatagtgttgggctaacttggattcataaacttcacaaatttcttggatcagatgaagaagataaggatagtttacaggaactctctacagaacagaaatgctttgttgaacacatcctttgtacgaagccattgccctgcaggcagccagctccaattcgaggattttggattgtacctgacattctgggacccacgatgatctgcatcaccagtacctatgaatgcctcatatggccgttattaagtacagtccatccagcgtctcctcccctgctttgtactcgagaagatgttgaagtggcagagtctcccctccgtgttctggctgaaaccccagattcctttgaaaagcatattagaagcattttgcaacgtagtgttgccaatccagcatttttgaaagcttctgaaaaggacatagcccctcctcctgaagaatgccttcagctcctcagcagagccacccaggtgttcagagagcagtacattctcaaacaggacttggcaaaggaggagattcagcggagggtcaaattattatgtgaccaaaaaaagaaacaactagaagatctcagttattgtcgagaagagaggaaaagtctgcgggaaatggctgagcgtttagctgacaaatatgaggaagctaaagaaaaacaagaggatatcatgaacaggatgaaaaaactacttcacagttttcactctgagctcccagttctctctgatagtgagcgagacatgaagaaagaattacagctgatacctgatcaacttcgacatttgggcaatgccatcaaacaggttactatgaaaaaggattatcaacagcaaaagatggagaaggtgttgagtcttccaaaacccaccattattctcagtgcctaccagcgaaagtgcattcagtccatcctgaaagaggagggtgaacatataagggaaatggtgaagcaaatcaatgatatccgcaatcatgtaaacttctgacaccaccaggagctgactcacacctgaactgaacaccattgaaggcttaaacccatattgtaaaacaggtagaattatctaatttataaaaaggtgttttgatgacctttggtgtggttcatctttttaaatatgttgttttataataattgagtaaatgcttttatttaaaatttggaa

SEQ ID NO: 20918 - DNA, 2902 bp, Homo sapiens
  source 1..2902: mol_type = unassigned DNA
aatcaggaagcgggggagagcggcgcgagaagcggcggccgcgtcctcaagccggcacctgagcggcggagacggctgtagcacaaggatctgcatctccaatggatactgaggggtttggtgagctccttcagcaagctgaacagcttgctgctgagactgagggcatctcagagcttccccatgtggaacggaacttacaggagatccagcaggcgggagagcgcctgcgttcccgtaccctaacacgcacgtcccaggagacggcagatgtcaaggcgtcagttctcctcgggtctcggggacttgacatatcccacatctcccagcgattggagagtctgagtgcagccaccacctttgagcctcttgagcctgtgaaggacactgacattcagggcttcctgaagaatgagaaggacaatgccctgctgtctgccatcgaagagtcccggaagaggaccttcggcatggctgaggagtaccatcgggagtcaatgttggttgagtgggagcaagtgaaacagcgaattctgcacacactgctggcatcaggagaagacgcccttgactttactcaagaaagcgagccaagctacatcagtgatgtgggaccccctggtcgaagctctctggataacatcgagatggcctatgcgcggcaaatttatatctataatgagaaaattgtaaatggacacctgcagcctaacctggtggacctttgtgcttccgtcgcagagctcgatgataagagcatttccgacatgtggaccatggtaaaacaaatgacagacgtgttgttgacaccggcaacggatgccctgaagaaccgcagcagcgtggaagtgcgcatggagtttgtcaggcaggccttggcgtaccttgagcagagttataagaattacacccttgtgactgtctttggaaatttgcatcaggcccagctgggcggggtgcctgggacttaccaattggttcgaagtttcctgaacattaaactgccagctcccttgcctggactacaggatggagaggtggaaggccatcctgtgtgggcgctaatttactactgcatgcgctgtggagacctgcttgccgcttcacaggtagttaatcgagcccagcaccagctgggagagtttaaaacctggttccaggagtacatgaacagcaaggacagaagattgtccccagctacggaaaacaagctccggctgcattaccgtagggccctcaggaacaatacagatccctacaagcgggccgtgtactgtatcattggcagatgtgacgtcaccgacaaccagagtgaagtggcggacaaaactgaggattacctgtggctgaagttgaaccaagtgtgttttgacgacgatggcaccagctccccacaagacaggctcactctctcacagttccagaagcagttgttggaagactatggcgagtcccactttacggtgaaccagcaacccttcctctacttccaagtcctgttcctgacagcgcagtttgaagcagcagttgcctttcttttccgcatggagcggctgcgctgccatgctgtccatgtagcactggtgctgtttgagctgaagctgcttttaaagtcctctggacagagtgctcagctcctcagccacgagcctggtgaccctccttgcttgcggcggctgaacttcgtgcggctcctcatgctgtacacccggaagtttgagtccacggacccaagggaggccctccagtacttctatttcctcagggatgagaaagatagtcaaggagaaaacatgtttctgcgctgtgtgagtgagcttgtgattgaaagccgagagttcgatatgattcttgggaaactagagaatgacggaagtagaaagcctggagtcatagataagtttactagtgacacaaagcctattatcaacaaagttgcttctgtggcagaaaataaaggactgtttgaagaggcagcaaagctgtatgaccttgccaagaatgctgacaaggtactggagctgatgaacaaactgctgagccctgtcgtcccccagatcagtgccccgcaatccaacaaggagaggctgaagaacatggcactctccattgccgaacggtatagggctcaaggaataagcgcaaataaatttgtggactccacgttctatcttcttttggacttgatcaccttttttgacgagtatcatagtggtcatattgatagagcttttgatatcattgagcgcttgaagctggtgcccctgaatcaggaaagtgtggaagagagagtggctgccttcagaaatttcagtgatgaaatcaggcacaacctctcagaagtgcttcttgccaccatgaacatcttgttcacacagtttaagaggctcaaggggacaagtccatcctcgtcatccaggccccagcgagtcatcgaggaccgcgactctcaactccgaagtcaagcccgcactctgattacctttgctggaatgataccataccgaacgtctggggacaccaatgcgaggctggtgcagatggaggtcctcatgaattaagtgccatgctttgtgggagtctgggtcggcacactgtcagtacatcaggcacatgggcccactaggctggggtttctggttttgtttctgttgtgttttgttttggtttctgtattatgtatttttgtcaacgccaataaatttctttgatttgtatttcttttcaacattcttttattttctttttttttttctttgaaattttgtttacatttttatttgtgtaatgggaaataccgtcactagctcttgggccagggaatgagaggctatgtagatattcattatttggttaaattgaccttaattaattaaaaatctacccaaaatgagccaggaaa

SEQ ID NO: 20919 - DNA, 2856 bp, Homo sapiens
  source 1..2856: mol_type = unassigned DNA
attgcaaagaatcgatttctgagatgagacaatgagatgtggtttgcattttgtaaagatggaggaaacctctaacactgaccctgtatgggagatgactcaattatccacgccttggtacagttgcaaattatttccctttgtctgaagtgggtggatgccagcgccttcatcagagctccttaatttaatgtatggaaaatgtctcagccaccatttttaacaattagctgtatcatggtcgaggtgagctgtattctgaaggcagctgcaaggccatttcatttacattaggttccatggcacaggagctttgttactgtaaaactaagaaaatgaatttgcacattgtatagaagagttctttaggaaggtggagaatattcccagaaagaaaatggaattcttttgtctacaggcttcctgaagaatgagaaggacaatgccctgctgtctgccatcgaagagtcccggaagaggaccttcggcatggctgaggagtaccatcgggagtcaatgttggttgagtgggagcaagtgaaacagcgaattctgcacacactgctggcatcaggagaagacgcccttgactttactcaagaaagcgagccaagctacatcagtgatgtgggaccccctggtcgaagctctctggataacatcgagatggcctatgcgcggcaaatttatatctataatgagaaaattgtaaatggacacctgcagcctaacctggtggacctttgtgcttccgtcgcagagctcgatgataagagcatttccgacatgtggaccatggtaaaacaaatgacagacgtgttgttgacaccggcaacggatgccctgaagaaccgcagcagcgtggaagtgcgcatggagtttgtcaggcaggccttggcgtaccttgagcagagttataagaattacacccttgtgactgtctttggaaatttgcatcaggcccagctgggcggggtgcctgggacttaccaattggttcgaagtttcctgaacattaaactgccagctcccttgcctggactacaggatggagaggtggaaggccatcctgtgtgggcgctaatttactactgcatgcgctgtggagacctgcttgccgcttcacaggtagttaatcgagcccagcaccagctgggagagtttaaaacctggttccaggagtacatgaacagcaaggacagaagattgtccccagctacggaaaacaagctccggctgcattaccgtagggccctcaggaacaatacagatccctacaagcgggccgtgtactgtatcattggcagatgtgacgtcaccgacaaccagagtgaagtggcggacaaaactgaggattacctgtggctgaagttgaaccaagtgtgttttgacgacgatggcaccagctccccacaagacaggctcactctctcacagttccagaagcagttgttggaagactatggcgagtcccactttacggtgaaccagcaacccttcctctacttccaagtcctgttcctgacagcgcagtttgaagcagcagttgcctttcttttccgcatggagcggctgcgctgccatgctgtccatgtagcactggtgctgtttgagctgaagctgcttttaaagtcctctggacagagtgctcagctcctcagccacgagcctggtgaccctccttgcttgcggcggctgaacttcgtgcggctcctcatgctgtacacccggaagtttgagtccacggacccaagggaggccctccagtacttctatttcctcagggatgagaaagatagtcaaggagaaaacatgtttctgcgctgtgtgagtgagcttgtgattgaaagccgagagttcgatatgattcttgggaaactagagaatgacggaagtagaaagcctggagtcatagataagtttactagtgacacaaagcctattatcaacaaagttgcttctgtggcagaaaataaaggactgtttgaagaggcagcaaagctgtatgaccttgccaagaatgctgacaaggtactggagctgatgaacaaactgctgagccctgtcgtcccccagatcagtgccccgcaatccaacaaggagaggctgaagaacatggcactctccattgccgaacggtatagggctcaaggaataagcgcaaataaatttgtggactccacgttctatcttcttttggacttgatcaccttttttgacgagtatcatagtggtcatattgatagagcttttgatatcattgagcgcttgaagctggtgcccctgaatcaggaaagtgtggaagagagagtggctgccttcagaaatttcagtgatgaaatcaggcacaacctctcagaagtgcttcttgccaccatgaacatcttgttcacacagtttaagaggctcaaggggacaagtccatcctcgtcatccaggccccagcgagtcatcgaggaccgcgactctcaactccgaagtcaagcccgcactctgattacctttgctggaatgataccataccgaacgtctggggacaccaatgcgaggctggtgcagatggaggtcctcatgaattaagtgccatgctttgtgggagtctgggtcggcacactgtcagtacatcaggcacatgggcccactaggctggggtttctggttttgtttctgttgtgttttgttttggtttctgtattatgtatttttgtcaacgccaataaatttctttgatttgtatttcttttcaacattcttttattttctttttttttttctttgaaattttgtttacatttttatttgtgtaatgggaaataccgtcactagctcttgggccagggaatgagaggctatgta

SEQ ID NO: 20920 - DNA, 2875 bp, Homo sapiens
  source 1..2875: mol_type = unassigned DNA
atgcaagatgtcggaagtcatcaaagattcacatcagagtaattgcagtggtttgggttggggaaaaaaagtatcatagcattccttgcctacatgttgtctctccccctcttaaatcttaacttggtacagtccgttaacaataaaatacccttctgtaacctataaactgttactcccatcagtttgtgctttcaaactgatggctgacttctctgaatttgtgtagcgcacaacgaatggtgatgctgtgctccgggggctgcagtgcaccctttttaaagggaccctgcaatctcattgtttaatttgactctttagtgcttcagtcacatcagcacttgcagaggggttgttcttttcctttttcttctttctctctttttctcttctctctgtccttctccccacccccatccctcaattcaggcagtttggggtgggaaaaacttgagcactggttccgacagagctcatctcatataagaaggtttggaagagctgcagtgatcgacagcatcgaccgttctgtaactccttaaatttaagagctgcagggcttcctgaagaatgagaaggacaatgccctgctgtctgccatcgaagagtcccggaagaggaccttcggcatggctgaggagtaccatcgggagtcaatgttggttgagtgggagcaagtgaaacagcgaattctgcacacactgctggcatcaggagaagacgcccttgactttactcaagaaagcgagccaagctacatcagtgatgtgggaccccctggtcgaagctctctggataacatcgagatggcctatgcgcggcaaatttatatctataatgagaaaattgtaaatggacacctgcagcctaacctggtggacctttgtgcttccgtcgcagagctcgatgataagagcatttccgacatgtggaccatggtaaaacaaatgacagacgtgttgttgacaccggcaacggatgccctgaagaaccgcagcagcgtggaagtgcgcatggagtttgtcaggcaggccttggcgtaccttgagcagagttataagaattacacccttgtgactgtctttggaaatttgcatcaggcccagctgggcggggtgcctgggacttaccaattggttcgaagtttcctgaacattaaactgccagctcccttgcctggactacaggatggagaggtggaaggccatcctgtgtgggcgctaatttactactgcatgcgctgtggagacctgcttgccgcttcacaggtagttaatcgagcccagcaccagctgggagagtttaaaacctggttccaggagtacatgaacagcaaggacagaagattgtccccagctacggaaaacaagctccggctgcattaccgtagggccctcaggaacaatacagatccctacaagcgggccgtgtactgtatcattggcagatgtgacgtcaccgacaaccagagtgaagtggcggacaaaactgaggattacctgtggctgaagttgaaccaagtgtgttttgacgacgatggcaccagctccccacaagacaggctcactctctcacagttccagaagcagttgttggaagactatggcgagtcccactttacggtgaaccagcaacccttcctctacttccaagtcctgttcctgacagcgcagtttgaagcagcagttgcctttcttttccgcatggagcggctgcgctgccatgctgtccatgtagcactggtgctgtttgagctgaagctgcttttaaagtcctctggacagagtgctcagctcctcagccacgagcctggtgaccctccttgcttgcggcggctgaacttcgtgcggctcctcatgctgtacacccggaagtttgagtccacggacccaagggaggccctccagtacttctatttcctcagggatgagaaagatagtcaaggagaaaacatgtttctgcgctgtgtgagtgagcttgtgattgaaagccgagagttcgatatgattcttgggaaactagagaatgacggaagtagaaagcctggagtcatagataagtttactagtgacacaaagcctattatcaacaaagttgcttctgtggcagaaaataaaggactgtttgaagaggcagcaaagctgtatgaccttgccaagaatgctgacaaggtactggagctgatgaacaaactgctgagccctgtcgtcccccagatcagtgccccgcaatccaacaaggagaggctgaagaacatggcactctccattgccgaacggtatagggctcaaggaataagcgcaaataaatttgtggactccacgttctatcttcttttggacttgatcaccttttttgacgagtatcatagtggtcatattgatagagcttttgatatcattgagcgcttgaagctggtgcccctgaatcaggaaagtgtggaagagagagtggctgccttcagaaatttcagtgatgaaatcaggcacaacctctcagaagtgcttcttgccaccatgaacatcttgttcacacagtttaagaggctcaaggggacaagtccatcctcgtcatccaggccccagcgagtcatcgaggaccgcgactctcaactccgaagtcaagcccgcactctgattacctttgctggaatgataccataccgaacgtctggggacaccaatgcgaggctggtgcagatggaggtcctcatgaattaagtgccatgctttgtgggagtctgggtcggcacactgtcagtacatcaggcacatgggcccactaggctggggtttctggttttgtttctgttgtgttttgttttggtttctgtattatgtatttttgtcaacgccaataaatttctttgatttgt

SEQ ID NO: 20921 - DNA, 6973 bp, Homo sapiens
  source 1..6973: mol_type = unassigned DNA
aaccgcggcggcgaggggcgggactccacggccctctcaccgctcctaccctgtgcctccccgaactccttctgcccctcctcttccctctcgccccttcccccttcagttcggtttcaaaagacgcgttgcccaatgaataacagggtcgacccagagtggcggccgcgtccaccaattcgcggacggcgagggcggagcgtccgcaacgagcctctgacgccgggcggcgtgtgacgcagtcgggccctctgcgcgctgcgcccgaagcggcggtcggtggcaggggtggtagcggcggcggcgacggtttcgtgggggccgcgcgctgctctgtgagcggcgggtggcagcaggggactcctgacacttccccttccccaccgaaccgcgctttctgaaacaaagactcattttgaagatgtttaacaaatcatttggaacaccctttgggggtggcacaggtggctttggcacaacttcaacatttggacagaatactggctttggcactactagtggaggggcatttggaacatctgcatttggttctagcaacaatactggaggcctctttggaaattcacagactaaaccaggaggattgtttggaaccagttcatttagccagccagctacctccacaagcactggctttgggtttggtacgtcaacaggaacagcaaataccttgtttggaactgcaagcacagggaccagtctcttctcatcccaaaacaatgcctttgcacaaaataaaccaactggctttggcaattttggaaccagtactagcagtggaggactctttggaaccacaaataccacctctaatccttttggcagcacatctggctccctctttgggccaagtagttttacagctgctcctactgggactactattaaatttaaccctccaactggtacagatactatggtcaaagctggagttagcactaacataagtaccaagcaccagtgtattactgctatgaaagaatatgaaagcaagtcactagaggaacttcgtttagaggattatcaggctaacaggaagggcccacagaaccaggtgggagcaggtaccacaactggcttgtttgggtcttctccagccacttccagcgcaacaggactcttcagctcctccaccactaattcaggctttgcatatggtcagaacaaaactgcctttggaactagtacaactggatttggaacaaatccaggtggtctctttggccaacagaatcagcagactaccagcctcttcagcaaaccatttggccaggctacaaccacccagaacactggcttttcctttggtaataccagcaccataggacagccaagcaccaacaccatgggattatttggagtaacccaagcctcacagcctggaggtctttttgggacagctacaaacaccagcactgggacagcatttggaacaggaacaggtctctttgggcagaccaatactggatttggtgctgttggttcgaccctgtttggcaataacaagcttactacatttggaagcagcacaaccagtgcaccttcatttggtacaaccagtggcgggctctttggttttggcacaaataccagtgggaatagtatttttggaagtaaaccagcacctgggactcttggaactgggcttggtgcaggatttggaacagctcttggtgctggacaggcatctttgtttgggaacaaccaacctaagattggagggcctcttggtacaggagcctttggggcccctggatttaatactacgacagccactttgggctttggagccccccaggccccagtagctttgacagatccaaatgcttctgctgcccagcaggctgttctccagcagcacatcaatagtctaacatactcaccttttggagactctcctctcttccggaatccgatgtcagaccctaagaagaaggaagagagattgaaaccaacaaatccagcagcccagaaggctcttactacacctactcattataaactgacaccccgccctgccactagagtccggccaaaggctttacaaacaacaggcacagccaagtcacatctctttgatgggctggatgacgatgaaccatccctagccaatggagcattcatgcccaagaagagcattaagaagttggttttgaagaaccttaataatagcaatctcttttctcctgttaatcgtgattcagaaaatctagcttcaccatctgaatatccagaaaatggagagagatttagtttcctaagcaaacctgttgatgagaatcaccagcaggatggagatgaagattcccttgtttcacatttttatactaaccctattgccaaacctattcctcaaaccccagaaagtgctggaaataaacacagcaacagcaacagtgtggatgataccattgttgcattaaacatgcgtgctgctttgcgaaatgggctggaaggaagcagtgaagaaacgtcttttcatgatgagtcacttcaggatgaccgagaagaaatagaaaataattcttaccatatgcacccagcaggtattattctcactaaggttggttactatactattccatctatggatgaccttgctaaaattaccaatgaaaaaggagagtgcattgtctctgatttcactattggtcggaaaggttatggttcaatctattttgaaggagatgtgaatttgacaaatctaaatttggatgatattgtgcatatccggaggaaagaagtagttgtctacttagatgataaccaaaaaccacctgtgggtgaagggctaaataggaaggctgaagttacattggatggagtttggccaacagataaaacatctcgttgtttaataaagagcccagatcgccttgctgatatcaactatgaaggaagattggaagcagtttcaaggaaacagggagctcaattcaaagaataccggcctgaaactggttcttgggtgtttaaggtctcccatttttctaagtatggccttcaggattctgatgaagaggaggaggagcatccgtctaaaactagtacaaagaagttgaagactgctcctttgcctcctgcaagccagactacgcccttgcagatggctcttaatggcaaacctgcacctccacctcagagccagagcccagaggtggagcagttagggagggttgtggaactggacagtgacatggtagatatcacccaggagccagttttggataccatgttagaagagagcatgcctgaggatcaggaacctgtgtctgcctcaacacatattgcatcttcactgggaattaatccacatgtcttacagatcatgaaagcatcattgcttactgatgaagaagatgtagatatggcactggatcaacgcttcagtcgcctgccttccaaagcagatacttctcaagaaatctgttctcccagactccccatttcagcatcccactcgtcgaaaactcgttcactagttggtgggttactacaatcaaaatttacaagtggagcttttctttcaccaagtgtctctgtgcaagaatgtcgtactcccagagcagcatctttaatgaatatcccatccacatcctcttggtctgtccctccacccctgacttctgtgttcacaatgcccagcccagcccctgaggttccgttgaaaacagtgggtacacgtaggcaactaggcctagtccctcgtgaaaagtctgtcacctatggcaagggaaaactcttgatggacatggccctattcatgggacgctcatttcgtgttggttggggccccaactggactcttgctaatagtggagaacagctgaatggctctcatgaactagaaaatcatcagattgccgattccatggagtttggattcctgcccaatccagtagctgttaaacccctaactgagtccccattcaaagttcacttagaaaaactcagtttgagacaaagaaagccagatgaagacatgaaattatatcagacacctctggagctcaaattaaaacacagcactgtccatgtggatgaactgtgtcctctcattgtccccaatctgggagttgctgtcattcatgactatgcagattgggttaaagaagcatcaggagacttaccagaagcacaaattgtgaagcactggagcctgacatggacactatgtgaagccctatggggccacctgaaggagcttgacagccagctaaatgaaccccgtgaatacattcaaattctggagcgaagaagagctttctcccgctggctatcctgtactgccacacctcagattgaagaggaagtctccttaacccaaaaaaacagccctgtggaggctgtattcagctacctcacaggcaaaaggatcagtgaggcctgctctctggcccagcagtcaggggatcatcgtcttgctcttcttttatctcagtttgtgggtagccagtcagtccgggagctgctcaccatgcagttggtggactggcatcagctccaagcagactccttcatccaggatgagagactgcgcatctttgctctgttggctggaaaaccggtgtggcagctctcagaaaagaagcaaataaacgtgtgctcccagttggattggaaacgctccctggctatccatctttggtatttgcttccaccaacagcctccatttctagggcgctcagcatgtatgaagaagcatttcagaatacctctgacagtgacagatatgcctgctccccacttccttcgtatctggagggttctggctgtgtgatagcggaggagcaaaactcacagacaccacttcgagatgtctgctttcaccttctaaaactctacagtgacagacattatgatctcaaccagctgctggagcctcgaagcataacagcagatcctttggactaccgcctaagctggcacttgtgggaagtgctgagggctcttaactacacccatctctcagcgcagtgtgaaggtgtgctacaggccagttacgctggccagcttgaaagtgaggggctctgggagtgggccatctttgtcctcctgcacattgacaactcaggcatacgtgagaaggctgttcgagagctgcttacccggcactgccagctgttggagacccctgaatcttgggctaaagagactttccttacccagaagctccgtgtacctgccaaatggatccacgaggccaaagctgtgcgagcacacatggaatctgacaagcacttagaggccctttgcttatttaaggctgagcactggaaccgctgccacaagctcatcatccgacacttagcttctgatgccatcattaatgagaactatgactacctgaaggggttcttggaagacctggcacctccagagcgcagcagcctaattcaggattgggaaacatctgggcttgtttacctggactatattagagtcattgaaatgctccgccatatacagcaggtggattgctcaggtaatgacctggagcagttacacatcaaagtgacttcactgtgcagtcggatagagcagattcagtgttacagtgctaaagatcgcctggctcagtcagacatggccaaacgtgtagccaacctgctgcgcgtggtgctgagtctgcatcatcctcctgatagaacctccgactcaacaccagaccctcagcgagtccctttgcgcctcttggctccccacattggccggcttcccatgcctgaggactatgccatggacgaactgcgcagccttacccagtcctatctgcgagaactggctgttgggagcctgtgagccccaggcactttgcatcacagtcacatgcccattcacaccacacagaggttccctgccttgtttggattggcactgtttgccattctctgggttggctgtggcatctaccctccctccctgctgccagaagcagcatcctccacttgttcagggcttttcttaatactgaacgtagcataagggcttctggaacccagaagaggagacagtttaccatcctcaagatcattcagtgtttttcctttaaaaaaatggtcaataaagctcctttggcagaatcccccaaagaaccagggtattctttttccatccctagccattctggatcttgtgaccctccatgccaaccagcttccctactcctaccctggcccttttatactaggactccttaggaggagtgagacaggtgataatggatccttaacagatgaactatccacagaaggaagagggatccgtctcttaagtaattggttagttaacactgaattttggaggcaaaggagggttggcctgagttaggaaacaaaatgggatctttctgacacacttagggcagaagtgaatgcctgtcacggagggattgatcttcagggctgtttttgttcctgcctttagagttccatgaacaccatacctttgctactactatgtgcaggaacccttggtcacatgtgacatgtctgtgggaagctcccagagtttggtttggtccctggttttcagtcttgctgagactctgtctggatttgcctgcagagtttggataaaaaatggcaggttgggtaaccctccctgttcatcccatgttagctccaaagcatttcccaccctccatctaccccttccagaagcaaaaacaaaccatgactgaggcaggcatggagttgggcgttaggggcaggcagagggcctttgctacactgctgacagctatagggagccccaggtaatggcatgagatagctggtgttagggctatctcaggcaatatggccacacctgggtctttatgcatgaagataatgtaaaggtttttattaaaaaatatatatatgtataaataaatgatctagatattttcctctttttctgaagctactttcttaaaaaataaataaaatgtttatagcattcctggta

SEQ ID NO: 20922 - DNA, 5628 bp, Homo sapiens
  source 1..5628: mol_type = unassigned DNA
tgtgagcggcgggtggcagcaggggactcctgacacttccccttccccaccgaaccgcgctttctgaaacaaagactcattttgaagatgtttaacaaatcatttggaacaccctttgggggtggcacaggtggctttggcacaacttcaacatttggacagaatactggctttggcactactagtggaggggcatttggaacatctgcatttggttctagcaacaatactggaggcctctttggaaattcacagactaaaccaggaggattgtttggaaccagttcatttagccagccagctacctccacaagcactggctttgggtttggtacgtcaacaggaacagcaaataccttgtttggaactgcaagcacagggaccagtctcttctcatcccaaaacaatgcctttgcacaaaataaaccaactggctttggcaattttggaaccagtactagcagtggaggactctttggaaccacaaataccacctctaatccttttggcagcacatctggctccctctttgggccaagtagttttacagctgctcctactgggactactattaaatttaaccctccaactggtacagatactatggtcaaagctggagttagcactaacataagtaccaagcaccagtgtattactgctatgaaagaatatgaaagcaagtcactagaggaacttcgtttagaggattatcaggctaacaggaagggcccacagaaccaggtgggagcaggtaccacaactggcttgtttgggtcttctccagccacttccagcgcaacaggactcttcagctcctccaccactaattcaggctttgcatatggtcagaacaaaactgcctttggaactagtacaactggatttggaacaaatccaggtggtctctttggccaacagaatcagcagactaccagcctcttcagcaaaccatttggccaggctacaaccacccagaacactggcttttcctttggtaataccagcaccataggacagccaagcaccaacaccatgggattatttggagtaacccaagcctcacagcctggaggtctttttgggacagctacaaacaccagcactgggacagcatttggaacaggaacaggtctctttgggcagaccaatactggatttggtgctgttggttcgaccctgtttggcaataacaagcttactacatttggaagcagcacaaccagtgcaccttcatttggtacaaccagtggcgggctctttggttttggcacaaataccagtgggaatagtatttttggaagtaaaccagcacctgggactcttggaactgggcttggtgcaggatttggaacagctcttggtgctggacaggcatctttgtttgggaacaaccaacctaagattggagggcctcttggtacaggagcctttggggcccctggatttaatactacgacagccactttgggctttggagccccccaggccccagtagctttgacagatccaaatgcttctgctgcccagcaggctgttctccagcagcacatcaatagtctaacatactcaccttttggagactctcctctcttccggaatccgatgtcagaccctaagaagaaggaagagagattgaaaccaacaaatccagcagcccagaaggctcttactacacctactcattataaactgacaccccgccctgccactagagtccggccaaaggctttacaaacaacaggcacagccaagtcacatctctttgatgggctggatgacgatgaaccatccctagccaatggagcattcatgcccaagaagagcattaagaagttggttttgaagaaccttaataatagcaatctcttttctcctgttaatcgtgattcagaaaatctagcttcaccatctgaatatccagaaaatggagagagatttagtttcctaagcaaacctgttgatgagaatcaccagcaggatggagatgaagattcccttgtttcacatttttatactaaccctattgccaaacctattcctcaaaccccagaaagtgctggaaataaacacagcaacagcaacagtgtggatgataccattgttgcattaaacatgcgtgctgctttgcgaaatgggctggaaggaagcagtgaagaaacgtcttttcatgatgagtcacttcaggatgaccgagaagaaatagaaaataattcttaccatatgcacccagcaggtattattctcactaaggttggttactatactattccatctatggatgaccttgctaaaattaccaatgaaaaaggagagtgcattgtctctgatttcactattggtcggaaaggttatggttcaatctattttgaaggagatgtgaatttgacaaatctaaatttggatgatattgtgcatatccggaggaaagaagtagttgtctacttagatgataaccaaaaaccacctgtgggtgaagggctaaataggaaggctgaagttacattggatggagtttggccaacagataaaacatctcgttgtttaataaagagcccagatcgccttgctgatatcaactatgaaggaagattggaagcagtttcaaggaaacagggagctcaattcaaagaataccggcctgaaactggttcttgggtgtttaaggtctcccatttttctaagtatggccttcaggattctgatgaagaggaggaggagcatccgtctaaaactagtacaaagaagttgaagactgctcctttgcctcctgcaagccagactacgcccttgcagatggctcttaatggcaaacctgcacctccacctcagagccagagcccagaggtggagcagttagggagggttgtggaactggacagtgacatggtagatatcacccaggagccagttttggataccatgttagaagagagcatgcctgaggatcaggaacctgtgtctgcctcaacacatattgcatcttcactgggaattaatccacatgtcttacagatcatgaaagcatcattgcttactgatgaagaagatgtagatatggcactggatcaacgcttcagtcgcctgccttccaaagcagatacttctcaagaaatctgttctcccagactccccatttcagcatcccactcgtcgaaaactcgttcactagttggtgggttactacaatcaaaatttacaagtggagcttttctttcaccaagtgtctctgtgcaagaatgtcgtactcccagagcagcatctttaatgaatatcccatccacatcctcttggtctgtccctccacccctgacttctgtgttcacaatgcccagcccagcccctgaggttccgttgaaaacagtgggtacacgtaggcaactaggcctagtccctcgtgaaaagtctgtcacctatggcaagggaaaactcttgatggacatggccctattcatgggacgctcatttcgtgttggttggggccccaactggactcttgctaatagtggagaacagctgaatggctctcatgaactagaaaatcatcagattgccgattccatggagtttggattcctgcccaatccagtagctgttaaacccctaactgagtccccattcaaagttcacttagaaaaactcagtttgagacaaagaaagccagatgaagacatgaaattatatcagacacctctggagctcaaattaaaacacagcactgtccatgtggatgaactgtgtcctctcattgtccccaatctgggagttgctgtcattcatgactatgcagattgggttaaagaagcatcaggagacttaccagaagcacaaattgtgaagcactggagcctgacatggacactatgtgaagccctatggggccacctgaaggagcttgacagccagctaaatgaaccccgtgaatacattcaaattctggagcgaagaagagctttctcccgctggctatcctgtactgccacacctcagattgaagaggaagtctccttaacccaaaaaaacagccctgtggaggctgtattcagctacctcacaggcaaaaggatcagtgaggcctgctctctggcccagcagtcaggggatcatcgtcttgctcttcttttatctcagtttgtgggtagccagtcagtccgggagctgctcaccatgcagttggtggactggcatcagctccaagcagactccttcatccaggatgagagactgcgcatctttgctctgttggctggaaaaccggtgtggcagctctcagaaaagaagcaaataaacgtgtgctcccagttggattggaaacgctccctggctatccatctttggtatttgcttccaccaacagcctccatttctagggcgctcagcatgtatgaagaagcatttcagaatacctctgacagtgacagatatgcctgctccccacttccttcgtatctggagggttctggctgtgtgatagcggaggagcaaaactcacagacaccacttcgagatgtctgctttcaccttctaaaactctacagtgacagcatacgtgagaaggctgttcgagagctgcttacccggcactgccagctgttggagacccctgaatcttgggctaaagagactttccttacccagaagctccgtgtacctgccaaatggatccacgaggccaaagctgtgcgagcacacatggaatctgacaagcacttagaggccctttgcttatttaaggctgagcactggaaccgctgccacaagctcatcatccgacacttagcttctgatgccatcattaatgagaactatgactacctgaaggggttcttggaagacctggcacctccagagcgcagcagcctaattcaggattgggaaacatctgggcttgtttacctggactatattagagtcattgaaatgctccgccatatacagcaggtggattgctcaggtaatgacctggagcagttacacatcaaagtgacttcactgtgcagtcggatagagcagattcagtgttacagtgctaaagatcgcctggctcagtcagacatggccaaacgtgtagccaacctgctgcgcgtggtgctgagtctgcatcatcctcctgatagaacctccgactcaacaccagaccctcagcgagtccctttgcgcctcttggctccccacattggccggcttcccatgcctgaggactatgccatggacgaactgcgcagccttacccagtcctatctgcgagaactggctgttgggagcctgtgagccccaggcactttgcatcacagtcacatgcccattcacaccacacagaggttccctgccttgtttggattggcactgtttgccattctctgggttggctgtggcatctaccctccctccctgctgccagaagcagcatcctccacttgttcagggcttttcttaatactgaacgtagcataagggcttctggaacccagaagaggagacagtttaccatcctcaagatcattcagtgtttttcctttaaaaaaatggtcaataaagctcctttggcagaatcccccaaagaaccagggtattctttttccatccctagccattctggatcttgtgaccctccatgccaaccagcttccc

SEQ ID NO: 20923 - DNA, 6770 bp, Homo sapiens
  source 1..6770: mol_type = unassigned DNA
aaccgcggcggcgaggggcgggactccacggccctctcaccgctcctaccctgtgcctccccgaactccttctgcccctcctcttccctctcgccccttcccccttcagttcggtttcaaaagacgcgttgcccaatgaataacagggtcgacccagagtggcggccgcgtccaccaattcgcggacggcgagggcggagcgtccgcaacgagcctctgacgccgggcggcgtgtgacgcagtcgggccctctgcgcgctgcgcccgaagcggcggtcggtggcaggggtggtagcggcggcggcgacggtttcgtgggggccgcgcgctgctctgtgagcggcgggtggcagcaggggactcctgacacttccccttccccaccgaaccgcgctttctgaaacaaagactcattttgaagatgtttaacaaatcatttggaacaccctttgggggtggcacaggtggctttggcacaacttcaacatttggacagaatactggctttggcactactagtggaggggcatttggaacatctgcatttggttctagcaacaatactggaggcctctttggaaattcacagactaaaccaggaggattgtttggaaccagttcatttagccagccagctacctccacaagcactggctttgggtttggtacgtcaacaggaacagcaaataccttgtttggaactgcaagcacagggaccagtctcttctcatcccaaaacaatgcctttgcacaaaataaaccaactggctttggcaattttggaaccagtactagcagtggaggactctttggaaccacaaataccacctctaatccttttggcagcacatctggctccctctttgggccaagtagttttacagctgctcctactgggactactattaaatttaaccctccaactggtacagatactatggtcaaagctggagttagcactaacataagtaccaagcaccagtgtattactgctatgaaagaatatgaaagcaagtcactagaggaacttcgtttagaggattatcaggctaacaggaagggcccacagaaccaggtgggagcaggtaccacaactggcttgtttgggtcttctccagccacttccagcgcaacaggactcttcagctcctccaccactaattcaggctttgcatatggtcagaacaaaactgcctttggaactagtacaactggatttggaacaaatccaggtggtctctttggccaacagaatcagcagactaccagcctcttcagcaaaccatttggccaggctacaaccacccagaacactggcttttcctttggtaataccagcaccataggacagccaagcaccaacaccatgggattatttggagtaacccaagcctcacagcctggaggtctttttgggacagctacaaacaccagcactgggacagcatttggaacaggaacaggtctctttgggcagaccaatactggatttggtgctgttggttcgaccctgtttggcaataacaagcttactacatttggaagcagcacaaccagtgcaccttcatttggtacaaccagtggcgggctctttggttttggcacaaataccagtgggaatagtatttttggaagtaaaccagcacctgggactcttggaactgggcttggtgcaggatttggaacagctcttggtgctggacaggcatctttgtttgggaacaaccaacctaagattggagggcctcttggtacaggagcctttggggcccctggatttaatactacgacagccactttgggctttggagccccccaggccccagtagctttgacagatccaaatgcttctgctgcccagcaggctgttctccagcagcacatcaatagtctaacatactcaccttttggagactctcctctcttccggaatccgatgtcagaccctaagaagaaggaagagagattgaaaccaacaaatccagcagcccagaaggctcttactacacctactcattataaactgacaccccgccctgccactagagtccggccaaaggctttacaaacaacaggcacagccaagtcacatctctttgatgggctggatgacgatgaaccatccctagccaatggagcattcatgcccaagaagagcattaagaagttggttttgaagaaccttaataatagcaatctcttttctcctgttaatcgtgattcagaaaatctagcttcaccatctgaatatccagaaaatggagagagatttagtttcctaagcaaacctgttgatgagaatcaccagcaggatggagatgaagattcccttgtttcacatttttatactaaccctattgccaaacctattcctcaaaccccagaaagtgctggaaataaacacagcaacagcaacagtgtggatgataccattgttgcattaaacatgcgtgctgctttgcgaaatgggctggaaggaagcagtgaagaaacgtcttttcatgatgagtcacttcaggatgaccgagaagaaatagaaaataattcttaccatatgcacccagcaggtattattctcactaaggttggttactatactattccatctatggatgaccttgctaaaattaccaatgaaaaaggagagtgcattgtctctgatttcactattggtcggaaaggttatggttcaatctattttgaaggagatgtgaatttgacaaatctaaatttggatgatattgtgcatatccggaggaaagaagtagttgtctacttagatgataaccaaaaaccacctgtgggtgaagggctaaataggaaggctgaagttacattggatggagtttggccaacagataaaacatctcgttgtttaataaagagcccagatcgccttgctgatatcaactatgaaggaagattggaagcagtttcaaggaaacagggagctcaattcaaagaataccggcctgaaactggttcttgggtgtttaaggtctcccatttttctaagtatggccttcaggattctgatgaagaggaggaggagcatccgtctaaaactagtacaaagaagttgaagactgctcctttgcctcctgcaagccagactacgcccttgcagatggctcttaatggcaaacctgcacctccacctcagagccagagcccagaggtggagcagttagggagggttgtggaactggacagtgacatggtagatatcacccaggagccagttttggataccatgttagaagagagcatgcctgaggatcaggaacctgtgtctgcctcaacacatattgcatcttcactgggaattaatccacatgtcttacagatcatgaaagcatcattgcttactgatgaagaagatgtagatatggcactggatcaacgcttcagtcgcctgccttccaaagcagatacttctcaagaaatctgttctcccagactccccatttcagcatcccactcgtcgaaaactcgttcactagttggtgggttactacaatcaaaatttacaagtggagcttttctttcaccaagtgtctctgtgcaagaatgtcgtactcccagagcagcatctttaatgaatatcccatccacatcctcttggtctgtccctccacccctgacttctgtgttcacaatgcccagcccagcccctgaggttccgttgaaaacagtgggtacacgtaggcaactaggcctagtccctcgtgaaaagtctgtcacctatggcaagggaaaactcttgatggacatggccctattcatgggacgctcatttcgtgttggttggggccccaactggactcttgctaatagtggagaacagctgaatggctctcatgaactagaaaatcatcagattgccgattccatggagtttggattcctgcccaatccagtagctgttaaacccctaactgagtccccattcaaagttcacttagaaaaactcagtttgagacaaagaaagccagatgaagacatgaaattatatcagacacctctggagctcaaattaaaacacagcactgtccatgtggatgaactgtgtcctctcattgtccccaatctgggagttgctgtcattcatgactatgcagattgggttaaagaagcatcaggagacttaccagaagcacaaattgtgaagcactggagcctgacatggacactatgtgaagccctatggggccacctgaaggagcttgacagccagctaaatgaaccccgtgaatacattcaaattctggagcgaagaagagctttctcccgctggctatcctgtactgccacacctcagattgaagaggaagtctccttaacccaaaaaaacagccctgtggaggctgtattcagctacctcacaggcaaaaggatcagtgaggcctgctctctggcccagcagtcaggggatcatcgtcttgctcttcttttatctcagtttgtgggtagccagtcagtccgggagctgctcaccatgcagttggtggactggcatcagctccaagcagactccttcatccaggatgagagactgcgcatctttgctctgttggctggaaaaccggtgtggcagctctcagaaaagaagcaaataaacgtgtgctcccagttggattggaaacgctccctggctatccatctttggtatttgcttccaccaacagcctccatttctagggcgctcagcatgtatgaagaagcatttcagaatacctctgacagtgacagatatgcctgctccccacttccttcgtatctggagggttctggctgtgtgatagcggaggagcaaaactcacagacaccacttcgagatgtctgctttcaccttctaaaactctacagtgacagcatacgtgagaaggctgttcgagagctgcttacccggcactgccagctgttggagacccctgaatcttgggctaaagagactttccttacccagaagctccgtgtacctgccaaatggatccacgaggccaaagctgtgcgagcacacatggaatctgacaagcacttagaggccctttgcttatttaaggctgagcactggaaccgctgccacaagctcatcatccgacacttagcttctgatgccatcattaatgagaactatgactacctgaaggggttcttggaagacctggcacctccagagcgcagcagcctaattcaggattgggaaacatctgggcttgtttacctggactatattagagtcattgaaatgctccgccatatacagcagatagcactgttttgtgtagagtggattgctcaggtaatgacctggagcagttacacatcaaagtgacttcactgtgcagtcggatagagcagattcagtgttacagtgctaaagatcgcctggctcagtcagacatggccaaacgtgtagccaacctgctgcgcgtggtgctgagtctgcatcatcctcctgatagaacctccgactcaacaccagaccctcagcgagtccctttgcgcctcttggctccccacattggccggcttcccatgcctgaggactatgccatggacgaactgcgcagccttacccagtcctatctgcgagaactggctgttgggagcctgtgagccccaggcactttgcatcacagtcacatgcccattcacaccacacagaggttccctgccttgtttggattggcactgtttgccattctctgggttggctgtggcatctaccctccctccctgctgccagaagcagcatcctccacttgttcagggcttttcttaatactgaacgtagcataagggcttctggaacccagaagaggagacagtttaccatcctcaagatcattcagtgtttttcctttaaaaaaatggtcaataaagctcctttggcagaatcccccaaagaaccagggtattctttttccatccctagccattctggatcttgtgaccctccatgccaaccagcttccctactcctaccctggcccttttatactaggactccttaggaggagtgagacaggtgataatggatccttaacagatgaactatccacagaaggaagagggatccgtctcttaagtaattggttagttaacactgaattttggaggcaaaggagggttggcctgagttaggaaacaaaatgggatctttctgacacacttagggcagaagtgaatgcctgtcacggagggattgatcttcagggctgtttttgttcctgcctttagagttccatgaacaccatacctttgctactactatgtgcaggaacccttggtcacatgtgacatgtctgtgggaagctcccagagtttggtttggtccctggttttcagtcttgctgagactctgtctggatttgcctgcagagtttggataaaaaatggcaggttgggtaaccctccctgttcatcccatgttagctccaaagcatttcccaccctccatctaccccttccagaagcaaaaacaaaccatgactgaggcaggcatggagttgggcgttaggggcaggcagagggcctttgctacactgctgacagctatagggagccccaggtaatggcatgagatagctggtgttagggctatctcaggcaatatggccacacctgggtctttatgcatgaagataatgtaaaggtttttattaaaaaatatatatatgtataaataaatgatctagatattttcctctttttctgaagctactttcttaaaaaataaataaaatgtttatagcattcctggt

SEQ ID NO: 20924 - DNA, 3923 bp, Homo sapiens
  source 1..3923: mol_type = unassigned DNA
ctgcgcgctgcgcccgaagcggcggtcggtggcaggggtggtagcggcggcggcgacggtttcgtgggggccgcgcgctgctctgtgagcggcgggtggcagcaggggactcctgacacttccccttccccaccgaaccgcgctttctgaaacaaagactcattttgaagatgtttaacaaatcatttggaacaccctttgggggtggcacaggtggctttggcacaacttcaacatttggacagaatactggctttggcactactagtggaggggcatttggaacatctgcatttggttctagcaacaatactggaggcctctttggaaattcacagactaaaccaggaggattgtttggaaccagttcatttagccagccagctacctccacaagcactggctttgggtttggtacgtcaacaggaacagcaaataccttgtttggaactgcaagcacagggaccagtctcttctcatcccaaaacaatgcctttgcacaaaataaaccaactggctttggcaattttggaaccagtactagcagtggaggactctttggaaccacaaataccacctctaatccttttggcagcacatctggctccctctttgggccaagtagttttacagctgctcctactgggactactattaaatttaaccctccaactggtacagatactatggtcaaagctggagttagcactaacataagtaccaagcaccagtgtattactgctatgaaagaatatgaaagcaagtcactagaggaacttcgtttagaggattatcaggctaacaggaagggcccacagaaccaggtgggagcaggtaccacaactggcttgtttgggtcttctccagccacttccagcgcaacaggactcttcagctcctccaccactaattcaggctttgcatatggtcagaacaaaactgcctttggaactagtacaactggatttggaacaaatccaggtggtctctttggccaacagaatcagcagactaccagcctcttcagcaaaccatttggccaggctacaaccacccagaacactggcttttcctttggtaataccagcaccataggacagccaagcaccaacaccatgggattatttggagtaacccaagcctcacagcctggaggtctttttgggacagctacaaacaccagcactgggacagcatttggaacaggaacaggtctctttgggcagaccaatactggatttggtgctgttggttcgaccctgtttggcaataacaagcttactacatttggaagcagcacaaccagtgcaccttcatttggtacaaccagtggcgggctctttggttttggcacaaataccagtgggaatagtatttttggaagtaaaccagcacctgggactcttggaactgggcttggtgcaggatttggaacagctcttggtgctggacaggcatctttgtttgggaacaaccaacctaagattggagggcctcttggtacaggagcctttggggcccctggatttaatactacgacagccactttgggctttggagccccccaggccccagtagctttgacagatccaaatgcttctgctgcccagcaggctgttctccagcagcacatcaatagtctaacatactcaccttttggagactctcctctcttccggaatccgatgtcagaccctaagaagaaggaagagagattgaaaccaacaaatccagcagcccagaaggctcttactacacctactcattataaactgacaccccgccctgccactagagtccggccaaaggctttacaaacaacaggcacagccaagtcacatctctttgatgggctggatgacgatgaaccatccctagccaatggagcattcatgcccaagaagagcattaagaagttggttttgaagaaccttaataatagcaatctcttttctcctgttaatcgtgattcagaaaatctagcttcaccatctgaatatccagaaaatggagagagatttagtttcctaagcaaacctgttgatgagaatcaccagcaggatggagatgaagattcccttgtttcacatttttatactaaccctattgccaaacctattcctcaaaccccagaaagtgctggaaataaacacagcaacagcaacagtgtggatgataccattgttgcattaaacatgcgtgctgctttgcgaaatgggctggaaggaagcagtgaagaaacgtcttttcatgatgagtcacttcaggatgaccgagaagaaatagaaaataattcttaccatatgcacccagcaggtattattctcactaaggttggttactatactattccatctatggatgaccttgctaaaattaccaatgaaaaaggagagtgcattgtctctgatttcactattggtcggaaaggttatggttcaatctattttgaaggagatgtgaatttgacaaatctaaatttggatgatattgtgcatatccggaggaaagaagtagttgtctacttagatgataaccaaaaaccacctgtgggtgaagggctaaataggaaggctgaagttacattggatggagtttggccaacagataaaacatctcgttgtttaataaagagcccagatcgccttgctgatatcaactatgaaggaagattggaagcagtttcaaggaaacagggagctcaattcaaagaataccggcctgaaactggttcttgggtgtttaaggtctcccatttttctaagtatggccttcaggattctgatgaagaggaggaggagcatccgtctaaaactagtacaaagaagttgaagactgctcctttgcctcctgcaagccagactacgcccttgcagatggctcttaatggcaaacctgcacctccacctcaggtagagaaaaaaggacagtgaatttgaatggaatccgtgataccgaagttgaaagcaagtcattcagctaatacaaagctgttttatgacccttggaactttgaagagtacaaacattggcaatcacgttgaaacaagtgcaagggagggcgtgaggtcttgcaggcatctgtctttttactggagagatttaaagaattctcttgctgtttggattattcctctacagattgtcatttttaaaccctttgttctctctcatttggacttgctgaattctctgctcagtgattaacttaagatttgctcatgtgggttcatgcacagtaaattctgcctttattgactacctgatgtgcagtttaatctttttctttacctccatggttttttaaaagttaaattagctttctgaaagggtttttaatctccatttttttaaagttgtttgcttatacttcgggtaaccttgatatttgtattttaatagtacataatctttatgaaaaatagtttgggaatgtaaatgaattattatttggcttggggagattagggcctacattgtttatcgcaattacttgtatcattgatacgggatttctttgtaaagcatcctctacctctcagctgctgaaagctagacctttggtattttccatgctataattcttatggctgctgaaatgtgtggtttttatgatttattaaataatctcttaggaggcatttctggagaatgtgtgtatatacatgtttgcgcgtacaggggaggggagggtatgataaatgtgggaaactggaaatatattgacttttatgtttataatcttggtagcatttagaatgcccctaagaaatctccattgacaaatgaaatgctatagacttggttttccagttatccatattcattttgtctgtcatatgctttgtatcatctccttctttcctaattttttataaccttatatatatatttattataaatatatgtatttctgagggaaa

SEQ ID NO: 20925 - DNA, 3698 bp, Homo sapiens
  source 1..3698: mol_type = unassigned DNA
ggccctctgcgcgctgcgcccgaagcggcggtcggtggcaggggtggtagcggcggcggcgacggtttcgtgggggccgcgcgctgctctgtgagcggcgggtggcagcaggggactcctgacacttccccttccccaccgaaccgcgctttctgaaacaaagactcattttgaagatgtttaacaaatcatttggaacaccctttgggggtggcacaggtggctttggcacaacttcaacatttggacagaatactggctttggcactactagtggaggggcatttggaacatctgcatttggttctagcaacaatactggaggcctctttggaaattcacagactaaaccaggaggattgtttggaaccagttcatttagccagccagctacctccacaagcactggctttgggtttggtacgtcaacaggaacagcaaataccttgtttggaactgcaagcacagggaccagtctcttctcatcccaaaacaatgcctttgcacaaaataaaccaactggctttggcaattttggaaccagtactagcagtggaggactctttggaaccacaaataccacctctaatccttttggcagcacatctggctccctctttgggccaagtagttttacagctgctcctactgggactactattaaatttaaccctccaactggtacagatactatggtcaaagctggagttagcactaacataagtaccaagcaccagtgtattactgctatgaaagaatatgaaagcaagtcactagaggaacttcgtttagaggattatcaggctaacaggaagggcccacagaaccaggtgggagcaggtaccacaactggcttgtttgggtcttctccagccacttccagcgcaacaggactcttcagctcctccaccactaattcaggctttgcatatggtcagaacaaaactgcctttggaactagtacaactggatttggaacaaatccaggtggtctctttggccaacagaatcagcagactaccagcctcttcagcaaaccatttggccaggctacaaccacccagaacactggcttttcctttggtaataccagcaccataggacagccaagcaccaacaccatgggattatttggagtaacccaagcctcacagcctggaggtctttttgggacagctacaaacaccagcactgggacagcatttggaacaggaacaggtctctttgggcagaccaatactggatttggtgctgttggttcgaccctgtttggcaataacaagcttactacatttggaagcagcacaaccagtgcaccttcatttggtacaaccagtggcgggctctttggtaacaaaccaaccctgactttaggaaccaatacaaacacttctaattttggttttggcacaaataccagtgggaatagtatttttggaagtaaaccagcacctgggactcttggaactgggcttggtgcaggatttggaacagctcttggtgctggacaggcatctttgtttgggaacaaccaacctaagattggagggcctcttggtacaggagcctttggggcccctggatttaatactacgacagccactttgggctttggagccccccaggccccagtagctttgacagatccaaatgcttctgctgcccagcaggctgttctccagcagcacatcaatagtctaacatactcaccttttggagactctcctctcttccggaatccgatgtcagaccctaagaagaaggaagagagattgaaaccaacaaatccagcagcccagaaggctcttactacacctactcattataaactgacaccccgccctgccactagagtccggccaaaggctttacaaacaacaggcacagccaagtcacatctctttgatgggctggatgacgatgaaccatccctagccaatggagcattcatgcccaagaagagcattaagaagttggttttgaagaaccttaataatagcaatctcttttctcctgttaatcgtgattcagaaaatctagcttcaccatctgaatatccagaaaatggagagagatttagtttcctaagcaaacctgttgatgagaatcaccagcaggatggagatgaagattcccttgtttcacatttttatactaaccctattgccaaacctattcctcaaaccccagaaagtgctggaaataaacacagcaacagcaacagtgtggatgataccattgttgcattaaacatgcgtgctgctttgcgaaatgggctggaaggaagcagtgaagaaacgtcttttcatgatgagtcacttcaggatgaccgagaagaaatagaaaataattcttaccatatgcacccagcaggtattattctcactaaggttggttactatactattccatctatggatgaccttgctaaaattaccaatgaaaaaggagagtgcattgtctctgatttcactattggtcggaaaggttatggttcaatctattttgaaggagatgtgaatttgacaaatctaaatttggatgatattgtgcatatccggaggaaagaagtagttgtctacttagatgataaccaaaaaccacctgtgggtgaagggctaaataggaaggctgaagttacattggatggagtttggccaacagataaaacatctcgttgtttaataaagagcccagatcgccttgctgatatcaactatgaaggaagattggaagcagtttcaaggaaacagggagctcaattcaaagaataccggcctgaaactggttcttgggtgtttaaggtctcccatttttctaagtatggccttcaggattctgatgaagaggaggaggagcatccgtctaaaactagtacaaagaagttgaagactgctcctttgcctcctgcaagccagactacgcccttgcagatggctcttaatggcaaacctgcacctccacctcaggtagagaaaaaaggacagtgaatttgaatggaatccgtgataccgaagttgaaagcaagtcattcagctaatacaaagctgttttatgacccttggaactttgaagagtacaaacattggcaatcacgttgaaacaagtgcaagggagggcgtgaggtcttgcaggcatctgtctttttactggagagatttaaagaattctcttgctgtttggattattcctctacagattgtcatttttaaaccctttgttctctctcatttggacttgctgaattctctgctcagtgattaacttaagatttgctcatgtgggttcatgcacagtaaattctgcctttattgactacctgatgtgcagtttaatctttttctttacctccatggttttttaaaagttaaattagctttctgaaagggtttttaatctccatttttttaaagttgtttgcttatacttcgggtaaccttgatatttgtattttaatagtacataatctttatgaaaaatagtttgggaatgtaaatgaattattatttggcttggggagattagggcctacattgtttatcgcaattacttgtatcattgatacgggatttctttgtaaagcatcctctacctctcagctgctgaaagctagacctttggtattttccatgctataattcttatggctgctgaaatgtgtggtttttatgatttattaaataatctcttaggaggca

SEQ ID NO: 20926 - DNA, 2664 bp, Homo sapiens
  source 1..2664: mol_type = unassigned DNA
agccttgccttcgccgccgttggggctggaagttcccgccaggtccgtgccgggcgagagagatgctgcccggcccgcctcggctttgaggcgagagaagtgtcccagacccatttcgccttgctgacggcgtcgagccctggccagacatgtccacagggttctccttcggaacgggagcgtctagcaacccttctgtggggctcaattttggaaatcttggaagtacttcaactccagcaactacatctgctccttcaagtggttttggaaccgggctctttggatctaaacctgccactgggttcactctaggaggaacaaatacaggaatagcaacaactataactacaggattaactctgggaacgccagccactacatctgcagctacaacaggcttcagtttaggattcaataaacctgcagcatctgccacaccatttgctctacctattacctctacctcagctagcggtctgactctttcgtctgctctgacatcaactccagcagcatccacaggatttactctaaataatttgggtgggacaacagccacaactacaactgcatcaacaggcctctctttagggggagccttagctggtttgggaggttcacttttccagagtacaaacacaggaacatcaggacttggacagaatgctttagggttgactttgggaactacagcagctacttcaactgcaggcaatgaaggccttggtggtatagatttcagtagctcctcagataaaaagagtgataaaacgggaacaagaccagaggatagtaaagctctgaaggatgaaaatctacctcctgtcatctgccaggatgttgaaaatctccagaaatttgtgaaggagcagaaacaagttcaagaagaaattagtagaatgtcttcaaaagcaatgcttaaggtacaagaagatattaaagctctgaagcagctcctgtcgttggctgccaatggaatacagagaaacactctcaacattgacaaattgaaaatagaaactgctcaggagttgaagaatgctgaaatagctttaagaacccagaagacaccacctggacttcaacatgaatatgcagctcctgctgactacttcagaatcttggttcagcaatttgaggtacagcttcagcagtacaggcagcagattgaagaactagaaaaccatcttgccactcaagcaaataattcacatataacccctcaagatttgtcaatggctatgcagaaaatttatcaaacatttgtagctttagcggcacaacttcagtctattcatgaaaatgtaaaggttctgaaagaacagtaccttggctacaggaaaatgttcttgggagatgctgttgatgtgtttgaaacaaggcgagcagaagccaagaagtggcagaacacacccagagttactactggacccactcctttcagcaccatgccaaacgcagcagccgttgccatggctgcaacacttacacagcagcaacagcctgctacagggccacagccatctctgggagttagttttggaacgccattcggctcaggtattggcactggcttgcaatcaagtggcttaggttcttcaaaccttggaggatttggaactagctctggttttggatgcagcaccacaggggcctccacatttggatttggaacaacaaataaaccctcaggaagtcttagtgcaggctttggcagctcaagtacatctgggtttaacttcagcaatcctggcatcacggcatcagctggtttgacttttggggtgtccaatcctgcctctgcaggttttggaacaggaggacaactccttcagttgaagaaacctccagctggaaacaaaagaggaaaaagataaacatgggttgatgtgttgagagaatccatagcagcaccgttcattctatgagtctatttttctaatgatgcagtaattaaattgcatcccaggagatttataaagttttgatatttttccctactctggaatttgaactttcttcatgtttgccatactgaacatcttttttcttgtggaatttaaagtccagctgtgttttctttttaatttgattctcagtgtaagaaatgttctgattacatcactgattggtaatggttagaaaccattaacctaaaacttactatttaacctagtgtttttgttgatgaggtttacattatgtgaatacatgcacatttgtttcttatacaggtggtgtgaactctagggcctatactagaatcaatttgttccttgttaaaggccttttgaattatactgcagggcatcttgtgaatatgtatgtaaatatatacagaataatacacacagttgtgtgtgcatataaaatacatatttacgccaggcgtggtggctcacgcctgtaatcccagcactttgggaggccgaggcaggcggatcacctgaggtcaggagtttgagaccagcctgacatggtgaaaccccatctctacgaaaaatacaaaaattagctgggcatagtggcgggtacctataatcccagctactcgggaggctgaggcacgagaatcacttgaagccgggaggtgggggttgcagtgagccgagatcacaccactgcactccagcctgggcaacaagagcaaaactccgtctc

SEQ ID NO: 20927 - DNA, 2489 bp, Homo sapiens
  source 1..2489: mol_type = unassigned DNA
cttcgccgccgttggggctggaagttcccgccaggtccgtgccgggcgagagagatgctgcccggcccgcctcggctttgaggcgagagaagtgtcccagacccatttcgccttgctgacggcgtcgagccctggccagacatgtccacagggttctccttcgggtccgggactctgggctccaccaccgtggccgccggcgggaccagcacaggcggcgttttctccttcggaacgggagcgtctagcaacccttctgtggggctcaattttggaaatcttggaagtacttcaactccagcaactacatctgctccttcaagtggttttggaaccgggctctttggatctaaacctgccactgggttcactctaggaggaacaaatacaggaacgccagccactacatctgcagctacaacaggcttcagtttaggattcaataaacctgcagcatctgccacaccatttgctctacctattacctctacctcagctagcggtctgactctttcgtctgctctgacatcaactccagcagcatccacaggatttactctaaataatttgggtgggacaacagccacaactacaactgcatcaacaggcctctctttagggggagccttagctggtttgggaggttcacttttccagagtacaaacacaggaacatcaggacttggacagaatgctttagggttgactttgggaactacagcagctacttcaactgcaggcaatgaaggccttggtggtatagatttcagtagctcctcagataaaaagagtgataaaacgggaacaagaccagaggatagtaaagctctgaaggatgaaaatctacctcctgtcatctgccaggatgttgaaaatctccagaaatttgtgaaggagcagaaacaagttcaagaagaaattagtagaatgtcttcaaaagcaatgcttaaggtacaagaagatattaaagctctgaagcagctcctgtcgttggctgccaatggaatacagagaaacactctcaacattgacaaattgaaaatagaaactgctcaggagttgaagaatgctgaaatagctttaagaacccagaagacaccacctggacttcaacatgaatatgcagctcctgctgactacttcagaatcttggttcagcaatttgaggtacagcttcagcagtacaggcagcagattgaagaactagaaaaccatcttgccactcaagcaaataattcacatataacccctcaagatttgtcaatggctatgcagaaaatttatcaaacatttgtagctttagcggcacaacttcagtctattcatgaaaatgtaaaggttctgaaagaacagtaccttggctacaggaaaatgttcttgggagatgctgttgatgtgtttgaaacaaggcgagcagaagccaagaagtggcagaacacacccagagttactactggacccactcctttcagcaccatgccaaacgcagcagccgttgccatggctgcaacacttacacagcagcaacagcctgctacagggccacagccatctctgggagttagttttggaacgccattcggctcaggtattggcactggcttgcaatcaagtggcttaggttcttcaaaccttggaggatttggaactagctctggttttggatgcagcaccacaggggcctccacatttggatttggaacaacaaataaaccctcaggaagtcttagtgcaggctttggcagctcaagtacatctgggtttaacttcagcaatcctggcatcacggcatcagctggtttgacttttggggtgtccaatcctgcctctgcaggttttggaacaggaggacaactccttcagttgaagaaacctccagctggaaacaaaagaggaaaaagataaacatgggttgatgtgttgagagaatccatagcagcaccgttcattctatgagtctatttttctaatgatgcagtaattaaattgcatcccaggagatttataaagttttgatatttttccctactctggaatttgaactttcttcatgtttgccatactgaacatcttttttcttgtggaatttaaagtccagctgtgttttctttttaatttgattctcagtgtaagaaatgttctgattacatcactgattggtaatggttagaaaccattaacctaaaacttactatttaacctagtgtttttgttgatgaggtttacattatgtgaatacatgcacatttgtttcttatacaggtggtgtgaactctagggcctatactagaatcaatttgttccttgttaaaggccttttgaattatactgcagggcatcttgtgaatatgtatgtaaatatatacagaataatacacacagttgtgtgtgcatataaaatacatatttacgccaggcgtggtggctcacgcctgtaatcccagcactttgggaggccgaggcaggcggatcacctgaggtcaggagtt

SEQ ID NO: 20928 - DNA, 4322 bp, Homo sapiens
  source 1..4322: mol_type = unassigned DNA
actcacgtaccagggctcattgcgtgacggttacacttccggcgggctacgtgcgcgcggcgagcgccgggcgtacttttgcgtggttgctccaccccctcagccttgccttcgccgccgttggggctggaagttcccgccaggtccgtgccgggcgagagagatgctgcccggcccgcctcggctttgaggcgagagaagtgtcccagacccatttcgccttgctgacggcgtcgagccctggccagacatgtccacagggttctccttcgggtccgggactctgggctccaccaccgtggccgccggcgggaccagcacaggcggcgttttctccttcggaacgggagcgtctagcaacccttctgtggggctcaattttggaaatcttggaagtacttcaactccagcaactacatctgctccttcaagtggttttggaaccgggctctttggatctaaacctgccactgggttcactctaggaggaacaaatacaggaatagcaacaactataactacaggattaactctgggaacgccagccactacatctgcagctacaacaggcttcagtttaggattcaataaacctgcagcatctgccacaccatttgctctacctattacctctacctcagctagcggtctgactctttcgtctgctctgacatcaactccagcagcatccacaggatttactctaaataatttgggtgggacaacagccacaactacaactgcatcaacaggcctctctttagggggagccttagctggtttgggaggttcacttttccagagtacaaacacaggaacatcaggacttggacagaatgctttagggttgactttgggaactacagcagctacttcaactgcaggcaatgaaggccttggtggtatagatttcagtagctcctcagataaaaagagtgataaaacgggaacaagaccagaggatagtaaagctctgaaggatgaaaatctacctcctgtcatctgccaggatgttgaaaatctccagaaatttgtgaaggagcagaaacaagttcaagaagaaattagtagaatgtcttcaaaagcaatgcttaaggtacaagaagatattaaagctctgaagcagctcctgtcgttggctgccaatggaatacagagaaacactctcaacattgacaaattgaaaatagaaactgctcaggagttgaagaatgctgaaatagctttaagaacccagaagacaccacctggacttcaacatgaatatgcagctcctgctgactacttcagaatcttggttcagcaatttgaggtacagcttcagcagtacaggcagcagattgaagaactagaaaaccatcttgccactcaagcaaataattcacatataacccctcaagatttgtcaatggctatgcagaaaatttatcaaacatttgtagctttagcggcacaacttcagtctattcatgaaaatgtaaaggttctgaaagaacagtaccttggctacaggaaaatgttcttgggagatgctgttgatgtgtttgaaacaaggcgagcagaagccaagaagtggcagaacacacccagagttactactggacccactcctttcagcaccatgccaaacgcagcagccgttgccatggctgcaacacttacacagcagcaacagcctgctacagggccacagccatctctgggagttagttttggaacgccattcggctcaggtattggcactggcttgcaatcaagtggcttaggttcttcaaaccttggaggatttggaactagctctggttttggatgcagcaccacaggggcctccacatttggatttggaacaacaaataaaccctcaggaagtcttagtgcaggctttggcagctcaagtacatctgggtttaacttcagcaatcctggcatcacggcatcagctggtttgacttttggggtgtccaatcctgcctctgcaggttttggaacaggaggacaactccttcagttgaagaaacctccagctggaaacaaaagaggaaaaagataaacatgggttgatgtgttgagagaatccatagcagcaccgttcattctatgagtctatttttctaatgatgcagtaattaaattgcatcccaggagatttataaagttttgatatttttccctactctggaatttgaactttcttcatgtttgccatactgaacatcttttttcttgtggaatttaaagtccagctgtgttttctttttaatttgattctcagtgtaagaaatgttctgattacatcactgattggtaatggttagaaaccattaacctaaaacttactatttaacctagtgtttttgttgatgaggtttacattatgtgaatacatgcacatttgtttcttatacaggtggtgtgaactctagggcctatactagaatcaatttgttccttgttaaaggccttttgaattatactgcagggcatcttgtgaatatgtatgtaaatatatacagaataatacacacagttgtgtgtgcatataaaatacatatttacgccaggcgtggtggctcacgcctgtaatcccagcactttgggaggccgaggcaggcggatcacctgaggtcaggagtttgagaccagcctgacatggtgaaaccccatctctacgaaaaatacaaaaattagctgggcatagtggcgggtacctataatcccagctactcgggaggctgaggcacgagaatcacttgaagccgggaggtgggggttgcagtgagccgagatcacaccactgcactccagcctgggcaacaagagcaaaactccgtctcaaaaaagatgaaaataaaataaaatatatatttacaggcctacaacttttgcctcagactgttccccttttctaagggtattcaagttttcaccttttaagcttcatatcctcagtgcttgtagaatgatgagcttagaggtaccaggtcattgcagttgtttgcttaaagacttattgaaatggttactggcgtaaatacttggccaactcaactttattgcccctgatcttttccatttttgtttccaccttaacctatagcagctcctccaaatgaggaatgctgtaagtaagactcatcaaacagattttaaccattttattatcctgtgtgtccttacattgcttctgtgagatgtttttttcttatctgagatgaactttcaggagcctatttgaactccagactggtgttctggggcaaagagctattagccaaactgattctatgcaggtgaaggatgcactaaagttctcactttagtgagaacttttctagctattccaatacagagttctttcttatagggctattgatattgacaccaaatggagtggcttctcagcctcttaatgtcttaagtaagtgcttaatttggaatagagaaaccagtatattttaaaaaagaaaaatattctttgtagcaactgtaaattctcccattataacagtgaacagagctccaggtaataacgcataggcatgtcaggttgcatctgtatatttgactacattagtattagtgacatcaggtggatataaaagaaaacccttggaaagagaactgccttagccatgatttcgttagtagacctatttatgattcaattgcaattttcagataggatgtgaacatggaatttcattgaaaatagtttaattttttatataaaaggttttgtatataatgtgtgtcagtgactattttcaaaatcattttcatcaagacaccttttttctaaaataggcattgcatacacatatgcacacgtatgtgcatgtgccacacattttttgtataatgttgggtttgattataaaagtgttgtcaaatgttttatttatctgcatatagcagtggttggcttttttgaattgaaatttttgcgcattgatgcattgaaataaggaaaattatttatctctgagcactaaacttatttttgcatatttctgtaatattgcagtccccagatccagaacatgggaagttagggaaaatgtgtgattttgtgttttgaattactgtcagaattacatacacaattacaacaaactttttttaaaagacatttcattgtactgcaaaaatctgaatatttatatttcttgtttttttctttatatgttttgcattttaatatgttgagccactggaaatttgtaacagattaatttgttataggagtttaaatgtgttgtcattgtctccattgtctttgtccagagcctattattatggaaacaataaaatttattgtgtca

SEQ ID NO: 20929 - DNA, 1761 bp, Homo sapiens
  source 1..1761: mol_type = unassigned DNA
acgtaccagggctcattgcgtgacggttacacttccggcgggctacgtgcgcgcggcgagcgccgggcgtacttttgcgtggttgctccaccccctcagccttgccttcgccgccgttggggctggaagttcccgccaggtccgtgccgggcgagagagatgctgcccggcccgcctcggctttgaggcgagagaagtgtcccagacccatttcgccttgctgacggcgtcgagccctggccagacatgtccacagggttctccttcgggtccgggactctgggctccaccaccgtggccgccggcgggaccagcacaggcggcgttttctccttcggaacgggagcgtctagcaacccttctgtggggctcaattttggaaatcttggaagtacttcaactccagcaactacatctgctccttcaagtggttttggaaccgggctctttggatctaaacctgccactgggttcactctaggaggaacaaatacaggaacgccagccactacatctgcagctacaacaggcttcagtttaggattcaataaacctgcagcatctgccacaccatttgctctacctattacctctacctcagctagcggtctgactctttcgtctgctctgacatcaactccagcagcatccacaggatttactctaaataatttgggtgggacaacagccacaactacaactgcatcaacaggcctctctttagggggagccttagctggtttgggaggttcacttttccagagtacaaacacaggaacatcaggacttggacagaatgctttagggttgactttgggaactacagcagctacttcaactgcaggcaatgaaggccttggtggtatagatttcagtagctcctcagataaaaagagtgataaaacgggaacaagaccagaggatagtaaagctctgaaggatgaaaatctacctcctgtcatctgccaggatgttgaaaatctccagaaatttgtgaaggagcagaaacaagttcaagaagaaattagtagaatgtcttcaaaagcaatgcttaaggtacaagaagatattaaagctctgaagcagctcctgtcgttggctgccaatggaatacagagaaacactctcaacattgacaaattgaaaatagaaactgctcaggagttgaagaatgctgaaatagctttaagaacccagaagacaccacctggacttcaacatgaatatgcagctcctgctgactacttcagaatcttggttcagcaatttgaggtacagcttcagcagtacaggcagcagattgaagaactagaaaaccatcttgccactcaagcaaataattcacatataacccctcaagatttgtcaatggctatgcagaaaatttatcaaacatttgtagctttagcggcacaacttcagtctattcatgaaaatgtaaaggttctgaaagaacagtaccttggctacaggaaaatgttcttgggagatgctgttgatgtgtttgaaacaaggcgagcagaagccaagaagtggcagaacacacccagagttactactggacccactcctttcagcaccatgccaaacgcagcagccgttgccatggctgcaacacttacacagcagcaacagcctgctacaggtgataagtggtgtaatgtagcagagcttaagaatagaactcaattatcactttttgtgaacaagttggaattgtcatgttactgtgtaattgatttgctttacaatgaacaataa

SEQ ID NO: 20930 - DNA, 6360 bp, Homo sapiens
  source 1..6360: mol_type = unassigned DNA
gccttcgccgccgttggggctggaagttcccgccaggtccgtgccgggcgagagagatgctgcccggcccgcctcggctttgaggcgagagaagtgtcccagacccatttcgccttgctgacggcgtcgagccctggccagacatgtccacagggttctccttcgggtccgggactctgggctccaccaccgtggccgccggcgggaccagcacaggcggcgttttctccttcggaacgggagcgtctagcaacccttctgtggggctcaattttggaaatcttggaagtacttcaactccagcaactacatctgctccttcaagtggttttggaaccgggctctttggatctaaacctgccactgggttcactctaggaggaacaaatacaggaatagcaacaactataactacaggattaactctgggaacgccagccactacatctgcagctacaacaggcttcagtttaggattcaataaacctgcagcatctgccacaccatttgctctacctattacctctacctcagctagcggtctgactctttcgtctgctctgacatcaactccagcagcatccacaggatttactctaaataatttgggtgggacaacagccacaactacaactgcatcaacaggcctctctttagggggagccttagctggtttgggaggttcacttttccagagtacaaacacaggaacatcaggacttggacagaatgctttagggttgactttgggaactacagcagctacttcaactgcaggcaatgaaggccttggtggtatagatttcagtagctcctcagataaaaagagtgataaaacgggaacaagaccagaggatagtaaagctctgaaggatgaaaatctacctcctgtcatctgccaggatgttgaaaatctccagaaatttgtgaaggagcagaaacaagttcaagaagaaattagtagaatgtcttcaaaagcaatgcttaaggtacaagaagatattaaagctctgaagcagctcctgtcgttggctgccaatggaatacagagaaacactctcaacattgacaaattgaaaatagaaactgctcaggagttgaagaatgctgaaatagctttaagaacccagaagacaccacctggacttcaacatgaatatgcagctcctgctgactacttcagaatcttggttcagcaatttgaggtacagcttcagcagtacaggcagcagattgaagaactagaaaaccatcttgccactcaagcaaataattcacatataacccctcaagatttgtcaatggctatgcagaaaatttatcaaacatttgtagctttagcggcacaacttcagtctattcatgaaaatgtaaaggttctgaaagaacagtaccttggctacaggaaaatgttcttgggagatgctgttgatgtgtttgaaacaaggcgagcagaagccaagaagtggcagaacacacccagagttactactggacccactcctttcagcaccatgccaaacgcagcagccgttgccatggctgcaacacttacacagcagcaacagcctgctacaggtctgaacgcattcaagttatagcttcttactgttccaatgcagaacatttatgtgcgtttttataagtcttccatttgtgtgagcactgaagaaatttctatgagtagctgttccaatacaatctaaaattgtgatggacacgattataaacatacctgataaaaaaggcagggtagtcttagcaataattatacatcaattagatattgaatattgtgaatctacttaatgttatttgctgtaatgctataaatgccctttagaacatggtgtttcactagtgaattacatttaagaataacattagattctgaaatcatgactgtaccatttattgttttaaagtcagagatcatccatccattctttgaatttttcatatatgatactgataggtggtgcattctcattttcctcatacatagtgattacaaagtacccacattcaggatgaagtatgcttttattgactgaaggtatgttgaagatcaataggcttgtttgtatgtatgttgactgtaaacagaatacaagccctctaaaccaaattttgaagatgatacatgctagaattgtacctttccaaggtgaacagaacagcaagagcaggaaaaagatgttttgagatgtggattgcacattaaggagcaactgggaagttgaacagatgaaaataattggtgacatggaaagcagattgttttatttcttggtttagttacacttctaattagagaaacattttttgtggtcattctacagtgttttatttggtcctgtgtctttcggaggttaatagttatcttaatcctgccatcccttttgtcaggtttgaagcttgacatggaaaaatagtcttaatcgatattgatttttttattttaatcattcataaatttcttagtaatgcttactattcaatagcatgtgtctttctgagagttccatatagtccagtagtacattataatacacacaaaaaaattaatacatatttagattgcattcaagctacctatactagggaagcattctctggttttcactattggcagtttaaaaaattgttcttcacatttggagatgacagaattgacttgccataagtaaagggttgatgatagatttatgccaaatcctccatatcccgtggctggacccatgtgaatagtggctcgcacgagcactgtctggtagctctctagctggctggagtgtaggattgcattgttaagttatggagggaaaaagtcattatgggattgattcctttgaggattgatatttcttcttaaaaggattcaatcccataattatgaccatcagctctcatgattacctaaccagttaatcaaaccaaccatagtactagtttactttttagagccagtattaatcctaaagtagataagtgtagatttggttaagtgttctttaaacatagtgaatttccattctattaaatagaacttgagaaatgtcagttatataaaaagttatgttgtaagtgaatatattctatgataaatacctaaacttgaagcaaaatctcctgtcaagggtttgtgtgtgtgtgtgtgtttaactttcttatctatagattattattttgagaaattcataggttttcacttatacattttgagcttgtggacatatggagatgtgtgttcattctctaaatgagtgcctactatgtgctgggctcgaggaatacaaaggtagacaatatagattttgtctttgccctctgtggtggttgacaatgttagcttaatctggagtattcttgaggagccttttgctcataggctttaattttgtctgtgacttttgccaggctttggggaaattgactgccttcactcttccctgaaactttgaagtccacataagggctttctcatcagatggcagaaattataatttattaacctaaacaaccttacagtgttttcgctttgaattgtatgaattcttagaactgagaagctaaacaacagtgataacaattttacattatcttttctttctccttttgtttctctaaaggtctcccaggccttcccagtcaaaattttcgttatttttagtcatgtcaccatgatgtgagatttctgagctctgttagatacatttagaaatgtccctatttatcaaatggtgttttgtaccccataagttatcccttatgccctgtgacttctgtgaaatctttgtttttaagtgccagtaacaaattttagaccatctagatgagggtagagagagcttatgcattgtttttatacatcactgttgatctatacaagatttgagttatcagaagggttttgcttttatttgcatatgaaatttttattaacatgaatatgggcacagagcaaatagcttcttagactgctgccttctgaaggtggcttctgtatctttctcagaggaggaggaatagacttaaacgacttctttgtcctccttcaattttttttttaatgaaaaagtatactagggcttaggcatgtgtgatttacagttatttgttctgaaggctgcagagaattgaaaatccagcaggctatttgtgtatgaaatcatgagcatcgataacgtggataacgtagttccatgttggcagaacttgacacttgtctataagtgcttcccaagcctcctgaaaaactgaagacatttacattaggcttttcagtataattttaatttaggataggttttttagcaatgtatctgggattgagttttgctattgtgttttgacactttaagagttcttgatgtttacataataagactttcttatgtgacttagctgctgttttaaggagagccaagacgttttgttaggaattcctaatttttagcttagtgtaggtttggacatttaaggtgtagtgttaaataggaaacattaagtatttcatcttagtttcttgtggttttgtgattttgttgtatttaataaccaaaggaacattccccattaaatcagtaagagtaaaatttttcaaactggggaaaacgcattttaggttttttaaagaaaaattattttaaaatgtgacttagaaataaccatactaattacattaggcatttggggtgatcatggaaaattataaaatatttttagcactttagtcctttttctgttaatgcagttttacttttaagaaagtaaaatttattctggaaaatatgaattacagcgctaaacctggttttgttgtgtgtgaatatattatatggtaacttttgtaaaatgttactctacatgaagatttcactttggccagtcattggtatatatcactacaaacttaattttatttatggaaataagaacctctcattggatgactattcaaatttcaaagcagacttcttgaattgtttacgtaacttttgcctgaaggatttagactgctttctaatagtgaaactaatatatatggtggccagagtgtaatatatgctaatactttggcatgggagatatttatcatgagtttttactattaaaaaatgttatacatttgcctacgagttttataaatgatgttgccttcagaatttgtgtgaaggtacaaaactaaaaatatcatgtatctgatgtgcaatggaaagtcttgtcatcattagatatgagttcttgattatattctgaatattgatgattagaaaaatcttatgttctgttgctcttaacaacagacccacacacaacaaaaagcatgctatttgagtaactcttacgacttacaaggctgagggctgtggtgtgcattattctttagggtcttccaccagcagtgcctcctattaacctgtgacaaacaagtctctcaatgttaaagaactggacatgtgttttttatgttttttgttaggaatcagaaagtataataatatgcttggtttctttttcctatagtaacattttacaaaagagctgctaggcaggtattttattctcaaagtgatctcaaactggatgtaaaattttaaattatttttttaatagtagtataagaattctggctgctattagttattgtttgttttctgggttagaagctattcgaaaagtccagtttctgtcccagtgtagcaaaatgtagttcctcggttgtttttctttaaatgctttataattttacactacctttttaatatacaaacctcattcttcattggataacttgaaggctttgatttctttaaaaatttaaattttagtgtgtatattactttgacagttccctcatctttgagatgcactgatcactgtgcttgaaaaagacaatactgaagattgtactatgaagtttattgaataattttcataaattatttatccaaatgagagatttttagatttttgtattctgcttagttttaaaaaaaaaaaatagtagtttaaaagagaggctagtaagtttgatgctattcttgccaaacaaactcagccaaaatctttaaagtaacaagagggaaaaggatgactaatcgttctgcttctgagtacattttccaaaacgttggaaagaaacttctgaattgaaatcttgaatgtattgaatctgtcaaggtacacagcggtgcctttgtaaatgttcattactttatttaatcaggtgataagtggtgtaatgtagcagagcttaagaatagaactcaattatcactttttgtgaacaagttggaattgtcatgttactgtgtaattgatttgctttacaatgaacaataaatttaataaaat

SEQ ID NO: 20931 - DNA, 3008 bp, Homo sapiens
  source 1..3008: mol_type = unassigned DNA
cccagcgcctgccgccgacgccgccgcctcctcccgccgcgcggaccgtggagcggggtcgcagccgcctgcccgccctgcggtgggccaggatgtcgggcttcctggaggagctgctcggcgagaagctggtgacgggcggcggcgaggaggtggacgtgcactcgctgggcgcccgcggcatctcgctgctgggtctctacttcggctgcagcctcagcgccccctgcgcgcagctcagcgccagcctggccgccttctacgggcgcctgcggggggacgcggcggccgggccggggccgggagcgggggccggggcggcggcggagcccgagccgcggcggcgcctggagatcgtcttcgtgtcctcggaccaggaccagcggcagtggcaggacttcgtgcgggacatgccgtggctggcgctgccctacaaggagaagcacaggaagctcaaactttggaacaaataccgaatttccaacattccatcactaatattcctcgacgccaccactgggaaggttgtgtgcaggaacgggctgctggtgatccgagatgacccagaaggtctggagttcccctggggaccgaaacccttcagggaagtcattgcagggcccttgcttagaaacaatgggcagtctctggagagcagcagcctggaggggtctcacgtgggcgtctatttctccgcacattggtgtccgccctgccgaagcctcacccgggtcctggtggaatcctaccggaagatcaaggaggcaggccagaacttcgagatcatcttcgttagtgcagacaggtcggaggagtccttcaaacagtacttcagtgagatgccctggctcgccgtcccctacacggatgaggcccggcggtcgcgcctcaaccggctgtacggaatccaaggcatccccacgctcatcatgctggacccgcagggcgaggtgatcacgcggcaggggcgggtggaggtgctgaacgacgaggactgccgggagttcccctggcaccccaagcccgtgctggagctctccgactccaacgccgcgcagcttaacgagggcccctgcctcgtcctttttgtagattctgaggatgacggagagtccgaggcggccaagcagctgattcagccgatagctgagaaaatcattgccaagtacaaagccaaagaggaggaggcaccccttctgttcttcgtagccggggaggatgacatgactgactccctgcgagattacaccaacctgcctgaggctgcccctttgctcaccatcctggacatgtcagcccgggccaagtacgtgatggacgtggaggagatcacccccgccatcgtggaggcctttgtgaatgacttcctagcagagaagctcaaaccggagcccatctagcgtggctccggcctcctgagacgttatttaaaactcagccttctcctcctccccctccttccttccgcccttggacttacccagcgtgccccgaatcccaccacccaagtgtccagcctctctgtggtgccttgtttctgcagtaaactcctcagccagcaccctggggtgtggaatcagcagcggcagagtccaccgtgtttggagactctgtttgggagcacgggatggccgggggcccggccagagcggggctgcatggctttcgcaaagtcactagcttttggtgaaggatctgccagggtgtcctgggcagagtgagcgtggagggccggtgggtcccgctcgggctctgactctgacgtcggcacacacggccccggacggccagaggggaaccgccgggtgacacctgcgtggaggctgagctgagaaagggcctccgcttagagctgcgggtgaggacgtccttttctaagcaacacagtcttcctcggtctgagagaaaagcagcccactcttgtgttctcaggcaggggatctccaaatgcaaaaggaagcttgtagaggttttttgggtgagaagaaaaatgtagctaaggtaatggttcatatcatacaaacagctcccacgatcctgaaattctgttaacgaatccttctctttggacatcttcccaagaaacttagccctgagtcctaggaggagcacctctgcaccagcacggacctctcgctccacccagctctgtgcccaaggcccctgatctctgctgaggtgcccacacccacgttcgatcacccctgccattcccttttattttcttttttttgagatggagtcttgctctgtcgcccaggctggagtgcagtggcaccatcttggctcacttcaacctccgcccccaaggttcaagtgattctcctgcctcagcctcccgagtagctgggattacaggcacccgccaccgtacctggctaatttttgtatttttagtagagatggggtttcaccatgttggccaggctggtctcgaactcctgacctcaggtgatccacccgcctcggcctcccaaagtgctgggattacaggcgtgagccgccgtgcccggcccccttttcttttcaaagcagaactacaaagatgagaaattaccagaagcctcgccttttcctaagcaccagcggaaggagctgtgccccgggatggagtgagggtggagggcgcgtcagccacgggtgggccttgtgtcgccttgtatcggcccaggtaggttgttggcctcttacttgggctgacctgacccccgaaagagaaacagacaactctgttctcaggattggggatggacggcttcggccaagcgttttagcctcattcactcaggccccactcagcactctgccagccaagaccattgatttggaaaatccggtccccacccgctaatgagctgttgacactgttgttccttgctgaattggattgttgacttgtagttcagaggcgtacaactagttggcgattagacttgttatgtgatgttaccagcctgaaatgcgatcaccccgtaggaaataaagcaggcatctctggacctcatcca

SEQ ID NO: 20932 - DNA, 1200 bp, Homo sapiens
  source 1..1200: mol_type = unassigned DNA
aaacgtgccccttcaccggaaccgagcaacggtaactgtgccccttcaccggaaccgagcaatggcagacgtgtcccttcaccggaacccagcaacgctcaaactttggaacaaataccgaatttccaacattccatcactaatattcctcgacgccaccactgggaaggttgtgtgcaggaacgggctgctggtgatccgagatgacccagaaggtctggagttcccctggggaccgaaacccttcagggaagtcattgcagggcccttgcttagaaacaatgggcagtctctggagagcagcagcctggaggggtctcacgtgggcgtctatttctccgcacattggtgtccgccctgccgaagcctcacccgggtcctggtggaatcctaccggaagatcaaggaggcaggccagaacttcgagatcatcttcgttagtgcagacaggtcggaggagtccttcaaacagtacttcagtgagatgccctggctcgccgtcccctacacggatgaggcccggcggtcgcgcctcaaccggctgtacggaatccaaggcatccccacgctcatcatgctggacccgcagggcgaggtgatcacgcggcaggggcgggtggaggtgctgaacgacgaggactgccgggagttcccctggcaccccaagcccgtgctggagctctccgactccaacgccgcgcagcttaacgagggcccctgcctcgtcctttttgtagattctgaggatgacggagagtccgaggcggccaagcagctgattcagccgatagctgagaaaatcattgccaagtacaaagccaaagaggaggaggcaccccttctgttcttcgtagccggggaggatgacatgactgactccctgcgagattacaccaacctgcctgaggctgcccctttgctcaccatcctggacatgtcagcccgggccaagtacgtgatggacgtggaggagatcacccccgccatcgtggaggcctttgtgaatgacttcctagcagagaagctcaaaccggagcccatctagcgtggctccggcctcctgagacgttatttaaaactcagccttctcctcctccccctccttccttccgcccttggacttacccagcgtgccccgaatcccaccacccaagtgtccagcctctctgtggtgccttgtttctgcagtaaactcctcag

SEQ ID NO: 20933 - DNA, 985 bp, Homo sapiens
  source 1..985: mol_type = unassigned DNA
gtgtccgccctgccgaagcctcacccgggtcctggtggaatcctaccggaagatcaaggaggcaggccagaacttcgagatcatcttcgttagtgcagacaggtcggaggagtccttcaaacagtacttcagtgagatgccctggctcgccgtcccctacacggatgaggcccggcggtcgcgcctcaaccggctgtacggaatccaagattctgaggatgacggagagtccgaggcggccaagcagctgattcagccgatagctgagaaaatcattgccaagtacaaagccaaagaggaggaggcaccccttctgttcttcgtagccggggaggatgacatgactgactccctgcgagattacaccaacctgcctgaggctgcccctttgctcaccatcctggacatgtcagcccgggccaagtacgtgatggacgtggaggagatcacccccgccatcgtggaggcctttgtgaatgacttcctagcagagaagctcaaaccggagcccatctagcgtggctccggcctcctgagacgttatttaaaactcagccttctcctcctccccctccttccttccgcccttggacttacccagcgtgccccgaatcccaccacccaagtgtccagcctctctgtggtgccttgtttctgcagtaaactcctcagccagcaccctggggtgtggaatcagcagcggcagagtccaccgtgtttggagactctgtttgggagcacgggatggccgggggcccggccagagcggggctgcatggctttcgcaaagtcactagcttttggtgaaggatctgccagggtgtcctgggcagagtgagcgtggagggccggtgggtcccgctcgggctctgactctgacgtcggcacacacggccccggacggccagaggggaaccgccgggtgacacctgcgtggaggctgagctgagaaagggcctccgcttagagctgcgggtgaggacgt

SEQ ID NO: 20934 - DNA, 2681 bp, Homo sapiens
  source 1..2681: mol_type = unassigned DNA
aaacgtgccccttcaccggaaccgagcaacggtaactgtgccccttcaccggaaccgagcaatggcagacgtgtcccttcaccggaacccagcaacgctcaaactttggaacaaataccgaatttccaacattccatcactaatattcctcgacgccaccactgggaaggttgtgtgcaggaacgggctgctggtgatccgagatgacccagaaggtctggagttcccctggggaccgaaacccttcagggaagtcattgcagggcccttgcttagaaacaatgggcagtctctggagagcagcagcctggaggggtctcacgtgggcgtctatttctccgcacattggtgtccgccctgccgaagcctcacccgggtcctggtggaatcctaccggaagatcaaggaggcaggccagaacttcgagatcatcttcgttagtgcagacaggtcggaggagtccttcaaacagtacttcagtgagatgccctggctcgccgtcccctacacggatgaggcccggcggtcgcgcctcaaccggctgtacggaatccaaggcatccccacgctcatcatgctggacccgcagggcgaggtgatcacgcggcaggggcgggtggaggtgctgaacgacgaggactgccgggagttcccctggcaccccaagcccgtgctggagctctccgactccaacgccgcgcagcttaacgagggcccctgcctcgtcctttttgtagattctgaggatgacggagagtccgaggcggccaagcagctgattcagccgatagctgagaaaatcattgccaagtacaaagccaaagaggaggaggcaccccttctgttcttcgtagccggggaggatgacatgactgactccctgcgagattacaccaacctgcctgaggctgcccctttgctcaccatcctggacatgtcagcccgggccaagtacgtgatggacgtggaggagatcacccccgccatcgtggaggcctttgtgaatgacttcctagcagagaagctcaaaccggagcccatctagcgtggctccggcctcctgagacgttatttaaaactcagccttctcctcctccccctccttccttccgcccttggacttacccagcgtgccccgaatcccaccacccaagtgtccagcctctctgtggtgccttgtttctgcagtaaactcctcagccagcaccctggggtgtggaatcagcagcggcagagtccaccgtgtttggagactctgtttgggagcacgggatggccgggggcccggccagagcggggctgcatggctttcgcaaagtcactagcttttggtgaaggatctgccagggtgtcctgggcagagtgagcgtggagggccggtgggtcccgctcgggctctgactctgacgtcggcacacacggccccggacggccagaggggaaccgccgggtgacacctgcgtggaggctgagctgagaaagggcctccgcttagagctgcgggtgaggacgtccttttctaagcaacacagtcttcctcggtctgagagaaaagcagcccactcttgtgttctcaggcaggggatctccaaatgcaaaaggaagcttgtagaggttttttgggtgagaagaaaaatgtagctaaggtaatggttcatatcatacaaacagctcccacgatcctgaaattctgttaacgaatccttctctttggacatcttcccaagaaacttagccctgagtcctaggaggagcacctctgcaccagcacggacctctcgctccacccagctctgtgcccaaggcccctgatctctgctgaggtgcccacacccacgttcgatcacccctgccattcccttttattttcttttttttgagatggagtcttgctctgtcgcccaggctggagtgcagtggcaccatcttggctcacttcaacctccgcccccaaggttcaagtgattctcctgcctcagcctcccgagtagctgggattacaggcacccgccaccgtacctggctaatttttgtatttttagtagagatggggtttcaccatgttggccaggctggtctcgaactcctgacctcaggtgatccacccgcctcggcctcccaaagtgctgggattacaggcgtgagccgccgtgcccggcccccttttcttttcaaagcagaactacaaagatgagaaattaccagaagcctcgccttttcctaagcaccagcggaaggagctgtgccccgggatggagtgagggtggagggcgcgtcagccacgggtgggccttgtgtcgccttgtatcggcccaggtaggttgttggcctcttacttgggctgacctgacccccgaaagagaaacagacaactctgttctcaggattggggatggacggcttcggccaagcgttttagcctcattcactcaggccccactcagcactctgccagccaagaccattgatttggaaaatccggtccccacccgctaatgagctgttgacactgttgttccttgctgaattggattgttgacttgtagttcagaggcgtacaactagttggcgattagacttgttatgtgatgttaccagcctgaaatgcgatcaccccgtaggaaataaagcaggcatctctggacctcatccaccctgggcctctgctgtccttgatcaca

SEQ ID NO: 20935 - DNA, 5202 bp, Homo sapiens
  source 1..5202: mol_type = unassigned DNA
cgggcgccgggcacgcgggccaggccttccccacaactgatggggttgaaatttcctttccggctcagcagggagaaaagatatggtggggtgcttaacagaggaggttagacaccggcgggaaccagaggagcccaagcgcggcgcctgggcctcggggctgcaggagtcctcggtgggggtatggaggtcgccggggaaggaggacggttcagttgctaggcaacccggcctggacccgcctctcgctcgcgttgctgggagactacaaggccgggaggagggcggcgaaagggccctacgtgctgacgctaattgtatatgagcgcgagcggcgggctcttgggtcttttttagcgccatctgctcgcggcgccgcctcctgctcctcccgctgctgctgccgctgccgccctgagtcactgcctgcgcagctccggccgcctggctccccatactagtcgccgatatttggagttcttacaacatggcagacattgacaacaaagaacagtctgaacttgatcaagatttggatgatgttgaagaagtagaagaagaggaaactggtgaagaaacaaaactcaaagcacgtcagctaactgttcagatgatgcaaaatcctcagattcttgcagcccttcaagaaagacttgatggtctggtagaaacaccaacaggatacattgaaagcctgcctagggtagttaaaagacgagtgaatgctctcaaaaacctgcaagttaaatgtgcacagatagaagccaaattctatgaggaagttcacgatcttgaaaggaagtatgctgttctctatcagcctctatttgataagcgatttgaaattattaatgcaatttatgaacctacggaagaagaatgtgaatggaaaccagatgaagaagatgagatttcggaggaattgaaagaaaaggccaagattgaagatgagaaaaaagatgaagaaaaagaagaccccaaaggaattcctgaattttggttaactgtttttaagaatgttgacttgctcagtgatatggttcaggaacacgatgaacctattctgaagcacttgaaagatattaaagtgaagttctcagatgctggccagcctatgagttttgtcttagaatttcactttgaacccaatgaatattttacaaatgaagtgctgacaaagacatacaggatgaggtcagaaccagatgattctgatcccttttcttttgatggaccagaaattatgggttgtacagggtgccagatagattggaaaaaaggaaagaatgtcactttgaaaactattaagaagaagcagaaacacaagggacgtgggacagttcgtactgtgactaaaacagtttccaatgactctttctttaacttttttgcccctcctgaagttcctgagagtggagatctggatgatgatgctgaagctatccttgctgcagacttcgaaattggtcactttttacgtgagcgtataatcccaagatcagtgttatattttactggagaagctattgaagatgatgatgatgattatgatgaagaaggtgaagaagcggatgaggaaggggaagaagaaggagatgaggaaaatgatccagactatgacccaaagaaggatcaaaacccagcagagtgcaagcagcagtgaagcaggatgtatgtggccttgaggataacctgcactgtaatagcctaaacacaactcttatttacttacagccttatgtttttgtattttcttggtagactaggtaatttttttttaaaggacaggaaactgatattttaaagaccaatttgttctacctagcattttaactagtttttctgccagctatgttgaatgcacaaattctgtcacgcatgttcattcattgctacataatttggttcttctggaatatttttatgtagctcttggagtacagctatgaaaattaacaactgttaaaggaaataccttttttttttttttgtaattttttccttgaagaaccaaagtattttttcagctggttgttgaatagggttaagtccgcttggattagctgtgcctttcattactttgttacagaaatgcagtgacttatactaagacaatttattgtttaaaaaaaaaattggcaagacaactatatggttaagaatttccagtatgaccacacccaataactgttattagagtgttaatggattattgtgttttaggtgacatagttaactgtaaagtaacctgactcagtatagttactggtaccacagtgaggtgaataaaacgggattttcagaagttagcctgaatttaactgtatttttaaatttaacctccattaactaagcatcttttctttgtggtagggtctaccttctgcttccctggaaaggatgaatttacatcatttgacaagcctattttcaagttatttgttgtttgtttgcttgtttttgtttttgcagctaaaataaaaatttcaaatacaattttagttcttacaagataatgtcttaattttgtaccaattcaggtagaagtagaggcctaccttgaattaagggttatactcagtttttaacacattgttgaagaaaaggtaccagctttggaacgagatgctatactaataagcaagtgtaaaaaaaaaaaaaaaagaggaagaaaatcttaagtgattgatgctgttttcttttaaaaaaaaaaaaaaaaattcattttctttgggttagagctagagagaaggccccaagcttctatggtttcttctaattcttattgcttaaagtatgagtatgtcacttacccgtgcttctgtttactgtgtaattaaaatgggtagtactgtttacctaactacctcatggatgtgttaaggcatattgagttaaatctcatataatgtttctcaatcttgttaaaagctcaaaattttgggcctatttgtaatgccagtgtgacactaagcattttgttcacaccacgctttgataactaaactggaaaacaaaggtgttaagtacctctgttctggatctgggcagtcagcactctttttagatctttgtgtggctcctatttttatagaagtggagggatgcactatttcacaaggtccaagatttgttttcagatatttttgatgactgtattgtaaatactacagggatagcactatagtattgtagtcatgagacttaaagtggaaataagactatttttgacaaaagatgccattaaatttcagactgtagagccacatttacaatacctcaggctaattactgttaattttggggttgaacttttttttgacagtgagggtggattattggattgtcattagaggaaggtctagatttcctgctcttaataaaattacattgaattgatttttagaggtaatgaaaacttcctttctgagaagttagtgttaaggtcttggaatgtgaacacattgtttgtagtgctatccattcctctcctgagattttaacttactactggaaatccttaaccaattataatagctttttttctttattttcaaaatgatttcctttgctttgattagacactatgtgctttttttttttaaccatagttcatcgaaatgcagctttttctgaacttcaaagatagaatcccatttttaatgaactgaagtagcaaaatcatctttttcattctttaggaaatagctattgccaaagtgaaggtgtagataatacctagtcttgttacataaaggggatgtggtttgcagaagaattttctttataaaattgaagttttaagggacgtcagtgtttatgccatttttccagttccaaaatgattccattccattctagaaatttgaagtatgtaacctgaaatccttaataaaatttggatttaattttataaaatgtactggtgatattttgggtgtttttttttaaatgaatgtatatactttttttttgaagagtggagagtagtgatgtctagagggagctattttgtgctgaggccactatgttctgtaaatatataattttaagagcaacctcacaatccctgctaagtggagtttattatttgaagactaaaatggaattccatagttcctgataggttatattctgggttattattctgagttatctacaaacatttttgagatttgtctttacactctgattgtagtttccagcagcccatgcacactgccaagtaagtctcattttttcctgttagaaatggtgaaatatcatataatcacttataaagaaaactgatatgaaaaaattttagagttgtttgctttatggtcactcaagtagggtaagtgttccacaaattccacaagttgatagtttaacatggatgtctgaaagccacatatataatttcttaggattcttaaattagtaaatctagcttactgaagcagtattagcatcactattttagattgcaaaaataccttaattgtgtggaactggcttgtagagtggtacttaagaaaaatgggattctacctctatttctgttttagcacacttaatcaggaaaggatatattaactttcataaaaatatttttgttgtgtgaataggttaatgatatggtaaggcccctaaaataactgaattaattgtttattgtaattgtaggccattcccattattaaaaataaagacaaaacttgaagtaactgaaaatcttatcgtgctatgtagaaatattgaactaatattcaaatatttgaatgctttggtttcagggattggtttaaaattggagtccttttttatgggttagtcttacaaaaatttaagcctttatatttttgactttaaatcaaaacaaatgttattttaaatgtacagaatagattggtagtgcagaagagtgtaagttcttcataggagctttagaaaagagaaatatgtgctaattcagtttttttttaatctgcactgtacatatatacttggtaattatgagcttgattttgtttttggaaatatgtgttcataatttaggtaatttgctacttaaagcactaagtctctgatacctgaaaagtacatgtaaatggtgatggtgaaataatactgcagttaacttaatagatgtatactggtgatttttgtatgctggattaaaactccagatattaaaatataacctggataaaaagccaa

SEQ ID NO: 20936 - DNA, 1896 bp, Homo sapiens
  source 1..1896: mol_type = unassigned DNA
tcgcggcgccgcctcctgctcctcccgctgctgctgccgctgccgccctgagtcactgcctgcgcagctccggccgcctggctccccatactagtcgccgatatttggagttcttacaacatggcagacattgacaacaaagaacagtctgaacttgatcaagatttggatgatgttgaagaagtagaagaagaggaaactggtgaagaaacaaaactcaaagcacgtcagctaactgttcagatgatgcaaaatcctcagattcttgcagcccttcaagaaagacttgatggtctggtagaaacaccaacaggatacattgaaagcctgcctagggtagttaaaagacgagtgaatgctctcaaaaacctgcaagttaaatgtgcacagatagaagccaaattctatgaggaagttcacgatcttgaaaggaagtatgctgttctctatcagcctctatttgataagcgatttgaaattattaatgcaatttatgaacctacggaagaagaatgtgaatggaaaccagatgaagaagatgagatttcggaggaattgaaagaaaaggccaagattgaagatgagaaaaaagatgaagaaaaagaagaccccaaaggaattcctgaattttggttaactgtttttaagaatgttgacttgctcagtgatatggttcaggaacacgatgaacctattctgaagcacttgaaagatattaaagtgaagttctcagatgctggccagcctatgagttttgtcttagaatttcactttgaacccaatgaatattttacaaatgaagtgctgacaaagacatacaggatgaggtcagaaccagatgattctgatcccttttcttttgatggaccagaaattatgggttgtacagggtgccagatagattggaaaaaaggaaagaatgtcactttgaaaactattaagaagaagcagaaacacaagggacgtgggacagttcgtactgtgactaaaacagtttccaatgactctttctttaacttttttgcccctcctgaagttcctgagagtggagatctggatgatgatgctgaagctatccttgctgcagacttcgaaattggtcactttttacgtgagcgtataatcccaagatcagtgttatattttactggagaagctattgaagatgatgatgatgattatgatgaagaaggtgaagaagcggatgaggaaggggaagaagaaggagatgaggaaaatgatccagactatgacccaaagaaggatcaaaacccagcagagtgcaagcagcagtgaagcaggatgtatgtggccttgaggataacctgcactggtctaccttctgcttccctggaaaggatgaatttacatcatttgacaagcctattttcaagttatttgttgtttgtttgcttgtttttgtttttgcagctaaaataaaaatttcaaatacaattttagttcttacaagataatgtcttaattttgtaccaattcaggtagaagtagaggcctaccttgaattaagggttatactcagtttttaacacattgttgaagaaaaggtaccagctttggaacgagatgctatactaataagcaagtgtaaaaaaaaaaaaaaaagaggaagaaaatcttaagtgattgatgctgttttcttttaaaaaaaaaaaaaaaaattcattttctttgggttagagctagagagaaggccccaagcttctatggtttcttctaattcttattgcttaaagtatgagtatgtcacttacccgtgcttctgtttactgtgtaattaaaatgggtagtactgtttacctaactacctcatggatgtgttaaggcatattgagttaaatctcatataatgtttctcaatcttgttaaaagctcaaa

SEQ ID NO: 20937 - DNA, 2031 bp, Homo sapiens
  source 1..2031: mol_type = unassigned DNA
cttttttagcgccatctgctcgcggcgccgcctcctgctcctcccgctgctgctgccgctgccgccctgagtcactgcctgcgcagctccggccgcctggctccccatactagtcgccgcaaagaacagtctgaacttgatcaagatttggatgatgttgaagaagtagaagaagaggaaactggtgaagaaacaaaactcaaagcacgtcagctaactgttcagatgatgcaaaatcctcagattcttgcagcccttcaagaaagacttgatggtctggtagaaacaccaacaggatacattgaaagcctgcctagggtagttaaaagacgagtgaatgctctcaaaaacctgcaagttaaatgtgcacagatagaagccaaattctatgaggaagttcacgatcttgaaaggaagtatgctgttctctatcagcctctatttgataaggaggaattgaaagaaaaggccaagattgaagatgagaaaaaagatgaagaaaaagaagaccccaaaggaattcctgaattttggttaactgtttttaagaatgttgacttgctcagtgatatggttcaggaacacgatgaacctattctgaagcacttgaaagatattaaagtgaagttctcagatgctggccagcctatgagttttgtcttagaatttcactttgaacccaatgaatattttacaaatgaagtgctgacaaagacatacaggatgaggtcagaaccagatgattctgatcccttttcttttgatggaccagaaattatgggttgtacagggtgccagatagattggaaaaaaggaaagaatgtcactttgaaaactattaagaagaagcagaaacacaagggacgtgggacagttcgtactgtgactaaaacagtttccaatgactctttctttaacttttttgcccctcctgaagttcctgagagtggagatctggatgatgatgctgaagctatccttgctgcagacttcgaaattggtcactttttacgtgagcgtataatcccaagatcagtgttatattttactggagaagctattgaagatgatgatgatgattatgatgaagaaggtgaagaagcggatgaggaaggggaagaagaaggagatgaggaaaatgatccagactatgacccaaagaaggatcaaaacccagcagagtgcaagcagcagtgaagcaggatgtatgtggccttgaggataacctgcactgtaatagcctaaacacaactcttatttacttacagccttatgtttttgtattttcttggtagactaggtaatttttttttaaaggacaggaaactgatattttaaagaccaatttgttctacctagcattttaactagtttttctgccagctatgttgaatgcacaaattctgtcacgcatgttcattcattgctacataatttggttcttctggaatatttttatgtagctcttggagtacagctatgaaaattaacaactgttaaaggaaataccttttttttttttttgtaattttttccttgaagaaccaaagtattttttcagctggttgttgaatagggttaagtccgcttggattagctgtgcctttcattactttgttacagaaatgcagtgacttatactaagacaatttattgtttaaaaaaaaaattggcaagacaactatatggttaagaatttccagtatgaccacacccaataactgttattagagtgttaatggattattgtgttttaggtgacatagttaactgtaaagtaacctgactcagtatagttactggtaccacagtgaggtgaataaaacgggattttcagaagttagcctgaatttaactgtatttttaaatttaacctccattaactaagcatcttttctttgtggtagggtctaccttctgcttccctggaaaggatgaatttacatcatttgacaagcctattttcaagttatttgttgtttgtttgcttgtttttgtttttgcagctaaaataaaaatttcaaatacaat

SEQ ID NO: 20938 - DNA, 1675 bp, Homo sapiens
  source 1..1675: mol_type = unassigned DNA
ctacgtgctgacgctaattgtatatgagcgcgagcggcgggctcttgggtcttttttagcgccatctgctcgcggcgccgcctcctgctcctcccgctgctgctgccgctgccgccctgagtcactgcctgcgcagctccggccgcctggctccccatactagtcgccgatatttggagttcttacaacatggcagacattgacaacacgtcagctaactgttcagatgatgcaaaatcctcagattcttgcagcccttcaagaaagacttgatggtctggtagaaacaccaacaggatacattgaaagcctgcctagggtagttaaaagacgagtgaatgctctcaaaaacctgcaagttaaatgtgcacagatagaagccaaattctatgaggaagttcacgatcttgaaaggaagtatgctgttctctatcagcctctatttgataagcgatttgaaattattaatgcaatttatgaacctacggaagaagaatgtgaatggaaaccagatgaagaagatgagatttcggaattgaaagaaaaggccaagattgaagatgagaaaaaagatgaagaaaaagaagaccccaaaggaattcctgaattttggttaactgtttttaagaatgttgacttgctcagtgatatggttcaggaacacgatgaacctattctgaagcacttgaaagatattaaagtgaagttctcagatgctggccagcctatgagttttgtcttagaatttcactttgaacccaatgaatattttacaaatgaagtgctgacaaagacatacaggatgaggtcagaaccagatgattctgatcccttttcttttgatggaccagaaattatgggttgtacagggtgccagatagattggaaaaaaggaaagaatgtcactttgaaaactattaagaagaagcagaaacacaagggacgtgggacagttcgtactgtgactaaaacagtttccaatgactctttctttaacttttttgcccctcctgaagttcctgagagtggagatctggatgatgatgctgaagctatccttgctgcagacttcgaaattggtcactttttacgtgagcgtataatcccaagatcagtgttatattttactggagaagctattgaagatgatgatgatgattatgatgaagaaggtgaagaagcggatgaggaaggggaagaagaaggagatgaggaaaatgatccagactatgacccaaagaaggatcaaaacccagcagagtgcaagcagcagtgaagcaggatgtatgtggccttgaggataacctgcactgtaatagcctaaacacaactcttatttacttacagccttatgtttttgtattttcttggtagactaggtaatttttttttaaaggacaggaaactgatattttaaagaccaatttgttctacctagcattttaactagtttttctgccagctatgttgaatgcacaaattctgtcacgcatgttcattcattgctacataatttggttcttctggaatatttttatgtagctcttggagtacagctatgaaaattaacaactgttaaaggaaataccttttttttttttttgtaattttttccttgaagaaccaaagtattttttcagctggttgttgaatagggttaagtccgcttggatta

SEQ ID NO: 20939 - DNA, 1597 bp, Homo sapiens
  source 1..1597: mol_type = unassigned DNA
gtgctgacgctaattgtatatgagcgcgagcggcgggctcttgggtcttttttagcgccatctgctcgcggcgccgcctcctgctcctcccgctgctgctgccgctgccgccctgagtcactgcctgcgcagctccggccgcctggctccccatactagtcgccgcctgcctagggtagttaaaagacgagtgaatgctctcaaaaacctgcaagttaaatgtgcacagatagaagccaaattctatgaggaagttcacgatcttgaaaggaagtatgctgttctctatcagcctctatttgataagcgatttgaaattattaatgcaatttatgaacctacggaagaagaatgtgaatggaaaccagatgaagaagatgagatttcggaggaattgaaagaaaaggccaagattgaagatgagaaaaaagatgaagaaaaagaagaccccaaaggaattcctgaattttggttaactgtttttaagaatgttgacttgctcagtgatatggttcaggaacacgatgaacctattctgaagcacttgaaagatattaaagtgaagttctcagatgctggccagcctatgagttttgtcttagaatttcactttgaacccaatgaatattttacaaatgaagtgctgacaaagacatacaggatgaggtcagaaccagatgattctgatcccttttcttttgatggaccagaaattatgggttgtacagggtgccagatagattggaaaaaaggaaagaatgtcactttgaaaactattaagaagaagcagaaacacaagggacgtgggacagttcgtactgtgactaaaacagtttccaatgactctttctttaacttttttgcccctcctgaagttcctgagagtggagatctggatgatgatgctgaagctatccttgctgcagacttcgaaattggtcactttttacgtgagcgtataatcccaagatcagtgttatattttactggagaagctattgaagatgatgatgatgattatgatgaagaaggtgaagaagcggatgaggaaggggaagaagaaggagatgaggaaaatgatccagactatgacccaaagaaggatcaaaacccagcagagtgcaagcagcagtgaagcaggatgtatgtggccttgaggataacctgcactgtaatagcctaaacacaactcttatttacttacagccttatgtttttgtattttcttggtagactaggtaatttttttttaaaggacaggaaactgatattttaaagaccaatttgttctacctagcattttaactagtttttctgccagctatgttgaatgcacaaattctgtcacgcatgttcattcattgctacataatttggttcttctggaatatttttatgtagctcttggagtacagctatgaaaattaacaactgttaaaggaaataccttttttttttttttgtaattttttccttgaagaaccaaagtattttttcagctggttgttgaatagggttaagtccgcttggattagctgtgcctttcattactttgttacagaaatgcagtgacttatactaagacaatttattgttt

SEQ ID NO: 20940 - DNA, 1967 bp, Homo sapiens
  source 1..1967: mol_type = unassigned DNA
gctgacgctaattgtatatgagcgcgagcggcgggctcttgggtcttttttagcgccatctgctcgcggcgccgcctcctgctcctcccgctgctgctgccgctgccgccctgagtcactgcctgcgcagctccggccgcctggctccccatactagtcgccgatatttggagttcttacaacatggcagacattgacaacctgcctagggtagttaaaagacgagtgaatgctctcaaaaacctgcaagttaaatgtgcacagatagaagccaaattctatgaggaagttcacgatcttgaaaggaagtatgctgttctctatcagcctctatttgataagcgatttgaaattattaatgcaatttatgaacctacggaagaagaatgtgaatggaaaccagatgaagaagatgagatttcggaggaattgaaagaaaaggccaagattgaagatgagaaaaaagatgaagaaaaagaagaccccaaaggaattcctgaattttggttaactgtttttaagaatgttgacttgctcagtgatatggttcaggaacacgatgaacctattctgaagcacttgaaagatattaaagtgaagttctcagatgctggccagcctatgagttttgtcttagaatttcactttgaacccaatgaatattttacaaatgaagtgctgacaaagacatacaggatgaggtcagaaccagatgattctgatcccttttcttttgatggaccagaaattatgggttgtacagggtgccagatagattggaaaaaaggaaagaatgtcactttgaaaactattaagaagaagcagaaacacaagggacgtgggacagttcgtactgtgactaaaacagtttccaatgactctttctttaacttttttgcccctcctgaagttcctgagagtggagatctggatgatgatgctgaagctatccttgctgcagacttcgaaattggtcactttttacgtgagcgtataatcccaagatcagtgttatattttactggagaagctattgaagatgatgatgatgattatgatgaagaaggtgaagaagcggatgaggaaggggaagaagaaggagatgaggaaaatgatccagactatgacccaaagaaggatcaaaacccagcagagtgcaagcagcagtgaagcaggatgtatgtggccttgaggataacctgcactgtaatagcctaaacacaactcttatttacttacagccttatgtttttgtattttcttggtagactaggtaatttttttttaaaggacaggaaactgatattttaaagaccaatttgttctacctagcattttaactagtttttctgccagctatgttgaatgcacaaattctgtcacgcatgttcattcattgctacataatttggttcttctggaatatttttatgtagctcttggagtacagctatgaaaattaacaactgttaaaggaaataccttttttttttttttgtaattttttccttgaagaaccaaagtattttttcagctggttgttgaatagggttaagtccgcttggattagctgtgcctttcattactttgttacagaaatgcagtgacttatactaagacaatttattgtttaaaaaaaaaattggcaagacaactatatggttaagaatttccagtatgaccacacccaataactgttattagagtgttaatggattattgtgttttaggtgacatagttaactgtaaagtaacctgactcagtatagttactggtaccacagtgaggtgaataaaacgggattttcagaagttagcctgaatttaactgtatttttaaatttaacctccattaactaagcatcttttctttgtggtagggtctaccttctgcttccctggaaaggatgaatttacatcatttgacaagcctattttcaagttatttgttgtttgtttgcttgttt

SEQ ID NO: 20941 - DNA, 1838 bp, Homo sapiens
  source 1..1838: mol_type = unassigned DNA
cttttttagcgccatctgctcgcggcgccgcctcctgctcctcccgctgctgctgccgctgccgccctgagtcactgcctgcgcagctccggccgcctggctccccatactagtcgccgatatttggagttcttacaacatggcagacattgacaacaaagaacagtctgaacttgatcaagatttggatgatgttgaagaagtagaagaagaggaaactggtgaagaaacaaaactcaaagcacgtcagctaactgttcagatgatgcaaaatcctcagattcttgcagcccttcaagaaagacttgatggtctggtagaaacaccaacaggatacattgaaagcctgcctagggtagttaaaagacgagtgaatgctctcaaaaacctgcaagttaaatgtgcacagatagaagccaaattctatgaggaagttcacgatcttgaaaggaagtatgctgttctctatcagcctctatttgataagcgatttgaaattattaatgcaatttatgaacctacggaagaagaatgtgaatggaaaccagatgaagaagatgagatttcggaggaattgaaagaaaaggccaagattgaagatgagaaaaaagatgaagaaaaagaagaccccaaaggaattcctgaattttggttaactgtttttaagaatgttgacttgctcagtgatatggttcaggaacacgatgaacctattctgaagcacttgaaagatattaaagtgaagttctcagatgctggccagcctatgagttttgtcttagaatttcactttgaacccaatgaatattttacaaatgaagtgctgacaaagacatacaggatgaggtcagaaccagatgattctgatcccttttcttttgatggaccagaaattatgggttgtacagggtgccagatagattggaaaaaaggaaagaatgtcactttgaaaactattaagaagaagcagaaacacaagggacgtgggacagttcgtactgtgactaaaacagtttccaatgactctttctttaacttttttgcccctcctgaagttcctgagagtggagatctggatgatgatgctgaagctatccttgctgcagacttcgaaattggtcactttttacgtgagcgtataatcccaagatcagtgttatattttactggagaagctattgaagatgatgatgatgattatgatgaagaaggtgaagaagcggatgaggtaatgtttaccaaatgagcaaataattctctgtggttaacacattgagaagcaaattgaatgacttatgtattcctttgctataatcattctgtgatttgggataaaaacattttggaaaacatgattttagaattctacagccaaacaatgtatgtataaggtttcaataaataaattgcaaaactcagcaacatttttttatttcaaataattttgttctgctgcagggttatcagctctttgaagaagtcaaaagctgcagtaaacttttccaacgttggctgcagtaactattttcaataaaagctgtctggatgtctcaagttgtgttgggaaatttttcatattagaagctttcaaattaaattgtattatcatcaaagtctgtaatcatgaaaatctgttgatccgtagagtaacttgtattaaattttccctacattatgagccagtttacctactatgtacatacttcatggatgcattttgaactttaatataggaaggggaagaagaaggagatgaggaaaatgatccagactatgacccaaaggtgagcaaaattagtgctgctttctattaaatttaagatagctaaagtaagagt

SEQ ID NO: 20942 - DNA, 1074 bp, Homo sapiens
  source 1..1074: mol_type = unassigned DNA
ggcggaggctgcgaattccgacgggagggaggggctgtggagggacgagtccccgaggcggggagggggcgggggaggctgcgacgctcccgggctctccgcccattgggggcggccgcgcggggaggggaaacccccggcggcttcgctccacacgtggtaatgggcttcatggccactggctgggcctggttggagacccttgccctcggtctgtgcttactttgaaagttgtagagacggtggaatgtgaaaaggaaggatatttggagttcttacaacatggcagacattgacaacaaagaacagtctgaacttgatcaagatttggatgatgttgaagaagtagaagaagaggaaactggtgaagaaacaaaactcaaagcacgtcagctaactgttcagatgatgcaaaatcctcagattcttgcagcccttcaagaaagacttgatggtctggtagaaacaccaacaggatacattgaaagcctgcctagggtagttaaaagacgagtgaatgctctcaaaaacctgcaagttaaatgtgcacagatagaagccaaattctatgaggaagttcacgatcttgaaaggaagtatgctgttctctatcagcctctatttgataagcgatttgaaattattaatgcaatttatgaacctacggaagaagaatgtgaatggaaaccagatgaagaagatgagatttcggaggaattgaaagaaaaggccaagattgaagatgagaaaaaagatgaagaaaaagaagaccccaaaggaattcctgaattttggttaactgtttttaagaatgttgacttgctcagtgatatggttcaggaacacgatgaacctattctgaagcacttgaaagatattaaagtgaagttctcagatgctggccagcctatgagttttgtcttagaatttcactttgaacccaatgaatattttacaaatgaagtgctgacaaagacatacaggatgaggtcagaaccagatgattctgatcccttttcttttgatggaccagaaattatgggttgtacagggtgccagatagattggaaaaaa

SEQ ID NO: 20943 - DNA, 1981 bp, Homo sapiens
  source 1..1981: mol_type = unassigned DNA
aaagaacagtctgaacttgatcaagatttggatgatgttgaagaagtagaagaagaggaaactggtgaagaaacaaaactcaaagcacgtcagctaactgttcagatgatgcaaaatcctcagattcttgcagcccttcaagaaagacttgatggtctggtagaaacaccaacaggatacattgaaagcctgcctagggtagttaaaagacgagtgaatgctctcaaaaacctgcaagttaaatgtgcacagatagaagccaaattctatgaggaagttcacgatcttgaaaggaagtatgctgttctctatcagcctctatttgataagcgatttgaaattattaatgcaatttatgaacctacggaagaagaatgtgaatggaaaccagatgaagaagatgagatttcggaggaattgaaagaaaaggccaagattgaagatgagaaaaaagatgaagaaaaagaagaccccaaaggaattcctgaattttggttaactgtttttaagaatgttgacttgctcagtgatatggttcaggaacacgatgaacctattctgaagcacttgaaagatattaaagtgaagttctcagatgctggccagcctatgagttttgtcttagaatttcactttgaacccaatgaatattttacaaatgaagtgctgacaaagacatacaggatgaggtcagaaccagatgattctgatcccttttcttttgatggaccagaaattatgggttgtacagggtgccagatagattggaaaaaaggaaagaatgtcactttgaaaactattaagaagaagcagaaacacaagggacgtgggacagttcgtactgtgactaaaacagtttccaatgactctttctttaacttttttgcccctcctgaagttcctgagagtggagatctggatgatgatgctgaagctatccttgctgcagacttcgaaattggtcactttttacgtgagcgtataatcccaagatcagtgttatattttactggagaagctattgaagatgatgatgatgattatgatgaagaaggtgaagaagcggatgaggaaggggaagaagaaggagatgaggaaaatgatccagactatgacccaaagaaggatcaaaacccagcagagtgcaagcagcagtgaagcaggatggtctaccttctgcttccctggaaaggatgaatttacatcatttgacaagcctattttcaagttatttgttgtttgtttgcttgtttttgtttttgcagctaaaataaaaatttcaaatacaattttagttcttacaagataatgtcttaattttgtaccaattcaggtagaagtagaggcctaccttgaattaagggttatactcagtttttaacacattgttgaagaaaaggtaccagctttggaacgagatgctatactaataagcaagtgtaaaaaaaaaaaaaaaagaggaagaaaatcttaagtgattgatgctgttttcttttaaaaaaaaaaaaaaaaattcattttctttgggttagagctagagagaaggccccaagcttctatggtttcttctaattcttattgcttaaagtatgagtatgtcacttacccgtgcttctgtttactgtgtaattaaaatgggtagtactgtttacctaactacctcatggatgtgttaaggcatattgagttaaatctcatataatgtttctcaatcttgttaaaagctcaaaattttgggcctatttgtaatgccagtgtgacactaagcattttgttcacaccacgctttgataactaaactggaaaacaaaggtgttaagtacctctgttctggatctgggcagtcagcactctttttagatctttgtgtggctcctatttttatagaagtggagggatgcactatttcacaaggtccaagatttgttttcagatatttttgatgactgtattgtaaatactacagggatagcactatagt

SEQ ID NO: 20944 - DNA, 2639 bp, Homo sapiens
  source 1..2639: mol_type = unassigned DNA
attcggctgcggtacatctcggcactctagctgcagccgggagaggccttgccgccaccgctgtcgcccaagcctccactgccgctgccacctcagcgccggcctctgcatccccagctccagctccgctctgcgccgctgctgccatcgccgctgccacctccgcagcccgggcctccgccgccgccactcaagcatccgtgagtcattttctgcccatctctggtcgcgcggtctccctggtagagtttgtaggcttgcaagatggcagaagcagattttaaaatggtctcggaacctgtcgcccatggggttgccgaagaggagatggctagctcgactagtgattctggggaagaatctgacagcagtagctctagcagcagcactagtgacagcagcagcagcagcagcactagtggcagcagcagcggcagcggcagcagcagcagcagcagcggcagcactagcagccgcagccgcttgtatagaaagaagagggtacctgagccttccagaagggcgcggcgggccccgttgggaacaaatttcgtggataggctgcctcaggcagttagaaatcgtgtgcaagcgcttagaaacattcaagatgaatgtgacaaggtagataccctgttcttaaaagcaattcatgatcttgaaagaaaatatgctgaactcaacaagcctctgtatgataggcggtttcaaatcatcaatgcagaatacgagcctacagaagaagaatgtgaatggaattcagaggatgaggagttcagcagtgatgaggaggtgcaggataacacccctagtgaaatgcctcccttagagggtgaggaagaagaaaaccctaaagaaaacccagaggtgaaagctgaagagaaggaagttcctaaagaaattcctgaggtgaaggatgaagaaaaggaagttcctaaagaaattcctgaggtaaaggctgaagaaaaagcagattctaaagactgtatggaggcaacccctgaagtaaaagaagatcctaaagaagtcccccaggtaaaggcagatgataaagaacagcctaaagcaacagaggctaaggcaagggctgcagtaagagagactcataaaagagttcctgaggaaaggcttcaggacagtgtagatcttaaaagagctaggaagggaaagcctaaaagagaagaccctaaaggcattcctgactattggctgattgttttaaagaatgttgacaagctcgggcctatgattcagaagtatgatgagcccattctgaagttcttgtcggatgttagcctgaagttctcaaaacctggccagcctgtaagttacacctttgaatttcattttctacccaacccatacttcagaaatgaggtgctggtgaagacatatataataaaggcaaaaccagatcacaatgatcccttcttttcttggggatgggaaattgaagattgcaaaggctgcaagatagactggagaagaggaaaagatgttactgtgacaactacccagagtcgcacaactgctactggagaaattgaaatccagccaagagtggttcctaatgcatcattcttcaacttctttagtcctcctgagattcctatgattgggaagctggaaccacgagaagatgctatcctggatgaggactttgaaattgggcagattttacatgataatgtcatcctgaaatcaatctattactatactggagaagtcaatggtacctactatcaatttggcaaacattatggaaacaagaaatacagaaaataagtcaatctgaaagatttttcaagaatcttaaaatctcaagaagtgaagcagattcatacagccttgaaaaaagtaaaaccctgacctgtaacctgaacactattattccttatagtcaagtttttgtggtttcttggtagtctatattttaaaaatagtcctaaaaagtgtctaagtgccagtttattctatctaggctgttgtagtataatattcttcaaaatatgtaagctgttgtcaattatctaaagcatgttagtttggtgctacacagtgttgatttttgtgatgtcctttggtcatgtttctgttagactgtagctgtgaaactgtcagaattgttaactgaaacaaatatttgcttgaaaaaaaaagttcatgaagtaccaatgcaagtgttttatttttttcttttttccagcccataagactaagggtttaaatctgcttgcactagctgtgccttcattagtttgctatagaaatccagtacttatagtaaataaaacagtgtattttgaagtttgactgcttgaaaaagattagcatacatctaatgtgaaaagaccacatttgattcaactgagaccttgtgtatgtgacatatagtggcctataaatttaatcataatgatgttattgtttaccactgaggtgttaatataacatagtatttttgaaaaagtttcttcatcttatattgtgtaattgtaaactaaagataccgtgttttctttgtattgtgttctaccttccctttcactgaaaatgatcacttcatttgatactgtttttcatgttcttgtattgcaacctaaaataaataaatattaaagtgtgttatactataaaaa

SEQ ID NO: 20945 - DNA, 2555 bp, Homo sapiens
  source 1..2555: mol_type = unassigned DNA
attcggctgcggtacatctcggcactctagctgcagccgggagaggccttgccgccaccgctgtcgcccaagcctccactgccgctgccacctcagcgccggcctctgcatccccagctccagctccgctctgcgccgctgctgccatcgccgctgccacctccgcagcccgggcctccgccgccgccactcaagcagattttaaaatggtctcggaacctgtcgcccatggggttgccgaagaggagatggctagctcgactagtgattctggggaagaatctgacagcagtagctctagcagcagcactagtgacagcagcagcagcagcagcactagtggcagcagcagcggcagcggcagcagcagcagcagcagcggcagcactagcagccgcagccgcttgtatagaaagaagagggtacctgagccttccagaagggcgcggcgggccccgttgggaacaaatttcgtggataggctgcctcaggcagttagaaatcgtgtgcaagcgcttagaaacattcaagatgaatgtgacaaggtagataccctgttcttaaaagcaattcatgatcttgaaagaaaatatgctgaactcaacaagcctctgtatgataggcggtttcaaatcatcaatgcagaatacgagcctacagaagaagaatgtgaatggaattcagaggatgaggagttcagcagtgatgaggaggtgcaggataacacccctagtgaaatgcctcccttagagggtgaggaagaagaaaaccctaaagaaaacccagaggtgaaagctgaagagaaggaagttcctaaagaaattcctgaggtgaaggatgaagaaaaggaagttcctaaagaaattcctgaggtaaaggctgaagaaaaagcagattctaaagactgtatggaggcaacccctgaagtaaaagaagatcctaaagaagtcccccaggtaaaggcagatgataaagaacagcctaaagcaacagaggctaaggcaagggctgcagtaagagagactcataaaagagttcctgaggaaaggcttcaggacagtgtagatcttaaaagagctaggaagggaaagcctaaaagagaagaccctaaaggcattcctgactattggctgattgttttaaagaatgttgacaagctcgggcctatgattcagaagtatgatgagcccattctgaagttcttgtcggatgttagcctgaagttctcaaaacctggccagcctgtaagttacacctttgaatttcattttctacccaacccatacttcagaaatgaggtgctggtgaagacatatataataaaggcaaaaccagatcacaatgatcccttcttttcttggggatgggaaattgaagattgcaaaggctgcaagatagactggagaagaggaaaagatgttactgtgacaactacccagagtcgcacaactgctactggagaaattgaaatccagccaagagtggttcctaatgcatcattcttcaacttctttagtcctcctgagattcctatgattgggaagctggaaccacgagaagatgctatcctggatgaggactttgaaattgggcagattttacatgataatgtcatcctgaaatcaatctattactatactggagaagtcaatggtacctactatcaatttggcaaacattatggaaacaagaaatacagaaaataagtcaatctgaaagatttttcaagaatcttaaaatctcaagaagtgaagcagattcatacagccttgaaaaaagtaaaaccctgacctgtaacctgaacactattattccttatagtcaagtttttgtggtttcttggtagtctatattttaaaaatagtcctaaaaagtgtctaagtgccagtttattctatctaggctgttgtagtataatattcttcaaaatatgtaagctgttgtcaattatctaaagcatgttagtttggtgctacacagtgttgatttttgtgatgtcctttggtcatgtttctgttagactgtagctgtgaaactgtcagaattgttaactgaaacaaatatttgcttgaaaaaaaaagttcatgaagtaccaatgcaagtgttttatttttttcttttttccagcccataagactaagggtttaaatctgcttgcactagctgtgccttcattagtttgctatagaaatccagtacttatagtaaataaaacagtgtattttgaagtttgactgcttgaaaaagattagcatacatctaatgtgaaaagaccacatttgattcaactgagaccttgtgtatgtgacatatagtggcctataaatttaatcataatgatgttattgtttaccactgaggtgttaatataacatagtatttttgaaaaagtttcttcatcttatattgtgtaattgtaaactaaagataccgtgttttctttgtattgtgttctaccttccctttcactgaaaatgatcacttcatttgatactgtttttcatgttcttgtattgcaacctaaaataaataaatattaaagtgtgttatactat

SEQ ID NO: 20946 - DNA, 2511 bp, Homo sapiens
  source 1..2511: mol_type = unassigned DNA
cttgctcgcggagagaggagctaggagcctcggccaatgggagccggcgttgttggaggccacggcggcgcagccccaaagcgagcgaagctagggtcgccgccactgccgcaggaggcgtgaggggataaaaacattcagatggcagatcacagtttttcagatggggttccttcagattccgtggaagctgctaaaaatgcaagtaacacagaaaagctcacagatcaggtgatgcagaatcctcgagttctggcagctttacaggagcgacttgacaatgtccctcacaccccttccagctacatcgaaactttacctaaagcagtaaaaagaagaattaatgcattgaaacaacttcaggtgagatgtgctcacatagaagccaagttctatgaagaggtacatgacttggaaagaaagtatgcagcgctataccagcctctctttgacaagagaagagaatttatcaccggcgatgttgaaccaacagatgcggaatcggaatggcacagtgaaaatgaagaggaagagaaattggctggagacatgaaaagtaaagtagtcgtcacagaaaaagcagcggcaacggctgaagagccagatcccaaaggaattccagagttctggtttaccatcttcagaaatgtggacatgctgagtgaattagtccaggaatatgatgaaccaatcttgaaacacctgcaggatattaaagtgaaattttctgaccctggacagcctatgtcttttgtgttagagttccactttgaacccaacgactactttaccaactcagtcctgacaaaaacctacaagatgaaatcagaaccagataaggctgatcccttttcctttgaaggtcctgagattgtggactgtgacgggtgtactattgactggaagaaaggaaagaatgttactgtcaaaaccatcaagaaaaagcagaagcataagggtcgaggcactgttagaacaattacgaaacaagtacccaatgagtcctttttcaacttcttcaatccattgaaagcatccggggatggagaatcactggatgaagattctgaattcacattagcctctgattttgaaattggacactttttccgtgagcggatagtcccgcgggctgtgctgtacttcactggggaggccatagaagatgatgacaattttgaagaaggtgaagaaggagaagaggaggaattagaaggtgacgaggagggagaagacgaggatgatgcggaaattaaccccaaggtgtaatttttgtctgttaatcattcatacgtttctagaaggaacccagccagccggcggaatgcaagcagcagtaggaagcggaggcgggtgcctggcagaccggctgtcgggactccaggcctgtgggcggggcctcggtccttgccgcagcacaatcccgtggacagagcttactccatctaactcgttttcaagtgcatgattttcactttcacttttcctttttccttattattttgcttaacttgtacagtggcaactgaaatgcatttcagaaataggaggtttcgtccagcaccctctgcagccttggtgcctgtagctctggacttccctgggcctttccctgtgggagggccctgtagaccacatcagggtggggtgggggtcacttggcaaaaagggccgaggtctggtgatgtggttcccaggatctggaacctctcccacccctcctgcagttggactgaattcttccctttcatccgaagaaacccacttgctgtttccagccgctgaatctgctgagtgtgcagcctgcatcacctgctgtatgccgatcatctcagaaagggctgtgtagagtagggccctgttctccttaggatgttgcttcttgatttttttttttttttaggggtgggtcagggttgtgacacaccagcccaggtgagagctgctgcgggtcacctcatatttatttatcccttcttgcctgtgaggactgcggcttttcgctgtggctcgtccttaacgtttctgaaccaccttggtgccctgagcaggaagatgtgccacttcctagcaggcgcaaggcctgtgcggaagaaacgccgctccctgccaccagggctgaagatgcgagcccgtcctcatgacgcaggcgccaccctgctgccggagccgggcttcggcagtcttctccactgagggactgggctgggaagtcctgcgtttcagtggagcgtatgagcgtcaagtcctgctttctcagtagccccattgcggggccccaccattcatcctgtctgaaggtcctgggtttggtgtgaccgcttggcggctggtgggtggggttttcaagtgggtgacggcgctctccggcagccggggatggccgtgtccgcactgaccaggcctgtggagagtgctcggcctaaccttagaacacatttgtaactgaatacagtgttttcaatttgtacagaatagttagaatattctattaaagtggtgaaacattga

SEQ ID NO: 20947 - DNA, 2479 bp, Homo sapiens
  source 1..2479: mol_type = unassigned DNA
cttgctcgcggagagaggagctaggagcctcggccaatgggagccggcgttgttggaggccacggcggcgcagccccaaagcgagcgaagctagggtcgccgccactgccgcaggaggcgtgaggggataaaaacattcagatggcagatcacagtttttcagatggggttccttcagattccgtggaagctgctaaaaatgcaagtaacacagaaaagctcacagatcaggtgatgcagaatcctcgagttctggcagctttacaggagcgacttgacaatgtccctcacaccccttccagctacatcgaaactttacctaaagcagtaaaaagaagaattaatgcattgaaacaacttcaggtgagatgtgctcacatagaagccaagttctatgaagaggtacatgacttggaaagaaagtatgcagcgctataccagcctctctttgacaagagaagagaatttatcaccggcgatgttgaaccaacagatgcggaatcggaatggcacagtgaaaatgaagaggaagagaaattggctggagacatgaaaagtaaagtagtcgtcacagaaaaagcagcggcaacggctgaagagccagatcccaaaggaattccagagttctggtttaccatcttcagaaatgtggacatgctgagtgaattagtccaggaatatgatgaaccaatcttgaaacacctgcaggatattaaagtgaaattttctgaccctggacagcctatgtcttttgtgttagagttccactttgaacccaacgactactttaccaactcagtcctgacaaaaacctacaagatgaaatcagaaccagataaggctgatcccttttcctttgaaggtcctgagattgtggactgtgacgggtgtactattgactggaagaaaggaaagaatgttactgtcaaaaccatcaagaaaaagcagaagcataagggtcgaggcactgttagaacaattacgaaacaagtacccaatgagtcctttttcaacttcttcaatccattgaaaggcaaggggcagagtaaatcaaaagatgaagattctgaattcacattagcctctgattttgaaattggacactttttccgtgagcggatagtcccgcgggctgtgctgtacttcactggggaggccatagaagatgatgacaattttgaagaaggtgaagaaggagaagaggaggaattagaaggtgacgaggagggagaagacgaggatgatgcggaaattaaccccaagaaggaacccagccagccggcggaatgcaagcagcagtaggaagcggaggcgggtgcctggcagaccggctgtcgggactccaggcctgtgggcggggcctcggtccttgccgcagcacaatcccgtggacagagcttactccatctaactcgttttcaagtgcatgattttcactttcacttttcctttttccttattattttgcttaacttgtacagtggcaactgaaatgcatttcagaaataggaggtttcgtccagcaccctctgcagccttggtgcctgtagctctggacttccctgggcctttccctgtgggagggccctgtagaccacatcagggtggggtgggggtcacttggcaaaaagggccgaggtctggtgatgtggttcccaggatctggaacctctcccacccctcctgcagttggactgaattcttccctttcatccgaagaaacccacttgctgtttccagccgctgaatctgctgagtgtgcagcctgcatcacctgctgtatgccgatcatctcagaaagggctgtgtagagtagggccctgttctccttaggatgttgcttcttgatttttttttttttttaggggtgggtcagggttgtgacacaccagcccaggtgagagctgctgcgggtcacctcatatttatttatcccttcttgcctgtgaggactgcggcttttcgctgtggctcgtccttaacgtttctgaaccaccttggtgccctgagcaggaagatgtgccacttcctagcaggcgcaaggcctgtgcggaagaaacgccgctccctgccaccagggctgaagatgcgagcccgtcctcatgacgcaggcgccaccctgctgccggagccgggcttcggcagtcttctccactgagggactgggctgggaagtcctgcgtttcagtggagcgtatgagcgtcaagtcctgctttctcagtagccccattgcggggccccaccattcatcctgtctgaaggtcctgggtttggtgtgaccgcttggcggctggtgggtggggttttcaagtgggtgacggcgctctccggcagccggggatggccgtgtccgcactgaccaggcctgtggagagtgctcggcctaaccttagaacacatttgtaactgaatacagtgttttcaatttgtacagaatagttagaatattctattaaagtggtgaaacattgagtcagc

SEQ ID NO: 20948 - DNA, 860 bp, Homo sapiens
  source 1..860: mol_type = unassigned DNA
ggtcggggcaggcagcggcggccgcggcggggcctggggcttggggcctggagcccgggcctggggcgctggcgggaggcccctcccaactcccggcgcgcctcgcccggctgcccgcctcactgaaggtcaaggcgctttgttctgcgccgcgggcggcctcctgggcggcggccccttggaggaggcgaagacggcgagaggcggcggccgctcaaatctcccgctagcccagcccgccccgcgtgcgggggctgtggcggttacacggccgggcgcgccggagcgttcaggcttcccgtttttaaggggataaaaacattcagatggcagatcacagtttttcagatggggttccttcagattccgtggaagctgctaaaaatgcaagtaacacagaaaagctcacagatcaggtgatgcagaatcctcgagttctggcagctttacaggagcgacttgacaatgtccctcacaccccttccagctacatcgaaactttacctaaagcagtaaaaagaagaattaatgcattgaaacaacttcaggtgagatgtgctcacatagaagccaagttctatgaagaggtacatgacttggaaagaaagtatgcagcgctataccagcctctctttgacaagagaagagaatttatcaccggcgatgttgaaccaacagatgcggaatcggaatggcacagtgaaaatgaagaggaagagaaattggctggagacatgaaaagtaaagtagtcgtcacagaaaaagcagcggcaacggctgaagagccagatcccaaaggaattccagagttctggtttaccatcttcagaaatgtggacatgctgagtgaattagtccag

SEQ ID NO: 20949 - DNA, 1941 bp, Homo sapiens
  source 1..1941: mol_type = unassigned DNA
cttgctcgcggagagaggagctaggagcctcggccaatgggagccggcgttgttggaggccacggcggcgcagccccaaagcgagcgaagctagggtcgccgccactgccgcaggaggcgtgagggaaaagtgttttaggcttccagagtagaaatctgatattacttcgtttgattcttcgaccactatggtgataggaagtagctgatctctgcaggaaactgctgttacctggcctcagctgaatttttgtgggacctcctgaggggataaaaacattcagatggcagatcacagtttttcagatggggttccttcagattccgtggaagctgctaaaaatgcaagtaacacagaaaagctcacagatcaggtgatgcagaatcctcgagttctggcagctttacaggagcgacttgacaatgtccctcacaccccttccagctacatcgaaactttacctaaagcagtaaaaagaagaattaatgcattgaaacaacttcaggtgagatgtgctcacatagaagccaagttctatgaagaggtacatgacttggaaagaaagtatgcagcgctataccagcctctctttgacaagagaagagaatttatcaccggcgatgttgaaccaacagatgcggaatcggaatggcacagtgaaaatgaagaggaagagaaattggctggagacatgaaaagtaaagtagtcgtcacagaaaaagcagcggcaacggctgaagagccagatcccaaaggaattccagagttctggtttaccatcttcagaaatgtggacatgctgagtgaattagtccaggaatatgatgaaccaatcttgaaacacctgcaggatattaaagtgaaattttctgaccctggacagcctatgtcttttgtgttagagttccactttgaacccaacgactactttaccaactcagtcctgacaaaaacctacaagatgaaatcagaaccagataaggctgatcccttttcctttgaaggtcctgagattgtggactgtgacgggtgtactattgactggaagaaaggaaagaatgttactgtcaaaaccatcaagaaaaagcagaagcataagggtcgaggcactgttagaacaattacgaaacaagtacccaatgagtcctttttcaacttcttcaatccattgaaagcatccggggatggagaatcactggatgaagattctgaattcacattagcctctgattttgaaattggacactttttccgtgagcggatagtcccgcgggctgtgctgtacttcactggggaggccatagaagatgatgacaattttgaagaaggtgaagaaggagaagaggaggaattagaaggtgacgaggagggagaagacgaggatgatgcggaaattaaccccaagaaggaacccagccagccggcggaatgcaagcagcagtaggaagcggaggcgggtgcctggcagaccggctgtcgggactccaggcctgtgggcggggcctcggtccttgccgcagcacaatcccgtggacagagcttactccatctaactcgttttcaagtgcatgattttcactttcacttttcctttttccttattattttgcttaacttgtacagtggcaactgaaatgcatttcagaaataggaggtttcgtccagcaccctctgcagccttggtgcctgtagctctggacttccctgggcctttccctgtgggagggccctgtagaccacatcagggtggggtgggggtcacttggcaaaaagggccgaggtctggtgatgtggttcccaggatctggaacctctcccacccctcctgcagttggactgaattcttccctttcatccgaagaaacccacttgctgtttccagccgctgaatctgctgagtgtgcagcctgcatcacctgctgtatgccgatcatctcaga

SEQ ID NO: 20950 - DNA, 535 bp, Homo sapiens
  source 1..535: mol_type = unassigned DNA
aggcgtgaggtgcggagacacgggtgctgggccggctggagtgcagtggcttgatcttggctcacggcaacctctgcctcctgtattcaagcgattctcctgcctcagcctcccgagtagctgggattacaggggataaaaacattcagatggcagatcacagtttttcagatggggttccttcagattccgtggaagctgctaaaaatgcaagtaacacagaaaagctcacagatcaggtgatgcagaatcctcgagttctggcagctttacaggagcgacttgacaatgtccctcacaccccttccagctacatcgaaactttacctaaagcagtaaaaagaagaattaatgcattgaaacaacttcaggtgagatgtgctcacatagaagccaagttctatgaagaggtacatgacttggaaagaaagtatgcagcgctataccagcctctctttgacaagagaagagaatttatcaccggcgatgttgaaccaacagatgcggaatcggaatggcacagtgaaaatgaaga

SEQ ID NO: 20951 - DNA, 587 bp, Homo sapiens
  source 1..587: mol_type = unassigned DNA
gtgaggtgcggagacacgggtgctgggccggaagtagctgatctctgcaggaaactgctgttacctggcctcagctgaatttttgtgggacctcctgagggcttggcaccgcagaagtctctgaagagacagtctgctgctgtttggaggggataaaaacattcagatggcagatcacagtttttcagatggggttccttcagattccgtggaagctgctaaaaatgcaagtaacacagaaaagctcacagatcaggtgatgcagaatcctcgagttctggcagctttacaggagcgacttgacaatgtccctcacaccccttccagctacatcgaaactttacctaaagcagtaaaaagaagaattaatgcattgaaacaacttcaggtgagatgtgctcacatagaagccaagttctatgaagaggtacatgacttggaaagaaagtatgcagcgctataccagcctctctttgacaagagaagagaatttatcaccggcgatgttgaaccaacagatgcggaatcggaatggcacagtgaaaatgaagaggaagagaaattggctggagacatgaaaagtaaag

SEQ ID NO: 20952 - DNA, 625 bp, Homo sapiens
  source 1..625: mol_type = unassigned DNA
aaagtgttttaggcttccagagtagaaatctgatattacttcgtttgattcttcgaccactatggtgataggaagtagctgatctctgcaggaaactgctgttacctggcctcagctgaatttttgtgggacctcctgagagacgaggtttccccatgttgcccaggctggtctgaaactcctgagcttcaggtgatctgtgataggggggataaaaacattcagatggcagatcacagtttttcagatggggttccttcagattccgtggaagctgctaaaaatgcaagtaacacagaaaagctcacagatcaggtgatgcagaatcctcgagttctggcagctttacaggagcgacttgacaatgtccctcacaccccttccagctacatcgaaactttacctaaagcagtaaaaagaagaattaatgcattgaaacaacttcaggtgagatgtgctcacatagaagccaagttctatgaagaggtacatgacttggaaagaaagtatgcagcgctataccagcctctctttgacaagagaagagaatttatcaccggcgatgttgaaccaacagatgcggaatcggaatggcacagtgaaaatgaagaggaagagaaattgg

SEQ ID NO: 20953 - DNA, 572 bp, Homo sapiens
  source 1..572: mol_type = unassigned DNA
cgtgaggtgcggagacacgggtgctgggccggtttacggggtgaaaatagacttttaaaaattctcttaccttagaaatatacaaatatgtagattaggttgttggaccttaaaggaagtagctgatctctgcaggaaactgctgttacctggcctcagctgaatttttgtgggacctcctgagggcttggcaccgcagaagtctctgaagagacagtctgctgctgtttggaggggataaaaacattcagatggcagatcacagtttttcagatggggttccttcagattccgtggaagctgctaaaaatgcaagtaacacagaaaagctcacagatcaggtgatgcagaatcctcgagttctggcagctttacaggagcgacttgacaatgtccctcacaccccttccagctacatcgaaactttacctaaagcagtaaaaagaagaattaatgcattgaaacaacttcaggtgagatgtgctcacatagaagccaagttctatgaagaggtacatgacttggaaagaaagtatgcagcgctataccagcctctctttgacaagagaaga

SEQ ID NO: 20954 - DNA, 544 bp, Homo sapiens
  source 1..544: mol_type = unassigned DNA
gtgaggtgcggagacacgggtgctgggccgggaaaagtgttttaggcttccagagtagaaatctgatattacttcgtttgattcttcgaccactatggtgataggaagtagctgatctctgcaggaaactgctgttacctggcctcagctgaatttttgtgggacctcctgagggcttggcaccgcagaagtctctgaagagacagtctgctgctgtttggagagacgaggtttccccatgttgcccaggctggtctgaaactcctgagcttcaggtgatctgtgataggggggataaaaacattcagatggcagatcacagtttttcagatggggttccttcagattccgtggaagctgctaaaaatgcaagtaacacagaaaagctcacagatcaggtgatgcagaatcctcgagttctggcagctttacaggagcgacttgacaatgtccctcacaccccttccagctacatcgaaactttacctaaagcagtaaaaagaagaattaatgcattgaaacaacttcaggtgagatgtgctca

SEQ ID NO: 20955 - DNA, 2321 bp, Homo sapiens
  source 1..2321: mol_type = unassigned DNA
tctaagaggtgatcaaacgccagctatggagagagatgcagaggaaagcgaagacatatgcactggcatttgtagaagggcctggatgggggtgaggagcacacggaaaatggtctgaggccatctatgcagttcctgaagaagcacctcgggcagctactgacactcccagcccagctctacaggggtgggtacatgggtgggctgggaacagggtgtctgtccaacaggcgggtgttgagggcccagaagatgtcagggtagcaacaggaggaatctggtgcagtatgagcacacggccgtcagctgatagtgggaagccagtcaagtgccgcgaaagcaggaggcggggccgcggccaacgtcattcccgcggccgcacgtcaccgccacttgccgcatccgcaagatctctctggaccagctcgggtgcagggcctctgcgggagccctcctagacctctgcggcttctcctctaacatggccgactcggaaaaccaggggcctgcggagcctagccaggcggcggcagcggcggaggcagcggcagaggaggtaatggcggaaggcggtgcgcagggtggagactgtgacagcgcggctggtgaccctgacagcgcggctggtcagatggctgaggagccccagacccctgcagagaatgccccaaagccgaaaaatgactttatcgagagcctgcctaattcggtgaaatgccgagtcctggccctcaaaaagctgcagaagcgatgcgataagatagaagccaaatttgataaggaatttcaggctctggaaaaaaagtataatgacatctataagcccctactcgccaagatccaagagctcaccggcgagatggaggggtgtgcatggaccttggagggggaggaggaggaggaagaggagtacgaggatgacgaggaggagggggaagacgaggaggaggaggaggctgcggcagaggctgccgcgggggccaaacatgacgatgcccacgccgagatgcctgatgacgccaagaagtaaggggggcagagatggatgaagagaaagcccacgaagaaaaaagcctggttttgtttttcccagaatatcgatggacttaaaaaggctcaggtttttgaccaaaatacaatgtgaatttattctgacattcctaaaatagattaaattaaagcaattagatcctggccagctcgattcaaatttgactttcattttgaacataataaatatatcaaaaggtgttaaagaaaactgaattaaacccaaaattatgttttcatggtctcttctctgaggattgaggtttacaaagggtgttagcagatgcgaagtaaagaacgtcactttgaaacccattcatcacacagcatacgctacacatggaacacccaagccatgactgaacacgttctcagtgcttaattcttaaatttctttactcatgacatttcgcagtgcagagaaggcagaacccaagaaaaacgtcatctttgagactttgcttttgtaacgcagacatcagctttacacttcacaggagattgatggcattgaggaagattgcaatggagatcatgacactactgttaataaggccaggaaaactgccatttcaagttctgaaaaatgttttgagtatttgaatttagagaaacaacatggttccaagaaggagggtgtaaaacctgtaaaatactgtcaacatatgtattcattagttacaatctcatgtttgtgttttcttagtactgtctatttacaaacacgtaaaaaataccccaaatatgtttaagtattaaatcactttacctagcgttttagaaatattaatttacttgaagagatgtagaatgtagcaaattatgtaaagcatgtgtatccagcgttatgtactttgcgccttgtgacgtctttctgtcatgtagcttttagggtgtagctgtgaaaatcatcagaactcttcactgaagctaatgtttggaaaaaatatatacttgaagaaccaatccaagtgtgtgcccctacccccagctcagaagtagaaagggtttaagtttgcttgtattagctgtgccttcattattttgctatgtaaatgtgacatattaattataaaatggtgcataatcaaattttactgcttgaggacagatgcatacagtaaggatttttaggaagaatatatttaatgtaaagactcttagcttctgtgtgggttttgaattatgtgtgagccagtgatctataaagaaacataagcttaaagttgtttatcactgtggtgttaataaaacagtattttcaaaaaata

SEQ ID NO: 20956 - DNA, 1889 bp, Homo sapiens
  source 1..1889: mol_type = unassigned DNA
agctcgggtgcagggcctctgcgggagccctcctagacctctgcggcttctcctctaacatggccgactcggaaaaccaggggcctgcggagcctagccaggcggcggcagcggcggaggcagcggcagaggaggtaatggcggaaggcggtgcgcagggtggagactgtgacagcgcggctggtgaccctgacagcgcggctggtcagatggctgaggagccccagacccctgcagagaatgccccaaagccgaaaaatgactttatcgagagcctgcctaattcggtgaaatgccgagtcctggccctcaaaaagctgcagaagcgatgcgataagatagaagccaaatttgataaggaatttcaggctctggaaaaaaagtataatgacatctataagcccctactcgccaagatccaagagctcaccggcgagatggaggggtgtgcatggaccttggagggggaggagaggaggaagagggtacgaggatgacgaggaggagggggaagacgaggaggaggaggaggctgcggcagaggctgccgcgggggccaaacatgacgatgcccacgccgagatgcctgatgacgccaagaagtaaggggggcagagatggatgaagagaaagcccacgaagaaaaaagcctggttttgtttttcccagaatatcgatggacttaaaaaggctcaggtttttgaccaaaatacaatgtgaatttattctgacattcctaaaatagattaaattaaagcaattagatcctggccagctcgattcaaatttgactttcattttgaacataataaatatatcaaaaggtgttaaagaaaactgaattaaacccaaaattatgttttcatggtctcttctctgaggattgaggtttacaaagggtgttagcagatgcgaagtaaagaacgtcactttgaaacccattcatcacacagcatacgctacacatggaacacccaagccatgactgaacacgttctcagtgcttaattcttaaatttctttactcatgacatttcgcagtgcagagaaggcagaacccaagaaaaacgtcatctttgagactttgcttttgtaacgcagacatcagctttacacttcacaggagattgatggcattgaggaagattgcaatggagatcatgacactactgttaataaggccaggaaaactgccatttcaagttctgaaaaatgttttgagtatttgaatttagagaaacaacatggttccaagaaggagggtgtaaaacctgtaaaatactgtcaacatatgtattcattagttacaatctcatgtttgtgttttcttagtactgtctatttacaaacacgtaaaaaataccccaaatatgtttaagtattaaatcactttacctagcgttttagaaatattaatttacttgaagagatgtagaatgtagcaaattatgtaaagcatgtgtatccagcgttatgtactttgcgccttgtgacgtctttctgtcatgtagcttttagggtgtagctgtgaaaatcatcagaactcttcactgaagctaatgtttggaaaaaatatatacttgaagaaccaatccaagtgtgtgcccctacccccagctcagaagtagaaagggtttaagtttgcttgtattagctgtgccttcattattttgctatgtaaatgtgacatattaattataaaatggtgcataatcaaattttactgcttgaggacagatgcatacagtaaggatttttaggaagaatatatttaatgtaaagactcttagcttctgtgtgggttttgaattatgtgtgagccagtgatctataaagaaacataagcttaaagttgtttatcactgtggtgttaataaaacagtattttc

SEQ ID NO: 20957 - DNA, 1252 bp, Homo sapiens
  source 1..1252: mol_type = unassigned DNA
gacagcgggttccggtgaccacgaaggcggcaaaggcgacggaatggaggaggtgcctcacgactgtccaggggccgacagcgcccaggcgggcagaggggcttcatgtcagggatgccccaaccagcggctgtgcgcttctggagcgggggccactccggacacggctatagaggaaatcaaagagaaaatgaagactgtaaaacacaaaatcttggtattgtctgggaaaggcggtgttgggaaaagcacattcagcgcccaccttgcccatggcctagcagaggatgaaaacacacagattgctcttctagacatcgatatatgtgggccatcgattcccaagataatgggattggaaggagagcaggttcaccagagtggctcaggctggtctccagtgtacgtggaagacaacctgggggtgatgtcagtgggcttcctgctcagcagtcctgatgatgctgttatctggaggggacccaagaaaaacggcatgatcaagcagttcctccgagatgtggactggggagaggtcgactacctcattgtggacaccccacctgggacgtcggatgaacacctctcggtcgtccggtacctggccacagcacacatcgatggagcagtgatcatcaccactccccaggaggtgtcactccaggatgtccggaaagaaatcaacttctgccgcaaggtgaagctgcccatcatcggggtggtggagaacatgagtggcttcatctgtcctaagtgcaagaaagaatctcagatattccctcccacaaccgggggcgcggagctcatgtgccaggacttggaggtccctctcctcggcagagtgcccctggatccgctcataggtaagaattgtgacaaaggccagtcttttttcattgacgccccagattccccagccacgttagcctacagaagtataattcagagaatccaagagttttgtaatctccatcagtcaaaagaagagaacctcatcagttcctgaaacgagagaatgttcaggaccaagcagttaccgagcgaggcactcactgggcagcacatccagccagacccgaccagctccgggatggggtgggtcacagcaaaaggaccagatgctggtgtggtccgaagccactttctcagagacactttaatcattgagtatttgtacacttttctttagaacatatataaagggcattctctacaaatgtgccgttttaagaataaaaccccctcaaatctc

SEQ ID NO: 20958 - DNA, 1195 bp, Homo sapiens
  source 1..1195: mol_type = unassigned DNA
aggcggcaaaggcgacggaatggaggaggtgcctcacgactgtccaggggccgacagcgcccaggcgggcagaggggcttcatgtcagggatgccccaaccagcggctgtgcgcttctggagcgggggccactccggacacggctatagaggaaatcaaagagaaaatgaagactgtaaaacacaaaatcttggtattgtctgggaaaggcggtgttgggaaaagcacattcagcgcccaccttgcccatggcctagcagaggatgaaaacacacagattgctcttctagacatcgatatatgtgggccatcgattcccaagataatgggattggaaggagagcagtacgtggaagacaacctgggggtgatgtcagtgggcttcctgctcagcagtcctgatgatgctgttatctggaggggacccaagaaaaacggcatgatcaagcagttcctccgagatgtggactggggagaggtcgactacctcattgtggacaccccacctgggacgtcggatgaacacctctcggtcgtccggtacctggccacagcacacatcgatggagcagtgatcatcaccactccccaggaggtgtcactccaggatgtccggaaagaaatcaacttctgccgcaaggtgaagctgcccatcatcggggtggtggagaacatgagtggcttcatctgtcctaagtgcaagaaagaatctcagatattccctcccacaaccgggggcgcggagctcatgtgccaggacttggaggtccctctcctcggcagagtgcccctggatccgctcataggtaagaattgtgacaaaggccagtcttttttcattgacgccccagattccccagccacgttagcctacagaagtataattcagagaatccaagagttttgtaatctccatcagtcaaaagaagagaacctcatcagttcctgaaacgagagaatgttcaggaccaagcagttaccgagcgaggcactcactgggcagcacatccagccagacccgaccagctccgggatggggtgggtcacagcaaaaggaccagatgctggtgtggtccgaagccactttctcagagacactttaatcattgagtatttgtacacttttctttagaacatatataaagggcattctctacaaatgtgccgttttaagaataaaaccccctcaaatctc

SEQ ID NO: 20959 - DNA, 1413 bp, Homo sapiens
  source 1..1413: mol_type = unassigned DNA
aagaagagccacgggcgggcacgcactgcccattggttggaaggcccttcgctctagctgggaggctgacggcccgcgggcgtaagcggactgcagccgcgagctcctggaggcggcgggatggaggcggcggccgagcctggaaacctggccggcgtcaggcacatcatcctggtcctctcaggaaaggggggcgttgggaaaagcaccatctccacggagctggccctggcactgcgccatgcaggcaagaaggtgggaatcctggatgtggacctgtgtggccccagtatcccccgcatgctcggggcgcagggcagggctgtgcaccagtgcgaccgcggctgggcacccgtcttcctggaccgggagcagagcatctcgctcatgtctgtgggcttcctgctggagaagccggacgaggccgtggtgtggagaggccccaagaaaaacgcgctgataaagcagtttgtgtccgacgtggcctggggggagctggactacctggtggtggacacgcccccggggacctccgatgagcacatggccaccatagaagccctgcgtccctaccagcccctgggggccctcgtggtcaccacgccccaggcggtgtccgtgggggacgtgaggcgcgagctgaccttctgtaggaagacgggcttgcgggtgatgggaatcgtggagaatatgagcggcttcacctgcccacactgcacggagtgcaccagcgtcttctccaggggcggcggagaggagctggcccagctcgccggggtgcccttcttaggctccgtgcccctggaccctgcgctcatgaggaccctggaggagggccacgacttcatccaggagttccctgggagccccgccttcgctgcactcacctccatagcccagaagattctggacgcgacgcccgcgtgcctcccctgactaaggccaccttgcagccgctttccagggccaccaagggctctgctccagcctctcagagaaacagaggcctgggctcggttcccgggccctgcaggggcaggcccaggcagcgtcagccggagagcttctccccgaccagcccagccccaggatgtgtcgcaccagcagctctgcctggttggcctgcagtgccgtggtctgcgtgctctgcagctgtgagacgggggcggcctgggctctcttcccatccatgttgcctacctgtgcccctggcagccgcgtgtccacacagttagcggagcgcgggacttctgcagtcctcaggtgaccccgggcctccagcaccctgggtcgctgtcatctgtgtttagctcggggagtgccccctaagggggcgaactgacctcaggcatgttttgtaactgtagaggcgcctgccattaaacgtgtccgctgctgtggcgacagatctga

SEQ ID NO: 20960 - DNA, 1016 bp, Homo sapiens
  source 1..1016: mol_type = unassigned DNA
actgcagccgcgagctcctggaggcggcgggatggaggcggcggccgagcctggaaacctggccggcgtcaggcacatcatcctggtcctctcaggaaaggggggcgttgggaaaagcaccatctccacggagctggccctggcactgcgccatgcaggcaagaagcgctgataaagcagtttgtgtccgacgtggcctggggggagctggactacctggtggtggacacgcccccggggacctccgatgagcacatggccaccatagaagccctgcgtccctaccagcccctgggggccctcgtggtcaccacgccccaggcggtgtccgtgggggacgtgaggcgcgagctgaccttctgtaggaagacgggcttgcgggtgatgggaatcgtggagaatatgagcggcttcacctgcccacactgcacggagtgcaccagcgtcttctccaggggcggcggagaggagctggcccagctcgccggggtgcccttcttaggctccgtgcccctggaccctgcgctcatgaggaccctggaggagggccacgacttcatccaggagttccctgggagccccgccttcgctgcactcacctccatagcccagaagattctggacgcgacgcccgcgtgcctcccctgactaaggccaccttgcagccgctttccagggccaccaagggctctgctccagcctctcagagaaacagaggcctgggctcggttcccgggccctgcaggggcaggcccaggcagcgtcagccggagagcttctccccgaccagcccagccccaggatgtgtcgcaccagcagctctgcctggttggcctgcagtgccgtggtctgcgtgctctgcagctgtgagacgggggcggcctgggctctcttcccatccatgttgcctacctgtgcccctggcagccgcgtgtccacacagttagcggagcgcgggacttctgcagtcctcaggtgaccccgggcctccagcaccctgggtcgctgtcatctgt

SEQ ID NO: 20961 - DNA, 3049 bp, Homo sapiens
  source 1..3049: mol_type = unassigned DNA
acccgcgacagtttcccagcagggctcacagcagcgttccgcgtcatggggatttggcagcgtctgctgctttttggtggggtgtcgctccgggctggtggcggggccactgccccgcttgggggaagccgagcgatggtttgtgggcgccagttgtctggcgccgggagtgagaccctaaaacaaagaagaacacaaatcatgtcccgaggacttccaaagcagaaaccgatagaaggtgttaaacaagttatagttgtggcttctggaaagggtggagtcggaaaatctactacagcagtgaatcttgcacttgcactagcagcgaacgattcgtccaaggccattggtttgctagatgtggatgtgtatggaccttcagttccaaagatgatgaatctgaaaggaaatccggaattatcacagagcaacctaatgaggcctctcttgaattatggtattgcttgtatgtctatgggctttctggttgaagaaagtgaaccagtagtttggagaggccttatggtaatgtcggccattgagaaattgttgaggcaggtagattggggtcaactggactacttagttgtagacatgccaccaggaactggagatgtgcagttatcagtctcacagaatattcctataacaggtgctgtgattgtctccacgccccaggacatcgcattgatggatgcacacaagggtgctgagatgtttcgcagagtccacgtgcccgtccttggccttgtccaaaacatgagtgttttccagtgtccaaaatgtaaacacaaaactcatatttttggtgctgatggtgcaaggaaactagcacagacccttggtcttgaagttctaggagacattcccttacaccttaatataagggaagcttcagatacaggccagccaattgtgttttcacagcctgaaagtgatgaggccaaagcttacttgaggattgctgtggaagtggtaagaagattgccatcaccttcagaatgattccccaagtgtcctggaaatttgcctggtactgacattaagaggacctttggaaatcagcaatgtggtgatggaacctacagaaataatagaaatcataactgttttatttctaaggaaagaatgtcttcatatttgacttgctaagctaaggttcacaaaactttgatgtatcaatgttaactgctatatttaggaattttttgaaagctggtgtgtaccacctgcaaagaactgcattttattttattgaattacccctttagaaatcacgagtttatgatgttacaagtccattttgggagagaactgtacactttttgcaggaccacagaattagtaatttaaatgatatactaaatttgtgtatgggcataagtattacgccttcccaccaggcaatttggactgtctttgaatcctgtctttggtactgtcttggacatgttcttaatatgaacctctgcttcttcatctggatcacactataccccagacttaatgaatttcagtctccaggagtggagcctgaacatatgtatttttagtaagaccatgatgatgttgatgatgattctggtaatcatggcagtaagaataatagctaacatttaacaagttaattataattgttcttccatttgtgtgagtgggtactattatctccattttacagataagtaatttgagatataatttgaaggcactcaaccttgagtgtcttgctgagggttactgtatctagcaggtgatggagcttggatttgaacttgagtaattcgatattagattcatctttttgtacaccaatgtgcttttgttaattaaaaaaagtcggtggtggctaggcgtggtggctcacgcctgtaatcccagcactttgggaggttgaggtgggtggatcatgaggtcaggagttcaagaccagcctgaccaacatggtgaaaccccgtctctactaaaaatacaaaaattagctgggtgtggtggcatatgcctgtaatcccagctactcgggaggctgaggcaggagaatcatttcaacccgggaggctgaggttgcagtgagtggagattgtaccactgcactccagcctggtcaatggagtgcgactccatctcaaaaaaaaaaaaaaaaaaaaaaaaagtcgggggagatgcaatatttagcatttcctcaaactttttttggccatgaaatccaccacccccctcctttttcagagcatttcatgaagttcacatttcaaataatacattttgaaaaacatttatcttgtctaattgaagctcaaagagatagagtcaatgacttttcaaagtcaggtagcagatagttttaaagctgcaagtactgataagtgtgagccattagttaattcgcatttataaagaagtggtctgtcacttttggcaaatgtcttgacatctgttgctctacagttgtcaactagaaaattaggcatagagtttcacattattataagcatgttttcacacaaaaacatgtacattgatgtttattgcaattttatgtgtaataaccaaaaacaacccagattttcttcattgggtaaatgattaaacaaaccatagtacattcataccgtgagtgctactcagcaataaaaaagaacaaactatgggtacaggcagcaacttataattccagagaattatgctgaatgaaaaaggccaatttaaaaaggttttgtaccaaaagattccatttatataacgttcttgaagtgacataattatagaaatggagaacagattagtggtggctgtgttaaggagggggtgaggatgggagagaattgggcgtggctgtgagaaacatgagggatccttgtgatgatggaaatgttctatatcacagctatcgatgtcagtatcccagttgtgatattgtgctatagttttgcaagatgttaccactgggggaaattgggtgaagggcacatggaatctctgtattatttcaactgcatgtaaatctacaattatctcaaaataaaaataaaagttaaaaaaacacaaa

SEQ ID NO: 20962 - DNA, 2685 bp, Homo sapiens
  source 1..2685: mol_type = unassigned DNA
atgtccaaggccattggtttgctagatgtggatgtgtatggaccttcagttccaaagatgatgaatctgaaaggaaatccggaattatcacagagcaacctaatgaggcctctcttgaattatggtattgcttgtatgtctatgggctttctggttgaagaaagtgaaccagtagtttggagaggccttatggtaatgtcggccattgagaaattgttgaggcaggtagattggggtcaactggactacttagttgtagacatgccaccaggaactggagatgtgcagttatcagtctcacagaatattcctataacaggtgctgtgattgtctccacgccccaggacatcgcattgatggatgcacacaagggtgctgagatgtttcgcagagtccacgtgcccgtccttggccttgtccaaaacatgagtgttttccagtgtccaaaatgtaaacacaaaactcatatttttggtgctgatggtgcaaggaaactagcacagacccttggtcttgaagttctaggagacattcccttacaccttaatataagggaagcttcagatacaggccagccaattgtgttttcacagcctgaaagtgatgaggccaaagcttacttgaggattgctgtggaagtggtaagaagattgccatcaccttcagaatgattccccaagtgtcctggaaatttgcctggtactgacattaagaggacctttggaaatcagcaatgtggtgatggaacctacagaaataatagaaatcataactgttttatttctaaggaaagaatgtcttcatatttgacttgctaagctaaggttcacaaaactttgatgtatcaatgttaactgctatatttaggaattttttgaaagctggtgtgtaccacctgcaaagaactgcattttattttattgaattacccctttagaaatcacgagtttatgatgttacaagtccattttgggagagaactgtacactttttgcaggaccacagaattagtaatttaaatgatatactaaatttgtgtatgggcataagtattacgccttcccaccaggcaatttggactgtctttgaatcctgtctttggtactgtcttggacatgttcttaatatgaacctctgcttcttcatctggatcacactataccccagacttaatgaatttcagtctccaggagtggagcctgaacatatgtatttttagtaagaccatgatgatgttgatgatgattctggtaatcatggcagtaagaataatagctaacatttaacaagttaattataattgttcttccatttgtgtgagtgggtactattatctccattttacagataagtaatttgagatataatttgaaggcactcaaccttgagtgtcttgctgagggttactgtatctagcaggtgatggagcttggatttgaacttgagtaattcgatattagattcatctttttgtacaccaatgtgcttttgttaattaaaaaaagtcggtggtggctaggcgtggtggctcacgcctgtaatcccagcactttgggaggttgaggtgggtggatcatgaggtcaggagttcaagaccagcctgaccaacatggtgaaaccccgtctctactaaaaatacaaaaattagctgggtgtggtggcatatgcctgtaatcccagctactcgggaggctgaggcaggagaatcatttcaacccgggaggctgaggttgcagtgagtggagattgtaccactgcactccagcctggtcaatggagtgcgactccatctcaaaaaaaaaaaaaaaaaaaaaaaaagtcgggggagatgcaatatttagcatttcctcaaactttttttggccatgaaatccaccacccccctcctttttcagagcatttcatgaagttcacatttcaaataatacattttgaaaaacatttatcttgtctaattgaagctcaaagagatagagtcaatgacttttcaaagtcaggtagcagatagttttaaagctgcaagtactgataagtgtgagccattagttaattcgcatttataaagaagtggtctgtcacttttggcaaatgtcttgacatctgttgctctacagttgtcaactagaaaattaggcatagagtttcacattattataagcatgttttcacacaaaaacatgtacattgatgtttattgcaattttatgtgtaataaccaaaaacaacccagattttcttcattgggtaaatgattaaacaaaccatagtacattcataccgtgagtgctactcagcaataaaaaagaacaaactatgggtacaggcagcaacttataattccagagaattatgctgaatgaaaaaggccaatttaaaaaggttttgtaccaaaagattccatttatataacgttcttgaagtgacataattatagaaatggagaacagattagtggtggctgtgttaaggagggggtgaggatgggagagaattgggcgtggctgtgagaaacatgagggatccttgtgatgatggaaatgttctatatcacagctatcgatgtcagtatcccagttgtgatattgtgctatagttttgcaagatgttaccactgggggaaattgggtgaagggcacatggaatctctgtattatttcaactgcatgtaaatctacaattatctc

SEQ ID NO: 20963 - DNA, 4485 bp, Homo sapiens
  source 1..4485: mol_type = unassigned DNA
gtagacagatccaggctcaccagtcctgtgccactgggcttttggcgttctgcacaaggcctacccgcagatgccatgcctgctcccccagcctaatgggctttgatgggggaagagggtggttcagcctctcacgatgaggaggaaagagcaagtgtcctcctcggacattctccgggttgtgaaatgtgctcgcaggaggcttttcaggcacagaggagccagctggtcgagctgctggtctcagggtccctggaaggcttcgagagtgtcctggactggctgctgtcctgggaggtcctctcctgggaggactacgagggcttccacctcctgggccagcctctctcccacttggccaggcgccttctggacaccgtctggaataagggtacttgggcctgtcagaagctcatcgcggctgcccaagaagcccaggccgacagccagtcccccaagctgcatggctgctgggacccccactcgctccacccagcccgagacctgcagagtcaccggccagccattgtcaggaggctccacagccatgtggagaacatgctggacctggcatgggagcggggtttcgtcagccagtatgaatgtgatgaaatcaggttgccgatcttcacaccgtcccagagggcaagaaggctgcttgatcttgccacggtgaaagcgaatggattggctgccttccttctacaacatgttcaggaattaccagtcccattggccctgcctttggaagctgccacatgcaagaagtatatggccaagctgaggaccacggtgtctgctcagtctcgcttcctcagtacctatgatggagcagagacgctctgcctggaggacatatacacagagaatgtcctggaggtctgggcagatgtgggcatggctggacccccgcagaagagcccagccaccctgggcctggaggagctcttcagcacccctggccacctcaatgacgatgcggacactgtgctggtggtgggtgaggcgggcagtggcaagagcacgctcctgcagcggctgcacttgctgtgggctgcagggcaagacttccaggaatttctctttgtcttcccattcagctgccggcagctgcagtgcatggccaaaccactctctgtgcggactctactctttgagcactgctgttggcctgatgttggtcaagaagacatcttccagttactccttgaccaccctgaccgtgtcctgttaacctttgatggctttgacgagttcaagttcaggttcacggatcgtgaacgccactgctccccgaccgaccccacctctgtccagaccctgctcttcaaccttctgcagggcaacctgctgaagaatgcccgcaaggtggtgaccagccgtccggccgctgtgtcggcgttcctcaggaagtacatccgcaccgagttcaacctcaagggcttctctgaacagggcatcgagctgtacctgaggaagcgccatcatgagcccggggtggcggaccgcctcatccgcctgctccaagagacctcagccctgcacggtttgtgccacctgcctgtcttctcatggatggtgtccaaatgccaccaggaactgttgctgcaggagggggggtccccaaagaccactacagatatgtacctgctgattctgcagcattttctgctgcatgccacccccccagactcagcttcccaaggtctgggacccagtcttcttcggggccgcctccccaccctcctgcacctgggcagactggctctgtggggcctgggcatgtgctgctacgtgttctcagcccagcagctccaggcagcacaggtcagccctgatgacatttctcttggcttcctggtgcgtgccaaaggtgtcgtgccagggagtacggcgcccctggaattccttcacatcactttccagtgcttctttgccgcgttctacctggcactcagtgctgatgtgccaccagctttgctcagacacctcttcaattgtggcaggccaggcaactcaccaatggccaggctcctgcccacgatgtgcatccaggcctcggagggaaaggacagcagcgtggcagctttgctgcagaaggccgagccgcacaaccttcagatcacagcagccttcctggcagggctgttgtcccgggagcactggggcctgctggctgagtgccagacatctgagaaggccctgctccggcgccaggcctgtgcccgctggtgtctggcccgcagcctccgcaagcacttccactccatcccgccagctgcaccgggtgaggccaagagcgtgcatgccatgcccgggttcatctggctcatccggagcctgtacgagatgcaggaggagcggctggctcggaaggctgcacgtggcctgaatgttgggcacctcaagttgacattttgcagtgtgggccccactgagtgtgctgccctggcctttgtgctgcagcacctccggcggcccgtggccctgcagctggactacaactctgtgggtgacattggcgtggagcagctgctgccttgccttggtgtctgcaaggctctgtatttgcgcgataacaatatctcagaccgaggcatctgcaagctcattgaatgtgctcttcactgcgagcaattgcagaagttagctctattcaacaacaaattgactgacggctgtgcacactccatggctaagctccttgcatgcaggcagaacttcttggcattgaggctggggaataactacatcactgccgcgggagcccaagtgctggccgaggggctccgaggcaacacctccttgcagttcctgggattctggggcaacagagtgggtgacgagggggcccaggccctggctgaagccttgggtgatcaccagagcttgaggtggctcagcctggtggggaacaacattggcagtgtgggtgcccaagccttggcactgatgctggcaaagaacgtcatgctagaagaactctgcctggaggagaaccatctccaggatgaaggtgtatgttctctcgcagaaggactgaagaaaaattcaagtttgaaaatcctgaagttgtccaataactgcatcacctacctaggggcagaagccctcctgcaggcccttgaaaggaatgacaccatcctggaagtctggctccgagggaacactttctctctagaggaggttgacaagctcggctgcagggacaccagactcttgctttgaagtctccgggaggatgttcgtctcagtttgtttgtgagcaggctgtgagtttgggccccagaggctgggtgacatgtgttggcagcctcttcaaaatgagccctgtcctgcctaaggctgaacttgttttctgggaacaccataggtcacctttattctggcagaggagggagcatcagtgccctccaggatagacttttcccaagcctacttttgccattgacttcttcccaagattcaatcccaggatgtacaaggacagcccctcctccatagtatgggactggcctctgctgatcctcccaggcttccgtgtgggtcagtggggcccatggatgtgcttgttaactgagtgccttttggtggagaggcccggcctctcacaaaagaccccttaccactgctctgatgaagaggagtacacagaacacataattcaggaagcagctttccccatgtctcgactcatccatccaggccattccccgtctctggttcctcccctcctcctggactcctgcacacgctccttcctctgaggctgaaattcagaatattagtgacctcagctttgatatttcacttacagcacccccaaccctggcacccagggtgggaagggctacaccttagcctgccctcctttccggtgtttaagacatttttggaaggggacacgtgacagccgtttgttccccaagacattctaggtttgcaagaaaaatatgaccacactccagctgggatcacatgtggacttttatttccagtgaaatcagttactcttcagttaagcctttggaaacagctcgactttaaaaagctccaaatgcagctttaaaaaattaatctgggccagaatttcaaacggcctcactaggcttctggttgatgcctgtgaactgaactctgacaacagacttctgaaatagacccacaagaggcagttccatttcatttgtgccagaatgctttaggatgtacagttatggattgaaagtttacaggaaaaaaaattaggccgttccttcaaagcaaatgtcttcctggattattcaaaatgatgtatgttgaagcctttgtaaattgtcagatgctgtgcaaatgttattattttaaacattatgatgtgtgaaaactggttaatatttataggtcactttgttttactgtcttaagtttatactcttatagacaacatggccgtgaactttatgctgtaaataatcagaggggaataaactgttgagtcaaaac

SEQ ID NO: 20964 - DNA, 1300 bp, Homo sapiens
  source 1..1300: mol_type = unassigned DNA
aacaacagatctgggaaggctgcagagggcacgatggggtctggatcgagggcggctgagaccagagggaaaggtgtgaccctgagtcaccctcgctgtcccggggaaaccacctcccaggacagctgcctactgtggctcctgcctggaattgtcacactgctgtgcaaacagcgtcccgctgcccctttccctttgctgggggaaaatgaagttgtgggagccgctgagtaaactagacctagcagcgagggcacctgatgtggctgctgcctcccgggcaggtcttcaatgctttcttcccttccaggctggggaataactacatcactgccgcgggagcccaagtgctggccgaggggctccgaggcaacacctccttgcagttcctgggattctggggcaacagagtgggtgacgagggggcccaggccctggctgaagccttgggtgatcaccagagcttgaggtggctcagcctggtggggaacaacattggcagtgtgggtgcccaagccttggcactgatgctggcaaagaacgtcatgctagaagaactctgcctggaggagaaccatctccaggatgaaggtgtatgttctctcgcagaaggactgaagaaaaattcaagtttgaaaatcctgaagttgtccaataactgcatcacctacctaggggcagaagccctcctgcaggcccttgaaaggaatgacaccatcctggaagtctggctccgagggaacactttctctctagaggaggttgacaagctcggctgcagggacaccagactcttgctttgaagtctccgggaggatgttcgtctcagtttgtttgtgagcaggctgtgagtttgggccccagaggctgggtgacatgtgttggcagcctcttcaaaatgagccctgtcctgcctaaggctgaacttgttttctgggaacaccataggtcacctttattctggcagaggagggagcatcagtgccctccaggatagacttttcccaagcctacttttgccattgacttcttcccaagattcaatcccaggatgtacaaggacagcccctcctccatagtatgggactggcctctgctgatcctcccaggcttccgtgtgggtcagtggggcccatggatgtgcttgttaactgagtgccttttggtggagaggcccggcctctcacaaaagaccccttaccactgctctgatgaagaggagtacacagaacacataattcaggaagcagctttccccatgtctcgactcatccatccaggccattccccgtctctggtt

SEQ ID NO: 20965 - DNA, 3162 bp, Homo sapiens
  source 1..3162: mol_type = unassigned DNA
ctctcctagacaccatgccacaaggagagtgatctcttcccctgttttcacaatggaggactccggaaagactttcagctccgaggaggaagaagctaactattggaaagatctggcgatgacctacaaacagagggcagaaaatacgcaagaggaactccgagaattccaggagggaagccgagaatatgaagctgaattggagacgcagctgcaacaaattgaaaccaggaacagagacctcctgtccgaaaataaccgccttcgcatggagctggaaaccatcaaggagaagtttgaagtgcagcactctgaaggctaccggcagatctcagccttggaggatgacctcgcgcagaccaaagccattaaagaccaattgcagaaatacatcagagagctggagcaagcaaatgacgacctggaaagagccaagcgcgccacgatcatgtctctcgaagactttgagcagcgcttgaatcaggccatcgaaagaaatgccttcctggaaagtgaacttgatgaaaaagagaatctcctggaatctgttcagagactgaaggatgaagccagagatttgcggcaggaactggccgtgcagcagaagcaggagaaacccaggacccccatgcccagctcagtggaagctgagaggacagacacagctgtgcaggccacgggctccgtgccgtccacgcccattgctcaccgaggacccagctcaagtttaaacacacctgggagcttcagacgtggcctggacgactccaccggggggacccccctcacacctgcggcccggatatcagccctcaacattgtgggagacctactgcggaaagtcggggcactggagtccaaactcgcttcctgccggaacctcgtgtacgatcagtccccaaaccgaacaggtggcccagcctctgggcggagcagcaagaacagagatggcggggagagacggccaagcagcaccagcgtgcctttgggtgataaggggttggacacgagttgccgctggttgtccaaatcaacaaccaggtcgtccagctcctgctgaagcctgttcttggtcttttccagtttatcataagcggccgccttctcctcgtactgctgggtgaggttctcgatctccttctggaacctcttcttcccctcttccagagcttccacggtgctggcaaagtcctgcagcttcttcttcgagtcggagagctacaaggacagcgtccagggtagggtgagagggggaccatgagtggcccctgtccctggccccacagactctgagaagcgaagaccatgtctcctcgttggagaaacccaatagcaggggaagctggggggtcaagcaccatcgcaccaacactccaccgcgatctgcctgcgggggatctcagcgcagagaagttgagaggacccatgaaggaagcaaggacacggggcaggcacctggatgttgagagtggagatgtggcgctccaggttctgcttggcctccatctcctcgtccagctggtcttgcaggctgttccgctcctcctccagctggcgcagcttcgtagacacgttgagcttctgccgggtttcttcttgaagcagctcctgcaaaagggatgcaaagaggtcccagggacctgccccgaggaaggccaccccccaggtcccctggatgatgtggcaggacactcacctgggtgtcctggagctgggaactgagggacgccacgtccttggccagcttaatggccttcccctcggcctcgttaagcatccctgtgacgctctcaacttcattctaagggtgccaagagactggttagtcaaagcctctagaaggggatcctcgttgaaaggagccctttttactcaaaacacatgggctagtacttgaggtgttcactgattgagaaaatacccgtgaggtatgggactctgataaaaaaaaaaaaaaacacacacacacacaaaaaaaacagaatctgtggcttgaagggaactccgtcacctatgagttgggaccctggccctagactctgtggttctaagaacttatttgagccccaatggtattgactgggacctgatcccactaaatggatcctagatccctgccaaggttggtagagacaaagcagcaggtctgagagtccagacgaggtgctctggctggtccactctctaaggctggagaagggagaccaggatggtacttgaacgtcccagggatgctgtcccatcccttccttcctcactcctactctttgaccctgatggccaaagccagagacgcaggccctaaaggtaaaaacgtcctctctgtattctctggcttttactccctagtgtctctgcataagtccctttgaggctgttagcctacccctccatctcttccattgacaaggaggatatgaatgatcttgacactgcttatatgagggcggcaaaagccctgctctcaactgcatgtgagaaaaaaacatctcacttaattcttccctcgccccttggtccctggctgtggacatgttaaacatttgtgaaaactttggccacgtccccatgagtggcaaggcagggtaaatggctatgccaagtgaaagaagaccaaagacaaaaagaccatgtcattcagcagcttaaaacccctcaacagcttcacattgcccagagtaaggatcaacatacatgtaataggttctcaaaagccctacatcatctgggtacaagctccccctccaaccccactctgtactatctccccctacccccaaccccagctgggcactccagctctactggctgtatgtctctctcctaatttttctacttaccacagggcctttgcacacgctgttccctctgcctggtagacttatccatgctccttagggaagcctttcgtggctcctcctcccccaggttaggccccctggttatttacacttgggcatcatgtgccttccctttgctgcatcatttgacattcatttgtgtgattattcatgtctttcccttcccttcccttccccttactcggctggagtcctactggggcagcgacagtgtctcttcttccttgctgttggatctcaggattaagcacagtgcctggcatacagcaggtgctcaataaatacttatcaaattggaaaa

SEQ ID NO: 20966 - DNA, 1867 bp, Homo sapiens
  source 1..1867: mol_type = unassigned DNA
ggggggggcggggcctcgcggccctgcagcctcgtcaggctcagtcccctcccgataaacccctaaatagggactttcccggggggtgaccctggcttttttggcgaaaacccccagtttaaggaggccttccccctggcttcacgttgtggagtcgaaaggaaccttgaagcggagaatgagctcgtgacgtggacccgaggaaaaaacctgccaaccaggatttaatagaattcagctctttcaggctttggagggaaggcgatttgaacgggatttcaatgaaaaaccctgtcccttcggctttttttttttcctctctcgggtctcgtcacgtgatggtcctactttatttttaaaaattaaatggcgcatattccccagcatcctaaatctagtgcaacctagtggcaagtggagaaaaaaataactgccaacctggcttcctacgaggtcccccggagttctcgcaaagttgcgacccagttggcaaaaatacagtgtgtgcaaagactcaactggacattgccaccaagaatcaagagatttttggggactttagcaagaaaacgttatttttaaaagccctgctccaaagctggttacaaatgaatactgcgtttccagtgacaggttgggcgagcagaaaggaaatcttacgacggagtcttgccctgtcgcctaggctagagtgcagtggtgtgatctcggctcactgcaaccgccacctcccggtttcccgtgattctcctgcctcagcctcctgagtagctgggattacagacaccatgccacaaggagagtgatctcttcccctgttttcacaatggaggactccggaaagactttcagctccgaggaggaagaagctaactattggaaagatctggcgatgacctacaaacagagggcagaaaatacgcaagaggaactccgagaattccaggagggaagccgagaatatgaagctgaattggagacgcagctgcaacaaattgaaaccaggaacagagacctcctgtccgaaaataaccgccttcgcatggagctggaaaccatcaaggagaagtttgaagtgcagcactctgaaggctaccggcagatctcagccttggaggatgacctcgcgcagaccaaagccattaaagaccaattgcagaaatacatcagagagctggagcaagcaaatgacgacctggaaagagccaagcgcgccacgatcatgtctctcgaagactttgagcagcgcttgaatcaggccatcgaaagaaatgccttcctggaaagtgaacttgatgaaaaagagaatctcctggaatctgttcagagactgaaggatgaagccagagatttgcggcaggaactggccgtgcagcagaagcaggagaaacccaggacccccatgcccagctcagtggaagctgagaggacagacacagctgtgcaggccacgggctccgtgccgtccacgcccattgctcaccgaggacccagctcaagtttaaacacacctgggagcttcagacgtggcctggacgactccaccggggggacccccctcacacctgcggcccggatatcagccctcaacattgtgggagacctactgcggaaagtcggggcactggagtccaaactcgcttcctgccggaacctcgtgtacgatcagtccccaaaccgaacaggtggcccagcctctgggcggagcagcaagaacagagatggcggggagagacggccaagcagcaccagcgtgcctttgggtgataaggggttggggaagcgcctggaatttgggaagccgccttcacacatgtcttcatcgccgctgccgtcagcccagggggtagtcaagatgttgctttag

SEQ ID NO: 20967 - DNA, 3221 bp, Homo sapiens
  source 1..3221: mol_type = unassigned DNA
ggggccgcaccgcccttcgcagccgcctctgccgccgccgccgcgttggcctcgccgcccctgctcggacaccatgccacaaggagagtgatctcttcccctgttttcacaatggaggactccggaaagactttcagctccgaggaggaagaagctaactattggaaagatctggcgatgacctacaaacagagggcagaaaatacgcaagaggaactccgagaattccaggagggaagccgagaatatgaagctgaattggagacgcagctgcaacaaattgaaaccaggaacagagacctcctgtccgaaaataaccgccttcgcatggagctggaaaccatcaaggagaagtttgaagtgcagcactctgaaggctaccggcagatctcagccttggaggatgacctcgcgcagaccaaagccattaaagaccaattgcagaaatacatcagagagctggagcaagcaaatgacgacctggaaagagccaagcgcgccacgatcatgtctctcgaagactttgagcagcgcttgaatcaggccatcgaaagaaatgccttcctggaaagtgaacttgatgaaaaagagaatctcctggaatctgttcagagactgaaggatgaagccagagatttgcggcaggaactggccgtgcagcagaagcaggagaaacccaggacccccatgcccagctcagtggaagctgagaggacagacacagctgtgcaggccacgggctccgtgccgtccacgcccattgctcaccgaggacccagctcaagtttaaacacacctgggagcttcagacgtggcctggacgactccaccggggggacccccctcacacctgcggcccggatatcagccctcaacattgtgggagacctactgcggaaagtcggggcactggagtccaaactcgcttcctgccggaacctcgtgtacgatcagtccccaaaccgaacaggtggcccagcctctgggcggagcagcaagaacagagatggcggggagagacggccaagcagcaccagcgtgcctttgggtgataaggggttggacacgagttgccgctggttgtccaaatcaacaaccaggtcgtccagctcctgctgaagcctgttcttggtcttttccagtttatcataagcggccgccttctcctcgtactgctgggtgaggttctcgatctccttctggaacctcttcttcccctcttccagagcttccacggtgctggcaaagtcctgcagcttcttcttcgagtcggagagctacaaggacagcgtccagggtagggtgagagggggaccatgagtggcccctgtccctggccccacagactctgagaagcgaagaccatgtctcctcgttggagaaacccaatagcaggggaagctggggggtcaagcaccatcgcaccaacactccaccgcgatctgcctgcgggggatctcagcgcagagaagttgagaggacccatgaaggaagcaaggacacggggcaggcacctggatgttgagagtggagatgtggcgctccaggttctgcttggcctccatctcctcgtccagctggtcttgcaggctgttccgctcctcctccagctggcgcagcttcgtagacacgttgagcttctgccgggtttcttcttgaagcagctcctgcaaaagggatgcaaagaggtcccagggacctgccccgaggaaggccaccccccaggtcccctggatgatgtggcaggacactcacctgggtgtcctggagctgggaactgagggacgccacgtccttggccagcttaatggccttcccctcggcctcgttaagcatccctgtgacgctctcaacttcattctaagggtgccaagagactggttagtcaaagcctctagaaggggatcctcgttgaaaggagccctttttactcaaaacacatgggctagtacttgaggtgttcactgattgagaaaatacccgtgaggtatgggactctgataaaaaaaaaaaaaaacacacacacacacaaaaaaaacagaatctgtggcttgaagggaactccgtcacctatgagttgggaccctggccctagactctgtggttctaagaacttatttgagccccaatggtattgactgggacctgatcccactaaatggatcctagatccctgccaaggttggtagagacaaagcagcaggtctgagagtccagacgaggtgctctggctggtccactctctaaggctggagaagggagaccaggatggtacttgaacgtcccagggatgctgtcccatcccttccttcctcactcctactctttgaccctgatggccaaagccagagacgcaggccctaaaggtaaaaacgtcctctctgtattctctggcttttactccctagtgtctctgcataagtccctttgaggctgttagcctacccctccatctcttccattgacaaggaggatatgaatgatcttgacactgcttatatgagggcggcaaaagccctgctctcaactgcatgtgagaaaaaaacatctcacttaattcttccctcgccccttggtccctggctgtggacatgttaaacatttgtgaaaactttggccacgtccccatgagtggcaaggcagggtaaatggctatgccaagtgaaagaagaccaaagacaaaaagaccatgtcattcagcagcttaaaacccctcaacagcttcacattgcccagagtaaggatcaacatacatgtaataggttctcaaaagccctacatcatctgggtacaagctccccctccaaccccactctgtactatctccccctacccccaaccccagctgggcactccagctctactggctgtatgtctctctcctaatttttctacttaccacagggcctttgcacacgctgttccctctgcctggtagacttatccatgctccttagggaagcctttcgtggctcctcctcccccaggttaggccccctggttatttacacttgggcatcatgtgccttccctttgctgcatcatttgacattcatttgtgtgattattcatgtctttcccttcccttcccttccccttactcggctggagtcctactggggcagcgacagtgtctcttcttccttgctgttggatctcaggattaagcacagtgcctggcatacagcaggtgctcaataaatacttatcaaattggaaaa

SEQ ID NO: 20968 - DNA, 3936 bp, Homo sapiens
  source 1..3936: mol_type = unassigned DNA
ggggggggcggggcctcgcggccctgcagcctcgtcaggctcagtcccctcccgataaacccctaaatagggactttcccggggggtgaccctggcttttttggcgaaaacccccagtttaaggaggccttccccctggcttcacgttgtggagtcgaaaggaaccttgaagcggagaatgagctcgtgacgtggacccgaggaaaaaacctgccaaccaggatttaatagaattcagctctttcaggctttggagggaaggcgatttgaacgggatttcaatgaaaaaccctgtcccttcggctttttttttttcctctctcgggtctcgtcacgtgatggtcctactttatttttaaaaattaaatggcgcatattccccagcatcctaaatctagtgcaacctagtggcaagtggagaaaaaaataactgccaacctggcttcctacgaggtcccccggagttctcgcaaagttgcgacccagttggcaaaaatacagtgtgtgcaaagactcaactggacattgccaccaagaatcaagagatttttggggactttagcaagaaaacgttatttttaaaagccctgctccaaagctggttacaaatgaatactgcgtttccagtgacaggttgggcgagcagaaaggaaatcttacgacggagtcttgccctgtcgcctaggctagagtgcagtggtgtgatctcggctcactgcaaccgccacctcccggtttcccgtgattctcctgcctcagcctcctgagtagctgggattacagacaccatgccacaaggagagtgatctcttcccctgttttcacaatggaggactccggaaagactttcagctccgaggaggaagaagctaactattggaaagatctggcgatgacctacaaacagagggcagaaaatacgcaagaggaactccgagaattccaggagggaagccgagaatatgaagctgaattggagacgcagctgcaacaaattgaaaccaggaacagagacctcctgtccgaaaataaccgccttcgcatggagctggaaaccatcaaggagaagtttgaagtgcagcactctgaaggctaccggcagatctcagccttggaggatgacctcgcgcagaccaaagccattaaagaccaattgcagaaatacatcagagagctggagcaagcaaatgacgacctggaaagagccaagcgcgccacgatcatgtctctcgaagactttgagcagcgcttgaatcaggccatcgaaagaaatgccttcctggaaagtgaacttgatgaaaaagagaatctcctggaatctgttcagagactgaaggatgaagccagagatttgcggcaggaactggccgtgcagcagaagcaggagaaacccaggacccccatgcccagctcagtggaagctgagaggacagacacagctgtgcaggccacgggctccgtgccgtccacgcccattgctcaccgaggacccagctcaagtttaaacacacctgggagcttcagacgtggcctggacgactccaccggggggacccccctcacacctgcggcccggatatcagccctcaacattgtgggagacctactgcggaaagtcggggcactggagtccaaactcgcttcctgccggaacctcgtgtacgatcagtccccaaaccgaacaggtggcccagcctctgggcggagcagcaagaacagagatggcggggagagacggccaagcagcaccagcgtgcctttgggtgataaggggttggacacgagttgccgctggttgtccaaatcaacaaccaggtcgtccagctcctgctgaagcctgttcttggtcttttccagtttatcataagcggccgccttctcctcgtactgctgggtgaggttctcgatctccttctggaacctcttcttcccctcttccagagcttccacggtgctggcaaagtcctgcagcttcttcttcgagtcggagagctacaaggacagcgtccagggtagggtgagagggggaccatgagtggcccctgtccctggccccacagactctgagaagcgaagaccatgtctcctcgttggagaaacccaatagcaggggaagctggggggtcaagcaccatcgcaccaacactccaccgcgatctgcctgcgggggatctcagcgcagagaagttgagaggacccatgaaggaagcaaggacacggggcaggcacctggatgttgagagtggagatgtggcgctccaggttctgcttggcctccatctcctcgtccagctggtcttgcaggctgttccgctcctcctccagctggcgcagcttcgtagacacgttgagcttctgccgggtttcttcttgaagcagctcctgcaaaagggatgcaaagaggtcccagggacctgccccgaggaaggccaccccccaggtcccctggatgatgtggcaggacactcacctgggtgtcctggagctgggaactgagggacgccacgtccttggccagcttaatggccttcccctcggcctcgttaagcatccctgtgacgctctcaacttcattctaagggtgccaagagactggttagtcaaagcctctagaaggggatcctcgttgaaaggagccctttttactcaaaacacatgggctagtacttgaggtgttcactgattgagaaaatacccgtgaggtatgggactctgataaaaaaaaaaaaaaacacacacacacacaaaaaaaacagaatctgtggcttgaagggaactccgtcacctatgagttgggaccctggccctagactctgtggttctaagaacttatttgagccccaatggtattgactgggacctgatcccactaaatggatcctagatccctgccaaggttggtagagacaaagcagcaggtctgagagtccagacgaggtgctctggctggtccactctctaaggctggagaagggagaccaggatggtacttgaacgtcccagggatgctgtcccatcccttccttcctcactcctactctttgaccctgatggccaaagccagagacgcaggccctaaaggtaaaaacgtcctctctgtattctctggcttttactccctagtgtctctgcataagtccctttgaggctgttagcctacccctccatctcttccattgacaaggaggatatgaatgatcttgacactgcttatatgagggcggcaaaagccctgctctcaactgcatgtgagaaaaaaacatctcacttaattcttccctcgccccttggtccctggctgtggacatgttaaacatttgtgaaaactttggccacgtccccatgagtggcaaggcagggtaaatggctatgccaagtgaaagaagaccaaagacaaaaagaccatgtcattcagcagcttaaaacccctcaacagcttcacattgcccagagtaaggatcaacatacatgtaataggttctcaaaagccctacatcatctgggtacaagctccccctccaaccccactctgtactatctccccctacccccaaccccagctgggcactccagctctactggctgtatgtctctctcctaatttttctacttaccacagggcctttgcacacgctgttccctctgcctggtagacttatccatgctccttagggaagcctttcgtggctcctcctcccccaggttaggccccctggttatttacacttgggcatcatgtgccttccctttgctgcatcatttgacattcatttgtgtgattattcatgtctttcccttcccttcccttccccttactcggctggagtcctactggggcagcgacagtgtctcttcttccttgctgttggatctcaggattaagcacagtgcctggcatacagcaggtgctcaataaatacttatcaaattggaaaa

SEQ ID NO: 20969 - DNA, 698 bp, Homo sapiens
  source 1..698: mol_type = unassigned DNA
agggctttctgtatccctaggtttcttgccttgatgtactggagcaatcagatcacacggcggcttggagaaacccagggaccatgggcgcctccaggctctataccctggtgctggtcctgcagcctcagcgagttctcctgggcatgaaaaagcgaggcttcggggccggccggtggaatggctttgggggcaaagtgcaagaaggagagaccatcgaggatggggctaggagggagctgcaggaggagagcggtctgacagtggacgccctgcacaaggtgggccagatcgtgtttgagttcgtgggcgagcctgagctcatggacgtgcatgtcttctgcacagacagcatccaggggacccccgtggagagcgacgaaatgcgcccatgctggttccagctggatcagatccccttcaaggacatgtggcccgacgacagctactggtttccactcctgcttcagaagaagaaattccacgggtacttcaagttccagggtcaggacaccatcctggactacacactccgcgaggtggacacggtctagcgggagcccagggcagcccctgggcaggagacgtggctgctgaacagccgcaaaccatcttcacctgggggcattgagtggcgcagagccgggtttcatctggaattaactggatggaagggaaaataaagctatctagcggtg

SEQ ID NO: 20970 - DNA, 771 bp, Homo sapiens
  source 1..771: mol_type = unassigned DNA
agggctttctgtatccctaggtttcttgccttgatgtactggagcaatcagatcacacggcggcttggagagtgagtgcaaggttttatgagtggaattagccctcagcagatgggggagccagaaggcagttggagtgggaagaacccagggaccatgggcgcctccaggctctataccctggtgctggtcctgcagcctcagcgagttctcctgggcatgaaaaagcgaggcttcggggccggccggtggaatggctttgggggcaaagtgcaagaaggagagaccatcgaggatggggctaggagggagctgcaggaggagagcggtctgacagtggacgccctgcacaaggtgggccagatcgtgtttgagttcgtgggcgagcctgagctcatggacgtgcatgtcttctgcacagacagcatccaggggacccccgtggagagcgacgaaatgcgcccatgctggttccagctggatcagatccccttcaaggacatgtggcccgacgacagctactggtttccactcctgcttcagaagaagaaattccacgggtacttcaagttccagggtcaggacaccatcctggactacacactccgcgaggtggacacggtctagcgggagcccagggcagcccctgggcaggagacgtggctgctgaacagccgcaaaccatcttcacctgggggcattgagtggcgcagagccgggtttcatctggaattaactggatggaagggaaaataaagctatctagcggtg

SEQ ID NO: 20971 - DNA, 662 bp, Homo sapiens
  source 1..662: mol_type = unassigned DNA
ggtcagaggccacgcccccggaagcggcggtgcagaacccagggaccatgggcgcctccaggctctataccctggtgctggtcctgcagcctcagcgagttctcctgggcatgaaaaagcgaggcttcggggccggccggtggaatggctttgggggcaaagtgcaagaaggagagaccatcgaggatggggctaggagggagctgcaggaggagagcggtctgacagtggacgccctgcacaaggtgggccagatcgtgtttgagttcgtgggcgagcctgagctcatggacgtgcatgtcttctgcacagacagcatccaggggacccccgtggagagcgacgaaatgcgcccatgctggttccagctggatcagatccccttcaaggacatgtggcccgacgacagctactggtttccactcctgcttcagaagaagaaattccacgggtacttcaagttccagggtcaggacaccatcctggactacacactccgcgaggtggacacggtctagcgggagcccagggcagcccctgggcaggagacgtggctgctgaacagccgcaaaccatcttcacctgggggcattgagtggcgcagagccgggtttcatctggaattaactggatggaagggaaaataaagctatctagcggtg

SEQ ID NO: 20972 - DNA, 712 bp, Homo sapiens
  source 1..712: mol_type = unassigned DNA
acgaaaagcgcgcgcggggattccaggagtcgtggtttcttgccttgatgtactggagcaatcagatcacacggcggcttggagaaacccagggaccatgggcgcctccaggctctataccctggtgctggtcctgcagcctcagcgagttctcctgggcatgaaaaagcgaggcttcggggccggccggtggaatggctttgggggcaaagtgcaagaaggagagaccatcgaggatggggctaggagggagctgcaggaggagagcggtctgacagtggacgccctgcacaaggtgggccagatcgtgtttgagttcgtgggcgagcctgagctcatggacgtgcatgtcttctgcacagacagcatccaggggacccccgtggagagcgacgaaatgcgcccatgctggttccagctggatcagatccccttcaaggacatgtggcccgacgacagctactggtttccactcctgcttcagaagaagaaattccacgggtacttcaagttccagggtcaggacaccatcctggactacacactccgcgaggtggacacggtctagcgggagcccagggcagcccctgggcaggagacgtggctgctgaacagccgcaaaccatcttcacctgggggcattgagtggcgcagagccgggtttcatctggaattaactggatggaagggaaaataaagctatctagcggtg

SEQ ID NO: 20973 - DNA, 783 bp, Homo sapiens
  source 1..783: mol_type = unassigned DNA
gaaaagcgcgcgcggggattccaggagtcgtggtttcttgccttgatgtactggagcaatcagatcacacggcggcttggagagtgagtgcaaggttttatgagtggaattagccctcagcagatgggggagccagaaggcagttggagtgggaagaacccagggaccatgggcgcctccaggctctataccctggtgctggtcctgcagcctcagcgagttctcctgggcatgaaaaagcgaggcttcggggccggccggtggaatggctttgggggcaaagtgcaagaaggagagaccatcgaggatggggctaggagggagctgcaggaggagagcggtctgacagtggacgccctgcacaaggtgggccagatcgtgtttgagttcgtgggcgagcctgagctcatggacgtgcatgtcttctgcacagacagcatccaggggacccccgtggagagcgacgaaatgcgcccatgctggttccagctggatcagatccccttcaaggacatgtggcccgacgacagctactggtttccactcctgcttcagaagaagaaattccacgggtacttcaagttccagggtcaggacaccatcctggactacacactccgcgaggtggacacggtctagcgggagcccagggcagcccctgggcaggagacgtggctgctgaacagccgcaaaccatcttcacctgggggcattgagtggcgcagagccgggtttcatctggaattaactggatggaagggaaaataaagctatctagcggtg

SEQ ID NO: 20974 - DNA, 786 bp, Homo sapiens
  source 1..786: mol_type = unassigned DNA
ggtcagaggccacgcccccggaagcggcggtgcaggtttcttgccttgatgtactggagcaatcagatcacacggcggcttggagagtgagtgcaaggttttatgagtggaattagccctcagcagatgggggagccagaaggcagttggagtgggaagaacccagggaccatgggcgcctccaggctctataccctggtgctggtcctgcagcctcagcgagttctcctgggcatgaaaaagcgaggcttcggggccggccggtggaatggctttgggggcaaagtgcaagaaggagagaccatcgaggatggggctaggagggagctgcaggaggagagcggtctgacagtggacgccctgcacaaggtgggccagatcgtgtttgagttcgtgggcgagcctgagctcatggacgtgcatgtcttctgcacagacagcatccaggggacccccgtggagagcgacgaaatgcgcccatgctggttccagctggatcagatccccttcaaggacatgtggcccgacgacagctactggtttccactcctgcttcagaagaagaaattccacgggtacttcaagttccagggtcaggacaccatcctggactacacactccgcgaggtggacacggtctagcgggagcccagggcagcccctgggcaggagacgtggctgctgaacagccgcaaaccatcttcacctgggggcattgagtggcgcagagccgggtttcatctggaattaactggatggaagggaaaataaagctatctagcggtg

SEQ ID NO: 20975 - DNA, 822 bp, Homo sapiens
  source 1..822: mol_type = unassigned DNA
gattccaggagtcgtggtgaccagggaggggagccgggccagcgggcggcaggagactaggggagctgagccatgggcttgggggagagcggggccgggagctcgaaggagaccagaagagcagggtcgggggctcgagggagacgaggagagcggggccgggggtttgggagagagacaaggagagcggggcggaggcttgggggagaccaggagtaaatcacaaaaatttactttggaaaccgtggcttctggcagaaacagatcagtgtcgggacaaagtacacgggcctggtgtgaaactaagccacaaacccatttaccctgtctgacctgcctccgccaccaggacccagtctcagtgaaatgggaaaggttcccttgtcctcctcgaagggcgtgcgatgaggatgtggctcacttcttcagtgccccgcttctcaagcctctaggggaacatacagacaggcaggctgaggggctcccaccccacggcagtgtctaggggtgaatgtttgcagctcctgaagccccagcaggcatgtgttagagggtgctctttcagtttagccttgtaggtggcttgtgttagtcagctgttagactccctgccttatcgcaaggacagagggctttctgtatccctaggtttcttgccttgatgtactggagcaatcagatcacacggcggcttggagaaacccagggaccatgggcgcctccaggctctataccctggtgctggtcctgcagcctcagcgagttctcctgggcatgaaaaagcgaggcttcggggccggccggtggaatggctttgggggc

SEQ ID NO: 20976 - DNA, 1917 bp, Homo sapiens
  source 1..1917: mol_type = unassigned DNA
gacggaggcgcctctctctccccgcccctctcctcggccctttctcttcccagcacctcggctgctgcccggcagcggcagcagctgcgtcggcggcccacacagcagcgagaggcgagaggaggctgcctcgaggatgaagtgcaaacccaaccagacacggacctacgaccccgaggggttcaagaagcgggcggcgtgcctgtgcttccggagcgagcgcgaggacgaggtcctgttagtgagtagcagccggtacccggaccgctggatcgtgccgggcgggggcatggagcccgaggaggagccgggcggtgcggcggtccgagaggtgtacgaagaggcgggagtcaaggggaagttaggccggctcctgggcgtcttcgaacagaaccaggaccccaagcacagaacgtacgtgtatgtactgactgtcacggagctgctggaggattgggaagattcggttagcattgggaggaagcgagagtggttcaaagtcgaagatgccatcaaggttctccagtgccacaagcccgtgcacgccgaatatctggagaaactaaagctgggcggttccccaaccaatggaaactccatggccccatcctcgccagatagcgatccctagtgaatggcatagatgttgttcagatttactttgaaagaatcaagtatgtgaatggatggatgaatggaattgtgaagcacagatgagctctttcacactccaaggacacagctcatcctatgcttttggacacttcttccctgtttattacaatgactattctccaggttgttgcactaccgctgtatctgtacataattctaacttggcacctgtggccttttttgtgctcttatgtgtctgtatttcccggcagagtatacgcccttgaatgccaggaacttgtttccttagtcttttttatatatctagcatataagatattgcttagaatatggtagacatcactgaagatttgtttcagtagttcatattttgtaatgatactgaatggttaaacaatccctttctaatctgtctagcatatatgtgacttttgtttatcaagtgtcacacaactgcttcaaggcagctgtgagatactagaaagcaaaaattcttactcctatgtctgtgtcatcccagatgtgtgcctccagatggcagtatactacactatctgtaaaatatatttgcaaagccaggcacagtgttacgcgtctgcctcaggaggctgaggcagaagaatagcttgagcccaggagctttagtctagcctgagcaatataatgagactccgtctcttaaaatatttgcccaaacattgaacctaaatttgaccatgcccctagaaataattcctaatctttagaaaatagggcagagaaacattattttacaccatggagatgagatcagcagaatccagactataagaaactacaggacacatgacctagtttcttctgtaaataacttgcaaggatgaaagatggaggatgaacctatagatttaaagagacttaagagacatattaaccaattgttaattggatcttatttgaattgtgatttgaccgaactgtaaaacgaatacatttatgagacaatcggggtaatttgaacattggtggggtatttggtattagaataatggttttatcattatgttagaaagaagggtcctcatctacattctcaaacatctgtggctgatatgatatgattcttggaatttgcttcaaaataataagtctggatgttaagtgcattggaaatattgatgaaacgaaattggccttgataattgttgaagctgggtgatggctaaaatgatggttcattatatatgttcatctctatttttgtatgtttggcattttccgtaataaagtttataaaaataa

SEQ ID NO: 20977 - DNA, 2001 bp, Homo sapiens
  source 1..2001: mol_type = unassigned DNA
tgagtaagccagaatggttgatagtgggggaggatgatgacgacgctgcctttgcccctgtcttgtgtgaaacaactgcctgtgggtttcctgcagcgcagtggggagtgagaggagaaacgtcctgccgtgccacacacctcggctgctgcccggcagcggcagcagctgcgtcggcggcccacacagcagcgagaggcgagaggaggctgcctcgaggatgaagtgcaaacccaaccagacacggacctacgaccccgaggggttcaagaagcgggcggcgtgcctgtgcttccggagcgagcgcgaggacgaggtcctgttagtgagtagcagccggtacccggaccgctggatcgtgccgggcgggggcatggagcccgaggaggagccgggcggtgcggcggtccgagaggtgtacgaagaggcgggagtcaaggggaagttaggccggctcctgggcgtcttcgaacagaaccaggaccccaagcacagaacgtacgtgtatgtactgactgtcacggagctgctggaggattgggaagattcggttagcattgggaggaagcgagagtggttcaaagtcgaagatgccatcaaggttctccagtgccacaagcccgtgcacgccgaatatctggagaaactaaagctgggcggttccccaaccaatggaaactccatggccccatcctcgccagatagcgatccctagtgaatggcatagatgttgttcagatttactttgaaagaatcaagtatgtgaatggatggatgaatggaattgtgaagcacagatgagctctttcacactccaaggacacagctcatcctatgcttttggacacttcttccctgtttattacaatgactattctccaggttgttgcactaccgctgtatctgtacataattctaacttggcacctgtggccttttttgtgctcttatgtgtctgtatttcccggcagagtatacgcccttgaatgccaggaacttgtttccttagtcttttttatatatctagcatataagatattgcttagaatatggtagacatcactgaagatttgtttcagtagttcatattttgtaatgatactgaatggttaaacaatccctttctaatctgtctagcatatatgtgacttttgtttatcaagtgtcacacaactgcttcaaggcagctgtgagatactagaaagcaaaaattcttactcctatgtctgtgtcatcccagatgtgtgcctccagatggcagtatactacactatctgtaaaatatatttgcaaagccaggcacagtgttacgcgtctgcctcaggaggctgaggcagaagaatagcttgagcccaggagctttagtctagcctgagcaatataatgagactccgtctcttaaaatatttgcccaaacattgaacctaaatttgaccatgcccctagaaataattcctaatctttagaaaatagggcagagaaacattattttacaccatggagatgagatcagcagaatccagactataagaaactacaggacacatgacctagtttcttctgtaaataacttgcaaggatgaaagatggaggatgaacctatagatttaaagagacttaagagacatattaaccaattgttaattggatcttatttgaattgtgatttgaccgaactgtaaaacgaatacatttatgagacaatcggggtaatttgaacattggtggggtatttggtattagaataatggttttatcattatgttagaaagaagggtcctcatctacattctcaaacatctgtggctgatatgatatgattcttggaatttgcttcaaaataataagtctggatgttaagtgcattggaaatattgatgaaacgaaattggccttgataattgttgaagctgggtgatggctaaaatgatggttcattatatatgttcatctctatttttgtatgtttggcattttccgtaataaagtttataaaaataa

SEQ ID NO: 20978 - DNA, 1060 bp, Homo sapiens
  source 1..1060: mol_type = unassigned DNA
ctattgatgggcccaagcgtaaccaggctcttctgattggccggtgtacttcagtttccgtccaaggtccgcctcctacctccttctgcttcggggagggcatgggatcagctacctgtttctgcctcaaccacggaccaataatatgagatctttgttcaccagttctacagtgatggggtgcttccttttggcttctggaatgggtgcgtttgcttctgaggatctccagtgtcacaacaaacacatgccagccctgttttacagggagccctggaggagttgggatagaggccacattgactgagggtagttgccagggtcctgcagttatacacaaagtccttaggataagaccatggccttgagagcatgtggcttgatcatcttccgaagatgcctcattcccaaagtggacaacaatgcaattgagtttttactgctgcaggcatcagatggcattcatcactggactcctcccaaaggccatgtggaaccaggagaggatgacttggaaacagccctgagggagacccaagaggaagcaggcatagaagcaggccagctgaccattattgaggggttcaaaagggaactcaattatgtggccaggaacaagcctaaaacagtcatttactggctggcggaggtgaaggactatgacgtggagatccgcctctcccatgagcaccaagcctaccgctggctggggctggaggaggcctgccagttggctcagttcaaggagatgaaggcagcgctccaagaaggacaccagtttctttgctccatagaggcctgagctgactggagcagagtcatttgcttcagcaggatccttgtgggccttctaagatgaagccaccctcaggtccagggaaggttgtgctggtatttggctcatgacagccaagagcagatttgtgaaatcggctcaactcccaggtgagagcaagcaaaaatcttggctgggtggaaaggaaggcaaaagagtaaaaattaaaaaggccaggcccagtaagtgtaccttgtactttataaataaacctcaagcagctca

SEQ ID NO: 20979 - DNA, 960 bp, Homo sapiens
  source 1..960: mol_type = unassigned DNA
ctattgatgggcccaagcgtaaccaggctcttctgattggccggtgtacttcagtttccgtccaaggtccgcctcctacctccttctgcttcggtgcgtttgcttctgaggatctccagtgtcacaacaaacacatgccagccctgttttacagggagccctggaggagttgggatagaggccacattgactgagggtagttgccagggtcctgcagttatacacaaagtccttaggataagaccatggccttgagagcatgtggcttgatcatcttccgaagatgcctcattcccaaagtggacaacaatgcaattgagtttttactgctgcaggcatcagatggcattcatcactggactcctcccaaaggccatgtggaaccaggagaggatgacttggaaacagccctgagggagacccaagaggaagcaggcatagaagcaggccagctgaccattattgaggggttcaaaagggaactcaattatgtggccaggaacaagcctaaaacagtcatttactggctggcggaggtgaaggactatgacgtggagatccgcctctcccatgagcaccaagcctaccgctggctggggctggaggaggcctgccagttggctcagttcaaggagatgaaggcagcgctccaagaaggacaccagtttctttgctccatagaggcctgagctgactggagcagagtcatttgcttcagcaggatccttgtgggccttctaagatgaagccaccctcaggtccagggaaggttgtgctggtatttggctcatgacagccaagagcagatttgtgaaatcggctcaactcccaggtgagagcaagcaaaaatcttggctgggtggaaaggaaggcaaaagagtaaaaattaaaaaggccaggcccagtaagtgtaccttgtactttataaataaacctcaagcagctcaaggttgtccttct

SEQ ID NO: 20980 - DNA, 1047 bp, Homo sapiens
  source 1..1047: mol_type = unassigned DNA
ctattgatgggcccaagcgtaaccaggctcttctgattggccggtgtacttcagtttccgtccaaggtccgcctcctacctccttctgcttcgggtaaaatctcctgtttcctccctcagccaatagcaaaaataacaaaatgactcagcagcttcgtctctgcaagaatggagtggcagatgtccagggaaagtgcgtttgcttctgaggatctccagtgtcacaacaaacacatgccagccctgttttacagggagccctggaggagttgggatagaggccacattgactgagggtagttgccagggtcctgcagttatacacaaagaccatggccttgagagcatgtggcttgatcatcttccgaagatgcctcattcccaaagtggacaacaatgcaattgagtttttactgctgcaggcatcagatggcattcatcactggactcctcccaaaggccatgtggaaccaggagaggatgacttggaaacagccctgagggagacccaagaggaagcaggcatagaagcaggccagctgaccattattgaggggttcaaaagggaactcaattatgtggccaggaacaagcctaaaacagtcatttactggctggcggaggtgaaggactatgacgtggagatccgcctctcccatgagcaccaagcctaccgctggctggggctggaggaggcctgccagttggctcagttcaaggagatgaaggcagcgctccaagaaggacaccagtttctttgctccatagaggcctgagctgactggagcagagtcatttgcttcagcaggatccttgtgggccttctaagatgaagccaccctcaggtccagggaaggttgtgctggtatttggctcatgacagccaagagcagatttgtgaaatcggctcaactcccaggtgagagcaagcaaaaatcttggctgggtggaaaggaaggcaaaagagtaaaaattaaaaaggccaggcccagtaagtgtaccttgtactttataaataaacctcaagcagctcaaggttgtccttct

SEQ ID NO: 20981 - DNA, 1002 bp, Homo sapiens
  source 1..1002: mol_type = unassigned DNA
ctattgatgggcccaagcgtaaccaggctcttctgattggccggtgtacttcagtttccgtccaaggtccgcctcctacctccttctgcttcggttctacagtgatggggtgcttccttttggcttctggaatgggtgcgtttgcttctgaggatctccagtgtcacaacaaacacatgccagccctgttttacagggagccctggaggagttgggatagaggccacattgactgagggtagttgccagggtcctgcagttatacacaaagtccttaggataagaccatggccttgagagcatgtggcttgatcatcttccgaagatgcctcattcccaaagtggacaacaatgcaattgagtttttactgctgcaggcatcagatggcattcatcactggactcctcccaaaggccatgtggaaccaggagaggatgacttggaaacagccctgagggagacccaagaggaagcaggcatagaagcaggccagctgaccattattgaggggttcaaaagggaactcaattatgtggccaggaacaagcctaaaacagtcatttactggctggcggaggtgaaggactatgacgtggagatccgcctctcccatgagcaccaagcctaccgctggctggggctggaggaggcctgccagttggctcagttcaaggagatgaaggcagcgctccaagaaggacaccagtttctttgctccatagaggcctgagctgactggagcagagtcatttgcttcagcaggatccttgtgggccttctaagatgaagccaccctcaggtccagggaaggttgtgctggtatttggctcatgacagccaagagcagatttgtgaaatcggctcaactcccaggtgagagcaagcaaaaatcttggctgggtggaaaggaaggcaaaagagtaaaaattaaaaaggccaggcccagtaagtgtaccttgtactttataaataaacctcaagcagctcaaggttgtccttct

SEQ ID NO: 20982 - DNA, 1074 bp, Homo sapiens
  source 1..1074: mol_type = unassigned DNA
ctattgatgggcccaagcgtaaccaggctcttctgattggccggtgtacttcagtttccgtccaaggtccgcctcctacctccttctgcttcgggggagggcatgggatcagctacctgtttctgcctcaaccacggaccaataatatgagatctttgttcaccagttctacagtgatggggtgcttccttttggcttctggaatgggtgcgtttgcttctgaggatctccagtgtcacaacaaacacatgccagccctgttttacagggagccctggaggagttgggatagaggccacattgactgagggtagttgccagggtcctgcagttatacacaaagtccttaggataagaccatggccttgagagcatgtggcttgatcatcttccgaagatgcctcattcccaaagtggacaacaatgcaattgagtttttactgctgcaggcatcagatggcattcatcactggactcctcccaaaggccatgtggaaccaggagaggatgacttggaaacagccctgagggagacccaagaggaagcaggcatagaagcaggccagctgaccattattgaggggttcaaaagggaactcaattatgtggccaggaacaagcctaaaacagtcatttactggctggcggaggtgaaggactatgacgtggagatccgcctctcccatgagcaccaagcctaccgctggctggggctggaggaggcctgccagttggctcagttcaaggagatgaaggcagcgctccaagaaggacaccagtttctttgctccatagaggcctgagctgactggagcagagtcatttgcttcagcaggatccttgtgggccttctaagatgaagccaccctcaggtccagggaaggttgtgctggtatttggctcatgacagccaagagcagatttgtgaaatcggctcaactcccaggtgagagcaagcaaaaatcttggctgggtggaaaggaaggcaaaagagtaaaaattaaaaaggccaggcccagtaagtgtaccttgtactttataaataaacctcaagcagctcaaggttgtccttct

SEQ ID NO: 20983 - DNA, 1969 bp, Homo sapiens
  source 1..1969: mol_type = unassigned DNA
agtaggaggcggcaagtttgaaaagtgatgacggttgacgtttgctgatttttgactttgcttgtagctgctccccgaactcgccgtcttcctgtcggcggccggcactgtaggtgagcgcgagaggacggaggaaggaagcctgcagacagacgccttctccatcccaaggcgcgggcaggtgccgggacgctgggcctggcggtgttttcgtcgtgctcagcggtgggaggaggcggaagaaaccagagcctgggagattaacaggaaacttccaagatggaaactttgtctttccccagatataatgtagctgagattgtgattcatattcgcaataagatcttaacaggagctgatggtaaaaacctcaccaagaatgatctttatccaaatccaaagcctgaagtcttgcacatgatctacatgagagccttacaaatagtatatggaattcgactggaacatttttacatgatgccagtgaactctgaagtcatgtatccacatttaatggaaggcttcttaccattcagcaatttagttactcatctggactcatttttgcctatctgccgggtgaatgactttgagactgctgatattctatgtccaaaagcaaaacggacaagtcggtttttaagtggcattatcaactttattcacttcagagaagcatgccgtgaaacgtatatggaatttctttggcaatataaatcctctgcggacaaaatgcaacagttaaacgccgcacaccaggaggcattaatgaaactggagagacttgattctgttccagttgaagagcaagaagagttcaagcagctttcagatggaattcaggagctacaacaatcactaaatcaggattttcatcaaaaaacgatagtgctgcaagagggaaattcccaaaagaagtcaaatatttcagagaaaaccaagcgtttgaatgaactaaaattgtcggtggtttctttgaaagaaatacaagagagtttgaaaacaaaaattgtggattctccagagaagttaaagaattataaagaaaaaatgaaagatacggtccagaagcttaaaaatgccagacaagaagtggtggagaaatatgaaatctatggagactcagttgactgcctgccttcatgtcagttggaagtgcagttatatcaaaagaaaatacaggacctttcagataatagggaaaaattagccagtatcttaaaggagagcctgaacttggaggaccaaattgagagtgatgagtcagaactgaagaaattgaagactgaagaaaattcgttcaaaagactgatgattgtgaagaaggaaaaacttgccacagcacaattcaaaataaataagaagcatgaagatgttaagcaatacaaacgcacagtaattgaggattgcaataaagttcaagaaaaaagaggtgctgtctatgaacgagtaaccacaattaatcaagaaatccaaaaaattaaacttggaattcaacaactaaaagatgctgctgaaagggagaaactgaagtcccaggaaatatttctaaacttgaaaactgctttggagaaataccacgacggtattgaaaaggcagcagaggactcctatgctaagatagatgagaagacagctgaactgaagaggaagatgttcaaaatgtcaacctgattaacaaaattacatgtctttttgtaaatggcttgccatcttttaattttctatttagaaagaaaagttgaagcgaatggaagtatcagaagtaccaaataatgttggcttcatcagtttttatacactctcataagtagttaataagatgaatttaatgtaggcttttattaatttataattaaaataacttgtgcagctattcatgtctctactctgccccttgttgtaaatagtttgagtaaaacaaaactagttacctttgaaatatatatatttttttctgttactatca

SEQ ID NO: 20984 - DNA, 1842 bp, Homo sapiens
  source 1..1842: mol_type = unassigned DNA
ggaatggggcgggacttccagtaggaggcggcaagtttgaaaagtgatgacggttgacgtttgctgatttttgactttgcttgtagctgctccccgaactcgccgtcttcctgtcggcggccggcactgtagattaacaggaaacttccaagatggaaactttgtctttccccagatataatgtagctgagattgtgattcatattcgcaataagatcttaacaggagctgatggtaaaaacctcaccaagaatgatctttatccaaatccaaagcctgaagtcttgcacatgatctacatgagagccttacaaatagtatatggaattcgactggaacatttttacatgatgccagtgaactctgaagtcatgtatccacatttaatggaaggcttcttaccattcagcaatttagttactcatctggactcatttttgcctatctgccgggtgaatgactttgagactgctgatattctatgtccaaaagcaaaacggacaagtcggtttttaagtggcattatcaactttattcacttcagagaagcatgccgtgaaacgtatatggaatttctttggcaatataaatcctctgcggacaaaatgcaacagttaaacgccgcacaccaggaggcattaatgaaactggagagacttgattctgttccagttgaagagcaagaagagttcaagcagctttcagatggaattcaggagctacaacaatcactaaatcaggattttcatcaaaaaacgatagtgctgcaagagggaaattcccaaaagaagtcaaatatttcagagaaaaccaagcgtttgaatgaactaaaattgtcggtggtttctttgaaagaaatacaagagagtttgaaaacaaaaattgtggattctccagagaagttaaagaattataaagaaaaaatgaaagatacggtccagaagcttaaaaatgccagacaagaagtggtggagaaatatgaaatctatggagactcagttgactgcctgccttcatgtcagttggaagtgcagttatatcaaaagaaaatacaggacctttcagataatagggaaaaattagccagtatcttaaaggagagcctgaacttggaggaccaaattgagagtgatgagtcagaactgaagaaattgaagactgaagaaaattcgttcaaaagactgatgattgtgaagaaggaaaaacttgccacagcacaattcaaaataaataagaagcatgaagatgttaagcaatacaaacgcacagtaattgaggattgcaataaagttcaagaaaaaagaggtgctgtctatgaacgagtaaccacaattaatcaagaaatccaaaaaattaaacttggaattcaacaactaaaagatgctgctgaaagggagaaactgaagtcccaggaaatatttctaaacttgaaaactgctttggagaaataccacgacggtattgaaaaggcagcagaggactcctatgctaagatagatgagaagacagctgaactgaagaggaagatgttcaaaatgtcaacctgattaacaaaattacatgtctttttgtaaatggcttgccatcttttaattttctatttagaaagaaaagttgaagcgaatggaagtatcagaagtaccaaataatgttggcttcatcagtttttatacactctcataagtagttaataagatgaatttaatgtaggcttttattaatttataattaaaataacttgtgcagctattcatgtctctactctgccccttgttgtaaatagtttgagtaaaacaaaactagttacctttgaaatatatatatttttttctgttactatca

SEQ ID NO: 20985 - DNA, 1133 bp, Homo sapiens
  source 1..1133: mol_type = unassigned DNA
ggaatggggcgggacttccagtaggaggcggcaagtttgaaaagtgatgacggttgacgtttgctgatttttgactttgcttgtagctgctccccgaactcgccgtcttcctgtcggcggccggcactgtaggtgagcgcgagaggacggaggaaggaagcctgcagacagacgccttctccatcccaaggcgcgggcaggtgccgggacgctgggcctggcggtgttttcgtcgtgctcagcggtgggaggaggcggaagaaaccagagcctgggaggagctcaaactatgtagttggaaagtgtcttcatctctcgttaatgaataaattgtaactgaaattgtacttcgaaagaatgatagaatttggatattggaggaggttccaaaaggaaatactggaagtttgggaaagttaggagactaacttggagcagaaatttcattcaattattaaagggtttagaagcctagcagaaaaatttgaatttgatgtggtgggtaagattaacaggaaacttccaagatggaaactttgtctttccccagatataatgtagctgagattgtgattcatattcgcaataagatcttaacaggagctgatggtaaaaacctcaccaagaatgatctttatccaaatccaaagcctgaagtcttgcacatgatctacatgagagccttacaaatagtatatggaattcgactggaacatttttacatgatgccagtgaactctgaagtcatgtatccacatttaatggaaggcttcttaccattcagcaatttagttactcatctggactcatttttgcctatctgccgggtgaatgactttgagactgctgatattctatgtccaaaagcaaaacggacaagtcggtttttaagtggcattatcaactttattcacttcagagaagcatgccgtgaaacgtatatggaatttctttggcaatataaatcctctgcggacaaaatgcaacagttaaacgccgcacaccaggaggcattaatgaaactggagagacttgattctgttccagttgaagagcaagaagagttcaagcagctttcagatggaattcaggagctacaacaatcactaaatcaggattttcatcaaaaaacg

SEQ ID NO: 20986 - DNA, 861 bp, Homo sapiens
  source 1..861: mol_type = unassigned DNA
tcttgagcccaaccggcatccgtcgcggttggacgtgggcttggcggaatggggcgggacttccagtaggaggcggcaagtttgaaaagtgatgacggttgacgtttgctgatttttgactttgcttgtagctgctccccgaactcgccgtcttcctgtcggcggccggcactgtaggagctcaaactatgtagttggaaagtgtcttcatctctcgttaatgaataaattgtaactgaaattgtacttcgaaagaatgatagaatttggatattggaggaggttccaaaaggaaatactggaagtttgggaaagttaggagactaacttggagcagaaatttcattcaattattaaagggtttagaagcctagcagaaaaatttgaatttgatgtggtgggtaagattaacaggaaacttccaagatggaaactttgtctttccccagatataatgtagctgagattgtgattcatattcgcaataagatcttaacaggagctgatggtaaaaacctcaccaagaatgatctttatccaaatccaaagcctgaagtcttgcacatgatctacatgagagccttacaaatagtatatggaattcgactggaacatttttacatgatgccagtgaactctgaagtcatgtatccacatttaatggaaggcttcttaccattcagcaatttagttactcatctggactcatttttgcctatctgccgggtgaatgactttgagactgctgatattctatgtccaaaagcaaaacggacaagtcggtttttaagtggcattatcaactttattcacttcagagaagcatgccgtgaaacgtatatggaatttctttggcaatat

SEQ ID NO: 20987 - DNA, 885 bp, Homo sapiens
  source 1..885: mol_type = unassigned DNA
tgtcggcggccggcactgtagattaacaggaaacttccaagatggaaactttgtctttccccagatataatgtagctgagattgtgattcatattcgcaataagatcttaacaggagctgatggtaaaaacctcaccaagaatgatctttatccaaatccaaagcctgaagtcttgcacatgatctacatgagagccttacaaatagtatatggaattcgactggaacatttttacatgatgccagtgaactctgaagtcatgtatccacatttaatggaaggcttcttaccattcagcaatttagttactcatctggactcatttttgcctatctgccgggtgaatgactttgagactgctgatattctatgtccaaaagcaaaacggacaagtcggtttttaagtggcattatcaactttattcacttcagagaagcatgccgtgaaacgtatatggaatttctttggcaatataaatcctctgcggacaaaatgcaacagttaaacgccgcacaccaggaggcattaatgaaactggagagacttgattctgttccagttgaagagcaagaagagttcaagcagctttcagatggaattcaggagctacaacaatcactaaatcaggattttcatcaaaaaacgtgctgcaagagggaaattcccaaaagaagtcaaatatttcagagaaaaccaagcgtttgaatgaactaaaattgtcggtggtttctttgaaagaaatacaagagagtttgaaaacaaaaattgtggattctccagagaagttaaagaattataaagaaaaaatgaaagatacggtccagaagcttaaaaatgccagacaagaagtggtggagaaatatgaaatctatggagactcagt

SEQ ID NO: 20988 - DNA, 1845 bp, Homo sapiens
  source 1..1845: mol_type = unassigned DNA
aaccggcatccgtcgcggttggacgtgggcttggcggaatggggcgggacttccagtaggaggcggcaagtttgaaaagtgatgacggttgacgtttgctgatttttgactttgcttgtagctgctccccgaactcgccgtcttcctgtcggcggccggcactgtaggtgagcgcgagaggacggaggaaggaagcctgcagacagacgccttctccatcccaaggcgcgggcaggtgccgggacgctgggcctggcggtgttttcgtcgtgctcagcggtgggaggaggcggaagaaaccagagcctgggagattaacaggaaacttccaagatggaaactttgtctttccccagatataatgtagctgagattgtgattcatattcgcaataagatcttaacaggagctgatggtaaaaacctcaccaagaatgatctttatccaaatccaaagcctgaagtcttgcacatgatctacatgagagccttacaaatagtatatggaattcgactggaacatttttacatgatgccagtgaactctgaagtcatgtatccacatttaatggaaggcttcttaccattcagcaatttagttactcatctggactcatttttgcctatctgccgggtgaatgactttgagactgctgatattctatgtccaaaagcaaaacggacaagtcggtttttaagtggcattatcaactttattcacttcagagaagcatgccgtgaaacgtatatggaatttctttggcaatataaatcctctgcggacaaaatgcaacagttaaacgccgcacaccaggaggcattaatgaaactggagagacttgattctgttccagttgaagagcaagaagagttcaagcagctttcagatggaattcaggagctacaacaatcactaaatcaggattttcatcaaaaaacgatagtgctgcaagagggaaattcccaaaagaagtcaaatatttcagagaaaaccaagcgtttgaatgaactaaaattgtcggtggtttctttgaaagaaatacaagagagtttgaaaacaaaaattgtggattctccagagaagttaaagaattataaagaaaaaatgaaagatacggtccagaagcttaaaaatgccagaagcctgaacttggaggaccaaattgagagtgatgagtcagaactgaagaaattgaagactgaagaaaattcgttcaaaagactgatgattgtgaagaaggaaaaacttgccacagcacaattcaaaataaataagaagcatgaagatgttaagcaatacaaacgcacagtaattgaggattgcaataaagttcaagaaaaaagaggtgctgtctatgaacgagtaaccacaattaatcaagaaatccaaaaaattaaacttggaattcaacaactaaaagatgctgctgaaagggagaaactgaagtcccaggaaatatttctaaacttgaaaactgctttggagaaataccacgacggtattgaaaaggcagcagaggactcctatgctaagatagatgagaagacagctgaactgaagaggaagatgttcaaaatgtcaacctgattaacaaaattacatgtctttttgtaaatggcttgccatcttttaattttctatttagaaagaaaagttgaagcgaatggaagtatcagaagtaccaaataatgttggcttcatcagtttttatacactctcataagtagttaataagatgaatttaatgtaggcttttattaatttataattaaaataacttgtgcagctattcatgtctctactctgccccttgttgtaaatagtttgagtaaaacaaaactagtt

SEQ ID NO: 20989 - DNA, 567 bp, Homo sapiens
  source 1..567: mol_type = unassigned DNA
aatgcttattcattcttcaagattcagctcaaaattcacttttctctgtgaattcgtatgtcactccatctaccacacagcctctctcagcttcctcagaaaacagccatatgaaagccaagaagagagtcctcaccaggcaccttgaacttgcacttcccagactccagaaatattaacaggaaacttccaagatggaaactttgtctttccccagatataatgtagctgagattgtgattcatattcgcaataagatcttaacaggagctgatggtaaaaacctcaccaagaatgatctttatccaaatccaaagcctgaagtcttgcacatgatctacatgagagccttacaaatagtatatggaattcgactggaacatttttacatgatgccagtgaactctgaagtcatgtatccacatttaatggaaggcttcttaccattcagcaatttagttactcatctggactcatttttgcctatctgccgggtgaatgactttgagactgctgatattctatgtccaaaagcaaaacggacaagtcggtttttaagtggcatta

SEQ ID NO: 20990 - DNA, 1657 bp, Homo sapiens
  source 1..1657: mol_type = unassigned DNA
ggcgcttgagttggtcgggggcagcggcagatttgaggcttaagcaacttcttccggggaagagtgccagtgcagccactgttacaattcaagatcttgatctatatccatagattggaatattggtgggccagcaatcctcagacgcctcacttaggacaagctgtaaaaattaaaatgaacaaattacggcaaagttttaggagaaagaaggatgtttatgttccagaggccagtcgtccacatcagtggcagacagatgaagaaggcgttcgcaccggaaaatgtagcttcccggttaagactggaaagaaagcagttaaagcagttctgtgggtctcagcagatggactcagagttgtggatgaaaaaactaaggacctcatagttgaccagacgatagagaaagtttctttctgtgccccagacaggaactttgatagagccttttcttacatatgccgtgatggcaccactcgtcgctggatctgtcactgcttcatggctgtcaaggacacaggtgaaaggttgagccatgcagtaggctgtgcttttgcagcctgtttagagcgcaagcagaagcgggagaaggaatgtggagtgactgctacttttgatgctagtcggaccacttttacaagagaaggatcattccgtgtcacaacagccactgaacaagcagaaagagaggagatcatgaaacaaatgcaagatgccaagaaagctgaaacagataagatagtcgttggttcatcagttgcccctggcaacactgccccatccccatcctctcccacctctcctacttctgatgccacgacctctctggagatgaacaatcctcatgccatcccacgccggcatgctccaattgaacagcttgctcgccaaggctctttccgaggttttcctgctcttagccagaagatgtcaccctttaaacgccaactatccctacgcatcaatgagttgccttccactatgcagaggaagactgatttccccattaaaaatgcagtgccagaagtagaaggggaggcagagagcatcagctccctgtgctcacagatcaccaatgccttcagcacacctgaggaccccttctcatctgctccgatgaccaaaccagtgacagtggtggcaccacaatctcctaccttccaagctaatggcactgactcagccttccatgtgcttgctaagccagcccatactgctctagcacccgtagcaatgcctgtgcgtgaaaccaacccttgggcccatgcccctgatgctgctaacaaggaaattgcagccacatgttcggggaccgagtggggtcaatcttctggtgctgcctctccaggtctcttccaggccggtcatagacgtactccctctgaggccgaccgatggttagaagaggtgtctaagagcgtccgggctcagcagccccaggcctcagctgctcctctgcagccagttctccagcctcctccacccactgccatctcccagccagcatcacctttccaagggaatgcattcctcacctctcagcctgtgccagtgggtgtggtcccagccctgcaaccagcctttgtccctgcccagtcctatcctgtggccaatggaatgccctatccagcccctaatgtgcctgtggtgggcatca

SEQ ID NO: 20991 - DNA, 3593 bp, Homo sapiens
  source 1..3593: mol_type = unassigned DNA
gcttgagttggtcgggggcagcggcagctgagctgggatgggagacccaactggcctggccgctccggctctgaggatccctaagggaccaggaaagaagtcctcgaggagtggctcgcgtttgagaccgggatttgaggcttaagcaacttcttccggggaagagtgccagtgcagccactgttacaattcaagatcttgatctatatccatagattggaatattggtgggccagcaatcctcagacgcctcacttaggacaagctgtaaaaattaaaatgaacaaattacggcaaagttttaggagaaagaaggatgtttatgttccagaggccagtcgtccacatcagtggcagacagatgaagaaggcgttcgcaccggaaaatgtagcttcccggttaagtaccttggccatgtagaagttgatgaatcaagaggaatgcacatctgtgaagatgctgtaaaaagattgaaagctgaaaggaagttcttcaaaggcttctttggaaaaactggaaagaaagcagttaaagcagttctgtgggtctcagcagatggactcagagttgtggatgaaaaaactaaggacctcatagttgaccagacgatagagaaagtttctttctgtgccccagacaggaactttgatagagccttttcttacatatgccgtgatggcaccactcgtcgctggatctgtcactgcttcatggctgtcaaggacacaggtgaaaggttgagccatgcagtaggctgtgcttttgcagcctgtttagagcgcaagcagaagcgggagaaggaatgtggagtgactgctacttttgatgctagtcggaccacttttacaagagaaggatcattccgtgtcacaacagccactgaacaagcagaaagagaggagatcatgaaacaaatgcaagatgccaagaaagctgaaacagataagatagtcgttggttcatcagttgcccctggcaacactgccccatccccatcctctcccacctctcctacttctgatgccacgacctctctggagatgaacaatcctcatgccatcccacgccggcatgctccaattgaacagcttgctcgccaaggctctttccgaggttttcctgctcttagccagaagatgtcaccctttaaacgccaactatccctacgcatcaatgagttgccttccactatgcagaggaagactgatttccccattaaaaatgcagtgccagaagtagaaggggaggcagagagcatcagctccctgtgctcacagatcaccaatgccttcagcacacctgaggaccccttctcatctgctccgatgaccaaaccagtgacagtggtggcaccacaatctcctaccttccaagctaatggcactgactcagccttccatgtgcttgctaagccagcccatactgctctagcacccgtagcaatgcctgtgcgtgaaaccaacccttgggcccatgcccctgatgctgctaacaaggaaattgcagccacatgttcggggaccgagtggggtcaatcttctggtgctgcctctccaggtctcttccaggccggtcatagacgtactccctctgaggccgaccgatggttagaagaggtgtctaagagcgtccgggctcagcagccccaggcctcagctgctcctctgcagccagttctccagcctcctccacccactgccatctcccagccagcatcacctttccaagggaatgcattcctcacctctcagcctgtgccagtgggtgtggtcccagccctgcaaccagcctttgtccctgcccagtcctatcctgtggccaatggaatgccctatccagcccctaatgtgcctgtggtgggcatcactccctcccagatggtggccaacgtatttggcactgcaggccaccctcaggctgcccatccccatcagtcacccagcctggtcaggcagcagacattccctcactacgaggcaagcagtgctaccaccagtcccttctttaagcctcctgctcagcacctcaacggttctgcagctttcaatggtgtagatgatggcaggttggcctcagcagacaggcatacagaggttcctacaggcacctgcccagtggatccttttgaagcccagtgggctgcattagaaaataagtccaagcagcgtactaatccctcccctaccaaccctttctccagtgacttacagaagacgtttgaaattgaactttaagcaatcattatggctatgtatcttgtccataccagacagggagcagggggtagcggtcaaaggagcaaaacagactttgtctcctgattagtactcttttcactaatcccaaaggtcccaaggaacaagtccaggcccagagtactgtgaggggtgattttgaaagacatgggaaaaagcattcctagagaaaagctgccttgcaattaggctaaagaagtcaaggaaatgttgctttctgtactccctcttcccttacccccttacaaatctctggcaacagagaggcaaagtatctgaacaagaatctatattccaagcacatttactgaaatgtaaaacacaacaggaagcaaagcaatctccctttgtttttcaggccattcacctgcctcctgtcagtagtggcctgtattagagatcaagaagagtggtttgtgctcaggctggggaacagagaggcacgctatgctgccagaattcccaggagggcatatcagcaactgcccagcagagctatattttgggggagaagttgagcttccattttgagtaacagaataaatattatatatatcaaaagccaaaatctttatttttatgcatttagaatattttaaatagttctcagatattaagaagttgtatgagttgtaagtaatcttgccaaaggtaaaggggctagttgtaagaaattgtacataagattgatttatcattgatgcctactgaaataaaaagaggaaaggctggaagctgcagacaggatccctagcttgttttctgtcagtcattcattgtaagtagcacattgcaacaacaatcatgcttatgaccaatacagtcactaggttgtagttttttttaaataaaggaaaagcagtattgtcctggttttaaacctatgatggaattctaatgtcattattttaatggaatcaatcgaaatatgctctatagagaatatatcttttatatattgctgcagtttccttatgttaatcctttaacactaaggtaacatgacataatcataccatagaagggaacacaggttaccatattggtttgtaatatgggtcttggtgggttttgttttatcctttaaattttgttcccatgagttttgtggggatggggattctggttttattagctttgtgtgtgtcctcttcccccaaacccccttttggtgagaacatccccttgacagttgcagcctcttgacctcggataacaataagagagctcatctcatttttacttttgaacgttggccttacaatcaaatgtaagttatatatatttgtactgatgaaaatttataatctgctttaacaaaaataaatgttcatggt

SEQ ID NO: 20992 - DNA, 3453 bp, Homo sapiens
  source 1..3453: mol_type = unassigned DNA
gcttgagttggtcgggggcagcggcagctgagctgggatgggagacccaactggcctggccgctccggctctgaggatccctaagggaccaggaaagaagtcctcgaggagtggctcgcgtttgagaccgggatttgaggcttaagcaacttcttccggggaagagtgccagtgcagccactgttacaattcaagatcttgatctatatccatagattggaatattggtgggccagcaatcctcagacgcctcacttaggacaagctgtaaaaattaaaatgaacaaattacggcaaagttttaggagaaagaaggatgtttatgttccagaggccagtcgtccacatcagtggcagacagatgaagaaggcgttcgcaccggaaaatgtagcttcccggttaagtaccttggccatgtagaagttgatgaatcaagaggaatgcacatctgtgaagatgctgtaaaaagattgaaagctgaaaggaagttcttcaaaggcttctttggaaaaactggaaagaaagcagttaaagcagttctgtgggtctcagcagatggactcagagttgtggatgaaaaaactaaggacctcatagttgaccagacgatagagaaagtttctttctgtgccccagacaggaactttgatagagccttttcttacatatgccgtgatggcaccactcgtcgctggatctgtcactgcttcatggctgtcaaggacacaggtgaaaggttgagccatgcagtaggctgtgcttttgcagcctgtttagagcgcaagcagaagcgggagaaggaatgtggagtgactgctacttttgatgctagtcggaccacttttacaagagaaggatcattccgtgtcacaacagccactgaacaagcagaaagagaggagatcatgaaacaaatgcaagatgccaagaaagctgaaacagataagatagtcgttggttcatcagttgcccctggcaacactgccccatccccatcctctcccacctctcctacttctgatgccacgacctctctggagatgaacaatcctcatgccatcccacgccggcatgctccaattgaacagcttgctcgccaaggctctttccgaggttttcctgctcttagccagaagatgtcaccctttaaacgccaactatccctacgcatcaatgagttgccttccactatgcagaggaagactgatttccccattaaaaatgcagtgccagaagtagaaggggaggcagagagcatcagctccctgtgctcacagatcaccaatgccttcagcacacctgaggaccccttctcatctgctccgatgaccaaaccagtgacagtggtggcaccacaatctcctaccttccaagggaccgagtggggtcaatcttctggtgctgcctctccaggtctcttccaggccggtcatagacgtactccctctgaggccgaccgatggttagaagaggtgtctaagagcgtccgggctcagcagccccaggcctcagctgctcctctgcagccagttctccagcctcctccacccactgccatctcccagccagcatcacctttccaagggaatgcattcctcacctctcagcctgtgccagtgggtgtggtcccagccctgcaaccagcctttgtccctgcccagtcctatcctgtggccaatggaatgccctatccagcccctaatgtgcctgtggtgggcatcactccctcccagatggtggccaacgtatttggcactgcaggccaccctcaggctgcccatccccatcagtcacccagcctggtcaggcagcagacattccctcactacgaggcaagcagtgctaccaccagtcccttctttaagcctcctgctcagcacctcaacggttctgcagctttcaatggtgtagatgatggcaggttggcctcagcagacaggcatacagaggttcctacaggcacctgcccagtggatccttttgaagcccagtgggctgcattagaaaataagtccaagcagcgtactaatccctcccctaccaaccctttctccagtgacttacagaagacgtttgaaattgaactttaagcaatcattatggctatgtatcttgtccataccagacagggagcagggggtagcggtcaaaggagcaaaacagactttgtctcctgattagtactcttttcactaatcccaaaggtcccaaggaacaagtccaggcccagagtactgtgaggggtgattttgaaagacatgggaaaaagcattcctagagaaaagctgccttgcaattaggctaaagaagtcaaggaaatgttgctttctgtactccctcttcccttacccccttacaaatctctggcaacagagaggcaaagtatctgaacaagaatctatattccaagcacatttactgaaatgtaaaacacaacaggaagcaaagcaatctccctttgtttttcaggccattcacctgcctcctgtcagtagtggcctgtattagagatcaagaagagtggtttgtgctcaggctggggaacagagaggcacgctatgctgccagaattcccaggagggcatatcagcaactgcccagcagagctatattttgggggagaagttgagcttccattttgagtaacagaataaatattatatatatcaaaagccaaaatctttatttttatgcatttagaatattttaaatagttctcagatattaagaagttgtatgagttgtaagtaatcttgccaaaggtaaaggggctagttgtaagaaattgtacataagattgatttatcattgatgcctactgaaataaaaagaggaaaggctggaagctgcagacaggatccctagcttgttttctgtcagtcattcattgtaagtagcacattgcaacaacaatcatgcttatgaccaatacagtcactaggttgtagttttttttaaataaaggaaaagcagtattgtcctggttttaaacctatgatggaattctaatgtcattattttaatggaatcaatcgaaatatgctctatagagaatatatcttttatatattgctgcagtttccttatgttaatcctttaacactaaggtaacatgacataatcataccatagaagggaacacaggttaccatattggtttgtaatatgggtcttggtgggttttgttttatcctttaaattttgttcccatgagttttgtggggatggggattctggttttattagctttgtgtgtgtcctcttcccccaaacccccttttggtgagaacatccccttgacagttgcagcctcttgacctcggataacaataagagagctcatctcatttttacttttgaacgttggccttacaatcaaatgtaagttatatatatttgtactgatgaaaatttataatctgctttaacaaaaataaatgttcatggtagaa

SEQ ID NO: 20993 - DNA, 3560 bp, Homo sapiens
  source 1..3560: mol_type = unassigned DNA
gcttgagttggtcgggggcagcggcagctgagctgggatgggagacccaactggcctggccgctccggctctgaggatccctaagggaccaggaaagaagtcctcgaggagtggctcgcgtttgagaccgggatttgaggcttaagcaacttcttccggggaagagtgccagtgcagccactgttacaattcaagatcttgatctatatccatagattggaatattggtgggccagcaatcctcagacgcctcacttaggacaagctgtaaaaattaaaatgaacaaattacggcaaagttttaggagaaagaaggatgtttatgttccagaggccagtcgtccacatcagtggcagacagatgaagaaggcgttcgcaccggaaaatgtagcttcccggttaagtaccttggccatgtagaagttgatgaatcaagaggaatgcacatctgtgaagatgctgtaaaaagattgaaagctactggaaagaaagcagttaaagcagttctgtgggtctcagcagatggactcagagttgtggatgaaaaaactaaggacctcatagttgaccagacgatagagaaagtttctttctgtgccccagacaggaactttgatagagccttttcttacatatgccgtgatggcaccactcgtcgctggatctgtcactgcttcatggctgtcaaggacacaggtgaaaggttgagccatgcagtaggctgtgcttttgcagcctgtttagagcgcaagcagaagcgggagaaggaatgtggagtgactgctacttttgatgctagtcggaccacttttacaagagaaggatcattccgtgtcacaacagccactgaacaagcagaaagagaggagatcatgaaacaaatgcaagatgccaagaaagctgaaacagataagatagtcgttggttcatcagttgcccctggcaacactgccccatccccatcctctcccacctctcctacttctgatgccacgacctctctggagatgaacaatcctcatgccatcccacgccggcatgctccaattgaacagcttgctcgccaaggctctttccgaggttttcctgctcttagccagaagatgtcaccctttaaacgccaactatccctacgcatcaatgagttgccttccactatgcagaggaagactgatttccccattaaaaatgcagtgccagaagtagaaggggaggcagagagcatcagctccctgtgctcacagatcaccaatgccttcagcacacctgaggaccccttctcatctgctccgatgaccaaaccagtgacagtggtggcaccacaatctcctaccttccaagctaatggcactgactcagccttccatgtgcttgctaagccagcccatactgctctagcacccgtagcaatgcctgtgcgtgaaaccaacccttgggcccatgcccctgatgctgctaacaaggaaattgcagccacatgttcggggaccgagtggggtcaatcttctggtgctgcctctccaggtctcttccaggccggtcatagacgtactccctctgaggccgaccgatggttagaagaggtgtctaagagcgtccgggctcagcagccccaggcctcagctgctcctctgcagccagttctccagcctcctccacccactgccatctcccagccagcatcacctttccaagggaatgcattcctcacctctcagcctgtgccagtgggtgtggtcccagccctgcaaccagcctttgtccctgcccagtcctatcctgtggccaatggaatgccctatccagcccctaatgtgcctgtggtgggcatcactccctcccagatggtggccaacgtatttggcactgcaggccaccctcaggctgcccatccccatcagtcacccagcctggtcaggcagcagacattccctcactacgaggcaagcagtgctaccaccagtcccttctttaagcctcctgctcagcacctcaacggttctgcagctttcaatggtgtagatgatggcaggttggcctcagcagacaggcatacagaggttcctacaggcacctgcccagtggatccttttgaagcccagtgggctgcattagaaaataagtccaagcagcgtactaatccctcccctaccaaccctttctccagtgacttacagaagacgtttgaaattgaactttaagcaatcattatggctatgtatcttgtccataccagacagggagcagggggtagcggtcaaaggagcaaaacagactttgtctcctgattagtactcttttcactaatcccaaaggtcccaaggaacaagtccaggcccagagtactgtgaggggtgattttgaaagacatgggaaaaagcattcctagagaaaagctgccttgcaattaggctaaagaagtcaaggaaatgttgctttctgtactccctcttcccttacccccttacaaatctctggcaacagagaggcaaagtatctgaacaagaatctatattccaagcacatttactgaaatgtaaaacacaacaggaagcaaagcaatctccctttgtttttcaggccattcacctgcctcctgtcagtagtggcctgtattagagatcaagaagagtggtttgtgctcaggctggggaacagagaggcacgctatgctgccagaattcccaggagggcatatcagcaactgcccagcagagctatattttgggggagaagttgagcttccattttgagtaacagaataaatattatatatatcaaaagccaaaatctttatttttatgcatttagaatattttaaatagttctcagatattaagaagttgtatgagttgtaagtaatcttgccaaaggtaaaggggctagttgtaagaaattgtacataagattgatttatcattgatgcctactgaaataaaaagaggaaaggctggaagctgcagacaggatccctagcttgttttctgtcagtcattcattgtaagtagcacattgcaacaacaatcatgcttatgaccaatacagtcactaggttgtagttttttttaaataaaggaaaagcagtattgtcctggttttaaacctatgatggaattctaatgtcattattttaatggaatcaatcgaaatatgctctatagagaatatatcttttatatattgctgcagtttccttatgttaatcctttaacactaaggtaacatgacataatcataccatagaagggaacacaggttaccatattggtttgtaatatgggtcttggtgggttttgttttatcctttaaattttgttcccatgagttttgtggggatggggattctggttttattagctttgtgtgtgtcctcttcccccaaacccccttttggtgagaacatccccttgacagttgcagcctcttgacctcggataacaataagagagctcatctcatttttacttttgaacgttggccttacaatcaaatgtaagttatatatatttgtactgatgaaaatttataatctgctttaacaaaaataaatgttcatggt

SEQ ID NO: 20994 - DNA, 1565 bp, Homo sapiens
  source 1..1565: mol_type = unassigned DNA
caggctgtaaaaattaaaatgaacaaattacggcaaagttttaggagaaagaaggatgtttatgttccagaggccagtcgtccacatcagtggcagacagatgaagaaggcgttcgcaccggaaaatgtagcttcccggttaagtaccttggccatgtagaagttgatgaatcaagaggaatgcacatctgtgaagatgctgtaaaaagattgaaagctgaaaggaagttcttcaaaggcttctttggaaaaactggaaagaaagcagttaaagcagttctgtgggtctcagcagatggactcagagttgtggatgaaaaaactaaggacctcatagttgaccagacgatagagaaagtttctttctgtgccccagacaggaactttgatagagccttttcttacatatgccgtgatggcaccactcgtcgctggatctgtcactgcttcatggctgtcaaggacacaggtgaaaggttgagccatgcagtaggctgtgcttttgcagcctgtttagagcgcaagcagaagcgggagaaggaatgtggagtgactgctacttttgatgctagtcggaccacttttacaagagaaggatcattccgtgtcacaacagccactgaacaagcagaaagagaggagatcatgaaacaaatgcaagatgccaagaaagtgccagaagtagaaggggaggcagagagcatcagctccctgtgctcacagatcaccaatgccttcagcacacctgaggaccccttctcatctgctccgatgaccaaaccagtgacagtggtggcaccacaatctcctaccttccaagggaccgagtggggtcaatcttctggtgctgcctctccaggtctcttccaggccggtcatagacgtactccctctgaggccgaccgatggttagaagaggtgtctaagagcgtccgggctcagcagccccaggcctcagctgctcctctgcagccagttctccagcctcctccacccactgccatctcccagccagcatcacctttccaagggaatgcattcctcacctctcagcctgtgccagtgggtgtggtcccagccctgcaaccagcctttgtccctgcccagtcctatcctgtggccaatggaatgccctatccagcccctaatgtgcctgtggtgggcatcactccctcccagatggtggccaacgtatttggcactgcaggccaccctcaggctgcccatccccatcagtcacccagcctggtcaggcagcagacattccctcactacgaggcaagcagtgctaccaccagtcccttctttaagcctcctgctcagcacctcaacggttctgcagctttcaatggtgtagatgatggcaggttggcctcagcagacaggcatacagaggttcctacaggcacctgcccagtggatccttttgaagcccagtgggctgcattagaaaataagtccaagcagcgtactaatccctcccctaccaaccctttctccagtgacttacagaagacgtttgaaattgaactttaagcaatcattatggctatgtatcttgtcca

SEQ ID NO: 20995 - DNA, 2124 bp, Homo sapiens
  source 1..2124: mol_type = unassigned DNA
actggcggccgaggtagaggcagtggcgcttgagttggtcgggggcagcggcagatttgaggcttaagcaacttcttccggggaagagtgccagtgcagccactgttacaattcaagatcttgatctatatccatagattggaatattggtgggccagcaatcctcagacgcctcacttaggacaagctgtaaaaattaaaatgaacaaattacggcaaagttttaggagaaagaaggatgtttatgttccagaggccagtcgtccacatcagtggcagacagatgaagaaggcgttcgcaccggaaaatgtagcttcccggttaagtaccttggccatgtagaagttgatgaatcaagaggaatgcacatctgtgaagatgctgtaaaaagattgaaagctactggaaagaaagcagttaaagcagttctgtgggtctcagcagatggactcagagttgtggatgaaaaaactaaggacctcatagttgaccagacgatagagaaagtttctttctgtgccccagacaggaactttgatagagccttttcttacatatgccgtgatggcaccactcgtcgctggatctgtcactgcttcatggctgtcaaggacacaggtgaaaggttgagccatgcagtaggctgtgcttttgcagcctgtttagagcgcaagcagaagcgggagaaggaatgtggagtgactgctacttttgatgctagtcggaccacttttacaagagaaggatcattccgtgtcacaacagccactgaacaagcagaaagagaggagatcatgaaacaaatgcaagatgccaagaaagctgaaacagataagatagtcgttggttcatcagttgcccctggcaacactgccccatccccatcctctcccacctctcctacttctgatgccacgacctctctggagatgaacaatcctcatgccatcccacgccggcatgctccaattgaacagcttgctcgccaaggctctttccgaggttttcctgctcttagccagaagatgtcaccctttaaacgccaactatccctacgcatcaatgagttgccttccactatgcagaggaagactgatttccccattaaaaatgcagtgccagaagtagaaggggaggcagagagcatcagctccctgtgctcacagatcaccaatgccttcagcacacctgaggaccccttctcatctgctccgatgaccaaaccagtgacagtggtggcaccacaatctcctaccttccaagctaatggcactgactcagccttccatgtgcttgctaagccagcccatactgctctagcacccgtagcaatgcctgtgcgtgaaaccaacccttgggcccatgcccctgatgctgctaacaaggaaattgcagccacatgttcggggaccgagtggggtcaatcttctggtgctgcctctccaggtctcttccaggccggtcatagacgtactccctctgaggccgaccgatggttagaagaggtgtctaagagcgtccgggctcagcagccccaggcctcagctgctcctctgcagccagttctccagcctcctccacccactgccatctcccagccagcatcacctttccaagggaatgcattcctcacctctcagcctgtgccagtgggtgtggtcccagccctgcaaccagcctttgtccctgcccagtcctatcctgtggccaatggaatgccctatccagcccctaatgtgcctgtggtgggcatcactccctcccagatggtggccaacgtatttggcactgcaggccaccctcaggctgcccatccccatcagtcacccagcctggtcaggcagcagacattccctcactacgaggcaagcagtgctaccaccagtcccttctttaagcctcctgctcagcacctcaacggttctgcagctttcaatggtgtagatgatggcaggttggcctcagcagacaggcatacagaggttcctacaggcacctgcccagtggatccttttgaagcccagtgggctgcattagaaaataagtccaagcagcgtactaatccctcccctaccaaccctttctccagtgacttacagaagacgtttgaaattgaactttaa

SEQ ID NO: 20996 - DNA, 1418 bp, Homo sapiens
  source 1..1418: mol_type = unassigned DNA
caggctgtaaaaattaaaatgaacaaattacggcaaagttttaggagaaagaaggatgtttatgttccagaggccagtcgtccacatcagtggcagacagatgaagaaggcgttcgcaccggaaaatgtagcttcccggttaagtaccttggccatgtagaagttgatgaatcaagaggaatgcacatctgtgaagatgctgtaaaaagattgaaagctgaaaggaagttcttcaaaggcttctttggaaaaactggaaagaaagcagttaaagcagttctgtgggtctcagcagatggactcagagttgtggatgaaaaaactaaggacctcatagttgaccagacgatagagaaagtttctttctgtgccccagacaggaactttgatagagccttttcttacatatgccgtgatggcaccactcgtcgctggatctgtcactgcttcatggctgtcaaggacacaggtgaaaggttgagccatgcagtaggctgtgcttttgcagcctgtttagagcgcaagcagaagcgggagaaggaatgtggagtgactgctacttttgatgctagtcggaccacttttacaagagaaggatcattccgtgtcacaacagccactgaacaagcagaaagagaggagatcatgaaacaaatgcaagatgccaagaaagggaccgagtggggtcaatcttctggtgctgcctctccaggtctcttccaggccggtcatagacgtactccctctgaggccgaccgatggttagaagaggtgtctaagagcgtccgggctcagcagccccaggcctcagctgctcctctgcagccagttctccagcctcctccacccactgccatctcccagccagcatcacctttccaagggaatgcattcctcacctctcagcctgtgccagtgggtgtggtcccagccctgcaaccagcctttgtccctgcccagtcctatcctgtggccaatggaatgccctatccagcccctaatgtgcctgtggtgggcatcactccctcccagatggtggccaacgtatttggcactgcaggccaccctcaggctgcccatccccatcagtcacccagcctggtcaggcagcagacattccctcactacgaggcaagcagtgctaccaccagtcccttctttaagcctcctgctcagcacctcaacggttctgcagctttcaatggtgtagatgatggcaggttggcctcagcagacaggcatacagaggttcctacaggcacctgcccagtggatccttttgaagcccagtgggctgcattagaaaataagtccaagcagcgtactaatccctcccctaccaaccctttctccagtgacttacagaagacgtttgaaattgaactttaagcaatcattatggctatgtatcttgtcca

SEQ ID NO: 20997 - DNA, 954 bp, Homo sapiens
  source 1..954: mol_type = unassigned DNA
tggcgcttgagttggtcgggggcagcggcagatttgaggcttaagcaacttcttccggggaagagtgccagtgcagccactgttacaattcaagatcttgatctatatccatagattggaatattggtgggccagcaatcctcagacgcctcacttaggacaagctgtaaaaattaaaatgaacaaattacggcaaagttttaggagaaagaaggatgtttatgttccagaggccagtcgtccacatcagtggcagacagatgaagaaggcgttcgcaccggaaaatgtagcttcccggttaagtaccttggccatgtagaagttgatgaatcaagaggaatgcacatctgtgaagatgctgtaaaaagattgaaagctgaaaggaagttcttcaaaggcttctttggaaaaactggaaagaaagcagttaaagcagttctgtgggtctcagcagatggactcagagttgtggatgaaaaaactaaggacctcatagttgaccagacgatagagaaagtttctttctgtgccccagacaggaactttgatagagccttttcttacatatgccgtgatggcaccactcgtcgctggatctgtcactgcttcatggctgtcaaggacacaggtgaaaggttgagccatgcagtaggctgtgcttttgcagcctgtttagagcgcaagcagaagcgggagaaggaatgtggagtgactgctacttttgatgctagtcggaccacttttacaagagaaggatcattccgtgtcacaacagccactgaacaagcagaaagagaggagatcatgaaacaaatgcaagatgccaagaaagctgaaacagataagatagtcgttggttcatcagttgcccctggcaacactgccccatccccatcctctcccacctctcctacttctgatgccacgacctctctggagatgaacaatcctca

SEQ ID NO: 20998 - DNA, 3607 bp, Homo sapiens
  source 1..3607: mol_type = unassigned DNA
caatggataggttagaagtatgaaagagggtgggcctgttgtcatgggggaggtggtggcgcttggtggccactggcggccgaggtagaggcagtggcgcttgagttggtcgggggcagcggcagatttgaggcttaagcaacttcttccggggaagagtgccagtgcagccactgttacaattcaagatcttgatctatatccatagattggaatattggtgggccagcaatcctcagacgcctcacttaggacaaatgaggaaactgaggcttggtgaagttacgaaacttgtccaaaatcacacaacttgtaaagggcacagccaagattcagagccaggctgtaaaaattaaaatgaacaaattacggcaaagttttaggagaaagaaggatgtttatgttccagaggccagtcgtccacatcagtggcagacagatgaagaaggcgttcgcaccggaaaatgtagcttcccggttaagtaccttggccatgtagaagttgatgaatcaagaggaatgcacatctgtgaagatgctgtaaaaagattgaaagctactggaaagaaagcagttaaagcagttctgtgggtctcagcagatggactcagagttgtggatgaaaaaactaaggacctcatagttgaccagacgatagagaaagtttctttctgtgccccagacaggaactttgatagagccttttcttacatatgccgtgatggcaccactcgtcgctggatctgtcactgcttcatggctgtcaaggacacaggtgaaaggttgagccatgcagtaggctgtgcttttgcagcctgtttagagcgcaagcagaagcgggagaaggaatgtggagtgactgctacttttgatgctagtcggaccacttttacaagagaaggatcattccgtgtcacaacagccactgaacaagcagaaagagaggagatcatgaaacaaatgcaagatgccaagaaagctgaaacagataagatagtcgttggttcatcagttgcccctggcaacactgccccatccccatcctctcccacctctcctacttctgatgccacgacctctctggagatgaacaatcctcatgccatcccacgccggcatgctccaattgaacagcttgctcgccaaggctctttccgaggttttcctgctcttagccagaagatgtcaccctttaaacgccaactatccctacgcatcaatgagttgccttccactatgcagaggaagactgatttccccattaaaaatgcagtgccagaagtagaaggggaggcagagagcatcagctccctgtgctcacagatcaccaatgccttcagcacacctgaggaccccttctcatctgctccgatgaccaaaccagtgacagtggtggcaccacaatctcctaccttccaagggaccgagtggggtcaatcttctggtgctgcctctccaggtctcttccaggccggtcatagacgtactccctctgaggccgaccgatggttagaagaggtgtctaagagcgtccgggctcagcagccccaggcctcagctgctcctctgcagccagttctccagcctcctccacccactgccatctcccagccagcatcacctttccaagggaatgcattcctcacctctcagcctgtgccagtgggtgtggtcccagccctgcaaccagcctttgtccctgcccagtcctatcctgtggccaatggaatgccctatccagcccctaatgtgcctgtggtgggcatcactccctcccagatggtggccaacgtatttggcactgcaggccaccctcaggctgcccatccccatcagtcacccagcctggtcaggcagcagacattccctcactacgaggcaagcagtgctaccaccagtcccttctttaagcctcctgctcagcacctcaacggttctgcagctttcaatggtgtagatgatggcaggttggcctcagcagacaggcatacagaggttcctacaggcacctgcccagtggatccttttgaagcccagtgggctgcattagaaaataagtccaagcagcgtactaatccctcccctaccaaccctttctccagtgacttacagaagacgtttgaaattgaactttaagcaatcattatggctatgtatcttgtccataccagacagggagcagggggtagcggtcaaaggagcaaaacagactttgtctcctgattagtactcttttcactaatcccaaaggtcccaaggaacaagtccaggcccagagtactgtgaggggtgattttgaaagacatgggaaaaagcattcctagagaaaagctgccttgcaattaggctaaagaagtcaaggaaatgttgctttctgtactccctcttcccttacccccttacaaatctctggcaacagagaggcaaagtatctgaacaagaatctatattccaagcacatttactgaaatgtaaaacacaacaggaagcaaagcaatctccctttgtttttcaggccattcacctgcctcctgtcagtagtggcctgtattagagatcaagaagagtggtttgtgctcaggctggggaacagagaggcacgctatgctgccagaattcccaggagggcatatcagcaactgcccagcagagctatattttgggggagaagttgagcttccattttgagtaacagaataaatattatatatatcaaaagccaaaatctttatttttatgcatttagaatattttaaatagttctcagatattaagaagttgtatgagttgtaagtaatcttgccaaaggtaaaggggctagttgtaagaaattgtacataagattgatttatcattgatgcctactgaaataaaaagaggaaaggctggaagctgcagacaggatccctagcttgttttctgtcagtcattcattgtaagtagcacattgcaacaacaatcatgcttatgaccaatacagtcactaggttgtagttttttttaaataaaggaaaagcagtattgtcctggttttaaacctatgatggaattctaatgtcattattttaatggaatcaatcgaaatatgctctatagagaatatatcttttatatattgctgcagtttccttatgttaatcctttaacactaaggtaacatgacataatcataccatagaagggaacacaggttaccatattggtttgtaatatgggtcttggtgggttttgttttatcctttaaattttgttcccatgagttttgtggggatggggattctggttttattagctttgtgtgtgtcctcttcccccaaacccccttttggtgagaacatccccttgacagttgcagcctcttgacctcggataacaataagagagctcatctcatttttacttttgaacgttggccttacaatcaaatgtaagttatatatatttgtactgatgaaaatttataatctgctttaacaaaaataaatgttcatggtagaagcttttgcccatgaagggctgttctttcccctttcctttattagtaaatgaatttatttttcgttcttttggtcttactctccattctactgctgctgtaaatccctag

SEQ ID NO: 20999 - DNA, 552 bp, Homo sapiens
  source 1..552: mol_type = unassigned DNA
gcggagttctcccgaggaaggtaggctacggccggacccgcgcgggtcaggccaggaggtcccttgggacgtccagctgctccggtctagcgcgctgaccggcggccactgtgtgaggaatttgaggcttaagcaacttcttccggggaagagtgccagtgcagccactgttacaattcaagatcttgatctatatccatagattggaatattggtgggccagcaatcctcagacgcctcacttaggacaaatgaggaaactgaggcttggtgaagttacgaaacttgtccaaaatcacacaacttgtaaagggcacagccaagattcagagccaggctgtaaaaattaaaatgaacaaattacggcaaagttttaggagaaagaaggatgtttatgttccagaggccagtcgtccacatcagtggcagacagatgaagaaggcgttcgcaccggaaaatgtagcttcccggttaagtaccttggccatgtagaagttgatgaatcaagaggaatgcacatctgtgaagatgctgtaaaaagattgaaagct

SEQ ID NO: 21000 - DNA, 3588 bp, Homo sapiens
  source 1..3588: mol_type = unassigned DNA
gaggcagtggcgcttgagttggtcgggggcagcggcagatttgaggcttaagcaacttcttccggggaagagtgccagtgcagccactgttacaattcaagatcttgatctatatccatagattggaatattggtgggccagcaatcctcagacgcctcacttaggacaaatgaggaaactgaggcttggtgaagttacgaaacttgtccaaaatcacacaacttgtaaagggcacagccaagattcagagccaggctgtaaaaattaaaatgaacaaattacggcaaagttttaggagaaagaaggatgtttatgttccagaggccagtcgtccacatcagtggcagacagatgaagaaggcgttcgcaccggaaaatgtagcttcccggttaagtaccttggccatgtagaagttgatgaatcaagaggaatgcacatctgtgaagatgctgtaaaaagattgaaagctgaaaggaagttcttcaaaggcttctttggaaaaactggaaagaaagcagttaaagcagttctgtgggtctcagcagatggactcagagttgtggatgaaaaaactaaggacctcatagttgaccagacgatagagaaagtttctttctgtgccccagacaggaactttgatagagccttttcttacatatgccgtgatggcaccactcgtcgctggatctgtcactgcttcatggctgtcaaggacacaggtgaaaggttgagccatgcagtaggctgtgcttttgcagcctgtttagagcgcaagcagaagcgggagaaggaatgtggagtgactgctacttttgatgctagtcggaccacttttacaagagaaggatcattccgtgtcacaacagccactgaacaagcagaaagagaggagatcatgaaacaaatgcaagatgccaagaaagctgaaacagataagatagtcgttggttcatcagttgcccctggcaacactgccccatccccatcctctcccacctctcctacttctgatgccacgacctctctggagatgaacaatcctcatgccatcccacgccggcatgctccaattgaacagcttgctcgccaaggctctttccgaggttttcctgctcttagccagaagatgtcaccctttaaacgccaactatccctacgcatcaatgagttgccttccactatgcagaggaagactgatttccccattaaaaatgcagtgccagaagtagaaggggaggcagagagcatcagctccctgtgctcacagatcaccaatgccttcagcacacctgaggaccccttctcatctgctccgatgaccaaaccagtgacagtggtggcaccacaatctcctaccttccaagctaatggcactgactcagccttccatgtgcttgctaagccagcccatactgctctagcacccgtagcaatgcctgtgcgtgaaaccaacccttgggcccatgcccctgatgctgctaacaaggaaattgcagccacatgttcggggaccgagtggggtcaatcttctggtgctgcctctccaggtctcttccaggccggtcatagacgtactccctctgaggccgaccgatggttagaagaggtgtctaagagcgtccgggctcagcagccccaggcctcagctgctcctctgcagccagttctccagcctcctccacccactgccatctcccagccagcatcacctttccaagggaatgcattcctcacctctcagcctgtgccagtgggtgtggtcccagccctgcaaccagcctttgtccctgcccagtcctatcctgtggccaatggaatgccctatccagcccctaatgtgcctgtggtgggcatcactccctcccagatggtggccaacgtatttggcactgcaggccaccctcaggctgcccatccccatcagtcacccagcctggtcaggcagcagacattccctcactacgaggcaagcagtgctaccaccagtcccttctttaagcctcctgctcagcacctcaacggttctgcagctttcaatggtgtagatgatggcaggttggcctcagcagacaggcatacagaggttcctacaggcacctgcccagtggatccttttgaagcccagtgggctgcattagaaaataagtccaagcagcgtactaatccctcccctaccaaccctttctccagtgacttacagaagacgtttgaaattgaactttaagcaatcattatggctatgtatcttgtccataccagacagggagcagggggtagcggtcaaaggagcaaaacagactttgtctcctgattagtactcttttcactaatcccaaaggtcccaaggaacaagtccaggcccagagtactgtgaggggtgattttgaaagacatgggaaaaagcattcctagagaaaagctgccttgcaattaggctaaagaagtcaaggaaatgttgctttctgtactccctcttcccttacccccttacaaatctctggcaacagagaggcaaagtatctgaacaagaatctatattccaagcacatttactgaaatgtaaaacacaacaggaagcaaagcaatctccctttgtttttcaggccattcacctgcctcctgtcagtagtggcctgtattagagatcaagaagagtggtttgtgctcaggctggggaacagagaggcacgctatgctgccagaattcccaggagggcatatcagcaactgcccagcagagctatattttgggggagaagttgagcttccattttgagtaacagaataaatattatatatatcaaaagccaaaatctttatttttatgcatttagaatattttaaatagttctcagatattaagaagttgtatgagttgtaagtaatcttgccaaaggtaaaggggctagttgtaagaaattgtacataagattgatttatcattgatgcctactgaaataaaaagaggaaaggctggaagctgcagacaggatccctagcttgttttctgtcagtcattcattgtaagtagcacattgcaacaacaatcatgcttatgaccaatacagtcactaggttgtagttttttttaaataaaggaaaagcagtattgtcctggttttaaacctatgatggaattctaatgtcattattttaatggaatcaatcgaaatatgctctatagagaatatatcttttatatattgctgcagtttccttatgttaatcctttaacactaaggtaacatgacataatcataccatagaagggaacacaggttaccatattggtttgtaatatgggtcttggtgggttttgttttatcctttaaattttgttcccatgagttttgtggggatggggattctggttttattagctttgtgtgtgtcctcttcccccaaacccccttttggtgagaacatccccttgacagttgcagcctcttgacctcggataacaataagagagctcatctcatttttacttttgaacgttggccttacaatcaaatgtaagttatatatatttgtactgatgaaaatttataatctgctttaacaaaaataaatgttcatggtagaa

SEQ ID NO: 21001 - DNA, 1039 bp, Homo sapiens
  source 1..1039: mol_type = unassigned DNA
gagttctcccgaggaaggtaggctacggccggacccgcgcgggtcaggccaggaggtcccttgggacgtccagctgctccggtctagcgcgctgaccggcggccactgtgtgaggaatttgaggcttaagcaacttcttccggggaagagtgccagtgcagccactgttacaattcaagatcttgatctatatccatagattggaatattggtgggccagcaatcctcagacgcctcacttaggacaagctgtaaaaattaaaatgaacaaattacggcaaagttttaggagaaagaaggatgtttatgttccagaggccagtcgtccacatcagtggcagacagatgaagaaggcgttcgcaccggaaaatgtagcttcccggttaagtaccttggccatgtagaagttgatgaatcaagaggaatgcacatctgtgaagatgctgtaaaaagattgaaagctgaaaggaagttcttcaaaggcttctttggaaaaactggaaagaaagcagttaaagcagttctgtgggtctcagcagatggactcagagttgtggatgaaaaaactaaggacctcatagttgaccagacgatagagaaagtttctttctgtgccccagacaggaactttgatagagccttttcttacatatgccgtgatggcaccactcgtcgctggatctgtcactgcttcatggctgtcaaggacacaggtgaaaggttgagccatgcagtaggctgtgcttttgcagcctgtttagagcgcaagcagaagcgggagaaggaatgtggagtgactgctacttttgatgctagtcggaccacttttacaagagaaggatcattccgtgtcacaacagccactgaacaagcagaaagagaggagatcatgaaacaaatgcaagatgccaagaaagctgaaacagataagatagtcgttggttcatcagttgcccctggcaacactgccccatccccatcctctcccacctctcctacttctgatgccacgacctctctggagatgaacaatcctca

SEQ ID NO: 21002 - DNA, 3037 bp, Homo sapiens
  source 1..3037: mol_type = unassigned DNA
gttgtcatgggggaggtggtggcgcttggtggccactggcggccgaggtagaggcagtggcgcttgagttggtcgggggcagcggcagatttgaggcttaagcaacttcttccggggaagagtgccagtgcagccactgttacaattcaagatcttgatctatatccatagattggaatattggtgggccagcaatcctcagacgcctcacttaggacaaatgaggaaactgaggcttggtgaagttacgaaacttgtccaaaatcacacaacttgtaaagggcacagccaagattcagagccaggctgtaaaaattaaaatgaacaaattacggcaaagttttaggagaaagaaggatgtttatgttccagaggccagtcgtccacatcagtggcagacagatgaagaaggcgttcgcaccggaaaatgtagcttcccggttaagtaccttggccatgtagaagttgatgaatcaagaggaatgcacatctgtgaagatgctgtaaaaagattgaaagctgaaaggaagttcttcaaaggcttctttggaaaaactggaaagaaagcagttaaagcagttctgtgggtctcagcagatggactcagagttgtggatgaaaaaactaaggacctcatagttgaccagacgatagagaaagtttctttctgtgccccagacaggaactttgatagagccttttcttacatatgccgtgatggcaccactcgtcgctggatctgtcactgcttcatggctgtcaaggacacaggtgaaaggttgagccatgcagtaggctgtgcttttgcagcctgtttagagcgcaagcagaagcgggagaaggaatgtggagtgactgctacttttgatgctagtcggaccacttttacaagagaaggatcattccgtgtcacaacagccactgaacaagcagaaagagaggagatcatgaaacaaatgcaagatgccaagaaagctgaaacagataagatagtcgttggttcatcagttgcccctggcaacactgccccatccccatcctctcccacctctcctacttctgatgccacgacctctctggagatgaacaatcctcatgccatcccacgccggcatgctccaattgaacagcttgctcgccaaggctctttccgaggttttcctgctcttagccagaagatgtcaccctttaaacgccaactatccctacgcatcaatgagttgccttccactatgcagaggaagactgatttccccattaaaaatgcagtgccagaagtagaaggggaggcagagagcatcagctccctgtgctcacagatcaccaatgccttcagcacacctgaggaccccttctcatctgctccgatgaccaaaccagtgacagtggtggcaccacaatctcctaccttccaagggaccgagtggggtcaatcttctggtgctgcctctccaggtctcttccaggccggtcatagacgtactccctctgaggccgaccgatggttagaagaggtgtctaagagcgtccgggctcagcagccccaggcctcagctgctcctctgcagccagttctccagcctcctccacccactgccatctcccagccagcatcacctttccaagggaatgcattcctcacctctcagcctgtgccagtgggtgtggtcccagccctgcaaccagcctttgtccctgcccagtcctatcctgtggccaatggaatgccctatccagcccctaatgtgcctgtggtgggcatcactccctcccagatggtggccaacgtatttggcactgcaggccaccctcaggctgcccatccccatcagtcacccagcctggtcaggcagcagacattccctcactacgaggcaagcagtgctaccaccagtcccttctttaagcctcctgctcagcacctcaacggttctgcagctttcaatggtgtagatgatggcaggttggcctcagcagacaggcatacagaggttcctacaggcacctgcccagtggatccttttgaagcccagtgggctgcattagaaaataagtccaagcagcgtactaatccctcccctaccaaccctttctccagtgacttacagaagacgtttgaaattgaactttaagcaatcattatggctatgtatcttgtccataccagacagggagcagggggtagcggtcaaaggagcaaaacagactttgtctcctgattagtactcttttcactaatcccaaaggtcccaaggaacaagtccaggcccagagtactgtgaggggtgattttgaaagacatgggaaaaagcattcctagagaaaagctgccttgcaattaggctaaagaagtcaaggaaatgttgctttctgtactccctcttcccttacccccttacaaatctctggcaacagagaggcaaagtatctgaacaagaatctatattccaagcacatttactgaaatgtaaaacacaacaggaagcaaagcaatctccctttgtttttcaggccattcacctgcctcctgtcagtagtggcctgtattagagatcaagaagagtggtttgtgctcaggctggggaacagagaggcacgctatgctgccagaattcccaggagggcatatcagcaactgcccagcagagctatattttgggggagaagttgagcttccattttgagtaacagaataaatattatatatatcaaaagccaaaatctttatttttatgcatttagaatattttaaatagttctcagatattaagaagttgtatgagttgtaagtaatcttgccaaaggtaaaggggctagttgtaagaaattgtacataagattgatttatcattgatgcctactgaaataaaaagaggaaaggctggaagctgcagacaggatccctagcttgttttctgtcagtcattcattgtaagtagcacattgcaacaacaatcatgcttatgaccaatacagtcactaggttgtagttttttttaaataaaggaaaagcagtattgtcctggttttaaaccta

SEQ ID NO: 21003 - DNA, 3547 bp, Homo sapiens
  source 1..3547: mol_type = unassigned DNA
ggcgcttgagttggtcgggggcagcggcagatttgaggcttaagcaacttcttccggggaagagtgccagtgcagccactgttacaattcaagatcttgatctatatccatagattggaatattggtgggccagcaatcctcagacgcctcacttaggacaaatgaggaaactgaggcttggtgaagttacgaaacttgtccaaaatcacacaacttgtaaagggcacagccaagattcagagccaggctgtaaaaattaaaatgaacaaattacggcaaagttttaggagaaagaaggatgtttatgttccagaggccagtcgtccacatcagtggcagacagatgaagaaggcgttcgcaccggaaaatgtagcttcccggttaagtaccttggccatgtagaagttgatgaatcaagaggaatgcacatctgtgaagatgctgtaaaaagattgaaagctactggaaagaaagcagttaaagcagttctgtgggtctcagcagatggactcagagttgtggatgaaaaaactaaggacctcatagttgaccagacgatagagaaagtttctttctgtgccccagacaggaactttgatagagccttttcttacatatgccgtgatggcaccactcgtcgctggatctgtcactgcttcatggctgtcaaggacacaggtgaaaggttgagccatgcagtaggctgtgcttttgcagcctgtttagagcgcaagcagaagcgggagaaggaatgtggagtgactgctacttttgatgctagtcggaccacttttacaagagaaggatcattccgtgtcacaacagccactgaacaagcagaaagagaggagatcatgaaacaaatgcaagatgccaagaaagctgaaacagataagatagtcgttggttcatcagttgcccctggcaacactgccccatccccatcctctcccacctctcctacttctgatgccacgacctctctggagatgaacaatcctcatgccatcccacgccggcatgctccaattgaacagcttgctcgccaaggctctttccgaggttttcctgctcttagccagaagatgtcaccctttaaacgccaactatccctacgcatcaatgagttgccttccactatgcagaggaagactgatttccccattaaaaatgcagtgccagaagtagaaggggaggcagagagcatcagctccctgtgctcacagatcaccaatgccttcagcacacctgaggaccccttctcatctgctccgatgaccaaaccagtgacagtggtggcaccacaatctcctaccttccaagctaatggcactgactcagccttccatgtgcttgctaagccagcccatactgctctagcacccgtagcaatgcctgtgcgtgaaaccaacccttgggcccatgcccctgatgctgctaacaaggaaattgcagccacatgttcggggaccgagtggggtcaatcttctggtgctgcctctccaggtctcttccaggccggtcatagacgtactccctctgaggccgaccgatggttagaagaggtgtctaagagcgtccgggctcagcagccccaggcctcagctgctcctctgcagccagttctccagcctcctccacccactgccatctcccagccagcatcacctttccaagggaatgcattcctcacctctcagcctgtgccagtgggtgtggtcccagccctgcaaccagcctttgtccctgcccagtcctatcctgtggccaatggaatgccctatccagcccctaatgtgcctgtggtgggcatcactccctcccagatggtggccaacgtatttggcactgcaggccaccctcaggctgcccatccccatcagtcacccagcctggtcaggcagcagacattccctcactacgaggcaagcagtgctaccaccagtcccttctttaagcctcctgctcagcacctcaacggttctgcagctttcaatggtgtagatgatggcaggttggcctcagcagacaggcatacagaggttcctacaggcacctgcccagtggatccttttgaagcccagtgggctgcattagaaaataagtccaagcagcgtactaatccctcccctaccaaccctttctccagtgacttacagaagacgtttgaaattgaactttaagcaatcattatggctatgtatcttgtccataccagacagggagcagggggtagcggtcaaaggagcaaaacagactttgtctcctgattagtactcttttcactaatcccaaaggtcccaaggaacaagtccaggcccagagtactgtgaggggtgattttgaaagacatgggaaaaagcattcctagagaaaagctgccttgcaattaggctaaagaagtcaaggaaatgttgctttctgtactccctcttcccttacccccttacaaatctctggcaacagagaggcaaagtatctgaacaagaatctatattccaagcacatttactgaaatgtaaaacacaacaggaagcaaagcaatctccctttgtttttcaggccattcacctgcctcctgtcagtagtggcctgtattagagatcaagaagagtggtttgtgctcaggctggggaacagagaggcacgctatgctgccagaattcccaggagggcatatcagcaactgcccagcagagctatattttgggggagaagttgagcttccattttgagtaacagaataaatattatatatatcaaaagccaaaatctttatttttatgcatttagaatattttaaatagttctcagatattaagaagttgtatgagttgtaagtaatcttgccaaaggtaaaggggctagttgtaagaaattgtacataagattgatttatcattgatgcctactgaaataaaaagaggaaaggctggaagctgcagacaggatccctagcttgttttctgtcagtcattcattgtaagtagcacattgcaacaacaatcatgcttatgaccaatacagtcactaggttgtagttttttttaaataaaggaaaagcagtattgtcctggttttaaacctatgatggaattctaatgtcattattttaatggaatcaatcgaaatatgctctatagagaatatatcttttatatattgctgcagtttccttatgttaatcctttaacactaaggtaacatgacataatcataccatagaagggaacacaggttaccatattggtttgtaatatgggtcttggtgggttttgttttatcctttaaattttgttcccatgagttttgtggggatggggattctggttttattagctttgtgtgtgtcctcttcccccaaacccccttttggtgagaacatccccttgacagttgcagcctcttgacctcggataacaataagagagctcatctcatttttacttttgaacgttggccttacaatcaaatgtaagttatatatatttgtactgatgaaaatttataatctgctttaacaaaaataaatgttcatggtagaa

SEQ ID NO: 21004 - DNA, 3561 bp, Homo sapiens
  source 1..3561: mol_type = unassigned DNA
aatcctcccgggagccgaggaggctcgcgcgcgtgcatcccgcaccatcccccggccccgggccctggccggcgtcagaccgagctgccgccgccaccaccgcagcagcagcagtcggggagccaggcccagccagggccgcgggaggcgggggcgcccgggccctggatgtcccgcagcgcggcggccagcggcggaccccggaggcctgagcggcacctgcccccagccccctgtggggccccggggcccccagaaacctgcaggacggagccagacggggcgggcaccatgaacaagttacggcagagcctgcggcggaggaagccagcctacgtgcccgaggcgtcgcgcccgcaccagtggcaggcagacgaggacgcggtgcggaagggcacgtgcagcttcccggtcaggtacctgggtcacgtggaggtagaggagtcccggggaatgcacgtgtgtgaagatgcggtgaagaagctgaaggcgatgggccgaaagtccgtgaagtctgtcctgtgggtgtcagccgatgggctccgagtggtggacgacaaaaccaaggatcttctggtcgaccagaccatcgaaaaggtctccttttgtgctcctgaccgcaacctggacaaggctttctcctatatctgtcgtgacgggactacccgccgctggatctgccactgttttctggcactgaaggactccggcgagaggctgagccacgctgtgggctgtgcttttgccgcctgcctggagcgaaaacagcgacgggagaaggaatgtggggtcacggccgccttcgatgccagccgcaccagcttcgcccgcgagggctccttccgcctgtctgggggtgggcggcctgctgagcgagaggccccggacaagaagaaagcagaggcagcagctgcccccactgtggctcctggccctgcccagcctgggcacgtgtccccgacaccagccaccacatcccctggtgagaagggtgaggcaggcacccctgtggctgcaggcaccactgcggccgccatcccccggcgccatgcacccctggagcagctggttcgccagggctccttccgtgggttcccagcactcagccagaagaactcgcctttcaaacggcagctgagcctacggctgaatgagctgccatccacgctgcagcgccgcactgacttccaggtgaagggcacagtgcctgagatggagcctcctggtgccggcgacagtgacagcatcaacgctctgtgcacacagatcagttcatcttttgccagtgctggagcgccagcaccagggccaccacctgccacaacagggacttctgcctggggtgagccctccgtgccccctgcagctgccttccagcctgggcacaagcggacaccttcagaggctgagcgatggctggaggaggtgtcacaggtggccaaggcccagcagcagcagcagcagcaacagcaacagcagcagcagcagcagcagcaacagcagcaagcagcctcagtggccccagtgcccaccatgcctcctgccctgcagcctttccccgcccccgtggggccctttgacgctgcacctgcccaagtggccgtgttcctgccacccccacacatgcagcccccttttgtgcccgcctacccgggcttgggctacccaccgatgccccgggtgcccgtggtgggcatcacaccctcacagatggtggcaaacgccttctgctcagccgcccagctccagcctcagcctgccactctgcttgggaaagctggggccttcccgccccctgccatacccagtgcccctgggagccaggcccgccctcgccccaatggggccccctggccccctgagccagcgcctgccccagctccagagttggacccctttgaggcccagtgggcggcattagaaggcaaagccactgtagagaaaccctccaaccccttttctggcgacctgcaaaagacattcgagattgaactgtagcccgagccgccccacccactccatcatctccaggtgccccacgcctgggggtggaggcacaacctctcccctaaccctgctccctggggctgcgcccctcaacaccctctcaacacccccctccctcaaccaccccgacaaccactacagaaccaacattgtgacgcccaggttgcaacaggatggaattcagggacggacccagcctggctaagggaaccatttcactgccggacttaggctggcaatgcccccttccccaaccccagacacaggggttggccacaatcccactgaatgcccttggttcacactccatttcccagtttctgttgacccccaccttccagtgttggacaggatggaggggggacacttgcttaggggctctcctgggccccacaccagtgcccaccccaaatctggtcgtctcctccccccatgcacagcacaagctaagggctgccctctgcccacacgctgcgttcactgccaatgctgtactcacctccatcaccctccaactttggggcccatgtcttccttgggccaaggtctcatgggggctagggccaagttgggggcccaggaggcggggagggaggaggaggagaagatgcgcagttacctcatgtcggtgcccgctggggaggggtccgggaagaaggggaaggggtgcctggcgggtacttttctatcttttatttccagattttttttgtatctaaacttgaagatttgtattatacaaggacagccaataaaggaagaatataatggtgcccctcgggaaacgagggtgtgtgtagggcgctggtgaggccctagaacctttcctcctgagtcatggactgaaacagagtcagaaggatgtccctgagtgataacctctgagtcatagcgtggtaacaggtaccactgactcagcacctgccaggcgggtattaaaggagccaaaattaatcaccccatttctattccttacagagttagaatcaaggaataaaaaacaaatattatgaactgctggctgggcacagtggctcacgcctgtaatcccagcactttgggaggtcgaggcaggcagatcacttaaggtcaggagttcgagaccagcctggccgccatggagaaacccagtctctaccaaaaattcaaaaattagccgggcgtggtggcaggcgcctgtaattccaggaggctgaggcacaagaatcgcttgaacccaggcagcagaggttgcagtgacctgaggtcacaccattgcactcctgcctgggcaacagaatgagactctgtctcaaaaaaaaaaaacaaaaaaaaaaaaactacttctaattagctcaatattaatattttaacaagttgggttggtaacagtatatctttgcccatgctggcaaattcttgttttgtcagcattttccataactctggccaaagtgtcacctgatgtggcaacgttttacagtcttgctattgtttcttgagtcctttaatctataagatgtatttttaaaaatatataacatataaattttgtttcgttatagctctttaaaa

SEQ ID NO: 21005 - DNA, 1931 bp, Homo sapiens
  source 1..1931: mol_type = unassigned DNA
aaaccaaggcctccaggacgcgattccagacacaatccctacctctccctgcctaagggggtctcagcacaacaactgcctagacggggcgggcaccatgaacaagttacggcagagcctgcggcggaggaagccagcctacgtgcccgaggcgtcgcgcccgcaccagtggcaggcagacgaggacgcggtgcggaagggcacgtgcagcttcccggtcaggtacctgggtcacgtggaggtagaggagtcccggggaatgcacgtgtgtgaagatgcggtgaagaagctgaaggcgatgggccgaaagtccgtgaagtctgtcctgtgggtgtcagccgatgggctccgagtggtggacgacaaaaccaaggatcttctggtcgaccagaccatcgaaaaggtctccttttgtgctcctgaccgcaacctggacaaggctttctcctatatctgtcgtgacgggactacccgccgctggatctgccactgttttctggcactgaaggactccggcgagaggctgagccacgctgtgggctgtgcttttgccgcctgcctggagcgaaaacagcgacgggagaaggaatgtggggtcacggccgccttcgatgccagccgcaccagcttcgcccgcgagggctccttccgcctgtctgggggtgggcggcctgctgagcgagaggccccggacaagaagaaagcagaggcagcagctgcccccactgtggctcctggccctgcccagcctgggcacgtgtccccgacaccagccaccacatcccctggtgagaagggtgaggcaggcacccctgtggctgcaggcaccactgcggccgccatcccccggcgccatgcacccctggagcagctggttcgccagggctccttccgtgggttcccagcactcagccagaagaactcgcctttcaaacggcagctgagcctacggctgaatgagctgccatccacgctgcagcgccgcactgacttccaggtgaagggcacagtgcctgagatggagcctcctggtgccggcgacagtgacagcatcaacgctctgtgcacacagatcagttcatcttttgccagtgctggagcgccagcaccagggccaccacctgccacaacagggacttctgcctggggtgagccctccgtgccccctgcagctgccttccagcctgggcacaagcggacaccttcagaggctgagcgatggctggaggaggtgtcacaggtggccaaggcccagcagcagcagcagcagcaacagcaacagcagcagcagcagcagcagcaacagcagcaagcagcctcagtggccccagtgcccaccatgcctcctgccctgcagcctttccccgcccccgtggggccctttgacgctgcacctgcccaagtggccgtgttcctgccacccccacacatgcagcccccttttgtgcccgcctacccgggcttgggctacccaccgatgccccgggtgcccgtggtgggcatcacaccctcacagatggtggcaaacgccttctgctcagccgcccagctccagcctcagcctgccactctgcttgggaaagctggggccttcccgccccctgccatacccagtgcccctgggagccaggcccgccctcgccccaatggggccccctggccccctgagccagcgcctgccccagctccagagttggacccctttgaggcccagtgggcggcattagaaggcaaagccactgtagagaaaccctccaaccccttttctggcgacctgcaaaagacattcgagattgaactgtagcccgagccgccccacccactccatcatctccaggtgccccacgcctgggggtggaggcacaacctctcccctaaccctgctccctggggctgcgcccctcaacaccctctcaacacccccctccctc

SEQ ID NO: 21006 - DNA, 2713 bp, Homo sapiens
  source 1..2713: mol_type = unassigned DNA
tggctgcctgacttgggagatggatgggctgagggagtggagggggacctcagaggagcaggaccagggagactcccaggacggtaagcaacatttgaggaccattcactaacgcttctctgcaggggtttcctctccatccatttccttgctgggttgtcagtgatgccatctgagttgctgtcagggctgtagcctgacaaagggtttcctaatagatccaaactgtccatttgtggggagcttctgattttctgttgttactggtttcccttagcccaacaccagggtcattaagaaggaaggaatgtgaggaagaaagaaaggcagggcattcaggaagaagtgtggaggcatgggagggttctcatggggccctcctgggcactgggtgacctgtcctttctcccctcaggtaggggtcccacggctgggtggtcctaagccactgggtggatgaaaggccgagggatgttggtcctgcttctgcatgcggtggtcctcggcctgcccagcgcctgggccgtgggggcctgcgcccgcgcttgtcccgccgcctgcgcctgcagcaccgtggagcgcggctgctcggtgcgctgcgaccgcgcgggcctcctgcgggtgccggccgagctcccgtgcgaggcggtctccatcgacctggaccggaacggcctgcgcttcctgggcgagcgagccttcggcacgctgccgtccttgcgccgcctgtcgctgcgccacaacaacctgtccttcatcacgcccggcgccttcaagggcctgccgcgcctggctgagctgcgcctggcgcacaacggcgacctgcgctacctgcacgcgcgcaccttcgcggcgctcagccgcctgcgccgcctagacctagcagcctgccgcctcttcagcgtgcccgagcgcctcctggccgaactgccggccctgcgcgaactcgccgccttcgacaacctgttccgccgcgtgccgggcgcgctgcgcggcctggccaacctgacgcacgcgcacctggagcgcggccgcatcgaggcggtggcctccagctcgctgcagggcctgcgccgcctgcgctcgctcagcctgcaggccaaccgcgtccgtgccgtgcacgctggcgccttcggggactgtggcgtcctggagcatctgctgctcaacgacaacctgctggccgagctcccggccgacgccttccgcggcctgcggcgcctgcgcacgctcaacctgggtggcaacgcgctggaccgcgtggcgcgcgcctggttcgctgacctggccgagctcgagctgctctacctggaccgcaacagcatcgccttcgtggaggagggcgccttccagaacctctcgggtctcctcgcgctgcacctcaacggcaaccgcctcaccgtgctcgcctgggtcgccttccagcccggcttcttcctgggccgcctcttcctcttccgcaacccgtggtgctgcgactgccgtctggagtggctgagggactggatggagggctccggacgtgtcaccgacgtgccgtgcgcctccccgggctccgtggccggcctggacctcagccaggtgaccttcgggcgctcctccgatggcctctgtgtggaccccgaggagctgaacctcaccacgtccagtccaggcccgtccccagaaccagcggccaccaccgtgagcaggttcagcagcctcctctccaagctgctggccccgagggtcccggtggaggaggcggccaacaccactggggggctggccaacgcctccctgtccgacagcctctcctcccgtggggtgggaggcgcgggccggcagccctggtttctcctcgcctcttgtctcctgcccagcgtggcccagcacgtggtgtttggcctgcagatggactgacctggccagaggggggaaagtttgcttaactgggcttgagtgtgtttgtggtaaggggagaggagccggaatggagggcagaggtgaaaatcccagtggagggtggaaggaaccgtttgcctccagagatggccccagggagaacacagggacgtgccactcgagggggaggatggtatggatttctgcttttgtcacacgggcatccattggaaaagagaagcaagaatgaacgtgggccctcgggtgggaagactaggaatcggaagcttctagggcttcacatcccttcccctcccctccccttcccctcatcttccaggcaacagtgcctgcaaggcctgaattagagagacttccattggctaagtagttaagagccgtcccatttctcctggcggggtaacccattacaccgaagtcctttgttttctaccacaatcctcctcctcctctccaggggcctggaaacactaggattcaggaaggtaggcaggacgtgagagaagggagatgggagagagatttaagacaaagggtggcggtggttcctggggtctgagatgtgttaggaggcgtttaaaacaaagatccagttcatttactccacagttattcccagggctggccctagccacaaaggaactttagggcagggtagggaaaaaaggggcagcagggggtgtgtttgtggacaaataaatttgtaaagtccgaggattaaaaaaaaaaaaaggttaaaccggtttctctactgctggacttttcagagtctttcatatgctaacattcattgtgaatctcccaagag

SEQ ID NO: 21007 - DNA, 2297 bp, Homo sapiens
  source 1..2297: mol_type = unassigned DNA
ggctgagggagtggagggggacctcagaggagcaggaccagggagactcccaggacggtaggggtcccacggctgggtggtcctaagccactgggtggatgaaaggccgagggatgttggtcctgcttctgcatgcggtggtcctcggcctgcccagcgcctgggccgtgggggcctgcgcccgcgcttgtcccgccgcctgcgcctgcagcaccgtggagcgcggctgctcggtgcgctgcgaccgcgcgggcctcctgcgggtgccggccgagctcccgtgcgaggcggtctccatcgacctggaccggaacggcctgcgcttcctgggcgagcgagccttcggcacgctgccgtccttgcgccgcctgtcgctgcgccacaacaacctgtccttcatcacgcccggcgccttcaagggcctgccgcgcctggctgagctgcgcctggcgcacaacggcgacctgcgctacctgcacgcgcgcaccttcgcggcgctcagccgcctgcgccgcctagacctagcagcctgccgcctcttcagcgtgcccgagcgcctcctggccgaactgccggccctgcgcgaactcgccgccttcgacaacctgttccgccgcgtgccgggcgcgctgcgcggcctggccaacctgacgcacgcgcacctggagcgcggccgcatcgaggcggtggcctccagctcgctgcagggcctgcgccgcctgcgctcgctcagcctgcaggccaaccgcgtccgtgccgtgcacgctggcgccttcggggactgtggcgtcctggagcatctgctgctcaacgacaacctgctggccgagctcccggccgacgccttccgcggcctgcggcgcctgcgcacgctcaacctgggtggcaacgcgctggaccgcgtggcgcgcgcctggttcgctgacctggccgagctcgagctgctctacctggaccgcaacagcatcgccttcgtggaggagggcgccttccagaacctctcgggtctcctcgcgctgcacctcaacggcaaccgcctcaccgtgctcgcctgggtcgccttccagcccggcttcttcctgggccgcctcttcctcttccgcaacccgtggtgctgcgactgccgtctggagtggctgagggactggatggagggctccggacgtgtcaccgacgtgccgtgcgcctccccgggctccgtggccggcctggacctcagccaggtgaccttcgggcgctcctccgatggcctctgtgtggaccccgaggagctgaacctcaccacgtccagtccaggcccgtccccagaaccagcggccaccaccgtgagcaggttcagcagcctcctctccaagctgctggccccgagggtcccggtggaggaggcggccaacaccactggggggctggccaacgcctccctgtccgacagcctctcctcccgtggggtgggaggcgcgggccggcagccctggtttctcctcgcctcttgtctcctgcccagcgtggcccagcacgtggtgtttggcctgcagatggactgacctggccagaggggggaaagtttgcttaactgggcttgagtgtgtttgtggtaaggggagaggagccggaatggagggcagaggtgaaaatcccagtggagggtggaaggaaccgtttgcctccagagatggccccagggagaacacagggacgtgccactcgagggggaggatggtatggatttctgcttttgtcacacgggcatccattggaaaagagaagcaagaatgaacgtgggccctcgggtgggaagactaggaatcggaagcttctagggcttcacatcccttcccctcccctccccttcccctcatcttccaggcaacagtgcctgcaaggcctgaattagagagacttccattggctaagtagttaagagccgtcccatttctcctggcggggtaacccattacaccgaagtcctttgttttctaccacaatcctcctcctcctctccaggggcctggaaacactaggattcaggaaggtaggcaggacgtgagagaagggagatgggagagagatttaagacaaagggtggcggtggttcctggggtctgagatgtgttaggaggcgtttaaaacaaagatccagttcatttactccacagttattcccagggctggccctagccacaaaggaactttagggcagggtagggaaaaaaggggcagcagggggtgtgtttgtggacaaataaatttgtaaagtccgaggattaaaaaaaaaaaaaggttaaaccggtttctct

SEQ ID NO: 21008 - DNA, 4417 bp, Homo sapiens
  source 1..4417: mol_type = unassigned DNA
ccccggccggttaggccaatgggcgggacgcgcgggcaaggcggggaggggcggggcccatggtctgcgcgcaggtgccgctcggcgcccggcccgcccgttccgccgctgtcgccgccgtcgtgcgtgccgctcggcggaggggacgggcctgcgttctctcctccttcctccccgcctccagctgccggcaggacctttctctcgctgccgctgggaccccgtgtcatcgcccaggccgagcacgatgccccctaaaaagggaggtgatggaattaaaccacccccaatcattggaagatttggaacctcactgaaaattggtattgttggattgccaaatgttgggaaatctactttcttcaatgtgttaaccaatagtcaggcttcagcagaaaacttcccgttctgcactattgatcctaatgagagcagagtacctgtgccagatgaaaggtttgactttctttgtcaataccacaaaccagcaagcaaaattcctgcctttctaaatgtggtggatattgctggccttgtgaaaggagctcacaatgggcagggcctggggaatgcttttttatctcatattagtgcctgtgatggcatctttcatctaacacgtgcttttgaagatgatgatatcacgcacgttgaaggaagtgtagatcctattcgagatatagaaataatacatgaagagcttcagcttaaagatgaggaaatgattgggcccattatagataaactagaaaaggtggctgtgagaggaggagataaaaaactaaaacctgaatatgatataatgtgcaaagtaaaatcctgggttatagatcaaaagaaacctgttcgcttctatcatgattggaatgacaaagagattgaagtgttgaataaacacttatttttgacttcaaaaccaatggtctacttggttaatctttctgaaaaagactacattagaaagaaaaacaaatggttgataaaaattaaagagtgggtggacaagtatgacccaggtgctttggtcattccttttagtggggccttggaactcaagttgcaagaattgagtgctgaggagagacagaagtatctggaagcgaacatgacacaaagtgctttgccaaagatcattaaggctgggtttgcagcactccaactagaatactttttcactgcaggcccagatgaagtgcgtgcatggaccatcaggaaagggactaaggctcctcaggctgcaggaaagattcacacagattttgaaaagggattcattatggctgaagtaatgaaatacgaagattttaaagaggaaggttctgaaaatgcagtcaaggctgctggaaagtacagacaacaaggcagaaattatattgttgaagatggagatattatcttcttcaaatttaacacacctcaacaaccgaagaagaaataaaatttagttattgctcagataaacatacaacttccaaaaggcatctgatttttaaaaaattaaaatttctgaaaaccaatgcgacaaataaagttggggagatgggaatctttgacaaacaaattatttttatttgttttaaaattaaaatactgtgtacccccccccccccatgaaatgcaggttcactaaatgtgaacagctttgcttttcacgtgattaagaccctactccaaattgtagaagcttttcaggaaccatattactctcatgatacttcattaatctccatcatgtatgccaagcctgacacatttgacagtgaggacaatgtggcttgctcctttttgaatctacagataatgcatgttttacagtactccagatgtctacactcaataaaacatttgacaaaaccagccttggtgtgtttggggatgtctgtattgactgactgtggtgtgctgaatgcgatacggcacctggtggttgctgattacagaattttaaggcgtgtgtatgacacagtaactggcagtgtggggcagctgcaattgtatcttaaaagtgagtctttcatgggaatcagaagaatagtataccagggatttgtctcaaaaaagttaattaatttatagatcaacatttattgaaagatgatagcaatgatattatgagggatatgagataggtgactgaccacaaagaagaaaattctgtctcaaaaattaaagaattttgtttgttattgttgttctgaccatattgaaaagaggttcacttttaatctttcctttgaaattattaaattgtaaaaactgacccattgatgtctggtgggttatgttttgcttcaattcagcaatgtgtataaaagttcctacactgattttgaaatactaagatcagactttgaaaattttaaaaattctttcattcttacttttcagatatttgagagcagtcgaagtggtagtatgggtaagttaagcacttcttaacattgtagcagaaaattccaaaagaaagactagaacaaattggtaatttggagaccctttgccacttagccttctcttgtgatgatggcctgaaagctctctcggccctgagcctccctttctctcccatgtttccattcctgtgagacctcccttccttgtccttgtcctctgcccttttgtgctcttctgtgatcacaggaccatttccatggaatgcagattcatacccagccagcctttgcctctactgtatcgctttgggactttaaagatgcagaagtattagaacacacacaaacttaaaatggaaagttaccaaatgtagcactagaggcaagaaaaggggtgattttttaaagatttggctatacttaagatatttaaagaggatgaggttgagtcgtgagtataatttagaagctctccagtgagtatttttttagtatcaaatagtgatcttcttttgctaacataaaaatgagtaaactacagcagagaaataagaataaaactaatgaagggttttttaaaagaactaaataaaacaaataaaactaggctacaggtatagctgaccaagtttgctgtgaaaaatccttgttatatctatttctgtattggagtaatgtgtagattagtggattgttagggatttcagcagtataagaaagaatcaaatatcttgcttttgggtcttctccaaagtaaattgcatggacttcttaaagaagtttgaaatcagtaaaaagacattaggatcatgcaattttactttgtctagcttctaatgtggtaaattgcacattgtgcaacagaaccattaataaaagaaaggagttagttttgaggtaactgcattcattaggggctgaaaataaatgttaaaaatgtttaatttggttagaagttctacaacattgtatgtacatatacaaaatttcattttctctgaaagtcgagaattccaagaactgttacatataatcatatatatgcctatatctaaacgttttccctcctttaatattgataaagttaatatattttaggatgttatgtaaatatttttgcatgtatctgtagctccatcttaatcaaatttatggttaaaagagatttgaggccaggcgtggaggctcacacctataatcccaacactttgggaggccgaggtgggaggatcacttgagcacaggagtttgagaccagcctgtgcaacatcatgaaacatcatctctacataaaaaaatacatatatacaaaaattagctgggcatcatggcacacacctgtagtcccagctacttaggaggctgagatgggaggattgatcgatcgcttgagcctgggaggtggaggctactgtgagccatgatcatgccactgcactccagcctgggcaacagagtgagaccctgtctccaaagagaaagagaaacttgagaaggcttgtgcccaaagcttgaagaaagattgtaatagcatttagttgtgttttatcatgttatcttcataacatgcattttgcatatggctcagagcagagccggatctcccaaggaagcacaaatagtttttgtcgctaacttagttatgagtgaagcctctgttcacttataacttgccagtttcattggtggaataagtccccttactcatgattcatcaatattcctatattaaaattccagtttgatgtttgtctctagttgtctgtgtataatatttccaaagctcctttgtaaaccccgtctcctttcattcagagagtcagagacggtatctcctcctcctgcctcttctattgttctgattagtctacttaaattcacttgatgctctttttattttacaagagacttgagaaatgtcggttgttcctaatggcaaactactttagctgggaaaattcatttcaacttattttaagcttgtaaaatacactgtggtgataaaataaaagagctgggtttga

SEQ ID NO: 21009 - DNA, 1656 bp, Homo sapiens
  source 1..1656: mol_type = unassigned DNA
gttccgccgctgtcgccgccgtcgtgcgtgccgctcggcggaggggacgggcctgcgttctctcctccttcctccccgcctccagctgccggcaggacctttctctcgctgccgctgggaccccgtgtcatcgcccaggccgagcacggaaatctactttcttcaatgtgttaaccaatagtcaggcttcagcagaaaacttcccgttctgcactattgatcctaatgagagcagagtacctgtgccagatgaaaggtttgactttctttgtcaataccacaaaccagcaagcaaaattcctgcctttctaaatgtggtggatattgctggccttgtgaaaggagctcacaatgggcagggcctggggaatgcttttttatctcatattagtgcctgtgatggcatctttcatctaacacgtgcttttgaagatgatgatatcacgcacgttgaaggaagtgtagatcctattcgagatatagaaataatacatgaagagcttcagcttaaagatgaggaaatgattgggcccattatagataaactagaaaaggtggctgtgagaggaggagataaaaaactaaaacctgaatatgatataatgtgcaaagtaaaatcctgggttatagatcaaaagaaacctgttcgcttctatcatgattggaatgacaaagagattgaagtgttgaataaacacttatttttgacttcaaaaccaatggtctacttggttaatctttctgaaaaagactacattagaaagaaaaacaaatggttgataaaaattaaagagtgggtggacaagtatgacccaggtgctttggtcattccttttagtggggccttggaactcaagttgcaagaattgagtgctgaggagagacagaagtatctggaagcgaacatgacacaaagtgctttgccaaagatcattaaggctgggtttgcagcactccaactagaatactttttcactgcaggcccagatgaagtgcgtgcatggaccatcaggaaagggactaaggctcctcaggctgcaggaaagattcacacagattttgaaaagggattcattatggctgaagtaatgaaatacgaagattttaaagaggaaggttctgaaaatgcagtcaaggctgctggaaagtacagacaacaaggcagaaattatattgttgaagatggagatattatcttcttcaaatttaacacacctcaacaaccgaagaagaaataaaatttagttattgctcagataaacatacaacttccaaaaggcatctgatttttaaaaaattaaaatttctgaaaaccaatgcgacaaataaagttggggagatgggaatctttgacaaacaaattatttttatttgttttaaaattaaaatactgtgtacccccccccccccatgaaatgcaggttcactaaatgtgaacagctttgcttttcacgtgattaagaccctactccaaattgtagaagcttttcaggaaccatattactctcatgatacttcattaatctccatcatgtatgccaagcctgacacatttgacagtgaggacaatgtggcttgctcctttttgaatctacagataatgcatgttttacagtactccagatgtctacactcaataaaacatttgacaaaacc

SEQ ID NO: 21010 - DNA, 2071 bp, Homo sapiens
  source 1..2071: mol_type = unassigned DNA
agtggccaagatggggccagggcagcgggtggcttggggatgtgtggatgaatgaggcgctgtcggactaggccgcgcgtcgggagatcggcctacgcctcacgcgggaaagccctggggaaagccttctcccgacgccaggacgcccggtggcccagtccggagaggaggatggggggtggggcccactttgggtgggctgccggccacctctctgtaggccagaggacccgacaggcgctgttcctgtatctgttctttggaggcctgggagttggccaggaacaggtgtcaggacgctgagaagggaaattcctggccctcggggtcagggatcagaggctggaatactactgcaagggcagggccccagcgtggtcctaggaggtacaactctcagccagaagactgggacagttttagttcccagcttctgagacgtgagcttagcggtctttgtgatttcactttgcagtccaagggtgggagtaattctgcacgcatgatttggagacagaactagtaagggacagagaaagtttcgacttgtaaataaaaaggttccgtcgattaatttaccattagaaatagtaaccataatgtagattttggaggttgcttatgaggactgatgagccgtaccttcagtgccaaaggtgggagggacttggtggaaggaccccagtacctgatgccccctaaaaagggaggtgatggaattaaaccacccccaatcattggaagatttggaacctcactgaaaattggtattgttggattgccaaatgttgggaaatctactttcttcaatgtgttaaccaatagtcaggcttcagcagaaaacttcccgttctgcactattgatcctaatgagagcagagtacctgtgccagatgaaaggtttgactttctttgtcaataccacaaaccagcaagcaaaattcctgcctttctaaatgtggtggatattgctggccttgtgaaaggagctcacaatgggcagggcctggggaatgcttttttatctcatattagtgcctgtgatggcatctttcatctaacacgtgcttttgaagatgatgatatcacgcacgttgaaggaagtgtagatcctattcgagatatagaaataatacatgaagagcttcagcttaaagatgaggaaatgattgggcccattatagataaactagaaaaggtggctgtgagaggaggagataaaaaactaaaacctgaatatgatataatgtgcaaagtaaaatcctgggttatagatcaaaagaaacctgttcgcttctatcatgattggaatgacaaagagattgaagtgttgaataaacacttatttttgacttcaaaaccaatggtctacttggttaatctttctgaaaaagactacattagaaagaaaaacaaatggttgataaaaattaaagagtgggtggacaagtatgacccaggtgctttggtcattccttttagtggggccttggaactcaagttgcaagaattgagtgctgaggagagacagaagtatctggaagcgaacatgacacaaagtgctttgccaaagatcattaaggctgggtttgcagcactccaactagaatactttttcactgcaggcccagatgaagtgcgtgcatggaccatcaggaaagggactaaggctcctcaggctgcaggaaagattcacacagattttgaaaagggattcattatggctgaagtaatgaaatacgaagattttaaagaggaaggttctgaaaatgcagtcaaggctgctggaaagtacagacaacaaggcagaaattatattgttgaagatggagatattatcttcttcaaatttaacacacctcaacaaccgaagaagaaataaaatttagttattgctcagataaacatacaacttccaaaaggcatctgatttttaaaaaattaaaatttctgaaaaccaatgcgacaaataaagttggggagatgggaatctttgacaaacaaattatttttatttgttttaaaattaaaatactgtgtacccccccccccccatgaaatgcaggttcac

SEQ ID NO: 21011 - DNA, 709 bp, Homo sapiens
  source 1..709: mol_type = unassigned DNA
agttctcgagcctcagcctcccgagtagctggaattacaggctgcgcgcctgatggccggctaatttttttgtatttgtttttctttttagtagagacggggtttctccgtgttggccaggctggtctcgactcctggtctcaagcagtctgcccacctcggcctccccctcccaaagtgctgggattacaggcctgagccaccgtgcccggcccaacaaatattgattttagatcagtctttctgggacttctcagcaatgactcttttgacaacggatatgtttacagaactttttaaacatttttgctgaaaaaaaagtggatttagctctgtgttagttttggatcgctatatacaatgccccctaaaaagggaggtgatggaattaaaccacccccaatcattggaagatttggaacctcactgaaaattggtattgttggattgccaaatgttgggaaatctactttcttcaatgtgttaaccaatagtcaggcttcagcagaaaacttcccgttctgcactattgatcctaatgagagcagagtacctgtgccagatgaaaggtttgactttctttgtcaataccacaaaccagcaagcaaaattcctgcctttctaaatgtggtggatattgctggccttgtgaaaggagctcacaatgggcagggcctggggaatgcttttttatctcatattagtgcct

SEQ ID NO: 21012 - DNA, 1270 bp, Homo sapiens
  source 1..1270: mol_type = unassigned DNA
gtgtcatcgcccaggccgagcacgatgccccctaaaaagggaggtgatggaattaaaccacccccaatcattggaagatttggaacctcactgaaaattggtattgttggattgccaaatgttgggaaatctactttcttcaatgtgttaaccaatagtcaggcttcagcagaaaacttcccgttctgcactattgatcctaatgagagcagagtacctgtgccagatgaaaggtttgactttctttgtcaataccacaaaccagcaagcaaaattcctgcctttctaaatgtggtggatattgctggccttgtgaaaggagctcacaatgggcagggcctggggaatgcttttttatctcatattagtgcctgtgatggcatctttcatctaacacgtgcttttgaagatgatgatatcacgcacgttgaaggaagtgtagatcctattcgagatatagaaataatacatgaagagcttcagcttaaagatgaggaaatgattgggcccattatagataaactagaaaaggtggctgtgagaggaggagataaaaaactaaaacctgaatatgatataatgtgcaaagtaaaatcctgggttatagatcaaaagaaacctgttcgcttctatcatgattggaatgacaaagagattgaagtgttgaataaacacttatttttgacttcaaaaccaatggtctacttggttaatctttctgaaaaagactacattagaaagaaaaacaaatggctgctggaaagtacagacaacaaggcagaaattatattgttgaagatggagatattatcttcttcaaatttaacacacctcaacaaccgaagaagaaataaaatttagttattgctcagataaacatacaacttccaaaaggcatctgatttttaaaaaattaaaatttctgaaaaccaatgcgacaaataaagttggggagatgggaatctttgacaaacaaattatttttatttgttttaaaattaaaatactgtgtacccccccccccccatgaaatgcaggttcactaaatgtgaacagctttgcttttcacgtgattaagaccctactccaaattgtagaagcttttcaggaaccatattactctcatgatacttcattaatctccatcatgtatgccaagcctgacacatttgacagtgaggacaatgtggcttgctcctttttgaatctacagataatgcatgttttacagtactccagatgtctacactcaataaaacatttgacaaaa

SEQ ID NO: 21013 - DNA, 485 bp, Homo sapiens
  source 1..485: mol_type = unassigned DNA
atatagctaattgaagattctcatcttgtgtgtaagcccagtttgcagcaaatgtggactaattttatatagcaggtgcttttgaagatgatgatatcacgcacgttgaaggaagtgtagatcctattcgagatatagaaataatacatgaagagcttcagcttaaagatgaggaaatgattgggcccattatagataaactagaaaaggtggctgtgagaggaggagataaaaaactaaaacctgaatatgatataatgtgcaaagtaaaatcctgggttatagatcaaaagaaacctgttcgcttctatcatgattggaatgacaaagagattgaagtgttgaataaacacttatttttgacttcaaaaccaatggtctacttggttaatctttctgaaaaagactacattagaaagaaaaacaaatggttgataaaaattaaagagtgggtggacaagtatgacccaggtgctttggtcatt

SEQ ID NO: 21014 - DNA, 2184 bp, Homo sapiens
  source 1..2184: mol_type = unassigned DNA
tggtgctgatgtgtgaactgtctcgggaggatgcccctgtgcgctggtacaaggatgggctggaagtggaggagagcgaggccctggtgctggagagggatgggccacgctgccgcctggtgctacctgctgctcagcccgaggacgggggcgagtttgtatgtgatgctggagatgactcggccttcttcactgtcactgtcacagccccaccagagaggattgtgcacccggcagcccgctccctggatctgcattttggggctccagggcgcgtggagctgcgctgtgaggtggccccagctgggtctcaggtgcgctggtacaaggacgggctggaagtggaggcatcagatgccctgcagctgggtgccgaggggcccacccgcaccctgaccctgccccacgcccagcctgaggacgccggggagtatgtgtgtgagacccggcatgaggccatcaccttcaatgtcatcctggctgagcctccagtgcagttccttgctctagagacaactccaagcccgctctgtgtggcccctggggagccagtggtgctgagctgtgaactgtcccgggctggcgcccccgtggtctggagccacaatgggaggcccgtgcaggagggcgagggcctagagctccatgccgagggcccccgccgagtcctctgcatccaggctgcaggcccagcccatgcagggctctacacctgccagtctggagcagcccccggagccccaagcctcagcttcaccgtccaggtggctgagccactgctggtgaagctggtctcggagctgacaccactcactgtccacgagggcgatgatgccacgttccggtgtgaagtctccccaccagatgccgatgtcacctggctgcgcaatggggccgtcgtcactccagggccccaggtggagatggcccagaatggttcaagccgcatcttaaccttgcgaggctgccaactgggggatgcagggaccgtgactttgcgggcagggagcacggccacaagtgcccggctccatgttcgagagacagagctgctgttcctacggcggttgcaggatgtgcgggcagaggaaggccaggatgtgtgtctcgaagtggagacaggccgagtgggtgcagcgggggccgtgcgctgggtgcgaggtgggcagcccctgccccacgactctcgcctgtccatggcccaggatgggcacatccaccgcctcttcatccatggtgtcatactggccgaccagggcacctacggctgcgagagccaccacgatcgcaccctggccaggctcagcgtgaggcgtgagtgccccgtcctctcttaatgcattacccaccctacaccacagccttttctggctgtcctggagtccctcaggcccccaccaaagtgcccctcatcgctgagaaaagtcacccatggccgtcccagcagcagcttgcccaaagcaaaacttttctttttctaatattttttatttaccttagaagtccatgtggattttgcattccattgcatatttccaagtcggctttgctataaacacaaatattctccagaaagacttgccatgggcatccttcaggcatgtattctagggatacacatacccacttaagtagcagggatggctgtcaaacagcaccccacacctcccacccaaagctggagccctctgtttcctatgtgacctcatgcaagttaacctctttgagccaagtctccttaaaaatggggctgagaccaggtgcagtggctcacgcctataatcctaacactttgggaggccaaggcaggaggatcccttgaggccaggagttcgaggccatcctgggcaacatagcaagaacccatctccacaaaaaaaaataaaaattagccgggcatggtagttactagggaggctgaggcagaaggattgcttgaacccaggaggttgaggctatagtgagctatgatcatgtcacggcattccagcctgggtgacagcaagaccctgtctcaaattttaaaaatggggttgatccccgtctcaagtgtctctgggaacattaactgagataacatgaaaattcttacacagagcttggtgaatggttgtcatttgtgacacatctcttctaacttatttcattcaagaaatcatcacaataaacctgtgtcccaatgtt

SEQ ID NO: 21015 - DNA, 5711 bp, Homo sapiens
  source 1..5711: mol_type = unassigned DNA
ggctcctaagagcaggaagccaggcagcgggcaggggaggctgcggggccactcgctggagaggcaaacaggaaggactgccccctgagcgccaggcttcgggcccgggaatcgccgccgccgccgccgcagagctgcagctcggggccgagggtaaggaggcgagccgggagcgggaggcccgggagagctccgcgggtccccgcgcccagtccccagccgcgccccgaccccgccgccccgggcctcggctcgccctccgcacccccccctgcccccccaccgttcgccgctgcaggcggtcggccgccgcgatgaaggcgagctcgggggatcaggggagccccccgtgcttcctgcgcttcccgcggcctgtgcgggtggtaagtggcgccgaggccgagctcaagtgcgtggtcctgggggagccgccgcctgtagtggtgtgggagaagggcgggcagcagctggcggcctcggaacgcctgagcttcccggcggacggcgcggagcacggcctgctgctgaccgccgcactgcccaccgacgcgggggtctacgtgtgccgcgcccgcaacgcggccggcgaggcctacgcggcggccgccgtcaccgtgctggagccgccggcctccgaccccgagctgcagcccgccgagcgcccgctgccatcgccggggtccggggagggcgccccggtcttcctcacggggcctcgatcccagtgggtgctgcggggggcggaggtggtgctgacgtgccgggcggggggcctccccgagcccacactgtactgggagaaggacgggatggccctggacgaagtgtgggacagcagccacttcgcgctccagccgggccgcgccgaggacggccccggcgcgagcctggcactgcgcatcctggcggctcggctgccggattccggcgtctacgtgtgccacgcccgcaacgcgcacggccacgcgcaggcgggggcgctgctccaggtgcaccagccccccgagagcccgcccgcggaccccgacgaggcccccgcgccggtggtggagccgctcaagtgcgcgcctaagaccttctgggtgaacgagggcaagcacgccaagttccgctgctacgtgatgggcaagcccgagcccgagatcgaatggcactgggagggccgcccgctgctcccggaccgccgccgcctcatgtaccgcgaccgcgacggcggcttcgtgctcaaggtgctttactgccaggccaaggatcgtgggctctacgtctgcgccgcgcgcaactcggcgggccagacgctcagtgccgtgcagctgcacgtgaaagagccccgcctccggttcacacggcccctgcaggacgtggagggccgtgagcacgggattgccgtgctggaatgtaaagtacccaactcccgcatccccacggcctggttccgtgaggaccagcggctgctgccctgccgcaagtacgagcagatcgaagagggcactgtccggcgcctcatcatccacaggctgaaggcagacgatgatggtatctacctgtgcgagatgcggggccgggtgcgcaccgtggccaacgtcacagtcaaagggcccatcctgaagcgcctgccccggaagctcgacgtcctggaaggagagaatgctgtgctgctagtggaaactctagaggccggggtcgagggacgctggagccgtgatggggaggagctgccggtcatctgccagagcagctcaggccacatgcatgccctggtccttccaggggtcacccgagaggatgctggcgaggtcacctttagcctgggcaactcccgtaccactacgcttctcagagtaaaatgtgtcaagcacagtcccccaggaccccccatattggcagagatgttcaagggccacaagaacacggtcctgttgacctggaagcctcccgagccagctcccgagaccccattcatctaccggctggagcggcaggaagtgggctctgaagactggattcagtgcttcagcatcgagaaagccggagccgtggaggtgccgggcgactgtgtgccctccgagggtgactaccgcttccgcatctgcacagtcagcggacatggccgtagtccccacgtggtgttccacggttctgctcaccttgtgcccacagctcgcctggtggcaggtctggaggatgtgcaggtatacgacggggaagatgccgtcttctccctcgatctctccaccatcatccagggtacctggttccttaatggggaagagctcaagagtaacgagccggagggccaggtggaacctggggccctgcggtaccgtatagagcagaagggtctgcagcacagactcatcctgcatgccgtcaagcaccaggacagcggtgccctggtcggcttcagctgccccggcgtgcaggactcagctgccctcacaatccaagagagcccggtgcacatcctgagcccccaggacagggtgtcgttgaccttcacaacctcagagcgggtggtgctgacttgtgagctctcaagggtggacttcccggcaacctggtacaaggatgggcagaaggtggaggagagcgagttgctggtggtgaagatggatgggcgcaaacaccgtctgatcctgcctgaggccaaagtccaggacagtggcgagtttgagtgcaggacagaaggggtctcggccttcttcggcgtcactgtccaagatcctcccgtgcacatcgtggacccccgagaacatgtgttcgtgcatgccataacttccgagtgtgtcatgctggcctgtgaggtggaccgagaggacgcccctgtgcgttggtacaaggacgggcaggaggtggaggagagtgacttcgtggtgctggagaatgaggggccccatcgccgcctggtgctgcccgccacccagccctcagacgggggcgagtttcagtgcgtcgctggagatgagtgtgcctacttcactgtcaccatcacagacgtctcctcgtggatcgtgtatcccagcggcaaggtgtatgtggcagccgtgcgcctggagcgtgtggtgctgacctgtgagctatgccggccctgggcagaggtgcgctggaccaaggatggagaggaggtggtggagagccccgcgctgctcctgcagaaggaagacactgtccgccgcctggtgctgcccgctgtccagctcgaggactccggcgagtacttgtgtgaaattgacgatgagtcggcctccttcactgtcaccgtcacagaacccccagtgcggatcatataccctcgcgatgaggtgaccttgatcgccgtgaccttggagtgtgtggtgctgatgtgtgaactgtctcgggaggatgcccctgtgcgctggtacaaggatgggctggaagtggaggagagcgaggccctggtgctggagagggatgggccacgctgccgcctggtgctacctgctgctcagcccgaggacgggggcgagtttgtatgtgatgctggagatgactcggccttcttcactgtcactgtcacagagcctccagtgcagttccttgctctagagacaactccaagcccgctctgtgtggcccctggggagccagtggtgctgagctgtgaactgtcccgggctggcgcccccgtggtctggagccacaatgggaggcccgtgcaggagggcgagggcctagagctccatgccgagggcccccgccgagtcctctgcatccaggctgcaggcccagcccatgcagggctctacacctgccagtctggagcagcccccggagccccaagcctcagcttcaccgtccaggtggctgagccccctgtgcgggtggtagctcccgaggcagcccagacgagggttcggagcaccccaggcggggacctagagctggtggtgcacctctccgggccagggggccctgtacgctggtacaaggacggggagcgactggcaagccaggggcgggtgcagctggagcaggccggggccaggcaggtgctgcgggtgcagggggcacggagcggggacgctggggagtacctgtgcgatgcgccccaggacagccgcatcttccttgtcagcgtggaagagccactgctggtgaagctggtctcggagctgacaccactcactgtccacgagggcgatgatgccacgttccggtgtgaagtctccccaccagatgccgatgtcacctggctgcgcaatggggccgtcgtcactccagggccccagagacagagctgctgttcctacggcggttgcaggatgtgcgggcagaggaaggccaggatgtgtgtctcgaagtggagacaggccgagtgggtgcagcgggggccgtgcgctgggtgcgaggtgggcagcccctgccccacgactctcgcctgtccatggcccaggatgggcacatccaccgcctcttcatccatggtgtcatactggccgaccagggcacctacggctgcgagagccaccacgatcgcaccctggccaggctcagcgtgaggccgaggcagctgagggtgctgcggcctctggaggacgtgaccatcagtgaggggggcagtgccaccttccagctggagctgtcccaggaaggtgtgaccggggagtgggcccggggtggagtacagctgtatccaggacccaagtgtcacatccactcggacggccaccgtcaccgactggtactcaatggcctgggcctggccgactcaggctgtgtctccttcacagcggattccctgcgctgcgcagccagactcattgtgagagaggtcccagtgaccatcgtgcgggggccacacgacctagaggtgaccgagggcgacacagctacgttcgagtgcgagctttcccaagctttggctgatgttacctgggagaaggacgggaacgcgcttacgcctagcccgcggctccggctccaggccctcggcacgcgccgccttctccagctgcgacgctgcggcccctcggacgccgggacctacagctgcgcggtggggacggcccgcgccggaccggtccgcctgaccgtgcgcgagcgtactgtggcggtactctccgagctgcggtcggtgagcgcccgcgaaggcgacggcgctacgttcgagtgcaccgtgtcggaggtcgagaccacggggcgctgggagctcggaggccgcccgctgagacccggagcccgcgtccgcatccgacaggaagggaagaaacacattctggtgcttagcgagctgcgcgccgaggacgccggtgaagtccgcttccaggcggggcccgcccagtccctggctctactggaagtggaggcattgcctctccagatgtgccgccacccccctcgcgagaagaccgttctggtgggccgccgggcggtgctggaggtgactgtgtcccgctcggggggccacgtgtgctggctgcgggagggggccgagctgtgcccgggagataagtatgagatgcgcagccacggccccacccacagcctggtcatccatgacgttcgacctgaggaccaaggcacttactgctgccaggccggccaggacagcacccacacacggctgctggtagagggcaactaggagaacctaaccaggccaggcgggtgcccttggacagcttggaaggcgtttgcccttaccctgggcaggggtagagagacaaggaacaataaaagtgctacagctc

SEQ ID NO: 21016 - DNA, 3297 bp, Homo sapiens
  source 1..3297: mol_type = unassigned DNA
ctccgcacccccccctgcccccccaccgttcgccgctgcaggcggtcggccgccgcgatgaaggcgagctcgggggatcaggggagccccccgtgcttcctgcgcttcccgcggcctgtgcgggtggtaagtggcgccgaggccgagctcaagtgcgtggtcctgggggagccgccgcctgtagtggtgtgggagaagggcgggcagcagctggcggcctcggaacgcctgagcttcccggcggacggcgcggagcacggcctgctgctgaccgccgcactgcccaccgacgcgggggtctacgtgtgccgcgcccgcaacgcggccggcgaggcctacgcggcggccgccgtcaccgtgctggagccgccggcctccgaccccgagctgcagcccgccgagcgcccgctgccatcgccggggtccggggagggcgccccggtcttcctcacggggcctcgatcccagtgggtgctgcggggggcggaggtggtgctgacgtgccgggcggggggcctccccgagcccacactgtactgggagaaggacgggatggccctggacgaagtgtgggacagcagccacttcgcgctccagccgggccgcgccgaggacggccccggcgcgagcctggcactgcgcatcctggcggctcggctgccggattccggcgtctacgtgtgccacgcccgcaacgcgcacggccacgcgcaggcgggggcgctgctccaggtgcaccagccccccgagagcccgcccgcggaccccgacgaggcccccgcgccggtggtggagccgctcaagtgcgcgcctaagaccttctgggtgaacgagggcaagcacgccaagttccgctgctacgtgatgggcaagcccgagcccgagatcgaatggcactgggagggccgcccgctgctcccggaccgccgccgcctcatgtaccgcgaccgcgacggcggcttcgtgctcaaggtgctttactgccaggccaaggatcgtgggctctacgtctgcgccgcgcgcaactcggcgggccagacgctcagtgccgtgcagctgcacgtgaaagagccccgcctccggttcacacggcccctgcaggacgtggagggccgtgagcacgggattgccgtgctggaatgtaaagtacccaactcccgcatccccacggcctggttccgtgaggaccagcggctgctgccctgccgcaagtacgagcagatcgaagagggcactgtccggcgcctcatcatccacaggctgaaggcagacgatgatggtatctacctgtgcgagatgcggggccgggtgcgcaccgtggccaacgtcacagtcaaagggcccatcctgaagcgcctgccccggaagctcgacgtcctggaaggagagaatgctgtgctgctagtggaaactctagaggccggggtcgagggacgctggagccgtgatggggaggagctgccggtcatctgccagagcagctcaggccacatgcatgccctggtccttccaggggtcacccgagaggatgctggcgaggtcacctttagcctgggcaactcccgtaccactacgcttctcagagtaaaatgtgtcaagcacagtcccccaggaccccccatattggcagagatgttcaagggccacaagaacacggtcctgttgacctggaagcctcccgagccagctcccgagaccccattcatctaccggctggagcggcaggaagtgggctctgaagactggattcagtgcttcagcatcgagaaagccggagccgtggaggtgccgggcgactgtgtgccctccgagggtgactaccgcttccgcatctgcacagtcagcggacatggccgtagtccccacgtggtgttccacggttctgctcaccttgtgcccacagctcgcctggtggcaggtctggaggatgtgcaggtatacgacggggaagatgccgtcttctccctcgatctctccaccatcatccagggtacctggttccttaatggggaagagctcaagagtaacgagccggagggccaggtggaacctggggccctgcggtaccgtatagagcagaagggtctgcagcacagactcatcctgcatgccgtcaagcaccaggacagcggtgccctggtcggcttcagctgccccggcgtgcaggactcagctgccctcacaatccaagagagcccggtgcacatcctgagcccccaggacagggtgtcgttgaccttcacaacctcagagcgggtggtgctgacttgtgagctctcaagggtggacttcccggcaacctggtacaaggatgggcagaaggtggaggagagcgagttgctggtggtgaagatggatgggcgcaaacaccgtctgatcctgcctgaggccaaagtccaggacagtggcgagtttgagtgcaggacagaaggggtctcggccttcttcggcgtcactgtccaagatcctcccgtgcacatcgtggacccccgagaacatgtgttcgtgcatgccataacttccgagtgtgtcatgctggcctgtgaggtggaccgagaggacgcccctgtgcgttggtacaaggacgggcaggaggtggaggagagtgacttcgtggtgctggagaatgaggggccccatcgccgcctggtgctgcccgccacccagccctcagacgggggcgagtttcagtgcgtcgctggagatgagtgtgcctacttcactgtcaccatcacagacgtctcctcgtggatcgtgtatcccagcggcaaggtgtatgtggcagccgtgcgcctggagcgtgtggtgctgacctgtgagctatgccggccctgggcagaggtgcgctggaccaaggatggagaggaggtggtggagagccccgcgctgctcctgcagaaggaagacactgtccgccgcctggtgctgcccgctgtccagctcgaggactccggcgagtacttgtgtgaaattgacgatgagtcggcctccttcactgtcaccgtcacagagtcttaccaaagtcaggacagttcaaataacaatccggagttatgcgtcctcttgaaaaagccgaagacccggcggctctggtcccgcttccccccatggcgacgaacagctggcactgagtagcagctgcccccatagtttggggcccacattcctctgtcccacctccctgccattgctttttgcctctccccagactgcttcagccgctaacctaacctggcccctgtgggcatttgagtttgcgacccctgtgttaaaccaataaacatgcaaataaatgta

SEQ ID NO: 21017 - DNA, 5841 bp, Homo sapiens
  source 1..5841: mol_type = unassigned DNA
ctccgcacccccccctgcccccccaccgttcgccgctgcaggcggtcggccgccgcgatgaaggcgagctcgggggatcaggggagccccccgtgcttcctgcgcttcccgcggcctgtgcgggtggtaagtggcgccgaggccgagctcaagtgcgtggtcctgggggagccgccgcctgtagtggtgtgggagaagggcgggcagcagctggcggcctcggaacgcctgagcttcccggcggacggcgcggagcacggcctgctgctgaccgccgcactgcccaccgacgcgggggtctacgtgtgccgcgcccgcaacgcggccggcgaggcctacgcggcggccgccgtcaccgtgctggagccgccggcctccgaccccgagctgcagcccgccgagcgcccgctgccatcgccggggtccggggagggcgccccggtcttcctcacggggcctcgatcccagtgggtgctgcggggggcggaggtggtgctgacgtgccgggcggggggcctccccgagcccacactgtactgggagaaggacgggatggccctggacgaagtgtgggacagcagccacttcgcgctccagccgggccgcgccgaggacggccccggcgcgagcctggcactgcgcatcctggcggctcggctgccggattccggcgtctacgtgtgccacgcccgcaacgcgcacggccacgcgcaggcgggggcgctgctccaggtgcaccagccccccgagagcccgcccgcggaccccgacgaggcccccgcgccggtggtggagccgctcaagtgcgcgcctaagaccttctgggtgaacgagggcaagcacgccaagttccgctgctacgtgatgggcaagcccgagcccgagatcgaatggcactgggagggccgcccgctgctcccggaccgccgccgcctcatgtaccgcgaccgcgacggcggcttcgtgctcaaggtgctttactgccaggccaaggatcgtgggctctacgtctgcgccgcgcgcaactcggcgggccagacgctcagtgccgtgcagctgcacgtgaaagagccccgcctccggttcacacggcccctgcaggacgtggagggccgtgagcacgggattgccgtgctggaatgtaaagtacccaactcccgcatccccacggcctggttccgtgaggaccagcggctgctgccctgccgcaagtacgagcagatcgaagagggcactgtccggcgcctcatcatccacaggctgaaggcagacgatgatggtatctacctgtgcgagatgcggggccgggtgcgcaccgtggccaacgtcacagtcaaagggcccatcctgaagcgcctgccccggaagctcgacgtcctggaaggagagaatgctgtgctgctagtggaaactctagaggccggggtcgagggacgctggagccgtgatggggaggagctgccggtcatctgccagagcagctcaggccacatgcatgccctggtccttccaggggtcacccgagaggatgctggcgaggtcacctttagcctgggcaactcccgtaccactacgcttctcagagtaaaatgtgtcaagcacagtcccccaggaccccccatattggcagagatgttcaagggccacaagaacacggtcctgttgacctggaagcctcccgagccagctcccgagaccccattcatctaccggctggagcggcaggaagtgggctctgaagactggattcagtgcttcagcatcgagaaagccggagccgtggaggtgccgggcgactgtgtgccctccgagggtgactaccgcttccgcatctgcacagtcagcggacatggccgtagtccccacgtggtgttccacggttctgctcaccttgtgcccacagctcgcctggtggcaggtctggaggatgtgcaggtatacgacggggaagatgccgtcttctccctcgatctctccaccatcatccagggtacctggttccttaatggggaagagctcaagagtaacgagccggagggccaggtggaacctggggccctgcggtaccgtatagagcagaagggtctgcagcacagactcatcctgcatgccgtcaagcaccaggacagcggtgccctggtcggcttcagctgccccggcgtgcaggactcagctgccctcacaatccaagagagcccggtgcacatcctgagcccccaggacagggtgtcgttgaccttcacaacctcagagcgggtggtgctgacttgtgagctctcaagggtggacttcccggcaacctggtacaaggatgggcagaaggtggaggagagcgagttgctggtggtgaagatggatgggcgcaaacaccgtctgatcctgcctgaggccaaagtccaggacagtggcgagtttgagtgcaggacagaaggggtctcggccttcttcggcgtcactgtccaagatcctcccgtgcacatcgtggacccccgagaacatgtgttcgtgcatgccataacttccgagtgtgtcatgctggcctgtgaggtggaccgagaggacgcccctgtgcgttggtacaaggacgggcaggaggtggaggagagtgacttcgtggtgctggagaatgaggggccccatcgccgcctggtgctgcccgccacccagccctcagacgggggcgagtttcagtgcgtcgctggagatgagtgtgcctacttcactgtcaccatcacagacgtctcctcgtggatcgtgtatcccagcggcaaggtgtatgtggcagccgtgcgcctggagcgtgtggtgctgacctgtgagctatgccggccctgggcagaggtgcgctggaccaaggatggagaggaggtggtggagagccccgcgctgctcctgcagaaggaagacactgtccgccgcctggtgctgcccgctgtccagctcgaggactccggcgagtacttgtgtgaaattgacgatgagtcggcctccttcactgtcaccgtcacagaacccccagtgcggatcatataccctcgcgatgaggtgaccttgatcgccgtgaccttggagtgtgtggtgctgatgtgtgaactgtctcgggaggatgcccctgtgcgctggtacaaggatgggctggaagtggaggagagcgaggccctggtgctggagagggatgggccacgctgccgcctggtgctacctgctgctcagcccgaggacgggggcgagtttgtatgtgatgctggagatgactcggccttcttcactgtcactgtcacagccccaccagagaggattgtgcacccggcagcccgctccctggatctgcattttggggctccagggcgcgtggagctgcgctgtgaggtggccccagctgggtctcaggtgcgctggtacaaggacgggctggaagtggaggcatcagatgccctgcagctgggtgccgaggggcccacccgcaccctgaccctgccccacgcccagcctgaggacgccggggagtatgtgtgtgagacccggcatgaggccatcaccttcaatgtcatcctggctgagcctccagtgcagttccttgctctagagacaactccaagcccgctctgtgtggcccctggggagccagtggtgctgagctgtgaactgtcccgggctggcgcccccgtggtctggagccacaatgggaggcccgtgcaggagggcgagggcctagagctccatgccgagggcccccgccgagtcctctgcatccaggctgcaggcccagcccatgcagggctctacacctgccagtctggagcagcccccggagccccaagcctcagcttcaccgtccaggtggctgagccccctgtgcgggtggtagctcccgaggcagcccagacgagggttcggagcaccccaggcggggacctagagctggtggtgcacctctccgggccagggggccctgtacgctggtacaaggacggggagcgactggcaagccaggggcgggtgcagctggagcaggccggggccaggcaggtgctgcgggtgcagggggcacggagcggggacgctggggagtacctgtgcgatgcgccccaggacagccgcatcttccttgtcagcgtggaagagccactgctggtgaagctggtctcggagctgacaccactcactgtccacgagggcgatgatgccacgttccggtgtgaagtctccccaccagatgccgatgtcacctggctgcgcaatggggccgtcgtcactccagggccccaggtggagatggcccagaatggttcaagccgcatcttaaccttgcgaggctgccaactgggggatgcagggaccgtgactttgcgggcagggagcacggccacaagtgcccggctccatgttcgagagacagagctgctgttcctacggcggttgcaggatgtgcgggcagaggaaggccaggatgtgtgtctcgaagtggagacaggccgagtgggtgcagcgggggccgtgcgctgggtgcgaggtgggcagcccctgccccacgactctcgcctgtccatggcccaggatgggcacatccaccgcctcttcatccatggtgtcatactggccgaccagggcacctacggctgcgagagccaccacgatcgcaccctggccaggctcagcgtgaggccgaggcagctgagggtgctgcggcctctggaggacgtgaccatcagtgaggggggcagtgccaccttccagctggagctgtcccaggaaggtgtgaccggggagtgggcccggggtggagtacagctgtatccaggacccaagtgtcacatccactcggacggccaccgtcaccgactggtactcaatggcctgggcctggccgactcaggctgtgtctccttcacagcggattccctgcgctgcgcagccagactcattgtgagagaggtcccagtgaccatcgtgcgggggccacacgacctagaggtgaccgagggcgacacagctacgttcgagtgcgagctttcccaagctttggctgatgttacctgggagaaggacgggaacgcgcttacgcctagcccgcggctccggctccaggccctcggcacgcgccgccttctccagctgcgacgctgcggcccctcggacgccgggacctacagctgcgcggtggggacggcccgcgccggaccggtccgcctgaccgtgcgcgagcgtactgtggcggtactctccgagctgcggtcggtgagcgcccgcgaaggcgacggcgctacgttcgagtgcaccgtgtcggaggtcgagaccacggggcgctgggagctcggaggccgcccgctgagacccggagcccgcgtccgcatccgacaggaagggaagaaacacattctggtgcttagcgagctgcgcgccgaggacgccggtgaagtccgcttccaggcggggcccgcccagtccctggctctactggaagtggaggcattgcctctccagatgtgccgccacccccctcgcgagaagaccgttctggtgggccgccgggcggtgctggaggtgactgtgtcccgctcggggggccacgtgtgctggctgcgggagggggccgagctgtgcccgggagataagtatgagatgcgcagccacggccccacccacagcctggtcatccatgacgttcgacctgaggaccaaggcacttactgctgccaggccggccaggacagcacccacacacggctgctggtagagggcaactaggagaacctaaccaggccaggcgggtgcccttggacagcttggaaggcgtttgcccttaccctgggcaggggtagagagacaaggaacaataaa

SEQ ID NO: 21018 - DNA, 5138 bp, Homo sapiens
  source 1..5138: mol_type = unassigned DNA
tctcagctcccagctccccgctcccggctcccggcgcccggcgcccggcgcggagctgttcctcaaacgacacgcagccgaggtgggtgggtgtggggacgcgggagccagtgtcgtcggatcggcccgcagtccgctgtcctgctgagcccggaggccgcctggatggagccgccgctcccggtcggagcccagccgcttgccactgtcgagggtatggagatgaagggtcctctccgggagccctgcgccctgaccctagcccagaggaacgggcaatatgagttaataatccagttgcatgagaaggaacagcatgttcaagatatcattcctataaatagccacttcagatgtgttcaagaagcagaagaaactcttttgattgacatagcttctaacagtggctgcaaaattcgggttcagggggactggatcagagagcgccgctttgaaatccctgatgaggaacactgtttgaagttcctctcagctgtccttgctgctcagaaagctcagtcacagcttcttgttccagagcaaaaggactcatctagctggtaccagaaattagacactaaggacaaaccttctgttttttcagggcttcttggatttgaagacaatttttcttctatgaatttggacaagaaaataaattcacaaaatcagcctactgggattcatcgggaacccccacctccacccttttcagtgaataaaatgcttccacgtgaaaaagaagcttctaacaaggagcagcccaaagtgaccaacaccatgcggaagctctttgtaccaaatacccaatctgggcagcgggagggtctcatcaaacatatcctggcaaagcgagagaaagaatatgtcaacattcagactttcagattttttgttggaacttggaatgtgaatggccagtctccagatagcgggttagaaccttggctgaactgtgatcccaatcctcctgatatctactgcattggattccaagaactggacttgagcacagaagccttcttctactttgaatctgtgaaggaacaagaatggtccatggctgtagagagaggtttgcattccaaagccaagtataagaaagttcaactggtgcgccttgttgggatgatgcttcttatatttgccagaaaggatcagtgtcgatacattcgtgatattgctacagaaacagttggaactggaatcatggggaaaatgggaaacaaaggtggggtagctgtgagatttgtatttcacaacaccaccttttgcattgtcaattcccatctggctgcacacgtggaggactttgagagaaggaatcaagattataaggacatttgtgcgagaatgagttttgtggtcccaaatcagaccctcccgcagttgaacatcatgaaacatgaggttgtcatttggttgggagatttgaattatagactttgcatgcctgatgccaatgaggtgaaaagtcttattaataagaaagaccttcagagactcttgaaattcgaccagctaaatattcagcgcacacagaaaaaagcttttgttgacttcaatgaaggggaaatcaagttcatccccacttataagtatgactctaaaacagaccggtgggattccagtgggaaatgccgggttccagcctggtgtgaccgaattctttggagaggaacaaatgttaatcagcttaattatcggagtcacatggaactgaaaaccagcgaccacaagcctgttagcgccctcttccatattggggtgaaggttgtggatgaacgaaggtaccggaaagtctttgaagatagtgtacgcatcatggacagaatggaaaatgacttccttccttccttagaactcagcaggagggagtttgtgtttgaaaatgtgaagtttcggcaactacaaaaggagaagttccagatcagcaacaatggacaggttccctgccatttttctttcatccctaaacttaatgacagccagtactgcaagccatggcttcgggctgaaccttttgagggctacttggagccaaatgagacagtggacatttctcttgatgtgtatgtcagcaaagactctgtaaccatcctgaactcgggagaagataagattgaagatattctcgtccttcacctggatcgaggcaaagattacttcttgactatcagtggaaattacctcccaagttgttttggcacatccttagaggctctgtgccgtatgaaaagaccaatccgagaagttcctgttaccaaactcatagacttggagaaatcccttctgcaaatggttcctttggatgaaggtgccagtgagagaccccttcaggttcccaaggagatctggcttctagtagatcacctattcaaatacgcctgtcaccaggaggacctgttccagacccctggaatgcaggaagagctccagcagatcattgattgtctggataccagcattcctgagacaatccctggcagcaaccactctgtggctgaagcactgctcattttcttggaagccctgccagagccagtcatctgttacgagctgtatcagcgatgtcttgactctgcttatgatccccggatctgccgacaggtgatctcccagcttccgagatgccatagaaatgttttccgttacttgatggcattccttcgagaactcttaaaattctctgaatacaatagcgtcaatgccaacatgatcgctactctcttcactagtcttctcctgaggcctccacccaaccttatggcaagacagactccaagtgaccgccagcgtgctattcagttccttctgggctttctgcttgggagcgaagaagactaaggcttttactgttctctgatattctagaagcagacgatctcgggctccaagtatttcagaatgatttaaaaagtcatgccacaggaagggtctattgcagaatttcaagttctgtttatagtaaaaaggaagagcgtttcctaatccctcctttaccatatcctacacagaaaaatacttttagacttatattgccaagccaaagttaccatattttggtgtttttgtgttttctctttataaggcaaaaagatctgtatttacactccttcacctagggatgtgtttgttgccctcctacccaattgtcatgattgtccttagtaccctaggcctagattctgagatcttcccattctaggcctacaagcactacttgctgtagctgagacttgtctagagtcctttgttttgcacttttgacccaccccttcctggatcactcctttgcactccactcccctcgttctgtcactttgaacgaagtctgagtgaggctagtgactccttgggtgtcctcaacagtgaattcactgtctgcgtgcagttattacatgcatttgtgcatttctactacaatggcatctttatgtctctgtaacattggccttttcatggctccacactgggtggaaccatattctcttagatcacatttagtagcataactgtagggactattagagatggcatctcatcgatgagagagaatcacaatcagaatggaagcactttgagtatctgaagagtgagagcattcatgtttgacaggtcctgcttcccactatccttttcctgttattattcaaattttacacaaggactaatcctgggtgtctctgagacccatctcctgcctagacatccacctccagagcaacactggccccacagtaaaagaggaagtcttgtacctcaggcaggcccatctagagctattgctccttcccacagcaaaggtattgtggatgacccttagaatccattctctggtcttctgaaataccaagggcagatgtcacctccttcctcagcaggactgactctgggctctacaaccagctccttcacataaagggtttagagactccccttggctcccagtcaccatatccagtgttgtgtaaagagactggccaacaggaccaaccaagcaccttacctctcccatacaagatgaccctctgagcttttcatttattcaagctctgtggtacagcctttttttaaaataaattaatctatattggttgacaaacaagccaccaaccactgactgcaaaactgcctgatgcagttgggttcctcctggttttcttttgttacaaccacccttgcctgtttacattaattgcaaggagcataacgtacaggctgtatgtacaatcctgggcattgactctgtgacatttctagcatatccaaggcaccaccagtgatttctcctgtttcttggtgggggtgggggggaaggtacgtattctgcaatatggctaaaccctttcctgattgagagttaaagcaataggagtcaagttactggtgccacagatctggaggtatgataggtcaggggctaggtgttgaacttagttaatggaagactgagagcagaacaggtttgtcatctccgcaaggccagaaagtgatcacaaaaagaggcagatgatagacactggggtagggtcataccacagggaaatacctttcctgggcttgttttctagcatatcactgacctgggatctttgggtgatcaagggtgtggttagtggaggctctgtgctgcacgtatgcagtatcctatctctttctacatcagatcaaaacactaagttggtgtactgcctcgaccttttttcagctcatcctggaacatatacagagttgagagttttagacaatctctaggtagaggagacaagatgtagacccagacagaagaaatctgcttccctaccatggctattccagcaccccaacctgtaattgccaagtcctctaaggtactaatttgtagctgctctgaagtaaggatttcggattcagctggtagggaaagactctgcacctgctgtcttagggaagaaatggttcaaatccatgtggtgacattgcattagtctccctttcactgttttcttattctgtaattgtttgttatatttcccaaaaacgtcttgatcactaagcaaagctgctagtgggattctatatttcgtgtcatcttttttattataatttattgcaaatttttttctgaataaatatatgttgtgtgaaaaagcaaa

SEQ ID NO: 21019 - DNA, 5162 bp, Homo sapiens
  source 1..5162: mol_type = unassigned DNA
tctcagctcccagctccccgctcccggctcccggcgcccggcgcccggcgcggagctgttcctcaaacgacacgcagccgaggtgggtgggtgtggggacgcgggagccagtgtcgtcggatcggcccgcagtccgctgtcctgctgagcccggaggccgcctggatggagccgccgctcccggtcggagcccagccgcttgccactgtcgagggtatggagatgaagggtcctctccgggagccctgcgccctgaccctagcccagaggaacgggcaatatgagttaataatccagttgcatgagaaggaacagcatgttcaagatatcattcctataaatagccacttcagatgtgttcaagaagcagaagaaactcttttgattgacatagcttctaacagtggctgcaaaattcgggttcagggggactggatcagagagcgccgctttgaaatccctgatgaggaacactgtttgaagttcctctcagctgtccttgctgctcagaaagctcagtcacagcttcttgttccagagcaaaaggactcatctagctggtaccagaaattagacactaaggacaaaccttctgttttttcagggcttcttggatttgaagacaatttttcttctatgaatttggacaagaaaataaattcacaaaatcagcctactgggattcatcgggaacccccacctccacccttttcagtgaataaaatgcttccacgtgaaaaagaagcttctaacaaggagcagcccaaagtgaccaacaccatgcggaagctctttgtaccaaatacccaatctgggcagcgggagggtctcatcaaacatatcctggcaaagcgagagaaagaatatgtcaacattcagactttcagattttttgttggaacttggaatgtgaatggccagtctccagatagcgggttagaaccttggctgaactgtgatcccaatcctcctgatatctactgcattggattccaagaactggacttgagcacagaagccttcttctactttgaatctgtgaaggaacaagaatggtccatggctgtagagagaggtttgcattccaaagccaagtataagaaagttcaactggtgcgccttgttgggatgatgcttcttatatttgccagaaaggatcagtgtcgatacattcgtgatattgctacagaaacagttggaactggaatcatggggaaaatgggaaacaaaggtggggtagctgtgagatttgtatttcacaacaccaccttttgcattgtcaattcccatctggctgcacacgtggaggactttgagagaaggaatcaagattataaggacatttgtgcgagaatgagttttgtggtcccaaatcagaccctcccgcagttgaacatcatgaaacatgaggttgtcatttggttgggagatttgaattatagactttgcatgcctgatgccaatgaggtgaaaagtcttattaataagaaagaccttcagagactcttgaaattcgaccagctaaatattcagcgcacacagaaaaaagcttttgttgacttcaatgaaggggaaatcaagttcatccccacttataagtatgactctaaaacagaccggtgggattccagtgggaaatgccgggttccagcctggtgtgaccgaattctttggagaggaacaaatgttaatcagcttaattatcggagtcacatggaactgaaaaccagcgaccacaagcctgttagcgccctcttccatattggggtgaaggttgtggatgaacgaaggtaccggaaagtctttgaagatagtgtacgcatcatggacagaatggaaaatgacttccttccttccttagaactcagcaggagggagtttgtgtttgaaaatgtgaagtttcggcaactacaaaaggagaagttccagatcagcaacaatggacaggttccctgccatttttctttcatccctaaacttaatgacagccagtactgcaagccatggcttcgggctgaaccttttgagggctacttggagccaaatgagacagtggacatttctcttgatgtgtatgtcagcaaagactctgtaaccatcctgaactcgggagaagataagattgaagatattctcgtccttcacctggatcgaggcaaagattacttcttgactatcagtggaaattacctcccaagttgttttggcacatccttagaggctctgtgccgtatgaaaagaccaatccgagaagttcctgttaccaaactcatagacttggaagaagacagcttcctagaaaaggagaaatcccttctgcaaatggttcctttggatgaaggtgccagtgagagaccccttcaggttcccaaggagatctggcttctagtagatcacctattcaaatacgcctgtcaccaggaggacctgttccagacccctggaatgcaggaagagctccagcagatcattgattgtctggataccagcattcctgagacaatccctggcagcaaccactctgtggctgaagcactgctcattttcttggaagccctgccagagccagtcatctgttacgagctgtatcagcgatgtcttgactctgcttatgatccccggatctgccgacaggtgatctcccagcttccgagatgccatagaaatgttttccgttacttgatggcattccttcgagaactcttaaaattctctgaatacaatagcgtcaatgccaacatgatcgctactctcttcactagtcttctcctgaggcctccacccaaccttatggcaagacagactccaagtgaccgccagcgtgctattcagttccttctgggctttctgcttgggagcgaagaagactaaggcttttactgttctctgatattctagaagcagacgatctcgggctccaagtatttcagaatgatttaaaaagtcatgccacaggaagggtctattgcagaatttcaagttctgtttatagtaaaaaggaagagcgtttcctaatccctcctttaccatatcctacacagaaaaatacttttagacttatattgccaagccaaagttaccatattttggtgtttttgtgttttctctttataaggcaaaaagatctgtatttacactccttcacctagggatgtgtttgttgccctcctacccaattgtcatgattgtccttagtaccctaggcctagattctgagatcttcccattctaggcctacaagcactacttgctgtagctgagacttgtctagagtcctttgttttgcacttttgacccaccccttcctggatcactcctttgcactccactcccctcgttctgtcactttgaacgaagtctgagtgaggctagtgactccttgggtgtcctcaacagtgaattcactgtctgcgtgcagttattacatgcatttgtgcatttctactacaatggcatctttatgtctctgtaacattggccttttcatggctccacactgggtggaaccatattctcttagatcacatttagtagcataactgtagggactattagagatggcatctcatcgatgagagagaatcacaatcagaatggaagcactttgagtatctgaagagtgagagcattcatgtttgacaggtcctgcttcccactatccttttcctgttattattcaaattttacacaaggactaatcctgggtgtctctgagacccatctcctgcctagacatccacctccagagcaacactggccccacagtaaaagaggaagtcttgtacctcaggcaggcccatctagagctattgctccttcccacagcaaaggtattgtggatgacccttagaatccattctctggtcttctgaaataccaagggcagatgtcacctccttcctcagcaggactgactctgggctctacaaccagctccttcacataaagggtttagagactccccttggctcccagtcaccatatccagtgttgtgtaaagagactggccaacaggaccaaccaagcaccttacctctcccatacaagatgaccctctgagcttttcatttattcaagctctgtggtacagcctttttttaaaataaattaatctatattggttgacaaacaagccaccaaccactgactgcaaaactgcctgatgcagttgggttcctcctggttttcttttgttacaaccacccttgcctgtttacattaattgcaaggagcataacgtacaggctgtatgtacaatcctgggcattgactctgtgacatttctagcatatccaaggcaccaccagtgatttctcctgtttcttggtgggggtgggggggaaggtacgtattctgcaatatggctaaaccctttcctgattgagagttaaagcaataggagtcaagttactggtgccacagatctggaggtatgataggtcaggggctaggtgttgaacttagttaatggaagactgagagcagaacaggtttgtcatctccgcaaggccagaaagtgatcacaaaaagaggcagatgatagacactggggtagggtcataccacagggaaatacctttcctgggcttgttttctagcatatcactgacctgggatctttgggtgatcaagggtgtggttagtggaggctctgtgctgcacgtatgcagtatcctatctctttctacatcagatcaaaacactaagttggtgtactgcctcgaccttttttcagctcatcctggaacatatacagagttgagagttttagacaatctctaggtagaggagacaagatgtagacccagacagaagaaatctgcttccctaccatggctattccagcaccccaacctgtaattgccaagtcctctaaggtactaatttgtagctgctctgaagtaaggatttcggattcagctggtagggaaagactctgcacctgctgtcttagggaagaaatggttcaaatccatgtggtgacattgcattagtctccctttcactgttttcttattctgtaattgtttgttatatttcccaaaaacgtcttgatcactaagcaaagctgctagtgggattctatatttcgtgtcatcttttttattataatttattgcaaatttttttctgaataaatatatgttgtgtgaaaaagcaaa

SEQ ID NO: 21020 - DNA, 3068 bp, Homo sapiens
  source 1..3068: mol_type = unassigned DNA
cttacttcgaaggctgtgctccgctcaccatccagagcggaggtgcggaccttaaactcactcctggagaaagatctgcaagtgcgcagagagaagactggcagtggagcatgcatctggagggcagagacggcaggcggtaccccggcgcgccggcggtggagctcctgcagacgtccgtgcccagcggactcgctgaacttgtggccggcaagcgcaggcttcctcggggagccggtggagctgacccctcgcactcctgccccaggggggctgccgggcagagctcttgggctcctgcaggccaggagtttgcttcattcctcacaaaagggaggtctcactcttctttgccccagatgtccagctccaggtctaaagattcctgctttacagaaaacactcctttgctgaggaattccttacaggagaaagggtcacggtgcatacctgtttaccatccagagttcatcactgctgaagagtcttgggaagacagctctgctgactgggagcgaagatacctgctaagcagggaggtgtctggtctgtctgcatctgcctcctccgagaagggagaccttctggacagcccgcacatccgactccgtctttccaagctgaggcgctgtgtgcagtggctgaaagtcatgggcctgtttgcctttgtggtgctgtgttctattttgttcagcctatatccggatcaaggaaagctctggcagctgttggccttatcaccgctggagaactactccgtgaaccttagcagccacgtggactccacgctgctgcaggtggacctggcaggggccctagtggccagtgggccgagtcgtcctgggagggaagagcacatcgtggtggagctgacccaggctgacgctttgggctccaggtggcggcggccacagcaggtcactcacaactggacggtgtatttaaatccgaggagaagcgagcactcagtgatgagcaggacctttgaggtactgaccagagagacggtgtccatcagcatccgggcctccctgcagcagacccaggctgtccctcttttgatggctcatcagtacctccgcggaagtgtagaaacccaggtgaccatcgcgacggccatcctcgcgggcgtctacgcgctgatcatatttgagagacccagcctgacccatgtggtggagtggattgattttgagacgctggccctgctgtttggcatgatgatcttagtagccatattttcagaaacgggatttttcgattattgtgctgtaaaggcataccggctctcccggggacgggtgtgggccatgatcatcatgctctgtctcatcgcggccgtcctctctgccttcttggacaacgtcaccaccatgctcctcttcacgcctgtgaccataaggttgtgtgaggtgctcaaccttgatccaagacaagtcctgattgcagaagtgatcttcacaaacattggaggagctgccactgccatcggggaccctccaaatgtcattattgtttccaaccaagagctgaggaagatgggcctggactttgccggattcactgcacacatgttcattgggatttgccttgttctcctggtctgctttccgctcctcagactcctttactggaacagaaagctttataacaaggaacccagtgagattgttgaactgaagcacgagattcacgtctggcgcctgactgctcagcgcatcagcccggccagccgcgaggagacagctgtgcgccgcctgctgctggggaaggtgctggcactggagcacctgctcgcccggaggctgcacaccttccacagacagatctcacaggaggacaaaaattgggagaccaatatccaagaactccaaaaaaagcataggatatctgacgggattctgctcgccaaatgcctgacagtgttgggatttgttatcttcatgtttttcctcaattcgtttgtccctggcattcatcttgatcttggatggattgctattctgggtgccatctggttgctaattttagctgatattcatgattttgagataattctacacagagtggaatgggcaacccttctgttttttgcagcgctctttgttctgatggaggcattggcacatctccacttaatagaatatgttggagaacaaactgctttgctaataaagatggtcccagaggagcagcgcctcatagccgccattgtcctggtggtgtgggtctcagccctggcgtcgtccctgattgacaacatcccgttcactgctaccatgattcccgtgctcctgaacctgagccacgaccctgaggttggcctgcccgcaccgccgctcatgtatgccctggccttcggtgcttgcctgggaggtaacgggacactgattggcgcgtcggcaaacgtcgtgtgtgcagggattgcagaacagcatggatatgggttctccttcatggaatttttcaggctgggcttcccaatgatggttgtgtcctgcactgttgggatgtgttatctccttgtggctcatgtggtggtgggatggaattaatagacatccatctattgctcgaagactaaaggaaacttcatccatcacaacccattagtcataaaactaccctgaccccactgtttgaagaagaaaaggtgcttaccctggagatgctacagagacacagtggaatagaccttgacactaacactctaattcaagcgaatgttggaacaccatgacctcctctgtgtgtcctttctccccaaggacaaaatgtagaaagatgtgagataacttactcaagattcccctccagaaaaatacgtatgtttaaaaacccttcctgctatacataggaaaagacacacatccacctaaaattgactgtactgtttaactgtcaattctcctgaggctaaacacagtttgtttttcttgtaatcacttttcatgttaaaataatcagcattcaaattgtatgctttctgaatatagactttctgggaaaaggtttactgctcgtaaggaaacattttatgtattaaaataaactgttccttgataaaa

SEQ ID NO: 21021 - DNA, 3186 bp, Homo sapiens
  source 1..3186: mol_type = unassigned DNA
cctgggtgggggacccgctgcgggagcgccgagctccctctgagttcttacttcgaaggctgtgctccgctcaccatccagagcggaggtgcggaccttaaactcactcctggagaaagatctgcaagtgcgcagagagaagactggcagtggagcatgcatctggagggcagagacggcaggcggtaccccggcgcgccggcggtggagctcctgcagacgtccgtgcccagcggactcgctgaacttgtggccggcaagcgcaggcttcctcggggagccggtggagctgacccctcgcactcctgccccaggggggctgccgggcagagctcttgggctcctgcaggccaggagtttgcttcattcctcacaaaagggaggtctcactcttctttgccccagatgtccagctccaggtctaaagattcctgctttacagaaaacactcctttgctgaggaattccttacaggagaaagggtcacggtgcatacctgtttaccatccagagttcatcactgctgaagagtcttgggaagacagctctgctgactgggagcgaagatacctgctaagcagggaggtgtctggtctgtctgcatctgcctcctccgagaagggagaccttctggacagcccgcacatccgactccgtctttccaagctgaggcgctgtgtgcagtggctgaaagtcatgggcctgtttgcctttgtggtgctgtgttctattttgttcagcctatatccggatcaaggaaagctctggcagctgttggccttatcaccgctggagaactactccgtgaaccttagcagccacgtggactccacgctgctgcaggtggacctggcaggggccctagtggccagtgggccgagtcgtcctgggagggaagagcacatcgtggtggagctgacccaggctgacgctttgggctccaggtggcggcggccacagcaggtcactcacaactggacggtgtatttaaatccgaggagaagcgagcactcagtgatgagcaggacctttgaggtactgaccagagagacggtgtccatcagcatccgggcctccctgcagcagacccaggctgtccctcttttgatggctcatcagtacctccgcggaagtgtagaaacccaggtgaccatcgcgacggccatcctcgcgggcgtctacgcgctgatcatatttgagatcgtgcacagaactctggcggccatgctgggttcccttgcagcactggcagcactggctgtgattggcgatagacccagcctgacccatgtggtggagtggattgattttgagacgctggccctgctgtttggcatgatgatcttagtagccatattttcagaaacgggatttttcgattattgtgctgtaaaggcataccggctctcccggggacgggtgtgggccatgatcatcatgctctgtctcatcgcggccgtcctctctgccttcttggacaacgtcaccaccatgctcctcttcacgcctgtgaccataaggttgtgtgaggtgctcaaccttgatccaagacaagtcctgattgcagaagtgatcttcacaaacattggaggagctgccactgccatcggggaccctccaaatgtcattattgtttccaaccaagagctgaggaagatgggcctggactttgccggattcactgcacacatgttcattgggatttgccttgttctcctggtctgctttccgctcctcagactcctttactggaacagaaagctttataacaaggaacccagtgagattgttgaactgaagcacgagattcacgtctggcgcctgactgctcagcgcatcagcccggccagccgcgaggagacagctgtgcgccgcctgctgctggggaaggtgctggcactggagcacctgctcgcccggaggctgcacaccttccacagacagatctcacaggaggacaaaaattgggagaccaatatccaagaactccaaaaaaagcataggatatctgacgggattctgctcgccaaatgcctgacagtgttgggatttgttatcttcatgtttttcctcaattcgtttgtccctggcattcatcttgatcttggatggattgctattctgggtgccatctggttgctaattttagctgatattcatgattttgagataattctacacagagtggaatgggcaacccttctgttttttgcagcgctctttgttctgatggaggcattggcacatctccacttaatagaatatgttggagaacaaactgctttgctaataaagatggtcccagaggagcagcgcctcatagccgccattgtcctggtggtgtgggtctcagccctggcgtcgtccctgattgacaacatcccgttcactgctaccatgattcccgtgctcctgaacctgagccacgaccctgaggttggcctgcccgcaccgccgctcatgtatgccctggccttcggtgcttgcctgggaggtaacgggacactgattggcgcgtcggcaaacgtcgtgtgtgcagggattgcagaacagcatggatatgggttctccttcatggaatttttcaggctgggcttcccaatgatggttgtgtcctgcactgttgggatgtgttatctccttgtggctcatgtggtggtgggatggaattaatagacatccatctattgctcgaagactaaaggaaacttcatccatcacaacccattagtcataaaactaccctgaccccactgtttgaagaagaaaaggtgcttaccctggagatgctacagagacacagtggaatagaccttgacactaacactctaattcaagcgaatgttggaacaccatgacctcctctgtgtgtcctttctccccaaggacaaaatgtagaaagatgtgagataacttactcaagattcccctccagaaaaatacgtatgtttaaaaacccttcctgctatacataggaaaagacacacatccacctaaaattgactgtactgtttaactgtcaattctcctgaggctaaacacagtttgtttttcttgtaatcacttttcatgttaaaataatcagcattcaaattgtatgctttctgaatatagactttctgggaaaaggtttactgctcgtaaggaaacattttatgtattaaaataaactgttccttgataaaa

SEQ ID NO: 21022 - DNA, 2117 bp, Homo sapiens
  source 1..2117: mol_type = unassigned DNA
cttacttcgaaggctgtgctccgctcaccatccagagcggaggtgcggaccttaaactcactcctggagaaagatctgcaagtgcgcagagagaagactggcagtggagcatgcatctggagggcagagacggcaggcggtaccccggcgcgccggcggtggagctcctgcagacgtccgtgcccagcggactcgctgaacttgtggccggcaagcgcaggcttcctcggggagccggtggagctgacccctcgcactcctgccccaggggggctgccgggcagagctcttgggctcctgcaggccaggagtttgcttcattcctcacaaaagggaggtctcactcttctttgccccagatgtccagctccaggtctaaagattcctgctttacagaaaacactcctttgctgaggaattccttacaggagaaagggtcacggtgcatacctgtttaccatccagagttcatcactgctgaagagtcttgggaagacagctctgctgactgggagcgaagatacctgctaagcagggaggtgtctggtctgtctgcatctgcctcctccgagaagggagaccttctggacagcccgcacatccgactccgtctttccaagctgaggcgctgtgtgcagtggctgaaagtcatgggcctgtttgcctttgtggtgctgtgttctattttgttcagcctatatccggatcaaggaaagctctggcagctgttggccttatcaccgctggagaactactccgtgaaccttagcagccacgtggactccacgctgctgcaggtggacctggcaggggccctagtggccagtgggccgagtcgtcctgggagggaagagcacatcgtggtggagctgacccaggctgacgctttgggctccaggtggcggcggccacagcaggtcactcacaactggacggtgtatttaaatccgaggagaagcgagcactcagtgatgagcaggacctttgaggtactgaccagagagacggtgtccatcagcatccgggcctccctgcagcagacccaggctgtccctcttttgatggctcatcagtacctccgcggaagtgtagaaacccaggtgaccatcgcgacggccatcctcgcgggcgtctacgcgctgatcatatttgagatcgtgcacagaactctggcggccatgctgggttcccttgcagcactggcagcactggctgtgattggcgatagacccagcctgacccatgtggtggagtggattgattttgagacgctggccctgctgtttggcatgatgatcttagtagccatattttcagaaacgggatttttcgattattgtgctgtaaaggcataccggctctcccggggacgggtgtgggccatgatcatcatgctctgtctcatcgcggccgtcctctctgccttcttggacaacgtcaccaccatgctcctcttcacgcctgtgaccataaggttgtgtgaggtgctcaaccttgatccaagacaagtcctgattgcagaagtgatcttcacaaacattggaggagctgccactgccatcggggaccctccaaatgtcattattgtttccaaccaagagctgaggaagatgggcctggactttgccggattcactgcacacatgttcattgggatttgccttgttctcctggtctgctttccgctcctcagactcctttactggaacagaaagctttataacaaggaacccagtgagattgttgaactgaagcacgagattcacgtctggcgcctgactgctcagcgcatcagcccggccagccgcgaggagacagctgtgcgccgcctgctgctggggaaggtgctggcactggagcacctgctcgcccggaggctgcacaccttccacagacagatctcacaggaggacaaaaattgggagaccaatatccaagaactccaaaaaaagcataggatatctgacgggattctgctcgccaaatgcctgacagtgttgggatttgttatcttcatgtttttcctcaattcgtttgtccctggcattcatcttgatcttggtggcctgggcttggttcaagctggcaggtattatttatccacacctgagagctga

SEQ ID NO: 21023 - DNA, 996 bp, Homo sapiens
  source 1..996: mol_type = unassigned DNA
tccgctcaccatccagagcggaggtgcggaccttaaactcactcctggagaaagatctgcaagtgcgcaggtaaagtgcacgtgctccgcggtcgggaggaaggaggcgaggagccagactagcctgggaacaggcagggagggtttacacagccccggctgagtcgcggcttaggaagcaagagagaagactggcagtggagcatgcatctggagggcagagacggcaggcggtaccccggcgcgccggcggtggagctcctgcagacgtccgtgcccagcggactcgctgaacttgtggccggcaagcgcaggcttcctcggggagccggtggagctgacccctcgcactcctgccccaggggggctgccgggcagagctcttgggctcctgcaggccaggagtttgcttcattcctcacaaaagggaggtctcactcttctttgccccagatgtccagctccaggtctaaagattcctgctttacagaaaacactcctttgctgaggaattccttacaggagaaagggtcacggtgcatacctgtttaccatccagagttcatcactgctgaagagtcttgggaagacagctctgctgactgggagcgaagatacctgctaagcagggaggtgtctggtctgtctgcatctgcctcctccgagaagggagaccttctggacagcccgcacatccgactccgtctttccaagctgaggcgctgtgtgcagtggctgaaagtcatgggcctgtttgcctttgtggtgctgtgttctattttgttcagcctatatccggatcaaggaaagctctggcagctgttggccttatcaccgctggagaactactccgtgaaccttagcagccacgtggactccacgctgctgcaggtggacctggcaggggccctagtggccagtgggccgagtcgtcctgggagggaagagcacatcgtggtggagctgacccaggctgacgctttgggctccaggtgg

SEQ ID NO: 21024 - DNA, 750 bp, Homo sapiens
  source 1..750: mol_type = unassigned DNA
tgctccgctcaccatccagagcggaggtgcggaccttaaactcactcctggagaaagatctgcaagtgcgcagagagaagactggcagtggagcatgcatctggagggcagagacggcaggcggtaccccggcgcgccggcggtggagctcctgcagacgtccgtgcccagcggactcgctgaacttgtggccggcaagcgcaggcttcctcggggagccggtggagctgacccctcgcactcctgccccaggggggctgccgggcagagctcttgggctcctgcaggccaggagtttgcttcattcctcacaaaagggaggtctcactcttctttgccccagatgtccagctccaggtctaaagattcctgctttacagaaaacactcctttgctgaggaattccttacaggagaaagggtcacggtgcatacctgtttaccatccagagttcatcactgctgaagagtcttgggaagacagctctgctgactgggagcgaagatacctgctaagcagggaggtgtctggtctgtctgcatctgcctcctccgagaagggagaccttctggacagcccgcacatccgactccgtctttccaagctgaggcgctgtgtgcagtggctgaaagtcatgggcctgtttgcctttgtggtgctgtgttctgtcactcacaactggacggtgtatttaaatccgaggagaagcgagcactcagtgatgagcaggacctttgaggtactgaccag

SEQ ID NO: 21025 - DNA, 1936 bp, Homo sapiens
  source 1..1936: mol_type = unassigned DNA
aaataagtaggcggctcggtgctaagggatgagtgagtcggagctcggcctctccccggcacgttctcagctgctcctggttcagacccagcgagggagccgcgagcgaggctcaccgtccccggcgtgcaggatccggggctgctgagcgctcgctcccgcgtgtccggcgcttggagtccccgcggcaggagaggagtcgggacactagagctccaggggcgcctgtgggctccagggcctccggcttccccagtccccttcagctaaagccccagagacgtgctcagccccaggacctctgcggaacaagatccggattgagaagccactgcaactaccgaaatgggcagcaaaaccttgccggcgccggtgcctatccacccttccctgcagctcaccaactactccttccttcaggcagtgaacggcctgcccacagtgccttcggaccatctgcccaacctgtatggtttcagcgcgttgcacgctgtgcacctgcatcagtggacgctgggctacccggccatgcacttgccgcgctcttctttctccaaagtgccgggcacggtgtccagcttggtggatgcgcgcttccagctgcccgcctttccctggttccctcatgtcattcaacccaagcccgagatcaccgctggaggcagcgttccagcgctcaagaccaagccgcgctttgattttgccaacctggccttggcagcaacgcaagaagatccggccaagctcggtcgcggggagggcccaggctcccctgcaggtgggctgggtgccctcctcgacgtgaccaagctgtctccagaaaagaagcccacaaggggacgtctgccttccaagaccaagaaggaattcgtctgcaagttctgtggccgccacttcaccaagtcctacaacctacttatccatgagcggacgcacaccgacgagcggccctacacctgtgacatctgccacaaagccttccggaggcaagaccacctgcgagaccacagatatattcactccaaagagaagcccttcaagtgtcaagagtgtgggaaaggattctgccagtccaggactctcgctgtccacaagacgctacactcacaggtgaaggagctcaaaacctccaagatcaaatgctaaatagaacctgtgggtcacaaggaccctaggcccagcggccctctcctccatagggaccagaagcctgactctggcgggcagcgggagaggcgctcgctcgggaccttccacctctccaacattgtcccctgggtccctggcgcacgcggcacttcagagccccgcccggggccgcgaccccgaccgtccctgctgctcccctaggacgcggctaaactcttggccaaaaggcggtactcacgtggcggaagggaaactgcattaaaaaaagaacgaaagctccgcggagccgcagcggcgcctctcccagaagtattactttttctattgttattttatacgttttcttttttatttttgtctttgaccatataagcttgtaactctgactgcggagagtgagtggagagaggagaggcaacgaagtccttagcactggcagctcccacctcctcctcccgcccctgcccccacccccggagcctgcaaaagtgtaatccctgtatctgcttcagcctcctgccctagggaccgcggggcagccccctcccagctcttgcagctcagctggcggccgtgggctccgggactaggagagcgggacggggacctcgggcctggggtctgcagggggcccggcctccgctgccgcgacactgcgagggagcagccagccaagagccgggcgttatattgcgattggcactttatgctgaccatcggtaacggacatttatcactggagttttttttttttttaactattaaataaacggttattttacaggca

SEQ ID NO: 21026 - DNA, 4175 bp, Homo sapiens
  source 1..4175: mol_type = unassigned DNA
aagcagttaacttgctcacgctcaattagccccgaataaaccactttaatagactctgcacacttcattaatgcccagcataggactggccgcagacctgggattggcgctccaccgcgcgagggacgcgagtgcccgcactgcgcagggactcgggatcccgagcgcgaattgcgtctgctgtgcgtggtcgggtccccttattctttcccgcaggtcctgaggcccaagctgtttgaggaatgggtgcctagcctggggaagggttttccatcctgtgtttaaagatcgaaagtattcgccctggggttccgcggtctgggaaaccggagccggaggagccgggggctcactcatcctttctggctggagaggctagggtgagactgtgtttttctcttaaccgacctcctgaaaccggatcgtgctttcggcccattcttgatactagtgtaaagagccacgtttcgaatgaatttcgtcctggggaaagtcgttggcgggagcctggggagcactggcttccgaatgcttcagaaaacaaggaacgggctgggccgcggaagaaaataaatgtagtgttggggaaaacaagatcgggcagatagcccggaaaggttggctcccaggaaccattatagctgcaagcactcccccttcccggcaccccctacggagcccaagacggctccggtcttggctctaaggaagaaggcgaggaaaggcctagcgaggttggtggtttctcccacccaggcacggagcgggttcgggacagtgtgcaggccagagtcccacagccacggccgctggcttggccttggataggccaagcacccagaggagcagggggaggcctccgcggcgcccagcggggtccgggacccggagataaggatctgatttccagcgcctggaagggaagaagaggtgacagcaattcaaagagcgctcatccctcctaagtccaggccgacctttgaagttagacaggcttctcctccttccccttccccaacccaaatgggtctcagcttcctctctggcccaatttgaaatttacttctccttgtgtccgagctctgggatagtctcaatttgtcccgggcacgacccgagcttggcgcagtagagatgaccgttgctgaagccacggcgctgccagcggcaccagcgctctgcttcagaggccagatcacgcagataatatgcctcctcttgccctgaggctaaattcattgcaacggtttttatccgagtgctaatttaaactgcgcaggcaaatcacggccagctcgtggtgtttttacaccccattcccaggaaggcctctttccttaggtcccaccacacagccagtggcccccgtgccagcttccaggagaaaaggttttcctgggtcaacattgccctcatacctcctgggaaaaggcactgcacatccctggacagagccaggctttgaaagcctcgctgcagcgaaaggcagaggagtctatgcctgggccttgccctgggctgagggtcagctcaacctggggagggggcacgccaaactagggagcagagcagaggccagtgcatcccagggaaggggaattgctccatgttagaggaaaggacctaggaagaggagagtaatgaagggtaaaggaagaagtcaacagcaggggattgaagctaggcaagagagaagggagtcccacggaccctgctgtgacaatgacttcttaagtagccccaagctaagagccaggagttcagtgcttgggcttcccaaggctccctgacagtttagactttgctcaccctgttctttcctccactggacacatctaaattaggagtgtctgggaggtagagatgaaaagcattttgcagagctcagatgtctccacggaggctggagaccatggccaaggaggtctggagatgccaacccctggtcacttcagtgtggctttcctctggccttgctcaagctctccaaccttgcacttggaggtacatagaccacaggaatggaggcctggcctcagtgttcttgcccataggcatacccacctgcccagggctcacaacacacaagaacatgctgacaacccaaagactcagctccctttttctttgggggagtgagggcactaacacccccttgtttgtgactgcagttgtttgacagagtaaatgaatgtggatattagcaacctccttgaaagcaaagtggtccccgagggctaaggcaaggcagagagtcagtccacaagcagctgcagagagagtggagccaacaggtttcacttacactaaggcagggaagcagatttaaggtcaaagttgagggttttgaggagaaagatgacagggcttctggaagccaaatcgaaggtcagccagaagaccttaatgaatgggagccaggaggtgcatgcatttgtgcgcctgtgtatgtgtgttgtctgtgaggctcttcatgggtgcaatgtgatcccgtgtgtgtgtgtgtgtgtgtgtgtgtgtgtgtgtgagattcaggggttcctgcatttttttaaagccagtgttgtactataaaacattggttgtcccagtctttgcaccttgtcaattctgcctcagaatgtctgaatccacgtgtgcaattctgtgtttatctgcaaataaatgtgtaagtatgttccccagctcctgttatctttgcaggagattgtgattctgtgttgacccgggcttacctggatgtcaatttctacaggacaggcagtttccctttgcttgttcctttctcagtgtcttgcatacagtaggcccttccctctatcaagttgtgtggctctgccagacgccatttggagggagcccttagaccaaggagggttctgaaaagagggctcccctgcgtcttacattcccaccctctttgtgagggcagtgggttttgggaatggggtcttagactcttagctcctgcgctgggtgtgaggagagggtgtggctcggctggaattcaggaggaaggcgacccaccctgaacttctttattcctctccacgcccctgccttcttcttttctttgcagatccggattgagaagccactgcaactaccgaaatgggcagcaaaaccttgccggcgccggtgcctatccacccttccctgcagctcaccaactactccttccttcaggcagtgaacggcctgcccacagtgccttcggaccatctgcccaacctgtatggtttcagcgcgttgcacgctgtgcacctgcatcagtggacgctgggctacccggccatgcacttgccgcgctcttctttctccaaagtgccgggcacggtgtccagcttggtggatgcgcgcttccagctgcccgcctttccctggttccctcatgtcattcaacccaagcccgagatcaccgctggaggcagcgttccagcgctcaagaccaagccgcgctttgattttgccaacctggccttggcagcaacgcaagaagatccggccaagctcggtcgcggggagggcccaggctcccctgcaggtgggctgggtgccctcctcgacgtgaccaagctgtctccagaaaagaagcccacaaggggacgtctgccttccaagaccaagaaggaattcgtctgcaagttctgtggccgccacttcaccaagtcctacaacctacttatccatgagcggacgcacaccgacgagcggccctacacctgtgacatctgccacaaagccttccggaggcaagaccacctgcgagaccacagatatattcactccaaagagaagcccttcaagtgtcaagagtgtgggaaaggattctgccagtccaggactctcgctgtccacaagacgctacactcacaggtgaaggagctcaaaacctccaagatcaaatgctaaatagaacctgtgggtcacaaggaccctaggcccagcggccctctcctccatagggaccagaagcctgactctggcgggcagcgggagaggcgctcgctcgggaccttccacctctccaacattgtcccctgggtccctggcgcacgcggcacttcagagccccgcccggggccgcgaccccgaccgtccctgctgctcccctaggacgcggctaaactcttggccaaaaggcggtactcacgtggcggaagggaaactgcatt

SEQ ID NO: 21027 - DNA, 1838 bp, Homo sapiens
  source 1..1838: mol_type = unassigned DNA
agcctggggagggacgcgggcggggacggagctcggcgtgcttgctgctggagggtgatggccctgcaaggctgtgggctccgacctcaccgggagtcgacagcgagaggttcgccgaagagcgaggttctgggcgagcgctgaacgccggccccaagcaccccgggtctttacacagtccgcgtccacagactctgacgaagacgtggatctgctctcgctttagctgctcgcggtcctccagatcatgtccgcgactcctgcgactccgcgcggaaaaaaaagtttgccaggcgtggactcaatgacctttccaagctgtgcgcctcgctgcctggaccgggtctgagcgcggctgcccaggttgacctttctgcgggagggctttctctacgtgctgttgtctcactgggtttttgtcggagccccacgccctccggcctctgattcctggaagaaagggttggtcccctcagcacccccagcatcccggaaaatggggagcaaggctctgccagcgcccatcccgctccacccgtcgctgcagctcaccaattactccttcctgcaggccgtgaacaccttcccggccacggtggaccacctgcagggcctgtacggtctcagcgcggtacagaccatgcacatgaaccactggacgctggggtatcccaatgtgcacgagatcacccgctccaccatcacggagatggcggcggcgcagggcctcgtggacgcgcgcttccccttcccggccctgccttttaccacccacctattccaccccaagcagggggccattgcccacgtcctcccagccctgcacaaggaccggccccgttttgactttgccaatttggcggtggctgccacgcaagaggatccgcctaagatgggagacctgagcaagctgagcccaggactgggtagccccatctcgggcctcagtaaattgactccggacagaaagccctctcgaggaaggttgccctccaaaacgaaaaaagagtttatctgcaagttttgcggcagacactttaccaaatcctacaatttgctcatccatgagaggacccacacggacgagaggccgtacacgtgtgacatctgccacaaggccttccggaggcaagatcacctgcgggatcacagatacatccattccaaagaaaaacccttcaaatgtcaggagtgtgggaaaggattttgtcagtctagaactctagcagttcacaaaactttacacatgcaggaatctccacacaaatgtcccacatgtggaagaacctttaatcagagaagtaatctgaaaactcaccttctcacccatacagacatcaagccctacagctgcgagcagtgcggcaaagtgttcaggcgaaactgtgatctgcggcggcacagcctgactcacaccccgcggcaggacttctagagaagcccaggatctgtcccgtgccgccgctgctcccctccccagacacctctccacgtctcctacccagggggtcgcatccctagcccttcactgaccccagctcttcccttgctgcagccgcacctgcagctccagggagttaactcttcttctgggggactgagaactgtagaaagccacacactactacatcccttcacaaagagtatatgctagtttcttgtagatattcacagctcattttagagctctgtacataatgttgtgggtctttgttttgttgttttgtttgctttgggatcttgttggatgcacttagatatggaaaatggaagccaaattttatctttaaagactgtattttcaaaataaaactttttcttgtttgtttcaaaactcc

SEQ ID NO: 21028 - DNA, 1736 bp, Homo sapiens
  source 1..1736: mol_type = unassigned DNA
cgggcggggacggagctcggcgtgcttgctgctggagggtgatggccctgcaaggctgtgggctccgacctcaccgggagtcgacagcgagaggttcgccgaagagcgaggttctgggcgagcgctgaacgccggccccaagcaccccgggtctttacacagtccgcgtccacagactctgacgaagacgtggatctgctctcgctttagctgctcgcggtcctccagatcatgtccgcgactcctgcgactccgcgcggaaaaaaaagtttgccaggcgtggactcaatgacctttccaagctgtgcgcctcgctgcctggaccgggtctgagcgcggctgcccaggttgacctttctgcgggagggctttctctacgtgctgttgtctcactgggtttttgtcggagccccacgccctccggcctctgattcctggaagaaagggttggtcccctcagcacccccagcatcccggaaaatggggagcaaggctctgccagcgcccatcccgctccacccgtcgctgcagctcaccaattactccttcctgcaggccgtgaacaccttcccggccacggtggaccacctgcagggcctgtacggtctcagcgcggtacagaccatgcacatgaaccactggacgctggggtatcccaatgtgcacgagatcacccgctccaccatcacggagatggcggcggcgcagggcctcgtggacgcgcgcttccccttcccggccctgccttttaccacccacctattccaccccaagcagggggccattgcccacgtcctcccagccctgcacaaggaccggccccgttttgactttgccaatttggcggtggctgccacgcaagaggatccgcctaagatgggagacctgagcaagctgagcccaggactgggtagccccatctcgggcctcagtaaattgactccggacagaaagccctctcgaggaaggttgccctccaaaacgaaaaaagagtttatctgcaagttttgcggcagacactttaccaaatcctacaatttgctcatccatgagaggacccacacggacgagaggccgtacacgtgtgacatctgccacaaggccttccggaggcaagatcacctgcgggatcacagatacatccattccaaagaaaaacccttcaaatgtcaggagtgtgggaaaggattttgtcagtctagaactctagcagttcacaaaactttacacatgcagacatcaagccctacagctgcgagcagtgcggcaaagtgttcaggcgaaactgtgatctgcggcggcacagcctgactcacaccccgcggcaggacttctagagaagcccaggatctgtcccgtgccgccgctgctcccctccccagacacctctccacgtctcctacccagggggtcgcatccctagcccttcactgaccccagctcttcccttgctgcagccgcacctgcagctccagggagttaactcttcttctgggggactgagaactgtagaaagccacacactactacatcccttcacaaagagtatatgctagtttcttgtagatattcacagctcattttagagctctgtacataatgttgtgggtctttgttttgttgttttgtttgctttgggatcttgttggatgcacttagatatggaaaatggaagccaaattttatctttaaagactgtattttcaaaataaaactttttcttgtttgtttcaaaa

SEQ ID NO: 21029 - DNA, 1528 bp, Homo sapiens
  source 1..1528: mol_type = unassigned DNA
tcgctttagctgctcgcggtcctccagatcatgtccgcgactcctgcgactccgcgcggaaaaaaaagtttgccaggcgtggactcaatgacctttccaagctgtgcgcctcgctgcctggaccgggtctgagcgcggctgcccaggttgacctttctgcgggagatggggctgagggcagaggaaggaaaaagaaaacctccgaggtcagtgcggggcgaggtgagcccctcccagggccctctggcccaggaggatgaagcgcgccggcttcgctcttgcacgccggcttgccatccgggtaagcgcgggaaaggcggccacagggcgcggcggcagcgcagcgcgtgggatctcacgacccatccgttaacccaccgttcccaggagctccgaggcgcagcggcgacagagggctttctctacgtgctgttgtctcactgggtttttgtcggagccccacgccctccggcctctgattcctggaagaaagggttggtcccctcagcacccccagcatcccggaaaatggggagcaaggctctgccagcgcccatcccgctccacccgtcgctgcagctcaccaattactccttcctgcaggccgtgaacaccttcccggccacggtggaccacctgcagggcctgtacggtctcagcgcggtacagaccatgcacatgaaccactggacgctggggtatcccaatgtgcacgagatcacccgctccaccatcacggagatggcggcggcgcagggcctcgtggacgcgcgcttccccttcccggccctgccttttaccacccacctattccaccccaagcagggggccattgcccacgtcctcccagccctgcacaaggaccggccccgttttgactttgccaatttggcggtggctgccacgcaagaggatccgcctaagatgggagacctgagcaagctgagcccaggactgggtagccccatctcgggcctcagtaaattgactccggacagaaagccctctcgaggaaggttgccctccaaaacgaaaaaagagtttatctgcaagttttgcggcagacactttaccaaatcctacaatttgctcatccatgagaggacccacacggacgagaggccgtacacgtgtgacatctgccacaaggccttccggaggcaagatcacctgcgggatcacagatacatccattccaaagaaaaacccttcaaatgtcaggagtgtgggaaaggattttgtcagtctagaactctagcagttcacaaaactttacacatgcaggaatctccacacaaatgtcccacatgtggaagaacctttaatcagagaagtaatctgaaaactcaccttctcacccatacagacatcaagccctacagctgcgagcagtgcggcaaagtgttcaggcgaaactgtgatctgcggcggcacagcctgactcacaccccgcggcaggacttctagagaagcccaggatctgtcccgtgccgccgctgctcccctccccagacacctctccacgtct

SEQ ID NO: 21030 - DNA, 1048 bp, Homo sapiens
  source 1..1048: mol_type = unassigned DNA
caggagctccgaggcgcagcggcgacagaggttcgccccggcctgctagcattggcattgcggttgactgagcttcgcctaacaggcttggggagggtgggctgggctgggctgggctgggctgggtgctgcccggctgtccgcctttcgttttcctgggaccgaggagtcttccgctccgtatctgcctagagtctgaatccgactttctttcctttgggcacgcgctcgccagtggagcacttcttgttctggccccgggctgatctgcacgcggacttgagcaggtgccaagggctttctctacgtgctgttgtctcactgggtttttgtcggagccccacgccctccggcctctgattcctggaagaaagggttggtcccctcagcacccccagcatcccggaaaatggggagcaaggctctgccagcgcccatcccgctccacccgtcgctgcagctcaccaattactccttcctgcaggccgtgaacaccttcccggccacggtggaccacctgcagggcctgtacggtctcagcgcggtacagaccatgcacatgaaccactggacgctggggtatcccaatgtgcacgagatcacccgctccaccatcacggagatggcggcggcgcagggcctcgtggacgcgcgcttccccttcccggccctgccttttaccacccacctattccaccccaagcagggggccattgcccacgtcctcccagccctgcacaaggaccggccccgttttgactttgccaatttggcggtggctgccacgcaagaggatccgcctaagatgggagacctgagcaagctgagcccaggactgggtagccccatctcgggcctcagtaaattgactccggacagaaagccctctcgaggaaggttgccctccaaaacgaaaaaagagtttatctgcaagttttgcggcagacactttaccaaatcctacaatttgctcatccatgagaggacccacacggacgagaggccgtacacgtgtgacatctgccacaaggccttccggaggcaagat

SEQ ID NO: 21031 - DNA, 1528 bp, Homo sapiens; identical to SEQ ID NO: 21029
  source 1..1528: mol_type = unassigned DNA

SEQ ID NO: 21032 - DNA, 741 bp, Homo sapiens
  source 1..741: mol_type = unassigned DNA
cgcccagtgacctgccgaggtcggcagcacagagctctggagatgaagaccctgttcctgggtgtcacgctcggcctggccgctgccctgtccttcaccctggaggaggaggatatcacagggacctggtacgtgaaggccatggtggtcgataaggactttccggaggacaggaggcccaggaaggtgtccccagtgaaggtgacagccctgggcggtgggaacttggaagccacgttcaccttcatgagggaggatcggtgcatccagaagaaaatcctgatgcggaagacggaggagcctggcaaattcagcgcctatgggggcaggaagctcatatacctgcaggagctgcccgggacggacgactacgtcttttactgcaaagaccagcgccgtgggggcctgcgctacatgggaaagcttgtggcatctgctccctgcagggccgtgccgctgtccccaccttggctcacctggccacctcacctgcaggtaggaatcctaataccaacctggaggccctggaagaatttaagaaattggtgcagcacaagggactctcggaggaggacattttcatgcccctgcagacgggaagctgcgttctcgaacactaggcagcccccgggtctgcacctccagagcccaccctaccaccagacacagagcccggaccacctggacctaccctccagccatgacccttccctgctcccacccacctgactccaaataaag

SEQ ID NO: 21033 - DNA, 607 bp, Homo sapiens
  source 1..607: mol_type = unassigned DNA
cgcccagtgacctgccgaggtcggcagcacagagctctggagatgaagaccctgttcctgggtgtcacgctcggcctggccgctgccctgtccttcaccctggaggaggaggatgagggaggatcggtgcatccagaagaaaatcctgatgcggaagacggaggagcctggcaaattcagcgcctatgggggcaggaagctcatatacctgcaggagctgcccgggacggacgactacgtcttttactgcaaagaccagcgccgtgggggcctgcgctacatgggaaagcttgtggcatctgctccctgcagggccgtgccgctgtccccaccttggctcacctggccacctcacctgcaggtaggaatcctaataccaacctggaggccctggaagaatttaagaaattggtgcagcacaagggactctcggaggaggacattttcatgcccctgcagacgggaagctgcgttctcgaacactaggcagcccccgggtctgcacctccagagcccaccctaccaccagacacagagcccggaccacctggacctaccctccagccatgacccttccctgctcccacccacctgactccaaataaag

SEQ ID NO: 21034 - DNA, 689 bp, Homo sapiens
  source 1..689: mol_type = unassigned DNA
cgcccagtgacctgccgaggtcggcagcacagagctctggagatgaagaccctgttcctgggtgtcacgctcggcctggccgctgccctgtccttcaccctggaggaggaggatatcacagggacctggtacgtgaaggccatggtggtcgataaggactttccggaggacaggaggcccaggaaggtgtccccagtgaaggtgacagccctgggcggtgggaacttggaagccacgttcaccttcatgagggaggatcggtgcatccagaagaaaatcctgatgcggaagacggaggagcctggcaaattcagcgcctatgggggcaggaagctcatatacctgcaggagctgcccgggacggacgactacgtcttttactgcaaagaccagcgccgtgggggcctgcgctacatgggaaagcttgtgggtaggaatcctaataccaacctggaggccctggaagaatttaagaaattggtgcagcacaagggactctcggaggaggacattttcatgcccctgcagacgggaagctgcgttctcgaacactaggcagcccccgggtctgcacctccagagcccaccctaccaccagacacagagcccggaccacctggacctaccctccagccatgacccttccctgctcccacccacctgactccaaataaagagcttctccccca

SEQ ID NO: 21035 - DNA, 914 bp, Homo sapiens
  source 1..914: mol_type = unassigned DNA
gaggtcggcagcacagagctctggagatgaagaccctgttcctgggtgtcacgctcggcctggccgctgccctgtccttcaccctggaggaggaggatatcacagggacctggtacgtgaaggccatggtggtcgataaggactttccggaggacaggaggcccaggaaggtgtccccagtgaaggtgacagccctgggcggtgggaacttggaagccacgttcaccttcatgagggaggatcggtgcatccagaagaaaatcctgatgcggaagacggaggagcctggcaaattcagcgcctatgggggcaggaagctcatatacctgcaggagctgcccgggacggacgactacgtcttttactgcaaagaccagcgccgtgggggcctgcgctacatgggaaagcttgtgggtaggaatcctaataccaacctggaggccctggaagaatttaagaaattggtgcagcacaagggactctcggaggaggacattttcatgcccctgcagacgggaagctgcgttctcgaacactaggcgaggcctccctccggctccctcaggtgtcagctcggcccatcgccccctgcacctgtccccactcggtctactcccccccacccactcaccaaggatgctcagaggcctgcccagtcattggaggagctgaggctgctctggagccccgaggctgcccagcagtggccgatgtggaagctgcagagcctggggagggagctctgggcctggcctctgccctaccctgcagcctccctgacctctgctcctcttcccagcacagcagcccccgggtctgcacctccagagcccaccctaccaccagacacagagcccggaccacctggacctaccctccagccatgacccttccctgctcccacccacctgact

SEQ ID NO: 21036 - DNA, 556 bp, Homo sapiens
  source 1..556: mol_type = unassigned DNA
gacgcccagtgacctgccgaggtcggcagcacagagctctggagatgaagaccctgttcctgggtgtcacgctcggcctggccgctgccctgtccttcaccctggaggaggaggatgatgggccatgggtgcatccagaagaaaatcctgatgcggaagacggaggagcctggcaaatacagcgcctatgggggcaggaagctcatgtacctgcaggagctgcccaggagggaccactacatcttttactgcaaagaccagcaccatgggggcctgctccacatgggaaagcttgtgggtaggaattctgataccaaccgggaggccctggaagaatttaagaaattggtgcagcgcaagggactctcggaggaggacattttcacgcccctgcagacgggaagctgcgttcccgaacactaggcagcccccgggtctgcacctccagagcccaccctaccaccagacacagagcctggaccacctggacctaccctccagccatgacccttccctgctcccacccacctgactccaaataaagtccttctccccc

SEQ ID NO: 21037 - DNA, 691 bp, Homo sapiens
  source 1..691: mol_type = unassigned DNA
cgcccagtgacctgccgaggtcggcagcacagagctctggagatgaagaccctgttcctgggtgtcacgctcggcctggccgctgccctgtccttcaccctggaggaggaggatatcacagggacctggtacgtgaaggccatggtggtcgataaggactttccggaggacaggaggcccaggaaggtgtccccagtgaaggtgacagccctgggcggtgggaagttggaagccacgttcaccttcatgagggaggataggtgcatccagaagaaaatcctgatgcggaagacggaggagcctggcaaatacagcgcctatgggggcaggaagctcatgtacctgcaggagctgcccaggagggaccactacatcttttactgcaaagaccagcaccatgggggcctgctccacatgggaaagcttgtgggtaggaattctgataccaaccgggaggccctggaagaatttaagaaattggtgcagcgcaagggactctcggaggaggacattttcacgcccctgcagacgggaagctgcgttcccgaacactaggcagcccccgggtctgcacctccagagcccaccctaccaccagacacagagcctggaccacctggacctaccctccagccatgacccttccctgctcccacccacctgactccaaataaagtccttctcccccagc

SEQ ID NO: 21038 - DNA, 14000 bp, Homo sapiens
  source 1..14000: mol_type = unassigned DNA
acctgctccttcctgggcgccccgctacggctcgcggagcagaggagccgcgccgccgagagagagaggagccaccggcgcggcgccttgcctccctgccgccgtcctcgccgcttccccggcggtagcagcctgcagccacgatggaaaaactgagaatcagagagggctagtgatctctcagacacttggtcggtagaaaagatcccgcaccatcctccaggatccaatggccttggagagagggctgcagggcccacggacattgctgactcttcagaacgtgctgacatggagccaggtagactgaaattaccatgtgtccaaattaaaattgcatacttcaaggattatttgaaggactattcttagacccttttaagaagatttaaagaaaaaccactcggccctgagtgcggcgaggaccctgtttgtggatgtggaggagcgcgggccggaggccatggacgtgaaggagaggaagccttaccgctcgctgacccggcgccgcgacgccgagcgccgctacaccagctcgtccgcggacagcgaggagggcaaagccccgcagaaatcgtacagctccagcgagaccctgaaggcctacgaccaggacgcccgcctagcctatggcagccgcgtcaaggacattgtgccgcaggaggccgaggaattctgccgcacaggtgccaacttcaccctgcgggagctggggctggaagaagtaacgccccctcacgggaccctgtaccggacagacattggcctcccccactgcggctactccatgggggctggctctgatgccgacatggaggctgacacggtgctgtcccctgagcaccccgtgcgtctgtggggccggagcacacggtcagggcgcagctcctgcctgtccagccgggccaattccaatctcacactcaccgacaccgagcatgaaaacactgagactgatcatccgggcggcctgcagaaccacgcgcggctccggacgccgccgccgccgctctcgcacgcccacacccccaaccagcaccacgcggcctccattaactccctgaaccggggcaacttcacgccgaggagcaaccccagcccggcccccacggaccactcgctctccggagagccccctgccggcggcgcccaggagcctgcccacgcccaggagaactggctgctcaacagcaacatccccctggagaccagaaacctaggcaagcagccattcctagggacattgcaggacaacctcattgagatggacattctcggcgcctcccgccatgatggggcttacagtgacgggcacttcctcttcaagcctggaggcacctccccgctcttctgcaccacatcaccagggtacccactgacgtccagcacagtgtactctcctccgccccgacccctgccccgcagcaccttcgcccggccggcctttaacctcaagaagccctccaagtactgtaactggaagtgcgcagccctgagcgccatcgtcatctcagccactctggtcatcctgctggcatactttgtggccatgcacctgtttggcctaaactggcacctgcagccgatggaggggcagatgtatgagatcacggaggacacagccagcagttggcctgtgccaaccgacgtctccctatacccctcagggggcactggcttagagacccctgacaggaaaggcaaaggaaccacagaaggaaagcccagtagtttctttccagaggacagtttcatagattctggagaaattgatgtgggaaggcgagcttcccagaagattcctcctggcactttctggagatctcaagtgttcatagaccatcctgtgcatctgaaattcaatgtgtctctgggaaaggcagccctggttggcatttatggcagaaaaggcctccctccttcacatacacagtttgactttgtggagctgctggatggcaggaggctcctaacccaggaggcgcggagcctagaggggaccccgcgccagtctcggggaactgtgcccccctccagccatgagacaggcttcatccagtatttggattcaggaatctggcacttggctttttacaatgacggaaaggagtcagaagtggtttcctttctcaccactgccattgagtcggtggataactgccccagcaactgctatggcaatggtgactgcatctctgggacctgccactgcttcctgggtttcctgggccccgactgtggcagagcctcctgccccgtgctctgtagcggaaatggccaatacatgaaaggcagatgcttgtgccacagtggctggaaaggcgctgagtgcgatgtgcccaccaaccagtgtatcgatgtggcctgcagcaaccatggcacctgcatcacgggcacctgcatctgcaaccctggctacaagggcgagagctgtgaggaagtggactgcatggaccccacatgttcaggccggggtgtctgcgtgagaggcgaatgccactgctctgtgggatggggaggcaccaactgcgagacccccagggccacatgcttagaccagtgttcaggccacggaaccttcctcccggacaccgggctttgcagctgtgacccaagctggactggacacgactgttctatcgagatctgtgctgccgactgtggtggccatggcgtgtgcgtagggggcacctgccgctgcgaggatggctggatgggggcagcctgcgaccagcgggcctgccacccgcgctgtgccgagcatgggacctgccgcgacggcaagtgcgagtgcagccctggctggaatggcgaacactgcaccatcgctcactatctggatagggtagttaaagagggttgccctgggttgtgcaatggcaacggcagatgtaccttagacctgaatggttggcactgcgtctgccagctgggctggagaggagctggctgtgacacttccatggagactgcctgcggtgacagcaaagacaatgatggagatggcctggtggactgcatggaccctgactgctgcctccagcccctgtgccatatcaacccgctgtgccttggctcccctaaccctctggacatcatccaggagacacaggtccctgtgtcacagcagaacctacactccttctatgaccgcatcaagttcctcgtgggcagggacagcacgcacataatccccggggagaacccctttgatggagggcatgcttgtgttattcgtggccaagtgatgacatcagatggaacccccctggttggtgtgaacatcagttttgtcaataaccctctctttggatatacaatcagcaggcaagatggcagctttgacttggtgacaaatggcggcatctccatcatcctgcggttcgagcgggcacctttcatcacacaggagcacaccctgtggctgccatgggatcgcttctttgtcatggaaaccatcatcatgagacatgaggagaatgagattcccagctgtgacctgagcaattttgcccgccccaacccagtcgtctctccatccccactgacgtccttcgccagctcctgtgcagagaaaggccccattgtgccggaaattcaggctttgcaggaggaaatctctatctctggctgcaagatgaggctgagctacctgagcagccggacccctggctacaaatctgtcctgaggatcagcctcacccacccgaccatccccttcaacctcatgaaggtgcacctcatggtagcggtggagggccgcctcttcaggaagtggttcgctgcagccccagacctgtcctattatttcatttgggacaagacagacgtctacaaccagaaggtgtttgggctttcagaagcctttgtttccgtgggttatgaatatgaatcctgcccagatctaatcctgtgggaaaaaagaacaacagtgctgcagggctatgaaattgacgcgtccaagcttggaggatggagcctagacaaacatcatgccctcaacattcaaagtggcatcctgcacaaagggaatggggagaaccagtttgtgtctcagcagcctcctgtcattgggagcatcatgggcaatgggcgccggagaagcatctcctgccccagctgcaacggccttgctgacggcaacaagctcctggccccagtggccctcacctgtggctctgacgggagcctctatgtgggtgatttcaactacattagaaggatcttcccctctggaaatgtcaccaacatcctagagctgagaaataaagatttcagacatagtcacagtccagcacacaaatactacctggccacagaccccatgagtggggccgtcttcctttctgacagcaacagccggcgggtctttaaaatcaagtccactgtggtggtgaaggaccttgtcaagaactctgaggtggttgcggggacaggtgaccagtgcctcccctttgatgacactcgctgcggggatggtgggaaggccacagaagccacactcaccaatcccaggggcattacagtggacaagtttgggctgatctacttcgtggatggcaccatgatcagacgcatcgatcagaatgggatcatctccaccctgctcggctctaatgatctcacatcagcccggccactcagctgtgattctgtcatggatatttcccaggttcacctggagtggcccacagacttagccatcaacccaatggacaactcactttatgtcctcgacaacaatgtggtcctgcaaatctctgaaaaccaccaggtgcgcattgtcgccgggaggcccatgcactgccaggtccctggcattgaccacttcctgctaagcaaggtggccatccacgcaaccctggagtcagccaccgctttggctgtttcacacaatggggtcctgtatattgctgagactgatgagaaaaagatcaaccgcatcaggcaggtcaccactagtggagagatctcactcgttgctggggcccccagtggctgtgactgtaaaaatgatgccaactgtgattgtttttctggagacgatggttatgccaaggatgcaaagttaaataccccatcttccttggctgtgtgtgctgatggggagctctacgtggccgaccttgggaacatccgaattcggtttatccggaagaacaagcctttcctcaacacccagaacatgtatgagctgtcttcaccaattgaccaggagctctatctgtttgataccaccggcaagcacctgtacacccaaagcctgcccacaggagactacctgtacaacttcacctacactggggacggcgacatcacactcatcacagacaacaatggcaacatggtaaatgtccgccgagactctactgggatgcccctctggctggtggtcccagatggccaggtgtactgggtgaccatgggcaccaacagtgcactcaagagtgtgaccacacaaggacacgagttggccatgatgacataccatggcaattccggccttctggcaaccaaaagcaatgaaaacggatggacaacattttatgagtacgacagctttggccgcctgacaaatgtgaccttccctactggccaggtgagcagtttccgaagtgatacagacagttcagtgcatgtccaggtagagacctccagcaaggatgatgtcaccataaccaccaacctgtctgcctcaggcgccttctacacactgctgcaagaccaagtccggaacagctactacatcggggccgatggctccttgcggctgctgctggccaacggcatggaggtggcgctgcagactgagccccacttgctggctggcaccgtcaaccccaccgtgggcaagaggaatgtcacgctgcccatcgacaacggcctcaacctggtggagtggcgccagcgcaaagagcaggctcggggccaggtcactgtctttgggcgccggctgcgggttcacaaccgaaatctcctatctctggactttgatcgcgtaacacgcacagagaagatctatgatgaccaccgcaagttcacccttcggattctgtacgaccaggcggggcggcccagcctctggtcacccagcagcaggctgaatggtgtcaacgtgacatactcccctgggggttacattgctggcatccagaggggcatcatgtctgaaagaatggaatacgaccaggcgggccgcatcacatccaggatcttcgctgatgggaagacatggagctacacatacttagagaagtccatggtgctgctactacacagccagaggcagtatatctttgagttcgacaagaatgaccgcctctcttctgtgacgatgcccaacgtggcgcggcagacactagagaccatccgctcagtgggctactacagaaacatctatcagccccctgagggcaatgcctcagtcatacaggacttcactgaggatgggcacctccttcacaccttctacctgggcactggccgcagggtgatatacaagtatggcaaactgtcaaagctggcagagacgctctatgacaccaccaaggtcagtttcacctatgacgagacggcaggcatgctgaagaccatcaacctacagaatgagggcttcacctgcaccatccgctaccgtcagattgggcccctgattgaccgacagatcttccgcttcactgaggaaggcatggtcaacgcccgttttgactacaactatgacaacagcttccgggtgaccagcatgcaggctgtgatcaacgagaccccactgcccattgatctctatcgctatgatgatgtgtcaggcaagacagagcagtttgggaagtttggtgtcatttactatgacattaaccagatcatcaccacagctgtcatgacccacaccaagcattttgatgcatatggcaggatgaaggaagtgcagtatgagatcttccgctcgctcatgtactggatgaccgtccagtatgataacatggggcgagtagtgaagaaggagctgaaggtaggaccctacgccaataccactcgctactcctatgagtatgatgctgacggccagctgcagacagtctccatcaatgacaagccactctggcgctacagctacgacctcaatgggaacctgcacttactgagccctgggaacagtgcacggctcacaccactacggtatgacatccgcgaccgcatcactcggctgggtgacgtgcaatacaagatggatgaggatggcttcctgaggcagcggggcggtgatatctttgagtacaactcagctggcctgctcatcaaggcctacaaccgggctggcagctggagtgtcaggtaccgctacgatggcctggggcggcgcgtgtccagcaagagcagccacagccaccacctgcagttcttctatgcagacctgaccaaccccaccaaggtcacccacctgtacaaccactccagctctgagatcacctccctctactacgacttgcaaggacacctctttgccatggagctgagcagtggtgatgagttttacatagcttgtgacaacatcgggacccctcttgctgtctttagtggaacaggtttgatgatcaagcaaatcctgtacacagcctatggggagatctacatggataccaaccccaactttcagatcatcataggctaccatggtggcctctatgatccactcaccaagcttgtccacatgggccggcgagattatgatgtgctggccggacgctggactagcccagaccacgagctgtggaagcaccttagtagcagcaacgtcatgccttttaatctctatatgttcaaaaacaacaaccccatcagcaactcccaggacatcaagtgcttcatgacagatgttaacagctggctgctcacctttggattccagctacacaacgtgatccctggttatcccaaaccagacatggatgccatggaaccctcctacgagctcatccacacacagatgaaaacgcaggagtgggacaacagcaagtctatcctcggggtacagtgtgaagtacagaagcagctcaaggcctttgtcaccttagaacggtttgaccagctctatggctccacaatcaccagctgccagcaggctccaaagaccaagaagtttgcatccagcggctcagtctttggcaagggggtcaagtttgccttgaaggatggccgagtgaccacagacatcatcagtgtggccaatgaggatgggcgaagggttgctgccatcttgaaccatgcccactacctagagaacctgcacttcaccattgatggggtggatacccattactttgtgaaaccaggaccttcagaaggtgacctggccatcctgggcctcagtggggggcggcgaaccctggagaatggggtcaacgtcactgtgtcccagatcaacacagtacttaatggcaggactagacgctacacagacatccagctccagtacggggcactgtgcttgaacacacgctacgggacaacgttggatgaggagaaggcacgggtcctggagctggcccggcagagagccgtgcgccaagcgtgggcccgcgagcagcagagactgcgggaaggggaggaaggcctgcgggcctggacagagggggagaagcagcaggtgctgagcacagggcgggtgcaaggctacgacggctttttcgtgatctctgtcgagcagtacccagaactgtcagacagcgccaacaacatccacttcatgagacagagcgagatgggccggaggtgacagagaggaccaaggacttcttgccaaagacagctactcttttgtggccgcatacctgactgtgttgtacttttaaaaaaatgattttttaacaagtgcagaaacaaaaagatactggttgcattgtaactcatgcaacatccttttttttagaaaagaaaaacacagatttggccttcgcacattttttgcaaagaacagaaggtatttttttctgtagtgtgatcacaatgaaaactttattgtcttttgttccctttttccttgaggatttttcccttgtcgtttggggtatgtatctcctctctgagatgcatctcctggggtgtgtcctcgtctgtccctaggtacccagtgtgatgtgggacatgaatgtctgtgctaacttgtctcatgtgcaaccctttcttcttcgactggggtcgggcaggagtaaagggagtgatgggccagtacaacaccccttccaagggggcctgggaggagggtctgtaggacctgaggctccttggcagggctcctgcagaagagtggtggatttcttctcaccttgttctctgcctccagaggatcatagatggcttcatcttgctccagggaatttcatggtgttgttcagcaccttttttaagctgccccaaactcctgttcaagctttctattttgatgctgaatgaaaccccctaccacttttgcaaatcctgtgtagttgtcggtgccacccccatgctgggatagagaaagtgtctcccaggtcctttcccccagaccagtgacataacatcctgggctcagagtcccatcctcccgggagggaaagcacccaggatgcctgtgattggttggtcctccatgatgttcctgttcatctcctcctttctcccaaagccagatgtgagaacgagcactgcacagcaagccttcaatgtgggcaccatgtccacagaacagaaggccacccatggcaaaggcatggcagtggtggcgagggcaccagcctgccttccgaggcaaagccctctctctatgactttgagtatcttccctccaccactcagccgccaccactgagacgtaggaatgtggagggaggtgcttggtggcctttgattctggaaaaatgcttaacaaaaaaagccagccaaagagaggaaggcataagctaagcatccttctaaccagttcccaaagtcccatctgcctccatgtaccagctgatcgcagagctggactggggcaggctgggcttccaggaaattcctgaagttctgaaacagcttcccctctagagaagcccacccaatgtgttttttagtgacaggaagaaaggagggaagagctgatgtggtgtggcctgcccatatcatacaaccccaccaggagcagggcagttcccaaggtgggtgcccgtagatctgggaggccaggctggcatgattcctgtgaagaactgtgcctgtgtcgtcagggagaggcctgagccctctcagaagcagggacagcccacacctgaagagcacgcccaagctgaggcagcagccagcaggctgggggagcagtgagggcagggggagtcacagccagagctgggagccccttgttcaaggattccattcctggttcatccgcctaattaccattgtcattaccactcacaggaggctctgggagatgggaggggaagccaaatgcttccttttaagctgggcttcttagaaaatggaacttttatgggttacatttacattaagtgtggaaaatgaattctgagtctgagctattccccgtggaaaccttgttggactgataagctcatggcacctctatagccttactcacatagtcttcagaatattacacaagttaatgaaactgagaaggtctgactgcatgaggatcggagcagcatgtagtctgggttctgcctggcagagggaggcaaccaaaacttcttggggagaggagatttcgccttaacgtcatcccactgggattagaggatgtgtttcgctaagtgctcttcctgtttccaaaaaaaaagccaccctgctgcagcagtgcgctttggcctgcttgtccactggttgcccattgcccctggatccagagctctactgagtcagatacagtgctctgcaggcctgctgtgggaggcatgagctggagatgggggctcccatctggcaggatcattcttggatgagatggaaaacagtttggcctgaagaacacaagttttgtcctccagaagggacttacgcctctcaaaatgtactcttcataccaagggcccttgggcaaagtgctcctgcccagttgatcagtcccatcctggctgcctgacatcagtgaagacctgctggggatgtctgctcagaggtcaggaacggcatgcggtccacaggaaccagctccctacgcttcccccacgccctgtccctcctccacagccccctccccaaaggaatagggtggacttttagggatcaaaaacagaattattgggtgtttcatttatttttttctttctttcttttttttttcatagagatggggtctcactatgttgcccaggctgttctcaaactcctggcctcaggcgatccaccttggcctcctgaagtgctggggttacaggtgtgagccactgcgcctggactgagtgtttgtttctttaaaggatcttatatttttcctgtgctacataccaccacagcagcccagcttctgtggggagagaagttgaaggatcccgaagctttagaaaaaggatctcagctgtggcacaggcagtgttatgcgcctcactgccacattggtgctgttgtattgaaggtggtgcttctggccttggcccttttgagttggtttccatttgggctgcaggtgactcagtgactccctcctcaagctgtcctcctgctaagaccagcagtcacaaacccatggcaagggtgagtgtgaaggcctaaccctgtgcctatgtaataggctccaagcatcgactcccatcctgagaggaccggcccttttgacactcaccaaccaaatctgttcattcgatagagtgaccaggcctccctcacctgcccaggtgtatgatcctacagttcctgccttctctcctaccccgcacagctgccaactggtcctacatcctcagcccctctgccaccaccttaaataggactttactgattccccaactttgtttttttgtaggatgagatttcctttttatcccacccccccacaccccaaacagacattgctggagggcagactggaggaaggggaaggcatgcaggtaaattactgccttgtcagcctctgaccctcatctctcagaattgttggctgagaattaacccaaggaccacaccagtgcctgatttctacttagggagagaggattggaaacgatccctaagaaactgactgagggtgagaatggccaggaggtgtgtgtccaaataaccaggagggggcacagaagatgatggcaaggcagactgggcagtgttttgtagacacagaacaaagaatcagaatttgaaaaaagaagaaaaacaaatcttcgcagctgcaactttaaagtatcacctttatagatggcagggatttccattatgcaaatggaatctaagatttcaatgtgaaatcttagaatgcagttttaccacttgcagtcttgtatttgtggtggccatgtggtgagggcggtgatgctgagctttctgcccaggaggaatgagctttcaagctctcagcagggtgtcaggcttggggatttgagcatccactgctcaaagtccaggctattctccagtcctcacggcagccactaagcccaggagccagacctggcccggggacacatctcctgagggatcccagaaagaacccagtctttcctttcccttggggtccttgttagaatgaaaacctctctatttaaggcacatcattcccagctaggtttatacacttgtctatattttactggaggaaagggaattaaaaaagaactctgcagttcaaggccctttcatttaaccttccaaaaacagcaaactcattttaaagactcattgctgaggtgatagagagaaaccttatcctctccaaccttcacattcacaaaaaccatccttgtgtacttgactgccctagacagtggtgactcttaggtttcattacgaatgtggaatatcagagtgtgggaaggcccaggcgagggccaatgttgtgtttcttaccccctctggaatgccaaaggcaaggtactaggtgacctcctggtccccaagaaaatgtgatttattctgagggcgaacagccaagggaggactagtctggagcacgctcggccgtcctggcaggagctgagcctcaggtgtctggcggtgccccagcagccctggattcacccaacaccagaatcccacttttctaaatccacctgttgttctgagcacctctgaacccgcagcttcggcaaaaggagtctgtaccaagctgcttctggatgaccaacactggagactctggccttaccatgtggaaatcattttcctgaagtctggaactaattttgagaagtttttttctcaacacttttgtgtttctaacactgtatcttgactgtgtaaataccaacaaggctgtaaataaatgcagatgtagataccttctagaaaaaaaaaagcataaaaacaaaaccagaagtgatcccgtgtagccttcgttgacaaataaagactattttgtgtttacaggtgtctggtggcctttgcttggagataaaggcttcctcttgcctgtcccagcccccgagccatcctgggtttgcacttccctgctggctgctatcaggatgacctgggagaggactcagtcctaggccccagggtccctctaaatccctccaggctgcagctctgtcaagagggatgtccagagggtctctaagaccctgaagcttgactttgcaattgcatgacaggaataaatatcacagctcctctgacatcactagtgcagcgtggctccccatcccactgctgccctcgttcagggacaggctgaaggggccaacgaacccaaccctcccagaggagggagccttgctccaccactgggcacacagagtcatccaccatgccactgccttccacaagggatgtgagccgttgcactttaaaaataaatgactgtatattcatca

SEQ ID NO: 21039 - DNA, 170 bp, Homo sapiens
  source 1..170: mol_type = unassigned DNA
aaaagatcccgcaccatcctccaggatccaatggccttggagagagggctgcagggcccacggacattgctgactcttcagaacgtgctgacatggagccagaccactcggccctgagtgcggcgaggaccctgtttgtggatgtggaggagcgcgggccggaggccatg

SEQ ID NO: 21040 - DNA, 2591 bp, Homo sapiens
  source 1..2591: mol_type = unassigned DNA
gggacgcgataaatatgcagagcggaggcttcgcgcagcagagcccgcgcgccgcccgctccgggtgctgaatccaggcgtggggacacgagccaggcgccgccgccggagccagcggagccggggccagagccggagcgcgtccgcgtccacgcagccgccggccggccagcacccagggccctgcatgccaggtcgttggaggtggcagcgagacatgcacccggcccggaagctcctcagcctcctcttcctcatcctgatgggcactgaactcactcaagtgctgcccaccaaccctgaggagagctggcaggtgtacagctctgcccaggacagcgagggcaggtgtatctgcacagtggtcgctccacagcagaccatgtgttcacgggatgcccgcacaaaacagctgaggcagctactggagaaggtgcagaacatgtctcaatccatagaggtcttggacaggcggacccagagagacttgcagtacgtggagaagatggagaaccaaatgaaaggactggagtccaagttcaaacaggtggaggagagtcataagcaacacctggccaggcagtttaaggcgataaaagcgaaaatggatgaacttaggcctttgatacctgtgttggaagagtacaaggccgatgccaaattggtattgcagtttaaagaggaggtccagaatctgacgtcagtgcttaacgagctgcaagaggaaattggcgcctatgactacgatgaacttcagagcagagtgtccaatcttgaagaaaggctccgtgcatgcatgcaaaaactagcttgcgggaagttgacgggcatcagtgaccccgtgactgtcaagacctccggctcgaggttcggatcctggatgacagaccctctcgcccctgaaggcgataaccgggtgtggtacatggacggctatcacaacaaccgcttcgtacgtgagtacaagtccatggttgacttcatgaacacggacaatttcacctcccaccgtctcccccacccctggtcgggcacggggcaggtggtctacaacggttctatctacttcaacaagttccagagccacatcatcatcaggtttgacctgaagacagagaccatcctcaagacccgcagcctggactatgccggttacaacaacatgtaccactacgcctggggtggccactcggacatcgacctcatggtggacgagagcgggctgtgggccgtgtacgccaccaaccagaacgctggcaacatcgtggtcagtaggctggaccccgtgtccctgcagaccctgcagacctggaacacgagctaccccaagcgcagcgccggggaggccttcatcatctgcggcacgctgtacgtcaccaacggctactcagggggtaccaaggtccactatgcataccagaccaatgcctccacctatgaatacatcgacatcccattccagaacaaatactcccacatctccatgctggactacaaccccaaggaccgggccctgtatgcctggaacaacggccaccagatcctctacaacgtgaccctcttccacgtcatccgctccgacgagttgtagctccctcctcctggaagccaagggcccacgtcctcaccacaaagggactcctgtgaaactgctgccaaaaagataccaataacactaacaataccgatcttgaaaaatcatcagcagtgcggattctgacatcgagggatggcattacctccgtgtttctccctttcgagccggcgggccacagacgtcggaagaaactcccgtatttgcagctggaactgcagcccacggcgccccggttttcctccccgccctgtccctctctggtcaaacaacatactaaagaggcgaggcaatgactgttggccagttctcaccggggaaaaacccactgttaggatggcatgaacatttccttagatcgtggtcagctccgaggaatgtggcgtccaggctctttgagagccatgggctgcacccggccgtaggctagtgtaactcgcatcccattgcagtgccgtttcttgactgtgttgctgtctcttagattaaccgtgctgaggctccacatagctcctggacctgtgtctagtacatactgaagcgatggtcagagtgtgtagagtgaagttgctgtgcccacattgtttgaactcgcgtaccccgtagatacattgtgcaacgttcttctgttattcccttgaggtggtaacttcgtatgttcagtttatgcgatgattgttgtaaatgcaatgccgtagtttggattaataagtggatggtttttgtttctaaaaagaaaaaaaaaatcagtgttcacccttatagagacatagtcaagttcatgttgataataatcaaaggaattactctcttcttgttaaattagctaaatcatgtaaccgcagataggaagggctcgcctggggaaactctggtttccgatgggacaggaaagtcatacgggcaacagtatgcggaaagtacgttttttaagtaaaaaacaaaggcaaactttgtactatccagttatctaaggaacaataaaaacattaggaga

SEQ ID NO: 21041 - DNA, 1014 bp, Homo sapiens
  source 1..1014: mol_type = unassigned DNA
gcgcgggggagccattaggaggcgaggagagaggagggcgcagctcccgcccagcccagccctgcccagccctgcccggaggcagacgcgccggaaccgggacgcgataaatatgcagagcggaggcttcgcgcagcagagcccgcgcgccgcccgctccgggtgctgaatccaggcgtggggacacgagccaggcgccgccgccggagccagcggagccggggccagagccggagcgcgtccgcgtccacgcagccgccggccggccagcacccagggccctgcatgccaggtcgttggaggtggcagcgagacatgcacccggcccggaagctcctcagcctcctcttcctcatcctgatgggcactgaactcactcaagtgctgcccaccaaccctgaggagagctggcaggtgtacagctctgcccaggacagcgagggcaggtgtatctgcacagtggtcgctccacagcagaccatgtgttcacgggatgcccgcacaaaacagctgaggcagctactggagaaggtgcagaacatgtctcaatccatagaggtcttggacaggcggacccagagagacttgcagtacgtggagaagatggagaaccaaatgaaaggactggagtccaagttcaaacaggtggaggagagtcataagcaacacctggccaggcagtttaagggctaacttaaaagagttttttcaatgctgcagtgactgaagaagcagtccactcccatgtaaccatgaaagagagccagagagctttttgcaccatgcatttttactattattttccaatacttagcaccatttcactaaggaaccttgaatacaaccaggatcctcctttgcatgcgactgtagctgcatttcatgaatagtttgaacccttgtcaatgcattttttgaaaaagaaagaaaaaaaaaacttcgtgtatgtgactcaaagcatgtaaccttaagatgttgcattctaaactgacaataaagacctttcccaaatat

SEQ ID NO: 21042 - DNA, 2444 bp, Homo sapiens
  source 1..2444: mol_type = unassigned DNA
ggcgggcggcgcgaggcgcagggcgcggcgggcagaggccacctggccaccttccctggcgcccggggaaggcgcggcgatggccggggcgcgcggggcggcggcggcggcgggcgggcggcggcgggccgagggggcgcggggacacagccaggcgcccctgcccgccgcggtgcccgccgcctgaaggccgcctgggcgcgggagccggtgccagctcggagcgggcgctggaggcagctcgaggcgcgatgtcggtgccgctgctcaagatcggggtcgtgctgagcaccatggccatgatcactaactggatgtcccagacgctgccctcgctggtgggcctcaacaccaccaagctctcggcggccggcggcgggacgctggaccgcagcaccggcgtgctgcccaccaaccctgaggagagctggcaggtgtacagctctgcccaggacagcgagggcaggtgtatctgcacagtggtcgctccacagcagaccatgtgttcacgggatgcccgcacaaaacagctgaggcagctactggagaaggtgcagaacatgtctcaatccatagaggtcttggacaggcggacccagagagacttgcagtacgtggagaagatggagaaccaaatgaaaggactggagtccaagttcaaacaggtggaggagagtcataagcaacacctggccaggcagtttaaggcgataaaagcgaaaatggatgaacttaggcctttgatacctgtgttggaagagtacaaggccgatgccaaattggtattgcagtttaaagaggaggtccagaatctgacgtcagtgcttaacgagctgcaagaggaaattggcgcctatgactacgatgaacttcagagcagagtgtccaatcttgaagaaaggctccgtgcatgcatgcaaaaactagcttgcgggaagttgacgggcatcagtgaccccgtgactgtcaagacctccggctcgaggttcggatcctggatgacagaccctctcgcccctgaaggcgataaccgggtgtggtacatggacggctatcacaacaaccgcttcgtacgtgagtacaagtccatggttgacttcatgaacacggacaatttcacctcccaccgtctcccccacccctggtcgggcacggggcaggtggtctacaacggttctatctacttcaacaagttccagagccacatcatcatcaggtttgacctgaagacagagaccatcctcaagacccgcagcctggactatgccggttacaacaacatgtaccactacgcctggggtggccactcggacatcgacctcatggtggacgagagcgggctgtgggccgtgtacgccaccaaccagaacgctggcaacatcgtggtcagtaggctggaccccgtgtccctgcagaccctgcagacctggaacacgagctaccccaagcgcagcgccggggaggccttcatcatctgcggcacgctgtacgtcaccaacggctactcagggggtaccaaggtccactatgcataccagaccaatgcctccacctatgaatacatcgacatcccattccagaacaaatactcccacatctccatgctggactacaaccccaaggaccgggccctgtatgcctggaacaacggccaccagatcctctacaacgtgaccctcttccacgtcatccgctccgacgagttgtagctccctcctcctggaagccaagggcccacgtcctcaccacaaagggactcctgtgaaactgctgccaaaaagataccaataacactaacaataccgatcttgaaaaatcatcagcagtgcggattctgacatcgagggatggcattacctccgtgtttctccctttcgagccggcgggccacagacgtcggaagaaactcccgtatttgcagctggaactgcagcccacggcgccccggttttcctccccgccctgtccctctctggtcaaacaacatactaaagaggcgaggcaatgactgttggccagttctcaccggggaaaaacccactgttaggatggcatgaacatttccttagatcgtggtcagctccgaggaatgtggcgtccaggctctttgagagccatgggctgcacccggccgtaggctagtgtaactcgcatcccattgcagtgccgtttcttgactgtgttgctgtctcttagattaaccgtgctgaggctccacatagctcctggacctgtgtctagtacatactgaagcgatggtcagagtgtgtagagtgaagttgctgtgcccacattgtttgaactcgcgtaccccgtagatacattgtgcaacgttcttctgttattcccttgaggtggtaacttcgtatgttcagtttatgcgatgattgttgtaaatgcaatgccgtagtttggattaataagtggatggtttttgtttctaa

SEQ ID NO: 21043 - DNA, 2492 bp, Homo sapiens
  source 1..2492: mol_type = unassigned DNA
gaatcaccgcggaaaagggctccagtaggcaggacggcgccgtctctctgccggcaacctttgccccaaagcggaccctctgcggggatcggagagggatgccccggcgtgaggatgggagaagccccgggacgggagggccgcgggccgtgcccccagctggagtccccgcgccgccgccgggtgctgcccaccaaccctgaggagagctggcaggtgtacagctctgcccaggacagcgagggcaggtgtatctgcacagtggtcgctccacagcagaccatgtgttcacgggatgcccgcacaaaacagctgaggcagctactggagaaggtgcagaacatgtctcaatccatagaggtcttggacaggcggacccagagagacttgcagtacgtggagaagatggagaaccaaatgaaaggactggagtccaagttcaaacaggtggaggagagtcataagcaacacctggccaggcagtttaaggcgataaaagcgaaaatggatgaacttaggcctttgatacctgtgttggaagagtacaaggccgatgccaaattggtattgcagtttaaagaggaggtccagaatctgacgtcagtgcttaacgagctgcaagaggaaattggcgcctatgactacgatgaacttcagagcagagtgtccaatcttgaagaaaggctccgtgcatgcatgcaaaaactagcttgcgggaagttgacgggcatcagtgaccccgtgactgtcaagacctccggctcgaggttcggatcctggatgacagaccctctcgcccctgaaggcgataaccgggtgtggtacatggacggctatcacaacaaccgcttcgtacgtgagtacaagtccatggttgacttcatgaacacggacaatttcacctcccaccgtctcccccacccctggtcgggcacggggcaggtggtctacaacggttctatctacttcaacaagttccagagccacatcatcatcaggtttgacctgaagacagagaccatcctcaagacccgcagcctggactatgccggttacaacaacatgtaccactacgcctggggtggccactcggacatcgacctcatggtggacgagagcgggctgtgggccgtgtacgccaccaaccagaacgctggcaacatcgtggtcagtaggctggaccccgtgtccctgcagaccctgcagacctggaacacgagctaccccaagcgcagcgccggggaggccttcatcatctgcggcacgctgtacgtcaccaacggctactcagggggtaccaaggtccactatgcataccagaccaatgcctccacctatgaatacatcgacatcccattccagaacaaatactcccacatctccatgctggactacaaccccaaggaccgggccctgtatgcctggaacaacggccaccagatcctctacaacgtgaccctcttccacgtcatccgctccgacgagttgtagctccctcctcctggaagccaagggcccacgtcctcaccacaaagggactcctgtgaaactgctgccaaaaagataccaataacactaacaataccgatcttgaaaaatcatcagcagtgcggattctgacatcgagggatggcattacctccgtgtttctccctttcgagccggcgggccacagacgtcggaagaaactcccgtatttgcagctggaactgcagcccacggcgccccggttttcctccccgccctgtccctctctggtcaaacaacatactaaagaggcgaggcaatgactgttggccagttctcaccggggaaaaacccactgttaggatggcatgaacatttccttagatcgtggtcagctccgaggaatgtggcgtccaggctctttgagagccatgggctgcacccggccgtaggctagtgtaactcgcatcccattgcagtgccgtttcttgactgtgttgctgtctcttagattaaccgtgctgaggctccacatagctcctggacctgtgtctagtacatactgaagcgatggtcagagtgtgtagagtgaagttgctgtgcccacattgtttgaactcgcgtaccccgtagatacattgtgcaacgttcttctgttattcccttgaggtggtaacttcgtatgttcagtttatgcgatgattgttgtaaatgcaatgccgtagtttggattaataagtggatggtttttgtttctaaaaagaaaaaaaaaatcagtgttcacccttatagagacatagtcaagttcatgttgataataatcaaaggaattactctcttcttgttaaattagctaaatcatgtaaccgcagataggaagggctcgcctggggaaactctggtttccgatgggacaggaaagtcatacgggcaacagtatgcggaaagtacgttttttaagtaaaaaacaaaggcaaactttgtactatccagttatctaaggaacaataaaaacattaggagat

SEQ ID NO: 21044 - DNA, 1057 bp, Homo sapiens
  source 1..1057: mol_type = unassigned DNA
ggacggcgcttcccggtggcggcggaggagcccggagggacgcagccgggcaaggcagggcgcagggcgggcggcgcgaggcgcagggcgcggcgggcagaggccacctggccaccttccctggcgcccggggaaggcgcggcgatggccggggcgcgcggggcggcggcggcggcgggcgggcggcggcgggccgagggggcgcggggacacagccaggcgcccctgcccgccgcggtgcccgccgcctgaaggccgcctgggcgcgggagccggtgccagctcggagcgggcgctggaggcagctcgaggcgcgatgtcggtgccgctgctcaagatcggggtcgtgctgagcaccatggccatgatcactaactggatgtcccagacgctgccctcgctggtgggcctcaacaccaccaagctctcggcggccggcggcgggacgctggaccgcagcaccggcgtgctgcccaccaaccctgaggagagctggcaggtgtacagctctgcccaggacagcgagggcaggtgtatctgcacagtggtcgctccacagcagaccatgtgttcacgggatgcccgcacaaaacagctgaggcagctactggagaaggtgcagaacatgtctcaatccatagaggtcttggacaggcggacccagagagacttgcagtacgtggagaagatggagaaccaaatgaaaggactggagtccaagttcaaacaggtggaggagagtcataagcaacacctggccaggcagtttaagggctaacttaaaagagttttttcaatgctgcagtgactgaagaagcagtccactcccatgtaaccatgaaagagagccagagagctttttgcaccatgcatttttactattattttccaatacttagcaccatttcactaaggaaccttgaatacaaccaggatcctcctttgcatgcgactgtagctgcatttcatgaatagtttgaacccttgtcaatgcattttttgaaaaagaaagaaaaaaaaaacttcgtgtatgtgactcaaagcatgtaaccttaag

SEQ ID NO: 21045 - DNA, 2897 bp, Homo sapiens
  source 1..2897: mol_type = unassigned DNA
atggggaaatcaccactgggcactataagaagcccctgggctctctgcagagccagcggctccagctaagaggacaagatgaggcccggcctctcatttctcctagcccttctgttcttccttggccaagctgcaggggatttgggggatgtgggacctccaattcccagccccggcttcagctctttcccaggtgttgactccagctccagcttcagctccagctccaggtcgggctccagctccagccgcagcttaggcagcggaggttctgtgtcccagttgttttccaatttcaccggctccgtggatgaccgtgggacctgccagtgctctgtttccctgccagacaccacctttcccgtggacagagtggaacgcttggaattcacagctcatgttctttctcagaagtttgagaaagaactttccaaagtgagggaatatgtccaattaattagtgtgtatgaaaagaaactgttaaacctaactgtccgaattgacatcatggagaaggataccatttcttacactgaactggacttcgagctgatcaaggtagaagtgaaggagatggaaaaactggtcatacagctgaaggagagttttggtggaagctcagaaattgttgaccagctggaggtggagataagaaatatgactctcttggtagagaagcttgagacactagacaaaaacaatgtccttgccattcgccgagaaatcgtggctctgaagaccaagctgaaagagtgtgaggcctctaaagatcaaaacacccctgtcgtccaccctcctcccactccagggagctgtggtcatggtggtgtggtgaacatcagcaaaccgtctgtggttcagctcaactggagagggttttcttatctatatggtgcttggggtagggattactctccccagcatccaaacaaaggactgtattgggtggcgccattgaatacagatgggagactgttggagtattatagactgtacaacacactggatgatttgctattgtatataaatgctcgagagttgcggatcacctatggccaaggtagtggtacagcagtttacaacaacaacatgtacgtcaacatgtacaacaccgggaatattgccagagttaacctgaccaccaacacgattgctgtgactcaaactctccctaatgctgcctataataaccgcttttcatatgctaatgttgcttggcaagatattgactttgctgtggatgagaatggattgtgggttatttattcaactgaagccagcactggtaacatggtgattagtaaactcaatgacaccacacttcaggtgctaaacacttggtataccaagcagtataaaccatctgcttctaacgccttcatggtatgtggggttctgtatgccacccgtactatgaacaccagaacagaagagattttttactattatgacacaaacacagggaaagagggcaaactagacattgtaatgcataagatgcaggaaaaagtgcagagcattaactataacccttttgaccagaaactttatgtctataacgatggttaccttctgaattatgatctttctgtcttgcagaagccccagtaagctgtttaggagttagggtgaaagagaaaatgtttgttgaaaaaatagtcttctccacttacttagatatctgcaggggtgtctaaaagtgtgttcattttgcagcaatgtttaggtgcatagttctaccacactagagatctaggacatttgtcttgatttggtgagttctcttgggaatcatctgcctcttcaggcgcattttgcaataaagtctgtctagggtgggattgtcagaggtctaggggcactgtgggcctagtgaagcctactgtgaggaggcttcactagaagccttaaattaggaattaaggaacttaaaactcagtatggcgtctagggattctttgtacaggaaatattgcccaatgactagtcctcatccatgtagcaccactaattcttccatgcctggaagaaacctggggacttagttaggtagattaatatctggagctcctcgagggaccaaatctccaacttttttttcccctcactagcacctggaatgatgctttgtatgtggcagataagtaaatttggcatgcttatatattctacatctgtaaagtgctgagttttatggagagaggcctttttatgcattaaattgtacatggcaaataaatcccagaaggatctgtagatgaggcacctgctttttcttttctctcattgtccaccttactaaaagtcagtagaatcttctacctcataacttccttccaaaggcagctcagaagattagaaccagacttactaaccaattccaccccccaccaacccccttctactgcctactttaaaaaaattaatagttttctatggaactgatctaagattagaaaaattaattttctttaatttcattatgaacttttatttacatgactctaagactataagaaaatctgatggcagtgacaaagtgctagcatttattgttatctaataaagaccttggagcatatgtgcaacttatgagtgtatcagttgttgcatgtaatttttgcctttgtttaagcctggaacttgtaagaaaatgaaaatttaatttttttttctaggacgagctatagaaaagctattgagagtatctagttaatcagtgcagtagttggaaaccttgctggtgtatgtgatgtgcttctgtgcttttgaatgactttatcatctagtctttgtctatttttcctttgatgttcaagtcctagtctataggattggcagtttaaatgctttactcccccttttaaaataaatgattaaaatgtgctttgaaaaaa

SEQ ID NO: 21046 - DNA, 492 bp, Homo sapiens
  source 1..492: mol_type = unassigned DNA
atggcggaggacaggccgcagcagccgcagctggacatgccgctggtcctggaccagggcctgaccaggcagatgcggctacgcgtggagagcctgaagcagcgcggggagaagcgccaggatggggagaagctgctgcagccagcggagtctgtgtaccgcctcaacttcacccagcagcagcggctacagttcgagcgctggaatgtcgtgctggacaagccgggcaaggtcaccatcacaggcacctcgcagaactggacgcctgacctcaccaacctcatgacacgccagctgctggaccccactgccatcttctggcgcaaggaggactcggatgccatagattggaatgaggccgacgccctggagtttggggagcgcctgtcggacctggccaagatccgcaaggtcatgtacttcctcgtcacctttggcgagggtgtggagcccgccaacctcaaggcctccgtggtttttaaccagctctga

SEQ ID NO: 21047 - DNA, 939 bp, Homo sapiens
  source 1..939: mol_type = unassigned DNA
atggatggaggcaaccagagtgaaggttcagagttccttctcctggggatgtcagagagtcctgagcagcagcggatcctgttttggatgttcctgtccatgtacctggtcacggtggtgggaaatgtgctcatcatcctggccatcagctctgattcccgcctgcacacccccgtgtacttcttcctggccaacctctccttcactgacctcttctttgtcaccaacacaatccccaagatgctggtgaacctccagtcccataacaaagccatctcctatgcagggtgtctgacacagctctacttcctggtctccttggtggccctggacaacctcatcctggctgtgatggcatatgaccgctatgtggccatctgctgccccctccactacaccacagccatgagccctaagctctgtatcttactcctttccttgtgttgggtcctatccgtcctctatggcctcatacacaccctcctcatgaccagagtgaccttctgtgggtcacgaaaaatccactacatcttctgtgagatgtatgtattgctgaggatggcatgttccaacattcagattaatcacacagtgctgattgccacaggctgcttcatcttcctcattccctttggattcgtgatcatttcctatgtgctgattatcagagccatcctcagaataccctcagtctctaagaaatacaaagccttctccacctgtgcctcccatttgggtgcagtctccctcttctatgggacactttgtatggtatacctaaagcccctccatacctactctgtgaaggactcagtagccacagtgatgtatgctgtggtgacacccatgatgaatcccttcatctacagcctgaggaacaaggacatgcatggggctctgggaagactcctagataaacactttaagaggctgacatga

SEQ ID NO: 21048 - DNA, 942 bp, Homo sapiens
  source 1..942: mol_type = unassigned DNA
atgagcgggacaaaccagtcgagtgtctccgagttcctcctcctgggactctccaggcagccccagcagcagcatctcctctttgtgttcttcctcagcatgtacctggccactgtcctggggaacctgctcatcatcctgtccgtaagcatagactcctgcctgcacacccccatgtacttcttcctcagcaacctgtcttttgtggacatctgcttctccttcaccaccgtccccaagatgctggccaatcacatactcgagactcagaccatctccttctgtggctgtctcacacagatgtatttcgttttcatgttcgtggacatggacaatttcctcctagctgtgatggcctatgaccactttgtcgccgtgtgccaccccttacattacacagcaaagatgacccatcagctctgtgccctgctggttgctggattatgggtggttgccaacctgaatgtccttctgcacaccctgctgatggctccactctcattctgtgcagacaatgccatcactcacttcttctgcgatgtgactcccctactgaaactctcctgctcagacacacacctcaatgaggtcataatccttagtgagggtgccctggtcatgatcaccccatttctttgcatcctggcttcttatatgcacatcacctgcactgtcctgaaggtcccatccacaaagggaaggtggaaagccttctccacctgtggttctcacctggctgtggttctcctcttctacagcaccatcattgctgtgtattttaaccctctgtcctcccactcagctgagaaagacactatggctactgtgttgtatacagtagtgactcccatgctaaaccctttcatctacagcctgaggaacaggtacttgaaaggggctctgaaaaaagtagttggcagggtggtgttttctgtctgatga

SEQ ID NO: 21049 - DNA, 1046 bp, Homo sapiens
  source 1..1046: mol_type = unassigned DNA
gccattcaatcacccaagcaggatgaatcacagcgttgtaactgagttcattattctgggcctcaccaaaaagcctgaactccagggaattatcttcctcttttttctcattgtctatcttgtggcttttctcggcaacatgctcatcatcattgccaaaatctataacaacaccttgcatacgcccatgtatgttttccttctgacactggctgttgtggacatcatctgcacaacaagcatcataccgaagatgctggggaccatgctaacatcagaaaataccatttcatatgcaggctgcatgtcccagctcttcttgttcacatggtctctgggagctgagatggttctcttcaccaccatggcctatgaccgctatgtggccatttgtttccctcttcattacagtactattatgaaccaccatatgtgtgtagccttgctcagcatggtcatggctattgcagtcaccaattcctgggtgcacacagctcttatcatgaggttgactttctgtgggccaaacaccattgaccacttcttctgtgagatacccccattgctggctttgtcctgtagccctgtaagaatcaatgaggtgatggtgtatgttgctgatattaccctggccataggggactttattcttacctgcatctcctatggttttatcattgttgctattctccgtatccgcacagtagaaggcaagaggaaggccttctcaacatgctcatctcatctcacagtggtgaccctttactattctcctgtaatctacacctatatccgccctgcttccagctatacatttgaaagagacaaggtggtagctgcactctatactcttgtgactcccacattaaacccgatggtgtacagcttccagaatagggagatgcaggcaggaattaggaaggtgtttgcatttctgaaacactagtagtttcaacatgcaacatcacttctgtactccagaaccatcttctagagcatctcagattttactggtttttcatacttacctccactccaattttccc

SEQ ID NO: 21050 - DNA, 930 bp, Homo sapiens
  source 1..930: mol_type = unassigned DNA
atggagaataggaataacatgacagagtttgttttgctggggcttacagagaatccaaagatgcagaaaatcatatttgttgtgttttttgtcatctatatcatcactgtggtgggatatgtgctcattgtggtcaccatcactgccagcccatcactggggtcccccatgtacctttccctggcctatctctcctttattgatgcctgctattcctctgtcaatacccctaacctgatcacacattcactctatggaaagaaggccatcctattcaatggatgcatgactcaagtctttggagaacatttcttcggaggtgcagagggcatcctacttactgtgatggcctatgaccactatgtggccatctgcaagcccttgcactatatgactatcatgaaccagtgtgtgtgtgccctgctaatgggagtggtgtggatgggaggctttcttcatgcaaccatacagatcctcttcatcttccaattacctttctgtggtcctaatgtcatagatcactttatgtgtgatctgaaccctttgctcaacctcgcctgcactgacacccatatgctggaactcttcattgctgccaacagtggattcatctgcttgttaaactttgccctcctgctggtctcctatgtggtcatcttgtgctccctaaggactcatagcttggaggcaaggcacaaagccctctccacctgtgtctcccacatcacggttgtcatcttattctttgtgccctgcatatttgtgtacatgagacctgcagctactttacctattgataaagcagttgctatattctacactatgataactcctatgttaaaccccttaatctataccttgaagaatgcccagatgaaaaatgccatcaggaaattgtgtagtagaaaggacatttcaggtgacaaataa

SEQ ID NO: 21051 - DNA, 1113 bp, Homo sapiens
  source 1..1113: mol_type = unassigned DNA
caacacctcttccccaatttcaactcacaattccattgcaaatgttcctttacctttgcttcatttttcagaggacatgcagtgaggagatggaagaggaaaatgcaacattgctgacagagtttgttctcacaggatttttacatcaacctgactgtaaaataccgctcttcctggcattcttggtaatatatctcatcaccatcatggggaatcttggtctaattgttctcatctggaaagaccctcaccttcatatcccaatgtacttattccttgggagtttagcctttgtggatgcttcgttatcatccacagtgactccgaagatgctgatcaacttcttagctaagagtaagatgatatctctctctgaatgcatggtacaatttttttcccttgtaaccactgtaaccacagaatgttttctcttggcaacaatggcatatgatcgctatgtagccatttgcaaagctttactttatccagtcattatgaccaatgaactatgcattcagctattagtcttgtcatttataggtggccttcttcatgctttaatccatgaagctttttcattcagattaaccttctgtaattccaacataatacaacacttttactgtgacattatcccattgttaaagatttcctgtactgattcctctattaactttctaatggtttttattttcgcaggttctgttcaagtttttaccattggaactattcttatatcttatacaattatcctctttacaatcttagaaaagaagtctatcaaagggatacgaaaagctgtctccacctgtggggctcatctcttatctgtatctttatactatggccccctcaccttcaaatatctgggctctgcatctccgcaagcagatgaccaagatatgatggagtctctattttacactgtcatagttcctttattaaatcccatgatctacagcctgagaaacaagcaagtaatagcttcattcacaaaaatgttcaaaagcaatgtttagatctcatacaatctctcttctctatttactaaaattgtcccaagattgtgcaagttagaggtgtctatgtcttgccagcattcaaagatgatgc

SEQ ID NO: 21052 - DNA, 1066 bp, Homo sapiens
  source 1..1066: mol_type = unassigned DNA
ccaaatttccatgttgccagtgtgttgataattgactgttgcttttttctctcttgtggcagttattttatccccatggaaacaggaaatcaaacacatgcccaagaatttctcctcctgggattttcagcaacgtcagagattcagttcattctctttgggctgttcctctccatgtacctagtcactttcaccgggaacctgctcatcatcctggccatatgctcagactcccacctccacacccccatgtacttcttcctctccaacctgtcttttgctgacctctgttttacctccacgactgtcccaaagatgttactgaatatactgacacagaacaaattcataacatatgcaggctgtctcagtcagattttttttttcacttcatttggatgcctggacaatttactcttgaccgtgatggcctatgaccgcttcgtggccgtctgtcaccccctgcactatacggtcatcatgaacccccagctctgtggactgctggttctggggtcctggtgcatcagtgtcatgggttccctgctcgagaccttgactgttttgaggctgtccttctgcaccgaaatggaaattccacactttttttgtgatctacttgaagtcctgaagctcgcctgttctgacaccttcattaataacgtggtgatatactttgcaactggcgtcctgggtgtgatttccttcactggaatatttttctcttactataaaattgttttctctatactgaggatttcctcagctgggagaaagcacaaagcgttttccacctgtggttcccacctctcagtggtcaccttgttctatggcacgggctttggggtctatctcagttctgcagccacaccatcttctaggacaagtctggtggcctcagtgatgtacaccatggtcacccccatgctgaaccccttcatctacagcctgaggaacacggacatgaagagggccctggggagactcctcagtagggcaacattttttaatggtgacatcactgcaggactttcataagtagcaaggcttggaccattgggaggca

SEQ ID NO: 21053 - DNA, 960 bp, Homo sapiens
  source 1..960: mol_type = unassigned DNA
atggaaagaggaaaccaaacagaagttggaaactttctcctcctgggattcgcagaggactctgacatgcagcttctcctccatgggctgttcctctccatgtacctggttaccatcatcggaaacctgctcatcatcctgaccatcagttcagactcccacctccacacccccatgtacttcttcctctccaacctgtcctttgctgacatctgtttcacatccacgactgtcccaaagatgctggtgaatatccaaacacaaagcaaaatgatcacttttgcaggctgcctcactcagatattttttttcattgcatttggatgcctggacaatttgctcctgaccatgacggcctatgaccgcttcgtggccatctgttaccccctgcactacacggtcatcatgaacccccggctctgtggactgctggttctggggtcctggtgcatcagtgtcatgggttccttgcttgagaccttgaccattttgaggctgtccttctgcacaaatatggaaattccgcactttttttgtgatccttccgaagtcctgaagctggcctgttctgacaccttcatcaataacatcgtgatgtattttgtgaccattgtcctgggtgtttttcctctctgtggaatcctattctcttattctcagattttctcctccgtcctaagagtatctgccagaggccagcacaaagccttttccacctgtggttcccacctctcagtggtcagcttgttctatggcactggccttggggtctatctcagttctgcagttacaccaccttctaggacaagtctggcagcctcggtgatgtacaccatggtcacccccatgctgaaccccttcatctacagcctgaggaacaaggacatgaaggggtcactggggagactcctcctcagggcaacgtctctcaaagaggggaccattgctaagctctcatga

SEQ ID NO: 21054 - DNA, 1017 bp, Homo sapiens
  source 1..1017: mol_type = unassigned DNA
cctccttccccagcagacacaacagctacatggaagcagaaaaccttacagaattatcaaaatttctcctcctgggactctcagatgatcctgaactgcagcccgtcctctttgggctgttcctgtccatgtacctggtcacggtgctggggaacctgctcatcattctggccgtcagctctgactcccacctccacacccccatgtacttcttcctctccaacctgtcctttgttgacatctgtttcatctccaccacagtccccaagatgctagtgagcatccaggcacggagcaaagacatctcctacatggggtgcctcactcaggtgtattttttaatgatgtttgctggaatggatactttcctactggccgtgatggcctatgaccggtttgtggccatctgccacccactgcactacacggtcatcatgaacccctgcctctgtggcctcctggttctggcatcttggttcatcattttctggttctccctggttcatattctactgatgaagaggttgaccttctccacaggcactgagattccgcatttcttctgtgaaccggctcaggtcctcaaggtggcctgctctaacaccctcctcaataacattgtcttgtatgtggccacggcactgctgggtgtgtttcctgtagctgggatcctcttctcctactctcagattgtctcctccttaatgggaatgtcctccaccaagggcaagtacaaagccttttccacctgtggatctcacctctgtgtggtctccttgttctatggaacaggacttggggtctatctgagttctgctgtgacccattcttcccagagcagctccaccgcctcagtgatgtacgccatggtcacccccatgctgaaccccttcatctacagcctgaggaacaaggatgtgaagggggccctggaaagactcctcagcagggccgactcttgtccatgacaaatcagggcctcagaactaagaggacacactgcgtacccctaaggca

SEQ ID NO: 21055 - DNA, 3262 bp, Homo sapiens
  source 1..3262: mol_type = unassigned DNA
ggatgcttattatagatcgacgcgacaccagcgcccggtgccaggttctcccctgaggcttttcggagcgagctcctcaaatcgcatccagagtaagtgtccccgccccacagcagccgcagcctagatcccagggacagactctcctcaactcggctgtgacccagaatgctccgatacagggggtctggatccctactctgcgggccatttctccagagcgactttgctcttctgtcctccccacactcaccgctgcatctccctcaccaaaagcgagaagtcggagcgacaacagctctttctgcccaagccccagtcagctggtgagctccccgtggtctccagatgcagcacatggactctgggccccgcgccggctctgggtgcatgtgcgtgtgcgtgtgtttgctgcgtggtgtcgatggagataaggtggatccgtttgaggaaccaaatcattagttctctatctagatctccattctccccaaagaaaggccctcacttcccactcgtttattccagcccgggggctcagttttcccacacctaactgaaagcccgaagcctctagaatgccacccgcaccccgagggtcaccaacgctccctgaaataacctgttgcatgagagcagaggggagatagagagagcttaattataggtacccgcgtgcagctaaaaggagggccagagatagtagcgagggggacgaggagccacgggccacctgtgccgggaccccgcgctgtggtactgcggtgcaggcgggagcagcttttctgtctctcactgactcactctctctctctctccctctctctctctctcattctctctcttttctcctcctctcctggaagttttcgggtccgagggaaggaggaccctgcgaaagctgcgacgactatcttcccctggggccatggactcggacgccagcctggtgtccagccgcccgtcgtcgccagagcccgatgacctttttctgccggcccggagtaagggcagcagcggcagcgccttcactgggggcaccgtgtcctcgtccaccccgagtgactgcccgccggagctgagcgccgagctgcgcggcgctatgggctctgcgggcgcgcatcctggggacaagctaggaggcagtggcttcaagtcatcctcgtccagcacctcgtcgtctacgtcgtcggcggctgcgtcgtccaccaagaaggacaagaagcaaatgacagagccggagctgcagcagctgcgtctcaagatcaacagccgcgagcgcaagcgcatgcacgacctcaacatcgccatggatggcctccgcgaggtcatgccgtacgcacacggcccttcggtgcgcaagctttccaagatcgccacgctgctgctggcgcgcaactacatcctcatgctcaccaactcgctggaggagatgaagcgactggtgagcgagatctacgggggccaccacgctggcttccacccgtcggcctgcggcggcctggcgcactccgcgcccctgcccgccgccaccgcgcacccggcagcagcagcgcacgccgcacatcaccccgcggtgcaccaccccatcctgccgcccgccgccgcagcggctgctgccgccgctgcagccgcggctgtgtccagcgcctctctgcccggatccgggctgccgtcggtcggctccatccgtccaccgcacggcctactcaagtctccgtctgctgccgcggccgccccgctggggggcgggggcggcggcagtggggcgagcgggggcttccagcactggggcggcatgccctgcccctgcagcatgtgccaggtgccgccgccgcaccaccacgtgtcggctatgggcgccggcagcctgccgcgcctcacctccgacgccaagtgagccgactggcgccggcgcgttctggcgacaggggagccaggggccgcggggaagcgaggactggcctgcgctgggctcgggagctctgtcgcgaggaggggcgcaggaccatggactgggggtggggcatggtggggattccagcatctgcgaacccaagcaatgggggcgcccacagagcagtggggagtgaggggatgttctctccgggacctgatcgagcgctgtctggctttaacctgagctggtccagtagacatcgttttatgaaaaggtaccgctgtgtgcattcctcactagaactcatccgacccccgacccccacctccgggaaaagattctaaaaacttctttccctgagagcgtggcctgacttgcagactcggcttgggcagcacttcggggggggagggggtgttatgggagggggacacattggggccttgctcctcttcctcctttcttggcgggtgggagactccgggtagccgcactgcagaagcaacagcccgaccgcgccctccagggtcgtccctggcccaaggccaggggccacaagttagttggaagccggcgttcggtatcagaagcgctgatggtcatatccaatctcaatatctgggtcaatccacaccctcttagaactgtggccgttcctccctgtctctcgttgatttgggagaatatggttttctaataaatctgtggatgttccttcttcaacagtatgagcaagtttatagacattcagagtagaaccacttgtggattggaataacccaaaactgccgatttcaggggcgggtgcattgtagttattattttaaaatagaaactaccccaccgactcatctttccttctctaagcacaaagtgatttggttattttggtacctgagaacgtaacagaattaaaaggcagttgctgtggaaacagtttgggttatttgggggttctgttggctttttaaaattttcttttttggatgtgtaaatttatcaatgatgaggtaagtgcgcaatgctaagctgtttgctcacgtgactgccagccccatcggagtctaagccggctttcctctattttggtttatttttgccacgtttaacacaaatggtaaactcctccacgtgcttcctgcgttccgtgcaagccgcctcggcgctgcctgcgttgcaaactgggctttgtagcgtctgccgtgtaacacccttcctctgatcgcaccgcccctcgcagagagtgtatcatctgttttatttttgtaaaaacaaagtgctaaataatatttattacttgtttggttgcaaaaacggaataaatgactgagtgttgagattttaaataaaatttaaagtaaa

SEQ ID NO: 21056 - DNA, 2578 bp, Homo sapiens
  source 1..2578: mol_type = unassigned DNA
gcacattgttccccgcccccgcccccgccaccgctgccgccgtcgccgctgccaccgggctataaaaaccggccgagcccctaaaggtgcggatgcttattatagatcgacgcgacaccagcgcccggtgccaggttctcccctgaggcttttcggagcgagctcctcaaatcgcatccagattttcgggtccgagggaaggaggaccctgcgaaagctgcgacgactatcttcccctggggccatggactcggacgccagcctggtgtccagccgcccgtcgtcgccagagcccgatgacctttttctgccggcccggagtaagggcagcagcggcagcgccttcactgggggcaccgtgtcctcgtccaccccgagtgactgcccgccggagctgagcgccgagctgcgcggcgctatgggctctgcgggcgcgcatcctggggacaagctaggaggcagtggcttcaagtcatcctcgtccagcacctcgtcgtctacgtcgtcggcggctgcgtcgtccaccaagaaggacaagaagcaaatgacagagccggagctgcagcagctgcgtctcaagatcaacagccgcgagcgcaagcgcatgcacgacctcaacatcgccatggatggcctccgcgaggtcatgccgtacgcacacggcccttcggtgcgcaagctttccaagatcgccacgctgctgctggcgcgcaactacatcctcatgctcaccaactcgctggaggagatgaagcgactggtgagcgagatctacgggggccaccacgctggcttccacccgtcggcctgcggcggcctggcgcactccgcgcccctgcccgccgccaccgcgcacccggcagcagcagcgcacgccgcacatcaccccgcggtgcaccaccccatcctgccgcccgccgccgcagcggctgctgccgccgctgcagccgcggctgtgtccagcgcctctctgcccggatccgggctgccgtcggtcggctccatccgtccaccgcacggcctactcaagtctccgtctgctgccgcggccgccccgctggggggcgggggcggcggcagtggggcgagcgggggcttccagcactggggcggcatgccctgcccctgcagcatgtgccaggtgccgccgccgcaccaccacgtgtcggctatgggcgccggcagcctgccgcgcctcacctccgacgccaagtgagccgactggcgccggcgcgttctggcgacaggggagccaggggccgcggggaagcgaggactggcctgcgctgggctcgggagctctgtcgcgaggaggggcgcaggaccatggactgggggtggggcatggtggggattccagcatctgcgaacccaagcaatgggggcgcccacagagcagtggggagtgaggggatgttctctccgggacctgatcgagcgctgtctggctttaacctgagctggtccagtagacatcgttttatgaaaaggtaccgctgtgtgcattcctcactagaactcatccgacccccgacccccacctccgggaaaagattctaaaaacttctttccctgagagcgtggcctgacttgcagactcggcttgggcagcacttcggggggggagggggtgttatgggagggggacacattggggccttgctcctcttcctcctttcttggcgggtgggagactccgggtagccgcactgcagaagcaacagcccgaccgcgccctccagggtcgtccctggcccaaggccaggggccacaagttagttggaagccggcgttcggtatcagaagcgctgatggtcatatccaatctcaatatctgggtcaatccacaccctcttagaactgtggccgttcctccctgtctctcgttgatttgggagaatatggttttctaataaatctgtggatgttccttcttcaacagtatgagcaagtttatagacattcagagtagaaccacttgtggattggaataacccaaaactgccgatttcaggggcgggtgcattgtagttattattttaaaatagaaactaccccaccgactcatctttccttctctaagcacaaagtgatttggttattttggtacctgagaacgtaacagaattaaaaggcagttgctgtggaaacagtttgggttatttgggggttctgttggctttttaaaattttcttttttggatgtgtaaatttatcaatgatgaggtaagtgcgcaatgctaagctgtttgctcacgtgactgccagccccatcggagtctaagccggctttcctctattttggtttatttttgccacgtttaacacaaatggtaaactcctccacgtgcttcctgcgttccgtgcaagccgcctcggcgctgcctgcgttgcaaactgggctttgtagcgtctgccgtgtaacacccttcctctgatcgcaccgcccctcgcagagagtgtatcatctgttttatttttgtaaaaacaaagtgctaaataatatttattacttgtttggttgcaaaaacggaataaatgactgagtgttgagattttaaataaaatttaaagtaaa

SEQ ID NO: 21057 - DNA, 575 bp, Homo sapiens
  source 1..575: mol_type = unassigned DNA
ggatgcttattatagatcgacgcgacaccagcgcccggtgccaggttctcccctgaggcttttcggagcgagctcctcaaatcgcatccagagtaagtgtccccgccccacagcagccgcagcctagatcccagggacagactctcctcaactcggctgtgacccagaatgctccgatacagggggtctggatccctactctgcgggccatttctccagagcgactttgctcttctgtcctccccacactcaccgctgcatctccctcaccaaaagcgagaagtcggagcgacaacagctctttctgcccaagccccagtcagctgttttcgggtccgagggaaggaggaccctgcgaaagctgcgacgactatcttcccctggggccatggactcggacgccagcctggtgtccagccgcccgtcgtcgccagagcccgatgacctttttctgccggcccggagtaagggcagcagcggcagcgccttcactgggggcaccgtgtcctcgtccaccccgagtgactgcccgccggagctgagcgccgagctgcgcggcgctatgggctctgcgg

SEQ ID NO: 21058 - DNA, 1867 bp, Homo sapiens
  source 1..1867: mol_type = unassigned DNA
gcagtcctcctatgtggtactgatcaggtggttgcagagcttcagctcacagcaacacaatgcagctgagcaggcaagcacagcccacagccagaaacagttccgactctacagaacaagacgacctttaagtttcccagagaaaatgagatgctgatgttgaagacgacaccacggctttgatggaatatcagatattgaaaatgtctctctgcctgttcatccttctgtttctcacacctggtattttatgcatttgtcctctccaatgtatatgcacagagaggcacaggcatgtggactgttcaggcagaaacttgtctacattaccatctggactgcaagagaatattatacatttaaacctgtcttataaccactttactgatctgcataaccagttaacccaatataccaatctgaggaccctggacatttcaaacaacaggcttgaaagcctgcctgctcacttacctcggtctctgtggaacatgtctgctgctaacaacaacattaaacttcttgacaaatctgatactgcttatcagtggaatcttaaatatctggatgtttctaagaacatgctggaaaaggttgtcctcattaaaaatacactaagaagtctcgaggttctcaacctcagtagtaacaaactttggacagttccaaccaacatgccctccaaactacatatcgtggacctgtctaataattctttgacacaaattcttccaggtacattaataaacctgacaaatctcacacatctttacctgcacaacaataagttcacattcattccagaccaatcttttgaccaactctttcagttgcaagagataaccctttacaataacaggtggtcatgtgaccacaaacaaaacattacttacttactgaagtggatgatggaaacaaaagcccatgtgatagggactccatgttctacccaaatatcatctttaaaggaacataacatgtatcccacaccttctggatttacctcaagcttattcactgtaagtgggatgcagacagtggacaccattaactctctgagtgtggtaactcaacccaaagtgaccaaaatacccaaacaatatcgaacaaaggaaacaacgtttggtgccactctaagcaaagacaccacctttactagcactgataaggcttttgtgccctatccagaagatacatccacagagactatcaattcacatgaagcagcagctgcaactctaactattcatctccaagatggaatggtcacaaacacaagcctcactagctcaacaaaatcatccccaacacccatgaccctaagtatcactagtggcatgccaaataatttctctgaaatgcctcaacaaagcacaacccttaacttatggagggaagagacaaccacaaatgtaaagactccattaccttctgtggcaaatgcttggaaagtaaatgcttcatttctcttattgctcaatgttgtggtcatgctggctgtctgagggtctgcattttctgaaactaatgaaagcactcctccctgatgtacagttgggaaaatatgtccatatctaaccagtgattcgagctatatttaagtattcaagaaagccagtcttaacatttctaactctgatgtaaatgaagtaacttgtcttaaataaaagaaatgcacaatgtcttggtacttgctgctattttactgtcttaattaagtaaactaatgagtttcttttataaaaaaaatgaaatgttttaaggcttcaatttattgcacaaaatataaagcatctaaactttaatatgtattttatgtatgtttacactgtcaaacatctggaaaataaaaggtctatgctcataa

SEQ ID NO: 21059 - DNA, 2196 bp, Homo sapiens
  source 1..2196: mol_type = unassigned DNA
agttcaagcacacaccaactagctgtccaggaagcagcctaaccagagagaggggcgtgggagggagagaggcggggaaaagcagcgtctccgcttttcttctcacgtcttgccgcggagaagtgggttcctgggcagtgcagattttttttttttaattcaagattttctttaatttcccgcctaaagcctccccacggtagggccgcatcccctgtaataaaatgaattctgattcgagctctgtctccagcagagcttcatctccggacatggatgagatgtacctgagggaccaccaccaccgccaccaccaccaccaggagagccgtctcaactcggtctcgtccacgcagggcgatatgatgcagaagatgcccggggaaagcctctcgcgggctggcgccaaggccgcgggagagagcagcaagtacaaaatcaagaagcagctgtcggagcaggacctacagcagttgaggctgaagatcaacggacgcgaacgcaagcggatgcacgacctgaacctagccatggacgggctgcgcgaagtcatgccctacgcgcatgggccgtcggtgcgcaagctctccaagatcgccacactcctgctcgccagaaactacatcctcatgctcaccagctccctggaggagatgaagaggctggttggcgagatctatgggggccaccactcggcctttcactgcgggaccgtgggccactcggccggccaccccgcgcacgcggccaactccgtgcacccggtgcaccccatcttgggcggcgcgctctcatctggcaacgcctcgtcaccgctgtccgccgcctcacttcccgccatcggcaccatccggcctccccactcgctactcaaggcgccctccacgccgcccgcgctgcagctgggcagcggcttccagcactgggctggtctgccctgcccctgcaccatctgccagatgccgccgccgccgcacctgtccgctctctccacagccaacatggcccggctgtcggccgagtccaaggacttgctcaagtgagcagcgggcgggcccggctgccaaggaggagggagagcggcgggaggggccgcggtgccgggccgggagggaagagggaggctgcacgctcggcccacgggagggcaggctccggggcccgcagcctcccacgctgtctgagagatctcagactccacttgacccccggagggaaaggaccaaaatcaaaccgcaatttctaggtggtagcaaagggggactcgaaccagatgtcgtgtgttttgcatgcatgcttcttttccccatgccgcgccagtatttttcactgccatatgctcttgtcaaaactgcatttgttgtataaagatgggatcggtgtagttaaaaacttgcgaagggacttttgagttggctttctctgactctgtgttctcgctttggaaaaagacggccatcccttttgtgcaaaacaaatgtaaatattttcttgagatggatgcgattatgattgtctctgtccttgccacagtttttctagagacaatggagagagaaagagagagagagcgcgagagagatcaagacccaagttttgaatctcaaccgaggtccagggcatgacacctcctatgtgggttttcctttcgacgcagtgtaggtcaaaagaatgcatgcacgcttctaaatgaatcttgtctgaatatgtcgtgcaggctgtggtgccgttttccttgtaacaaggatttattagtgaattatcccaagtactccatatatctgtctgtggttgtatgaaatgaaaaaaggggcagagtgcaaagacccacactcacgcacacgcgcttcttctcccacccccacccccttcaaactttattcggaaccttcctttgctgttctggggccgctattgtaaaagcctgggctccctctagtagcttgcgccaccccccctcgctcagttattctgcatgcggggttggctctctctattatcagctttgaaaacttatcctggttttgggaggggtgccgtttttattttcctgaacatttgcttgaaatattttgttagggcctcaaagacgatacctgtctttattttttatatattcttgataactatgatatatttattaataaccagtgtttctggatgagatttcaaataaaaaagaacctttaaatcgtg

SEQ ID NO: 21060 - DNA, 843 bp, Homo sapiens
  source 1..843: mol_type = unassigned DNA
ccttcccggagcccgggacaggctgggcgcgcgcccgtgtgagtgagcgggactcagggcagaagtgtcccctcactgcgtttttttttccttttatccaaagaacggggcagttagtacgcttgccttcctgtcgcccggttgggagcggggttggtgtgcggagtggttcgcctttttttctttagaacttgacgcgtgaccaaaaccaaagacggccatgaagtgagatcgtgcaaagtagcagataaaacgggcagcatcactatttccgtgtgggatgagatcggaggtcttatacagccaggggatattattcggttgaccagagggtatgcatccatgtggaaaggatgtctgacactttatactggaaggggtggtgaacttcaaaaaattggggaattttgtatggtttattcagaagtgccaaatttcagtgaacccaacccagattatcgaggacagcagaacaaaggggcacagagtgaacagaagaataattccatgaatagtaatatgggtacaggtacatttggaccagtgggaaatggtgttcacactggccctgaatcaagggaacaccagttttcacatgctggcagaagcaatggccggggacttataaatccacaactacaaggaacagctagtaatcaaacagtgatgaccacaataagtaatggcagggaccctcggagagcctttaaaagatgacctatgctaaatactcatgtgtagtttttatactacatgccctacttgaacacttattgcacttttatttattgttaactgtgaaaagtacgtcctttattgggtttccttttatattcttggttt

SEQ ID NO: 21061 - DNA, 3387 bp, Homo sapiens
  source 1..3387: mol_type = unassigned DNA
agtcgctgtttgggacgctgggtgtgcggtgttctgtctccgctcccgtttcgctgtcacagcccgttccttcccggagcccgggacaggctgggcgcgcgcccgtgacgcgtgaccaaaaccaaagacggccatgaagtgagatcgtgcaaagtagcagataaaacgggcagcatcactatttccgtgtgggatgagatcggaggtcttatacagccaggggatattattcggttgaccagagggtatgcatccatgtggaaaggatgtctgacactttatactggaaggggtggtgaacttcaaaaaattggggaattttgtatggtttattcagaagtgccaaatttcagtgaacccaacccagattatcgaggacagcagaacaaaggggcacagagtgaacagaagaataattccatgaatagtaatatgggtacaggtacatttggaccagtgggaaatggtgttcacactggccctgaatcaagggaacaccagttttcacatgctggcagaagcaatggccggggacttataaatccacaactacaaggaacagctagtaatcaaacagtgatgaccacaataagtaatggcagggaccctcggagagcctttaaaagatgacctatgctaaatactcatgtgtagtttttatactacatgccctacttgaacacttattgcacttttatttattgttaactgtgaaaagtacgtcctttattgggtttccttttatattcttggtttgttaagaagaatggtttgtttttatagcaaaactgttaagctgctcgagtctcctgttgaagaatgggaacactgaaaagtaggggcatttatttttagagtaaaaagattattggatagcctttaaaaaacctgcacccatttcatgggtgagttacttaagacatcagctttatagcctctatgagtctatcttctgtataagttttgtaatatttaacataaggcttaatgggagatgttcttttgtcttgtattcagatattgccaactaaagcaataaccatcaaaaaacacaagaacttgtcaatgctagcagtaatttttgagtgtttgtggctctcggaatgattgacttcgttcagtgactactattaagattttccaaggactgactcatcccaaatttttgttgtattaccaaaaaaacagattccttatcagaatttggaatagaatgtgatctctattgcaacaagtaattttaaaagaaagctacatttattttagagtagtgctcctaacatgtattatcaactttgtggattacattggaggaaaatttaaaactggggccttgaatatttattttttgaaactaccatgttaaatactgaagtataatttgggggagttataaagttatgataaacattcatctgattattttaaacaatagttgtggtagataaacatactggaggtgagtcaaattgaattcatatagtaacatgcagtctgaagtcctagttacttaataggtactcagcctggagtgaaaatcctgggtactgactttgagaggagtgagtgtgcatgttgtcaaagtttctgaacacagttcacatagccttattagcaaaagttttaagaaatggctctatcaaagaagcaattgcagctttattcagaaatataaaagtggaatttatgtacatgtcataagtggtacccacttcccctttttactgtagggtggataactcttaggatttaactctttgaatattatctcttgaataaagcatgtgttaatgttaacaaacctacgtaatttttgccctttcaatgacttacagtggagagccagtacatcttaactactgttgtagtgatggtatcaacctcatggttacttagctctgcatttgttgctttgttttttttccacttcaaatcacaaaataagtagattttgttttctgaaaactccatagcatttgaatacaaaaagttgtgccagattgtttgccctaattcactgtgtttaacaaatatttcagtacacactatgtattaggcactgtgtggaaagtgttaaggggtagacaaaataccgaataatctccacaagtttatttgtggtctatagtacttttgtaactggggttacaaaaattatagaaatttttttcctttgttcatatgcatattcatgattataatttggctttgtttgtgattaatgttttcttaagattttcacattatagaatacctcaaaagaagttgtctaaggactgggatagagagtatgtttcataaaattgtagatgtttagaatttttaaaaaccctacaaattagtatatgattgttttatataagtaagataggagcaacactttaaattatttgtgggagaatacagcattaaaggtgattttaaaagaaaaaaatttggaattttagaaaatttaaatgctgtcaggtatggaatgctgggcttccaatcctggcctcattgtctcctcacctgtgatgttggatgagttattacacttgaaatgtctttaagccttaggttccacaagtatgaaaacaagtaagtaacagtatcctttctagacttgtttaagatttccatgtaagtaattataatgacttctgacacataataatgtcgtcttataccccaacagtaggaaaaaaatgcagaattcagtatgaaagtattgttaccctttaacacagtggtccccaacctttttggcaccagagaccagtctcctggaagacagtttttccgtgggatcgggggatggttttgggatgaaactgttccacctcaggtcatcagtcattagttagattctcataaggagcgtgcaacctcaatcccttgcatactcatttcacaatagggttcatgctcctatgagaatctaatgccaccactcatctgacaggaggtggagctcaggcagtaagtctccctcgcccgccactcacctgctgggcgttcctgttcctagcaggccagaattgatactgatctaggggttggggacccctgcttaacatgttgagattaaatggagaaagacttaagcttttacttttgtgattgacacttgcttcaataatgtaaccttgttctgtgtttttatcatttattaacaaatttcttttttcttaagggaagcctccaaaatcaaagaaaagtgagttacaatccataatgaatatttgccttaccagcctactggaacacattcatcaagaacttaagaggaagaaagttttctgccttcctccttcctagtgctctcagctatcaactttgaaataagtttaaacaacacctactgaaaacaaaaaccacttagtataaaaatatcccccaccagaa

SEQ ID NO: 21062 - DNA, 1878 bp, Homo sapiens
  source 1..1878: mol_type = unassigned DNA
cgcccctgtcccgggagggtgggaagctttgaccccgccctgcccactcgcgtctccgcagccgtagccgcgcctgtcccaatatgaatagggtcaacgacccacttatttttataagagatattaagcccggactgaaaaacttaaatgtcgtctttattgtcctggagataggacgcgtgaccaaaaccaaagacggccatgaagtgagatcgtgcaaagtagcagataaaacgggcagcatcactatttccgtgtgggatgagatcggaggtcttatacagccaggggatattattcggttgaccagagggtatgcatccatgtggaaaggatgtctgacactttatactggaaggggtggtgaacttcaaaaaattggggaattttgtatggtttattcagaagtgccaaatttcagtgaacccaacccagattatcgaggacagcagaacaaaggggcacagagtgaacagaagaataattccatgaatagtaatatgggtacaggtacatttggaccagtgggaaatggtgttcacactggccctgaatcaagggaacaccagttttcacatgctggcagaagcaatggccggggacttataaatccacaactacaaggaacagctagtaatcaaacagtgatgaccacaataagtaatggcagggaccctcggagagcctttaaaagatgacctatgctaaatactcatgtgtagtttttatactacatgccctacttgaacacttattgcacttttatttattgttaactgtgaaaagtacgtcctttattgggtttccttttatattcttggtttgttaagaagaatggtttgtttttatagcaaaactgttaagctgctcgagtctcctgttgaagaatgggaacactgaaaagtaggggcatttatttttagagtaaaaagattattggatagcctttaaaaaacctgcacccatttcatgggtgagttacttaagacatcagctttatagcctctatgagtctatcttctgtataagttttgtaatatttaacataaggcttaatgggagatgttcttttgtcttgtattcagatattgccaactaaagcaataaccatcaaaaaacacaagaacttgtcaatgctagcagtaatttttgagtgtttgtggctctcggaatgattgacttcgttcagtgactactattaagattttccaaggactgactcatcccaaatttttgttgtattaccaaaaaaacagattccttatcagaatttggaatagaatgtgatctctattgcaacaagtaattttaaaagaaagctacatttattttagagtagtgctcctaacatgtattatcaactttgtggattacattggaggaaaatttaaaactggggccttgaatatttattttttgaaactaccatgttaaatactgaagtataatttgggggagttataaagttatgataaacattcatctgattattttaaacaatagttgtggtagataaacatactggaggtgagtcaaattgaattcatatagtaacatgcagtctgaagtcctagttacttaataggtactcagcctggagtgaaaatcctgggtactgactttgagaggagtgagtgtgcatgttgtcaaagtttctgaacacagttcacatagccttattagcaaaagttttaagaaatggctctatcaaagaagcaattgcagctttattcagaaatataaaagtggaatttatgtacatgtcataagtggtacccacttcccctttttactgtagggtggataactcttaggatttaactctttgaatattatctcttgaataaagcatgtgttaatgttaacaaacctacgtaa

SEQ ID NO: 21063 - DNA, 1417 bp, Homo sapiens
  source 1..1417: mol_type = unassigned DNA
aacttccgggaatgtccgcactcccgcgttccacggggcagcatccggcggcagcggagcctgtggctccccctgcgggctgctcagcggcgtgcacagtcctgccggctggcttggtggggtgccgaggctcaggcagcatgacgacggagacctttgtgaaggatatcaagcctgggctcaagaatctgaaccttatcttcattgtgctggagacaggccgagtgaccaagacaaaggacgggcatgaggttcggacctgcaaagtggcggacaaaacaggcagcatcaatatctctgtctgggacgatgttggcaatctgatccagcctggggacattatccggctcaccaaagggtacgcttcagttttcaaaggttgtctgacactatatactggccgtgggggtgatctgcagaagattggagaattctgtatggtttattctgaggttcctaacttcagtgagccaaacccagagtacagcacccagcaggcacccaacaaggcggtgcagaacgacagcaacccttcagcttcccagcctaccactggaccctctgctgcctctccagcctctgagaaccagaatgggaatggactgagtgccccaccaggtcccggtggtggcccacatccccctcatactccctcccacccacccagcacccgaatcactcgaagccagcccaaccacacacctgcaggcccgcctggcccttccagcaaccctgttagtaacggcaaagaaacccggaggagcagcaagagatagcatgacattctttcttcctgccaccaaccacatcccaagtgtcccctggagagcaagatagccttccactgattggctggtgtagcagtattttagccactgaacttcagtggagggtggtgagcagtgtccttatccaccctaatctcatactccctcattgtccagctgaactacctgtcccctgggagtcaggaccctctgcctgctctctttcctctttagaaatggcagttactggctgggcgcagtggctcacgcttgtaatcccagcactttgggaagccgaggtgggcggatcacctgaggtcgggagttcaagaccagcctgaccaacatggagaaaccccgtgtctactaaaaatacagaattagccaggcatggtggcgtatgcctgtaatcccagctacttaggaggctgaggcaggagaatctcttgaaaccgggaggcggaggttgaggtgagccgaaattgcaccattgcactccagcctgggcaataagagcgaaactccatctcaaaaaaaaaagaaagaaagaaagaaagaaagaaagaaatggcagttaccatctgtttcttctgtgtgagacatgggagtctaactgaagtctctccttcctaataaatgttaccactcta

SEQ ID NO: 21064 - DNA, 1411 bp, Homo sapiens
  source 1..1411: mol_type = unassigned DNA
gggctgctcagcggcgtgcacagtcctgccggctggcttgggtgggtggtgggctgcgggtaggggaggggatggaccgagtcccggcttgtcgggatgagggttccggaagatctggccatggggtgccgaggctcaggcagcatgacgacggagacctttgtgaaggatatcaagcctgggctcaagaatctgaaccttatcttcattgtgctggagacaggccgagtgaccaagacaaaggacgggcatgaggttcggacctgcaaagtggcggacaaaacaggcagcatcaatatctctgtctgggacgatgttggcaatctgatccagcctggggacattatccggctcaccaaagggtacgcttcagttttcaaaggttgtctgacactatatactggccgtgggggtgatctgcagaagattggagaattctgtatggtttattctgaggttcctaacttcagtgagccaaacccagagtacagcacccagcaggcacccaacaaggcggtgcagaacgacagcaacccttcagcttcccagcctaccactggaccctctgctgcctctccagcctctgagaaccagaatgggaatggactgagtgccccaccaggtcccggtggtggcccacatccccctcatactccctcccacccacccagcacccgaatcactcgaagccagcccaaccacacacctgcaggcccgcctggcccttccagcaaccctgttagtaacggcaaagaaacccggaggagcagcaagagatagcatgacattctttcttcctgccaccaaccacatcccaagtgtcccctggagagcaagatagccttccactgattggctggtgtagcagtattttagccactgaacttcagtggagggtggtgagcagtgtccttatccaccctaatctcatactccctcattgtccagctgaactacctgtcccctgggagtcaggaccctctgcctgctctctttcctctttagaaatggcagttactggctgggcgcagtggctcacgcttgtaatcccagcactttgggaagccgaggtgggcggatcacctgaggtcgggagttcaagaccagcctgaccaacatggagaaaccccgtgtctactaaaaatacagaattagccaggcatggtggcgtatgcctgtaatcccagctacttaggaggctgaggcaggagaatctcttgaaaccgggaggcggaggttgaggtgagccgaaattgcaccattgcactccagcctgggcaataagagcgaaactccatctcaaaaaaaaaagaaagaaagaaagaaagaaagaaagaaatggcagttaccatctgtttcttctgtgtgagacatgggagtctaactgaagtctctccttcctaataaatgt

SEQ ID NO: 21065 - DNA, 1775 bp, Homo sapiens
  source 1..1775: mol_type = unassigned DNA
ggggcagcatccggcggcagcggagcctgtggctccccctgcgggctgctcagcggcgtgcacagtcctgccggctggcttgggtgggtggtgggctgcgggtaggggaggggatggaccgagtcccggcttgtcgggatgagggttccggaagatctggccagtaagattctactccctggctgtgcaccgggttccctacccctgtctacgtcggctccgccacttcgcggcttgagactaaaagagcatcccggcagggggccttccagccccaaagcagcctgtccagagacccccaaattctgatcctgaagttggaggcctccggggatgttcttttttaatcttttagaagggttagaggggttgaggctgcctgaccccagcctaatggggtaggtaggccttgggaagtggagcatgggggcaaaggatccaagcattgagccttcatcctctattccccatccagtggggtgccgaggctcaggcagcatgacgacggagacctttgtgaaggatatcaagcctgggctcaagaatctgaaccttatcttcattgtgctggagacaggccgagtgaccaagacaaaggacgggcatgaggttcggacctgcaaagtggcggacaaaacaggcagcatcaatatctctgtctgggacgatgttggcaatctgatccagcctggggacattatccggctcaccaaagggtacgcttcagttttcaaaggttgtctgacactatatactggccgtgggggtgatctgcagaagattggagaattctgtatggtttattctgaggttcctaacttcagtgagccaaacccagagtacagcacccagcaggcacccaacaaggcggtgcagaacgacagcaacccttcagcttcccagcctaccactggaccctctgctgcctctccagcctctgagaaccagaatgggaatggactgagtgccccaccaggtcccggtggtggcccacatccccctcatactccctcccacccacccagcacccgaatcactcgaagccagcccaaccacacacctgcaggcccgcctggcccttccagcaaccctgttagtaacggcaaagaaacccggaggagcagcaagagatagcatgacattctttcttcctgccaccaaccacatcccaagtgtcccctggagagcaagatagccttccactgattggctggtgtagcagtattttagccactgaacttcagtggagggtggtgagcagtgtccttatccaccctaatctcatactccctcattgtccagctgaactacctgtcccctgggagtcaggaccctctgcctgctctctttcctctttagaaatggcagttactggctgggcgcagtggctcacgcttgtaatcccagcactttgggaagccgaggtgggcggatcacctgaggtcgggagttcaagaccagcctgaccaacatggagaaaccccgtgtctactaaaaatacagaattagccaggcatggtggcgtatgcctgtaatcccagctacttaggaggctgaggcaggagaatctcttgaaaccgggaggcggaggttgaggtgagccgaaattgcaccattgcactccagcctgggcaataagagcgaaactccatctcaaaaaaaaaagaaagaaagaaagaaagaaagaaagaaatggcagttaccatctgtttcttctgtgtgagacatgggagtctaactgaagtctctccttcctaataaatgttaccactcta

SEQ ID NO: 21066 - DNA, 663 bp, Homo sapiens
  source 1..663: mol_type = unassigned DNA
agccaggagctgcctacgaggagggacgaaggctggccaggcctccactctagacaggaagtctagtctagagtctatatggtcccagccaggactatgtagccatttaggagggagaactctatgttcttcccggcaaaaacgtgtgggcctggccggccacgcttcgctttggaggggtgcagtggggtgccgaggctcaggcagcatgacgacggagacctttgtgaaggatatcaagcctgggctcaagaatctgaaccttatcttcattgtgctggagacaggccgagtgaccaagacaaaggacgggcatgaggttcggacctgcaaagtggcggacaaaacaggcagcatcaatatctctgtctgggacgatgttggcaatctgatccagcctggggacattatccggctcaccaaagggtacgcttcagttttcaaaggttgtctgacactatatactggccgtgggggtgatctgcagaagattggagaattctgtatggtttattctgaggttcctaacttcagtgagccaaacccagagtacagcacccagcaggcacccaacaaggcggtgcagaacgacagcaacccttcagcttcccagcctaccactggaccctctgctgcctctccagcctctgagaaccagaatgg

SEQ ID NO: 21067 - DNA, 770 bp, Homo sapiens
  source 1..770: mol_type = unassigned DNA
agccaggagctgcctacgaggagggacgaaggctggccaggcctccactctagacaggaagtctagtctagagtctatatggtcccagccaggactatgtagccatttaggagggagaactctatgttcttcccggcaaaaacgtgtgggcctggccggccacgcttcgctttggaggggtgcaggttccatttcttccaagaagggtgagcctgccttttgtctctggtgtaaatgccacttttcccagagaccttgaccaagctgggtagtgcattaaagatgagaaccccaaatcaggaacaaagataacgtggggtgccgaggctcaggcagcatgacgacggagacctttgtgaaggatatcaagcctgggctcaagaatctgaaccttatcttcattgtgctggagacaggccgagtgaccaagacaaaggacgggcatgaggttcggacctgcaaagtggcggacaaaacaggcagcatcaatatctctgtctgggacgatgttggcaatctgatccagcctggggacattatccggctcaccaaagggtacgcttcagttttcaaaggttgtctgacactatatactggccgtgggggtgatctgcagaagattggagaattctgtatggtttattctgaggttcctaacttcagtgagccaaacccagagtacagcacccagcaggcacccaacaaggcggtgcagaacgacagcaacccttcagcttcccagcctaccactggaccctctgctgcctctc
